United States Patent Application Publication US 2023/0026259 A1 - sequence listing, part 92

SEQ ID NO: 201376 - DNA, 1809 bp, Homo sapiens
  Payload ID: 19743
  Gene Name: zinc finger E-box binding homeobox 2
  ENST ID: ENST00000440875
  CDS Start-End: 538-1809
atttcatttcttccactaaagcgtttgcggagacttcaaggtataatctatcccagatcctttcccagagagaaacttggcgatcacgttttcacatgatgctcacgctcagggcgcttcaattatccctccccacaaagataggtggcgcgtgtttcagggtctctcgtctctctcctacagaaaagaaaaagaaaaaaatgtcattagaagaggcgtaacacgtcagtccgtccccaggtttgtgtttcctggagtggccgaaagagatcagttctaacctgctctgcaggaataacggtcctgcctcccgacactcttggcgaggtttttgtacagtttgctccgggagctgtttcttcgcttccacctttttctcccccacacttcgcggcttcttcatgctttttcttctcaccatttctggccaaaactacaaacaagacttcgcagatcgagcctgcgtgctgccgaagcagggcgccgagtccatgcgaactgccatctgatccgctcttatcaatgaagcagccgatcatggcggatggcccccggtgcaagaggcgcaaacaagccaatcccaggaggaaaaacgtggtgaactatgacaatgtagtggacacaggttctgaaacagatgaggaagacaagcttcatattgctgaggatgacggtattgccaaccctctggaccaggagacgagtccagctagtgtgcccaaccatgagtcctccccacacgtgagccaagctctgttgccaagagaggaagaggaagatgaaataagggagggtggagtggaacacccctggcacaacaacgagattctacaagcctctgtagatggtccagaagaaatgaaggaagactatgacactatggggccagaagccacgatccagaccgcaattaacaatggtacagtgaagaatgcaaattgcacatcagattttgaggaatactttgccaaaagaaaactggaggaacgcgatggtcatgcagtcagcatcgaggagtaccttcagcgcagtgacacagccattatttacccagaagcccctgaggagctgtctcgccttggcacgccagaggccaatgggcaagaagaaaatgacctgccacctggaactccagatgcttttgcccaactgctgacctgcccctactgcgaccggggctacaagcgcttgacatcactgaaggagcacatcaagtaccgccacgagaagaatgaagagaacttttcctgccctctctgtagctacacgtttgcctaccgcacccagctcgagcggcatatggtgacacacaagccagggacagatcagcaccaaatgctaacccaaggagcaggtaatcgcaagttcaaatgcacagagtgtggcaaggccttcaaatataaacaccatctgaaagaacacctgcgaattcacagtggtgaaaaaccttacgagtgcccaaactgcaagaaacgtttctcccattctggttcctacagttcgcacatcagcagcaagaaatgtattggtttaatctctgtaaatggccgaatgagaaacaatatcaagacgggttcttcccctaattctgtttcttcttctcctactaattcagccattacccagttaagaaacaagttggagaatggaaaaccacttagtatgtctgaacagacaggcttacttaaaaactcaaggagacagtggctcatgcctgtaatcccagcactttgggaggccaacgagggtggatcaggtcaggagtttgagaccagcctggccaacatggtaaaacaccatctgtcctaa

SEQ ID NO: 201377 - DNA, 2564 bp, Homo sapiens
  Payload ID: 19743
  Gene Name: zinc finger E-box binding homeobox 2
  ENST ID: ENST00000629520
  CDS Start-End: 83-259
cggagacttcaagatcgagcctgcgtgctgccgaagcagggcgccgagtccatgcgaactgccatctgatccgctcttatcaatgaagcagccgatcatggcggatggcccccggtgcaagaggcgcaaacaagccaatcccaggaggaaaaacgccttggagtcagaaatgagcactcggagcgggagatgccctgctgctgcttgccaccggtgcggcccgtttgtaacttgcaaagtttgttgcttttgcccctgattcgggcagcgggtcctgggatgctcctgcttccctcctgcctcccacggagcccgggaagagggtctgcctccccatcccgccaccttccagcatcagcctctgaaaaatctcacagagacatgcacgttgtagcaaaaatcaaatccggaaactgcttgtttcagagaaagaaatgaagttgtcttttaaagaaaaactgaattaggaggagagaaaagggaaataggagaagaaaggaaaagttaaatttgatttttctccagagtttccactaaagggttggggacagtgtgaaggagaaggggagctttttacaaatgcctttggtctctgaacttcagtggcaaagaacagggatcaagttgaatgttctcagggctttggatcctagaggagaaacaatcagaagagcagaaatggttatccctgtttaaaataagccctcactctttaccacttccttaaaggagtggaggtgctggtagtgatggttagaggcaatgagggacggagaagttgctcccgtttcagagatgcttaaatgaaaaggaaagaaaatgcagtcaaccccttctccaggaggtgcctcctagctctcctccctgagaggtgaagttgggatggggcaacgagagtcatacacacttagacaaggaagtttccttcggatcactgtcagtccagacttggttatctttgcaaagtgtggaaatctttggcaagtagctttcttcgtaaagttgatgagcttctagggagcctgttttgctgactttcaaagcactggggcaggttgtgtggcaggtaccagttctgagggcgctccaaagatatccatctccatccttttttctctgtggagatcttctgcaagttttgtcacgctgcacacacacaaggctgggggctatgtatctaggctgatctatttgttttattttggtctggaaaaactaagccaattggggtagaaacatgctttccttcgtagcagagccagtaggctgctggtgtccatagagtgacagtccaccaggactaagggtgggctgaggattttaaactttacattgtttctctgttaccagatacaaataaattcacgtcttccaccatttgttttcaaatagggtaaaaccaagattaaagttccctgctcaactgctatgtcataggtttcagtgtttcccttccttcttaatttgcttaaagaaaattccaagaggttattaaagaccttgatgccatattaagaatatttcctgggaaaaatgtatgtctaccctgaaggtaggaaaggagggcgttgctagcctctagcagtgccgcgtttattctaagatgtgggagattcttttccttgcaacagtttttgtcatctgcattcttccaaggcttttaaggtgcattttcttctgtgtgaaaggaaattctttgtccttttcctctcagcaccgtggcttcccaaggtagacactattttgtgcctgtcacagagagagggagtgcaggtttgcaatgctcacagacaattgattgtctgccctaatgtgtttcatttacatgtttataacgtcaatggtgctggggtgtccactgtaccattcattcccgcattcccacaagggggcaattgtctgaatggccaagtcagacacctttttgattgctctttggttgtcttttcagagcaaagagataaaggaggaaaatctgtgatgcagaaacactagttgaaaatatacagaattaaatgtcaccacaaaagcagatgttaacataagcccaaatatgctttttagccaagatgtgaaggttgaaaaaaataattcagagcagagggaaggatgatttaaaccaataaatatagccctattccccctctttacttcttttctgtctttagcaatcagaagatgaaatgtaattttccttttcatttttaagccttgaaacatccaggcacctcctcattatttgtatgtttgctgtgatttgtgaattttgtatatatttacatagctctgtttatgccaacagcatcagcttaccacttggaaaatctattgaatgactatttgggctgtggggagggtaaacttttaaaaagtaagatccaagtatttcttcatcaagcagtttttaaaaggaaaacgataataatcagtaggctccatggaagcctttgccttaatagctatgtgccaaatacttttatcttgtgtgacagtcatgtcagagtgaaatctctcaggaaaagtgtaactagtagttacaaagtaaataaaggatttcattttaa

SEQ ID NO: 201378 - DNA, 845 bp, Homo sapiens
  Payload ID: 19743
  Gene Name: zinc finger E-box binding homeobox 2
  ENST ID: ENST00000484313
  CDS Start-End: 91-216
gcgggtgcaacacaccaaacaatcgagcctgcgtgctgccgaagcagggcgccgagtccatgcgaactgccatctgatccgctcttatcaatgaagcagccgatcatggcggatggcccccggtgcaagaggcgcaaacaagccaatcccaggaggaaaaacgcaaagacaaaccacctaaatagagagattaattccacatcagtgcaacattaaaagggagagaggatgccaagaatcccattaatttgggatataagtgtctgaaatttcctcaaaacatttacgccaaggaataccaacaagacaatatcaagcagctctccctaaggatagagaggcatgttaaaactgtataaccaacagaaccatttaaaaggaagaaaaacatcacccaagttccgtgtctgaatgaaggctgtcttctcaaatgctcctcattactccagagcagttatatttggattataattaaaacgaggcttcttttttttcttttattcttcttttttcccagaatgcctcaagtgaagtattcctcccaaagttattgcacctctttactaacaagtgctgggattttaataagcctgtcccccctccttaccctgtacagaggaaaggatggcaaagagtggctgtggtacaaaggttacatattcagtgatattttctgcttttattggtaaaaatggggaggtgggtggaggatttcctttaattatgaaataagtgtgatgttagtagttatttctgtaacctggtgaaaatgctgcatatttcaggcctaatttttagcatatgttaccacgtgtgtaataaaacggtgatctgcgctctccgaa

SEQ ID NO: 201379 - DNA, 468 bp, Homo sapiens
  Payload ID: 19743
  Gene Name: zinc finger E-box binding homeobox 2
  ENST ID: ENST00000630572
  CDS Start-End: 351-468
gggaaatcttaatttgggggcgagggtggggggaggaagagacagtgcctcgataaactccaaaaggggaggggagggggcgctgggcgagtgggcttcctataattactattatcaatttgcccgagtgtgcttcatccaggggctgtttcgcgttgtttgtttgtttgtttcctctgggaattggggggtggggggatgagaaaagatgagaacgaaaagaaaacctcgcctcaccccaagttcccgagccgggggctgaggacttttcgaaggaaaggatcgagcctgcgtgctgccgaagcagggcgccgagtccatgcgaactgccatctgatccgctcttatcaatgaagcagccgatcatggcggatggcccccggtgcaagaggcgcaaacaagccaatcccaggaggaaaaacgtggtgaactatgacaatgtagtggacacaggttctgaaacagatg

SEQ ID NO: 201380 - DNA, 9541 bp, Homo sapiens
  Payload ID: 19743
  Gene Name: zinc finger E-box binding homeobox 2
  Uniprot ID: O60315
  ENST ID: ENST00000627532
  CDS Start-End: 527-4171
tggaatttcatttcttccactaaagcgtttgcggagacttcaaggtataatctatcccagatcctttcccagagagaaacttggcgatcacgttttcacatgatgctcacgctcagggcgcttcaattatccctccccacaaagataggtggcgcgtgtttcagggtctctcgtctctctcctacagaaaagaaaaagaaaaaaatgtcattagaagaggcgtaacacgtcagtccgtccccaggtttgtgtttcctggagtggccgaaagagatcagttctaacctgctctgcaggaataacggtcctgcctcccgacactcttggcgaggtttttgtacagtttgctccgggagctgtttcttcgcttccacctttttctcccccacacttcgcggcttcttcatgctttttcttctcaccatttctggccaaaactacaaacaagacttcgcagatcgagcctgcgtgctgccgaagcagggcgccgagtccatgcgaactgccatctgatccgctcttatcaatgaagcagccgatcatggcggatggcccccggtgcaagaggcgcaaacaagccaatcccaggaggaaaaacgtggtgaactatgacaatgtagtggacacaggttctgaaacagatgaggaagacaagcttcatattgctgaggatgacggtattgccaaccctctggaccaggagacgagtccagctagtgtgcccaaccatgagtcctccccacacgtgagccaagctctgttgccaagagaggaagaggaagatgaaataagggagggtggagtggaacacccctggcacaacaacgagattctacaagcctctgtagatggtccagaagaaatgaaggaagactatgacactatggggccagaagccacgatccagaccgcaattaacaatggtacagtgaagaatgcaaattgcacatcagattttgaggaatactttgccaaaagaaaactggaggaacgcgatggtcatgcagtcagcatcgaggagtaccttcagcgcagtgacacagccattatttacccagaagcccctgaggagctgtctcgccttggcacgccagaggccaatgggcaagaagaaaatgacctgccacctggaactccagatgcttttgcccaactgctgacctgcccctactgcgaccggggctacaagcgcttgacatcactgaaggagcacatcaagtaccgccacgagaagaatgaagagaacttttcctgccctctctgtagctacacgtttgcctaccgcacccagctcgagcggcatatggtgacacacaagccagggacagatcagcaccaaatgctaacccaaggagcaggtaatcgcaagttcaaatgcacagagtgtggcaaggccttcaaatataaacaccatctgaaagaacacctgcgaattcacagtggtgaaaaaccttacgagtgcccaaactgcaagaaacgtttctcccattctggttcctacagttcgcacatcagcagcaagaaatgtattggtttaatctctgtaaatggccgaatgagaaacaatatcaagacgggttcttcccctaattctgtttcttcttctcctactaattcagccattacccagttaagaaacaagttggagaatggaaaaccacttagtatgtctgaacagacaggcttacttaaaattaaaacagaaccactagacttcaatgactataaagttcttatggctacacacgggtttagtggcactagtccctttatgaatggtgggcttggagccaccagccctttaggagttcatccatctgctcagagtccaatgcagcacttaggtgtagggatggaagcccctttacttgggtttcccaccatgaatagtaatttaagtgaggtacaaaaggttctacagattgtggacaatactgtttccaggcaaaaaatggactgcaaggctgaagaaatttcaaagttgaaaggttatcacatgaaggatccatgctctcaacctgaggaacaaggagttacttctcctaatattccgcctgtcggtcttccggtagtgagtcataatggtgccactaaaagtattattgactatacgttggaaaaagtcaatgaagccaaagcttgcctccagagcttgactactgactcaaggagacagatcagtaatataaagaaagagaagctacgtactttaatagatttggtcactgatgacaaaatgattgagaaccacaacatatccactccattttcatgccagttctgtaaagaaagttttcctggccccatccctttgcatcagcatgaacgttacctttgtaagatgaatgaagagatcaaggcggtcctgcagcctcatgaaaacatagtccccaacaaagccggagtttttgttgataataaagccctcctcttgtcatctgtactttctgagaaaggaatgacaagccccatcaacccatacaaggaccacatgtctgtactcaaagcatactatgctatgaacatggagcccaactccgatgaactgctgaaaatttccattgctgtgggccttcctcaggaatttgtgaaggaatggtttgaacaacgaaaagtctaccagtactcaaattccaggtccccatccctggaaagaagctccaagccgttagctcccaacagtaaccctcccacaaaagactctttattacccaggtctcctgtaaaacctatggactccataacatcaccatctatagcagaactccacaacagtgttacgaattgtgatcctcctctcaggctaacaaaaccttcccattttaccaatattaaaccagttgaaaaattggaccactccaggagtaatactccttctcccttaaatctttcctccacatcttctaaaaactcccacagtagttcatacactccaaacagcttctcttctgaggagctccaggctgagcctttagacttgtcattaccaaaacaaatgaaagaacccaaaagtattatagccacaaagaacaaaacaaaagctagtagcatcagtttagatcataacagtgtttcttcctcatctgaaaactcagatgagcctctgaacttgacttttatcaagaaggaattttcaaattcaaataatctggacaacaaaagcactaacccagtgttcagcatgaacccatttagtgccaaacctttatacacagctcttccacctcaaagcgcatttccccctgctactttcatgccaccagtccagaccagtattcctgggctacgaccatacccaggactggatcagatgagcttcctaccacatatggcctacacctacccaactggagcagctacttttgctgatatgcagcaaaggagaaagtaccagcggaaacaaggatttcagggagaattgcttgatggagcacaagactacatgtcaggcctagatgatatgacagactccgactcctgtctgtctcgcaaaaagatcaagaagacagagagtggcatgtatgcatgtgacttatgtgacaagacattccagaaaagcagttcccttctgcgacataaatacgaacacacaggaaaaagaccacatcagtgtcagatttgtaagaaagcgtttaaacacaagcaccaccttatcgagcactcaaggcttcactcgggcgagaagccctatcagtgtgataaatgtggcaagcgcttctcacactcgggctcgtactcgcagcacatgaatcacaggtattcctactgcaagcgggaggcggaggagcgggaagcggcggagcgcgaggcgcgcgagaaagggcacttggaacccaccgagctgctgatgaaccgggcttacttgcagagcattacccctcaggggtactctgactcggaggagagggagagtatgccgagggatggcgagagcgagaaggagcacgagaaagaaggcgaggatggctacgggaagctgggcagacaggatggcgacgaggagttcgaggaggaagaggaagaaagtgaaaataaaagtatggatacggatcccgaaacgatacgagatgaagaagagactggagatcactccatggacgatagttcggaggatgggaaaatggaaaccaaatcagaccacgaggaagacaatatggaagatggcatgtaataaactactgcattttaagcttcctatttttttttccagtagtattgttacctgcttgaaaacactgctgtgttaagctgttcatgcacgtgcctgacgcttccaggaagctgtagagagggacagaaggggcggttcagccaagacagatgtagacggagttggagctgggtattgttaaaaactgcattatgcaaaaattttgtacagtgttaaggcctaaaaactgtgtggttcagagactaattcctgtgtttaatagcatttatactttaagcacaactagaaaattgtaagaattgcactctacttatgtatcactacaaactttaaaaaactatgtctaatttatattaatacattttaaaaaggtgcccgcactaccatacatcagtatttttattattattattgttattcctttttaatttaatgtgctcgcactacaatgcatcagtattatgattcctctgtactttcctttcgctattcatcaatttcccattttttttttcagcttaagtaaccacacaattttaggcctcaatttttttttttttctgtgaaggaacttgaagtgatgcatgtgtgaatttaagataccgaagtcttaaagtgacctggacgtgaaggaaaaagtaagatgagaaataaagaaagcctttgtaaggtggttttaaaagccttatatgcaaaccttttaatctgtgtttctgcaagtgccatccttgtacagtgttaagagggtaacatgggttacctttgcaccagcttcagtgttaagctcaccctgttctttgaagcacccatgtcagtattagaagaataggcagcagttccttagtttacatatgtttgtgcaattattttctgtacttttttgttcattaattttgtcagtattacaccaaactgtttttgcaacaaaaaaattttttttgcattcatttaattttaggtcaaataacattttatttatgtggctcattttatatttcctaattttatttatttcatactgtagtgtacagtattatagttcttcaatatatagatatattttagtaaaaaaggaacatgacgttgatcatttgggcaaattttacgtaaagagaagagcatttattgtgttttggaacattaattgtgagatgggatttttcaattttattattttatttttgtttttttccaattactggaaattccaaatttgggaacttttgatacgatcttgtgaaaacactgtattttcgactgaaaattccactttcttcatcttgttttttagctaaaaagagggactgttaaatacaatgtatgataccatgacaaaaatctttcctgaattgtctttgtaaaagtattattgaattttcaatttgtaatttcttttgaaaatgaccatgctcgaataaaaatgtagccaaactaagaatgtagttaatgagttctgtacttttagagagttttccttcaatgaccattaacatgtaacatgctttatgcttataataatgctaattatgtttttttcatataattttagtttagcaataattttgactggtaccaataactgttttttaaaattccatacctatgtacagcaattttacagcttttctcaactgatcctgattccagattgtgtatttttatgtgaggttatattattcaaatttagtctatttactttacagacatttctacttttgcattacgagtatttagagattatgtgttaaaaattcacttctctgtccaaggggtctttgtgatttattcaaaaaaaagtctaatttcaaaaagacagctattattcagtgttatttataatatgtaaccttttttaaaggattgggatagtttatctcactttttgaaatgcagacagtagtttaccgtttatctgaaactagaaggcgtgggtgggagaggaaaagctaaaagcaaatgctaacaaaaataaccgtgattttctaagacagtttttcagtttttacaagatgaccctaatattcagaatatgaatgtattcgtaggttttacataatgacttttatcaagaaactagattctgcttcttaaatctaattgccaagtgaagaataacagaaaaaacagattaccttatcaaatttacagctcttgaatatacagaactataatatagtagctgtccatgtattttttctactttagaatcaaagaagaaaagcatcattttgctattaaatttgctaaaattttgagtatgatatttccagttggcaagaacaacatatttatatttattccttagccataataccactttcctaaatttcacaaaagtcattctttgcaacttgaaactcaatagaaagtgtgtatgtgtgtgtgtgtatatatatatatatatacacacacacacatacacagaaaggatgtaatgaagatacagtaatagttgagcagacctttttagaaaaacatgtttttagctctatcttcaaactttctggcagagggggtggggggggcagggggaggagtggcatcaaaatgctatgcctcctgttatccacagcctagagtttttatatttggaaagtttagaaaattctatcctcgtttctccttctttgaatggcacaaataaatacactacataaatttttctggtttgaaaggctctaggcgataactttattaattcaacctgaaaatatcaagccattaaattttgtccgggtagaataaatccctgtggcctcttttaaagcaatgtaggtctctgttgcccatggggcatatctgtgtcccaatccacaagagataggaccaacaaacaatgaatgtgcaacctaactctttctccttggaaagaagaaagtgtgcacgaagtagaggagggtgggcagaccctgccttgcccctcctgttacccccttctctgtcatttgttcctaactccatttcataggcaggctcagaatacctgagtctgaaaatatcaggataacacttgtgaattgtgacaatcactacaatgtcccatatctgaggagttttttttaatgctatttatccgctggacacgattgcacattagggctgcataatcctctaactctagggaaaaataaaaacttttgatttgtcttaagattcttctccaaggtcgcaaacaagaaattcccctccacaaccaagagatgtgcattttagtaacatcagatgtgttcttctgttttatcaactacttactcttcccacacgcttagttctaaatctaacctttcccccctcgaatagggggcaggggaggatgaggaaacactggaacaactgaacacccctgcccattttctccaagagccttttgtattctagcatatctgtgcaatcttttcttttttcttcacatgacactgtaagcttaggcctgaaataactgggaagagagatgcgtatcagaatttctccgcaagagctaaacaaaacatacatcttccttagcatgaattggactgggggcggagtgggagggcttggaggaaaggggaaagaagggactatatttgaataaatatgaataaatgtattagatacttttcacaatcagataacttttaaaaaggtcattttttatctttctaataatgtaagccttaataaaagcaaatcttagtcacaaatttgaggagactgcccaataataagtttacatgtatttgaactgaaaaattgttaaccatgcttttgctccaagatgtgtgaggccattcaggggctgtagggccctggatatacacacaaacaagtgtgtgtatatctggagccccacacattgtaataaacacagctgcatttatttgactatgtgatcccatgtacatgtaaaaacattcaaacaaacacactcagcggatttatttattgtgcaatggggcaattattcaaataaacatgctcaatgcaattatttgaatctcacattgcatgttcatcaatcatagcactaaaaaaagagggggaaaaaacaccaaagaattcacatggggaaaaaatatatatatgaaaaccaccttattatagattttatagggcagctgaggttatggctcccttcttaactgtaactcaactattctgtattcaatgacatttgtttctaatgattaattggttcactcacttgatcatataatagcaaactttataaacctgtattgtgtagagatgtgaaatctctatatttcaagagcagaagagttctttctagacaccttacatcaagggacactggtccaattattatcgcttatataagcactcctataaattctgaaaaattttatacatgcaacaaaacattcctacatttgaagacattaagaaaaatcacaggtgactcatctgatcattctatatattaataaatattatgacatatatgtgaacacatcacaaatcatattggtgtaccaagaggcaatttatgcctctcttaagtatgtactgacataacctaatatactaaaatgggaaggggcttttagtcactgaaatatgcatcgtgtaacaaagatgaagaaaatacatggcttgtgcccatcataaaaaaagattcagactgaaggcttagctttggttttttcaattaaattgttaaactgtgcacagtgatttttttttagaacttgagacatttgtgatgttggctgtttaaatctttgttaccttcgctgtgaattgaaattgtacatatttagtaaatcatgcagacaaaacaaactttttagacaatatttttattggagagttttcttttcctgtatccatgttaaaaaaaaaaaagacctcctttcccaaaataaaaatgtcaatactaaatttaaagaagtataaaggaatgattgcttcctttagagcaaaatatttaaataaacatggagataattggcaacatgttctttttgggctagtaggctgtgtccaattttttgggtctgatgtttcagagggcctctgtttcagggttgaagatgatatattaatctcggaattaaacaaatgctattaaataacagaaataaatccttcagtcttcatttgtatctgaaatgtggaattagtcagagaaatggcaccgagataatatgatgctgaatatgccacaagctaaaactttctctattaaacgagtcgcctactacctataatctagcatgacatgttaaaatgctccaaaatactgaaaatagaaaatgaacactactgttccgatttggtcttgagattaatatgacaaagattctaataattttagtcaaagaaaatgatgagtaaaaaatacatgaagattaaagtgatgacaaatga

SEQ ID NO: 201381 - DNA, 583 bp, Homo sapiens
  Payload ID: 19743
  Gene Name: zinc finger E-box binding homeobox 2
  ENST ID: ENST00000434448
  CDS Start-End: 184-309
aacctccaccgagttttcaggattctcctcctctcctgcctgcctccgaggtcccccttctccaagttttgacagtttcaactgaaaaaatgcagcgcctctctcgatttttagatcgagcctgcgtgctgccgaagcagggcgccgagtccatgcgaactgccatctgatccgctcttatcaatgaagcagccgatcatggcggatggcccccggtgcaagaggcgcaaacaagccaatcccaggaggaaaaacgggtcatcaagattgtcagaaaaggcctggactacatgcctgtcccagcactagattgtggtgaactatgacaatgtagtggacacaggttctgaaacagatgaggaagacaagcttcatattgctgaggatgacggtattgccaaccctctggaccaggagacgagtccagctagtgtgcccaaccatgagtcctccccacacgtgagccaagctctgttgccaagagaggaagaggaagatgaaataagggagggtggagtggaacacccctggcacaacaacgagattctacaagcctctgtagatggtccagaagaaatgaagg

SEQ ID NO: 201382 - DNA, 1071 bp, Homo sapiens
  Payload ID: 19743
  Gene Name: zinc finger E-box binding homeobox 2
  ENST ID: ENST00000465308
  CDS Start-End: 647-1071
agacttcaaggtataatctatcccagatcctttcccagagagaaacttggcgatcacgttttcacatgatgctcacgctcagggcgcttcaattatccctccccacaaagataggtggcgcgtgtttcagggtctctcgtctctctcctacagaaaagaaaaagaaaaaaatgtcattagaagaggcgtaacacgtcagtccgtccccaggtttgtgtttcctggagtggccgaaagagatcagttctaacctgctctgcaggaataacggtcctgcctcccgacactcttggcgaggtttttgtacagtttgctccgggagctgtttcttcgcttccacctttttctcccccacacttcgcggcttcttcatgctttttcttctcaccatttctggccaaaactacaaacaagacttcgcagccccctgtttaaactaatcctcgaggcacagcatcttcccaacctccaccgagttttcaggattctcctcctctcctgcctgcctccgaggtcccccttctccaagttttgacagtttcaactgaaaaaatgcagcgcctctctcgatttttagatcgagcctgcgtgctgccgaagcagggcgccgagtccatgcgaactgccatctgatccgctcttatcaatgaagcagccgatcatggcggatggcccccggtgcaagaggcgcaaacaagccaatcccaggaggaaaaacgtggtgaactatgacaatgtagtggacacaggttctgaaacagatgaggaagacaagcttcatattgctgaggatgacggtattgccaaccctctggaccaggagacgagtccagctagtgtgcccaaccatgagtcctccccacacgtgagccaagctctgttgccaagagaggaagaggaagatgaaataagggagggtggagtggaacacccctggcacaacaacgagattctacaagcctctgtagatggtccagaagaaatgaaggaagactatgacactatggggccagaagccacgatccagaccgcaattaacaatggtacagtgaagaatgcaaattgcacatc

SEQ ID NO: 201383 - DNA, 2876 bp, Homo sapiens
  Payload ID: 19744
  Gene Name: zinc finger family member 783
  Uniprot ID: Q6ZMS7
  ENST ID: ENST00000378052
  CDS Start-End: 164-1009
aaagggccagcggggcacgtggctcgggacgcagttcgctgccgcccggcagtagctctcaggttaggcgggtcccgctccgcttccgccgtcgctgccgcgccgccccgggcccgacaggccgggtccagggactgcaacccagcgagggacgcgggcagccatggccgaagcggcgcctgcccgggaccccgagacagacaagcacacagaggaccagagtccttcgacacccttgccccagccagctgctgagaagaactcgtacctctactccacggaaatcacactgtggacggtggtggccgccattcaggccttggagaagaaggtggattcctgcctgacccgcttgctgactctggaggggcgcacggggacagccgagaagaagctggccgactgcgagaagacagctgtggagttcgggaaccagctggagggcaagtgggccgtgctggggaccttgctgcaggagtacgggctgctgcagaggcggctggagaatgtggagaacttgctgcgcaacaggaacttctggatcttgcggctgcccccgggcagcaagggggaggcccccaaggtgcccgtgaccttcgatgatgtggccgtgtatttctctgagctggagtggggcaagctggaggactggcagaaggagctctacaagcacgtgatgaggggcaactacgagacgctggtctccctggattatgcaatctccaaaccagacatcctcacccggatagagaggggagaggagccttgtcttgaccggtggggccaggagaaggggaatgaagtagaggtgggacgtccaaggatgatgggcactggcctccctccgtatccagagcacctcaccagcccacttagccctgcccaggaggagctgaaagaagggcaggcccccaagcagcagcaggactcagaggcgagagtggccccagccgggccagaagcaggactggcattgcggactgacctccagggagaggcccagatctgatctgcagagatctcccttccggctatcgtggctgctgttcaggtggtggagaagaagatggaaccccaggctgcctggctacagagcctggagggatgcatgtggacagccaagaagaagctggctgactgcgagaaggtggctgtggagttcgggaaccagctggaggccaggccaccaccaagccagatctggcaccagtggagaaaggagacaggcaggcaactgcagcctgcccagtgcggagaggggccagagcccgggcactgatttctccaggagagagctttgtttacccccaaggactgggcttcactcctaaaagctgcttctaaaccctttgcgtgcaggccccagacagtgtgggtgcatgactgctttatctgttggatgtttccacaggcaggctgttgctgccagaattctagaagcagtgtaaacgggctgctcattcattagggccctggttaatggtggagccagcctggtgtgtggcagccaggtcgggctggtgtcttcagagtggctgtgtcagaagggcctcgtgtatgacagaaacgcaggccagctggaacgtccccaggcgttctgtcctggatcaagcaagaggaaggggcaagtgggaggagccagcagggcccacaggagaccactgtggcacacctgtgctcaggcagcatggtgctgggcgctgcaggggctcattaatgcatgagacacagattccactcaggagagagaagacgaacacagacacagtacacggtgggaaggggcacttccatgtctgcagccagagagccctttcagaatctgacccaaaagatggccagtattctaagaaaaagcacatatgcttacgatgtgcaaacagctgaaggtgttctttcaactatagtaaaaggggtgtctcggtggccacaggcggcccagatgaagagacctgtctgggccgcagagaggagtctggaggccccccgagccaggctgagccagccgctaggggcacggagcagtgcccaccttgcgcccagtgtggccagagcttcggccagaaggagctcagtgcgccgcaccagcgcgtgcatcgtggcccccggcctttcgctggtgctcagtgtcccaagagcttcacgcagcggaccacccccgccagccaccgtcgggcgcacgtggccgagtgcacctacacccgcgcccaatgcggcaagaccttcctccagcagtcgacgctcacacccactactgcgcgcacatcagggagaagccctacgagtgcgccaagctctttggccgcctgtccacgctgctggagcaccggcacatgcacacgggtgagcggcccttccagtgcacgcaatgtggctgctgcttcagccgcctgtccacgctgctggagcaccggcacacacacatcagcgagaagcccttccagtgtgcgcagtgcgacaagcgtttcacgcgtctggccaacctgaccgtgcaccagagagtgcacttgggcgagcgctccttccagtgcgcccagtacagcaggagattcatgcagaagcccggcttcctgcgtcatctgtgtggccactcgcaggagaagcactatccttgcagcccttgtggttcccatgatcagtggtgaaatatagtgattttcacctgtgcttccattctgaagttctggaaagaagtactggatggactgaagtccaggacaacgtcccaaagaaaggcagagtccaggtaggcttggaggaccaagccctggatgagcactggagggcagaggcctcagtgtccagcactgtgccctgcacatggaaagcccctacgtttgtggaatgaatgaataataaaaatgttttcataagtg

SEQ ID NO: 201384 - DNA, 4452 bp, Homo sapiens
  Payload ID: 19744
  Gene Name: zinc finger family member 783
  Uniprot ID: Q6ZMS7
  ENST ID: ENST00000434415
  CDS Start-End: 164-1804
aaagggccagcggggcacgtggctcgggacgcagttcgctgccgcccggcagtagctctcaggttaggcgggtcccgctccgcttccgccgtcgctgccgcgccgccccgggcccgacaggccgggtccagggactgcaacccagcgagggacgcgggcagccatggccgaagcggcgcctgcccgggaccccgagacagacaagcacacagaggaccagagtccttcgacacccttgccccagccagctgctgagaagaactcgtacctctactccacggaaatcacactgtggacggtggtggccgccattcaggccttggagaagaaggtggattcctgcctgacccgcttgctgactctggaggggcgcacggggacagccgagaagaagctggccgactgcgagaagacagctgtggagttcgggaaccagctggagggcaagtgggccgtgctggggaccttgctgcaggagtacgggctgctgcagaggcggctggagaatgtggagaacttgctgcgcaacaggaacttctggatcttgcggctgcccccgggcagcaagggggaggcccccaaggtgcccgtgaccttcgatgatgtggccgtgtatttctctgagctggagtggggcaagctggaggactggcagaaggagctctacaagcacgtgatgaggggcaactacgagacgctggtctccctggattatgcaatctccaaaccagacatcctcacccggatagagaggggagaggagccttgtcttgaccggtggggccaggagaaggggaatgaagtagaggtgggacgtccaaggatgatgggcactggcctccctccgtatccagagcacctcaccagcccacttagccctgcccaggaggagctgaaagaagggcaggcccccaagcagcagcaggactcagaggcgagagtggccccagccgggccagaagcaggtggtggtgtggccatcaagacagaggcacagtctgaagacgagatgacgcctgagcggctctttctgggggtgtcccgaggccagaccgagtgtagaatcccccgagggcccaggaacaggcctgggggccccagccgtcatcaggcccagggcatgcccagggtgcgggcaggggagccacggccaccgggggccagtggggagacgccccgagtcctctcccgcaggcggcagcgggcattcccctgccccgactgcgggcagagcttccgcctgaagatcaatctgacgattcatcagcggacccatgtggaggaggggcggcaggaggcccccggccgctcgcccaccagctgcggggacagccaggccatgctggagccgggggaggtggtggtacccggccctgtcatccgctggctccccgaggagcctgagggtcgccgctccgtggcagggggccgtgccttggtggggcggcggcctgcagccagcaagatgtaccactgcagcgagtgcctgcgcttcttccagcagcgcaagagcctgctgctgcaccagcgcctgcacaccggcaatggccagggctggcccgcctgcccctactgcggcaaggccttccgccggccctcggacctcttccggcaccagcgcatccacaccggtgagcggccctaccagtgcccccagtgtggccggaccttcaaccgcaaccaccacctggccgtgcacatgcagacccacgcccgaggccaggtgggcccacacttccctgccgcccccgcccgccacgggagcctgcccctgccctggcccagccggaaggaggagggctgacctggcaggagcccacagaggacccctggcggggtctctcccctgtgcctgacgcaggttcttccttttcctgggatggagagaggtttgttgtttttacccattcaaatgggaagctagctgcccttctggtgacattgtgtgtgaccgggtgctttctgtttcctgtttgcactcttcgctgccttttctgcattcctgacttctaaaagatgccttaaggcttaagggatgccatatttttgataaggcctctggtaggtaccacagccaagaggaccagagatcatggcccttccagtatgggggcgatagagacatcggggacctgggatttttgttttgtgcagagatctcctgcctgctgtcaccatgagaaacagtggagtggagtggatggatggcctgacttgaagaaagggccctggaaagttttctactttgctattttgaaatttttttcccttcttatagagactttgaaatacttttgtaaatgtgtgtagttgttaatggaactttgccttttgcaaagtcggaaagagtcggcttttccatgtgaggctcgcagagctgaaaggggagctacgtccaccagcctgtgggtcttttggttttttttttgttgttgttgttgtttttttaagatggagtttcactcttgttgcccaggctggagtgcaatggtacaatctccgctcactgcaacctccgcctctcgggttcaggtgattctcctgcctcagcctcctgagtagctgggattacaggcgcccaccaccactcccggctaatttttgtatttttagtagagacagggtttcatcatgttgtccagactggtctcgaactcctgatgttaggtgacccgcacacctcggcctcctgaagtgctgggattacaggcgtgagccaccactcttggcccagcctgtgggttttgatggggatgtcttggctgctgtcttggaggcacagtgtctccccatgtgtgtgtttcttggcccagagtgactcccagtattcctagtccttccccacaggatagtcacatccattatttacttttgttgtcagctgggaggggaaactgaagcctggacacgtctccccaagggctcagtgttcatgggtgtgtaagatccattgactggaccccagaaagcaccctgaggggcagtgcagagagagcccaggaagcccctccactagaggaggcccttggtctggctgaggaccacgtccaccctgggcctccaggcctgcttttcacattaaaggcggggcagtctcctctcaaaggagttctcccttgagcactttgggctctggggcagagttgggctaggagatctgggtgaatcctttagtcacagctagtctcatgttcctcttctgtcaaaggggtcatggccccagtgtgtcctacctcagagttgtcagggtcaaagtaacaggcactgggacaaatatgaagcctagctttgtgcttcctttcaaattcagggcctcctttctactccattccagcctttttttcctgtcagaatccctcaggaaggacctttatcttctggagtgagtggcagttccactgggttcagtgaaagagtcgcccatggggctctgttccccaggagtcctttgtattttggtgaacaaattcttaccaaagcatgagattcggactgtagaagttcagactgcctcagttcagactgcctcatggggcagtctggaggtcagctggcttctggtgtctctcatcacaccactgcggacgctgtctgtagagcagccttggtgtgggtgactctgaagctggagtgatgggaccccagctatccttgttttttaccgccttgtctggcactgtgaccacgcttcagggctgcttctgggggtcttggtccctggatgtgccatttccttgcccttctgaccctcacacttcttccaaagtcttgagcagagttgggggccaatggtagcattgctgtcatctctgggaggagagtgagtatacaagtcagtgacagttcagccaggctcccttgggtttgggaagaggcactgcccttctgtgctgtggatcctgcttgtctgctctggagtccccccacccttgccaggagcttcacaaaccagagacgggctgtcagcaagagctcagacaggatgtggtgcaagtgcaggtgcacgagtttaaccctcagctgcaggagctagtctcaggtgttctggggatgcctcaggctaagaattttgccgactttctgggcttggttggctaatgccaaatgcccctgcttaaatatcacaaggtgctgattctccttttttctttttttcataccaatgtgctcaaactttgagctaggtcttgtgagtttgcctagcactcagacctgtttaagtaacgttctttacattgaaacaagtcaaccgaagctttgtggtgcaggagctgagggtgccccagactcagtgggagccctggttgggccccaaactctcccagcagggtcctcggtttcctcatttgtgaaataaatgagtgggccacgacgttaataagcccaagagaactgtgaaggtggtagtcccttgccctaattggtgctcaataaagttgttggcataaacga

SEQ ID NO: 201385 - DNA, 2346 bp, Homo sapiens
  Payload ID: 19744
  Gene Name: zinc finger family member 783
  Uniprot ID: Q6ZMS7
  ENST ID: ENST00000476295
  CDS Start-End: 120-965
cccggcagtagctctcaggttaggcgggtcccgctccgcttccgccgtcgctgccgcgccgccccgggcccgacaggccgggtccagggactgcaacccagcgagggacgcgggcagccatggccgaagcggcgcctgcccgggaccccgagacagacaagcacacagaggaccagagtccttcgacacccttgccccagccagctgctgagaagaactcgtacctctactccacggaaatcacactgtggacggtggtggccgccattcaggccttggagaagaaggtggattcctgcctgacccgcttgctgactctggaggggcgcacggggacagccgagaagaagctggccgactgcgagaagacagctgtggagttcgggaaccagctggagggcaagtgggccgtgctggggaccttgctgcaggagtacgggctgctgcagaggcggctggagaatgtggagaacttgctgcgcaacaggaacttctggatcttgcggctgcccccgggcagcaagggggaggcccccaaggtgcccgtgaccttcgatgatgtggccgtgtatttctctgagctggagtggggcaagctggaggactggcagaaggagctctacaagcacgtgatgaggggcaactacgagacgctggtctccctggattatgcaatctccaaaccagacatcctcacccggatagagaggggagaggagccttgtcttgaccggtggggccaggagaaggggaatgaagtagaggtgggacgtccaaggatgatgggcactggcctccctccgtatccagagcacctcaccagcccacttagccctgcccaggaggagctgaaagaagggcaggcccccaagcagcagcaggactcagaggcgagagtggccccagccgggccagaagcaggactggcattgcggactgacctccagggagaggcccagatctgatctgcagagatctcccttccggctatcgtggctgctgttcaggtggtggagaagaagatggaaccccaggctgcctggctacagagcctggagggatgcatgtggacagccaagaagaagctggctgactgcgagaaggtggctgtggagttcgggaaccagctggaggccaggccaccaccaagccagatctggcaccagtggagaaaggagacaggcaggcaactgcagcctgcccagtgcggagaggggccagagcccgggcactgggccctggttaatggtggagccagcctggtgtgtggcagccaggtcgggctggtgtcttcagagtggctgtgtcagaagggcctcgtgtatgacagaaacgcaggccagctggaacgtccccaggcgttctgtcctggatcaagcaagaggaaggggcaagtgggaggagccagcagggcccacaggagaccactgtggcacacctgtgctcaggcagcatggtgctgggcgctgcaggggctcattaatgcatgagacacagattccactcaggagagagaagacgaacacagacacagtacacgagacctgtctgggccgcagagaggagtctggaggtagggtccaagggccacgagccagtttgggctgctggaggggggcctggcaaggagggctctcggggaagcacctgtgggggtctgcttcctgaccccagggagctagaggcctccctccctccaggccccccgagccaggctgagccagccgctaggggcacggagcagtgcccaccttgcgcccagtgtggccagagcttcggccagaaggagctcagtgcgccgcaccagcgcgtgcatcgtggcccccggcctttcgctggtgctcagtgtcccaagagcttcacgcagcggaccacccccgccagccaccgtcgggcgcacgtggccgagtgcacctacacccgcgcccaatgcggcaagaccttcctccagcagtcgacgctcacacccactactgcgcgcacatcagggagaagccctacgagtgcgccaagctctttggccgcctgtccacgctgctggagcaccggcacatgcacacgggtgagcggcccttccagtgcacgcaatgtggctgctgcttcagccgcctgtccacgctgctggagcaccggcacacacacatcagcgagaagcccttccagtgtgcgcagtgcgacaagcgtttcacgcgtctggccaacctgaccgtgcaccagagagtgcacttgggcgagcgctccttccagtgcgcccagtacagcaggagattcatgcagaagcccggcttcctgcgtcatctgtgtggccactcgcaggagaagcactatccttgcagcccttgtggt

SEQ ID NO: 201386 - DNA, 1929 bp, Homo sapiens
  Payload ID: 19744
  Gene Name: zinc finger family member 783
  ENST ID: ENST00000481519
  CDS Start-End: 348-1094
ccagattctgtcatgacctgcctggcgatcattaccgtgatttcctgtctgctgaattcctgtgctgcagtttccttctgtgggacatgaggctttagactggaatctagctgccaggcctccctccgtatccagagcacctcaccagcccacttagccctgcccaggaggagctgaaagaagggcaggcccccaagcagcagcaggactcagaggcgagagtggccccagccgggccagaagcaggactggcattgcggactgacctccagggagaggcccagatctgatctgcagagatctcccttccggctatcgtggctgctgttcaggtggtggagaagaagatggaaccccaggctgcctggctacagagcctggagggatgcatgtggacagccaagaagaagctggctgactgcgagaaggtggctgtggagttcgggaaccagctggagactcctgaatctcagagcaggaagcatgtggagatcatttcttcagccctctgtcttcaggcaggtagaaggccaggccaccaccaagccagatctggcaccagtggagaaaggagacaggcaggcaactgcagcctgcccagtgcggagaggggccagagcccgggcactggtgagtccctcagggtgtgggcctgggcctctccacctgcatctgggccctggttaatggtggagccagcctggtgtgtggcagccaggtcgggctggtgtcttcagagtggctgtgtcagaagggcctcgtgtatgacagaaacgcaggccagctggaacgtccccaggcgttctgtcctggatcaagcaagaggaaggggcaagtgggaggagccagcagggcccacaggagaccactgtggcacacctgtgctcaggcagcatggtgctgggcgctgcaggggctcattaatgcatgagacacagattccactcaggagagagaagacgaacacagacacagtacacggtgggaaggggcacttccatgtctgcagccagagagccctttcagaatctgacccaaaagatggccagtattctaagaaaaagcacatatgcttacgatgtgcaaacagctgaaggtgttctttcaactatagtaaaaggggtgtctcggtggccacaggcggcccagatgaagagacctgtctgggccgcagagaggagtctggaggtagggtccaagggccacgagccagtttgggctgctggaggggggcctggcaaggagggctctcggggaagcacctgtgggggtctgcttcctgaccccagggagctagaggcctccctccctccaggccccccgagccaggctgagccagccgctaggggcacggagcagtgcccaccttgcgcccagtgtggccagagcttcggccagaaggagctcagtgcgccgcaccagcgcgtgcatcgtggcccccggcctttcgctggtgctcagtgtcccaagagcttcacgcagcggaccacccccgccagccaccgtcgggcgcacgtggccgagtgcacctacacccgcgcccaatgcggcaagaccttcctccagcagtcgacgctcacacccactactgcgcgcacatcagggagaagccctacgagtgcgccaagctctttggccgcctgtccacgctgctggagcaccggcacatgcacacgggttcccatgatcagtggtgaaatatagtgattttcacctgtgcttccattctgaagttctggaaagaagtactggatggactgaagtccaggacaacgtcccaaagaaaggcagagtccaggtaggcttggaggaccaagccctggatgagcactggagggcagaggcctcagtgtccagcactgtgccctgcacatggaaagcccctacgtttgtggaatgaatgaataataaaaatgttttcataagtga

SEQ ID NO: 201387 - DNA, 777 bp, Homo sapiens
  Payload ID: 19745
  Gene Name: zinc finger family member 788
  ENST ID: ENST00000397759
  CDS Start-End: 1-777
agatctcacactagagaaaaacgctataaatgcaagcaatgtggaaaacccttcatttatttcaatgcctttcaacgtcatcaaaggagccacactggagagaacccctatgagtgtaagcaatgtgggaaagcctgtatttcttccactgcttttcagtgtcgtgaattgagtcacactggagcaaaacgctataagtgtaagcagtgtggcaaaggcttcaatttgcccagttccattcgatatcatgaaatgactcacactggagagaaaccctatgaatgtaagcaatgtgggagagctttcagatctgcctcacacctacgaacacatgaaaggactcacattggggagaaaccctatgaatgtaaacagtgtggtaaagtctatcgttactggagtggccttcgaatacatggactaactcatattggaaaaaagccttatgaatgcaaggaatgtgggaaagcatttgataatcctacatcctttcaaaaacatgaagggagtcacagaaaagggaagtcttatgaatgtaaggaatgtgggaaggtattcagtttttcccgttcctttcgtagacatggaaggatgcacactggagagaagccatatgaatgtaagaattgtgggaaagccttcacatctgccaagagccttcaaaatcatggaaggacacacaccggagagaaaccatgtgaatgcaagcaatgtggcaaagctttcatttgttccagttcctgtcagagacatgaagagacacattctgttaatatg

SEQ ID NO: 201388 - DNA, 3941 bp, Homo sapiens
  Payload ID: 19745
  Gene Name: zinc finger family member 788
  ENST ID: ENST00000430298
  CDS Start-End: 206-394
aacttttttcggggaaggagacggctgcaagcccgcggtctcttgttgctgtgctaacgaccgttggaaccctctttctggctcttggaacgctcggctctgagaggctccaggtttctccgccagagctcctgtcgctctgtcagttgcgctgtgttcctctctagtcacaagagccttggggaagacagttggaagctcagacatggactcagtggcctttgaggatgtggctgtgaacttcaccccagacgagtgggctttgctggatccttcccaaaagaatctctaccgagaagtgatgcaagaaaccttgaggaacttggcctctatagaggtcttatggaagagagactctttgaaagtgaaggtcatcagcatggagaaattttgacccaggttctggatgacatgctgaagaagaaaactggagtagaatcatgtgaaaggaatgtgtgtgaggtcagcatgggtcatttatcccttaataagcacaccagagctgacactggacacaagccatatgagtatcaggaatatggacagacgccatataaatgtacatactgtaagaaagccttcagctgtctcccctacttttgcagacatgtaattgcacacactggagaaaaaccctatgaatgtaaggattctgcgaagacatttagtttttccatttattttcatagtcataaaagagctcactctggagggaacccctatgaatgtaaacaatctggaaaaccctttggatgcgcctcagaacttcaaatgcatgcaaggactcagtgtggagaaaccttacaaatgtaagaaatgtgaaaaagcatttaataacttatcttcctttcaaatacatgaaagaatgcacagaggagggaagtatcatgcctgtaagggttctgggaatacataccgtttttctggtttctatcatagacataaaatgcctcatgctggcgggaagttttatggatgtaagaaatgtgggaaagcctttattagtttctgtgcctttcgataccatcaaaggactcacactaaagagaaaccctatgcgtgtaaacaatgtgggaaagcctatatttcttacacttcttttcaatatcatcagttgaatcacactggagcgaaatgctatgagtgtaagcagtgtggcaaaggcttcgatttgcccaattccattcgatatcatgaaatgactcacactggggagaaaccccatgaatgtaagcaatgtgggaaaactttcagatgtgcctcaagcctccgaatacatggaaggactcacactggggagaaaccctatgaatgtaaacagtgtggtaaagtctctcgttattggagcggccttcaggtacatgaagtaactcatattggaaaaaagctttatgaatgtaaggaatgtgggaaatcatactatagttctggttcctttctaaatcataaaaggatccacaccagggagaagtcttatgaatgcaaggaatgtgggaaagcatttggtaatcccatatcctttcaaaaacatgaagggagtcacagaaaatggaagccttatgaatgtaaggaatgtgggaaggtattcagtttttccagttcccttcggagacatgaaaggacacacactgaaaaactctgtgaatgtaaacagcatgggaaaggattttttcatagaagctgtcctagacacatgaagatagacactggagagatacttcataaacgtaagatacgtggaaaagtctttcattctcctagttcatttcaaacatgtgaaagatctcacactagagaaaaacgctataaatgcaagcaatgtggaaaacccttcatttatttcaatgcctttcaacgtcatcaaaggagccacactggagagaacccctatgagtgtaagcaatgtgggaaagcctgtatttcttccactgcttttcagtgtcgtgaattgagtcacactggagcaaaacgctataagtgtaagcagtgtggcaaaggcttcaatttgcccagttccattcgatatcatgaaatgactcacactggagagaaaccctatgaatgtaagcaatgtgggagagctttcagatctgcctcacacctacgaacacatgaaaggactcacattggggagaaaccctatgaatgtaaacagtgtggtaaagtctatcgttactggagtggccttcgaatacatggactaactcatattggaaaaaagccttatgaatttaatgaccgtgggaaatcattctatagttccaatttctttctaaatcataaaagggtccacactagagtgaagacatatgaatgcaaggaatgtgggaaagcatttgataatcctacatcctttcaaaaacatgaagggagtcacagaaaagggaagtcttatgaatgtaaggaatgtgggaaggtattcagtttttcccgttcctttcgtagatatgaaagggcacacactggcgaaaagccctgtgaataaacaatgtgggaaaggatttttcatatcttctgtggagctttgaatgcatgaaaagacagactacagagaaatgctaaatgtaaggcgtgtataaaagcatttagtaatttctcttccttgcttatacatggaaggatgcacactggagagaagccatatgaatgtaagaattgtgggaaagccttcacatctgccaagagccttcaaaatcatggaaggacacacaccggagagaaaccatgtgaatgcaagcaatgtggcaaagctttcatttgttccagttcctgtcagagacatgaagagacacattctgttaatatgcattcagttatcctaattcctttgaaacacagaaaaagagtagggaaaggacctctgagataactgttttctgagttgagaagagctacttgtgaatggacaattaaatctagatgtatttagatctgatacaattcatctgtagccaacctttttttaaatttttttattttttagatggagtcttgctctgtcgcccagactggagtgcagtggcacgatcttggctcactgcaacctccgcctcctgggtttaagcaattctcctgcctcagcctcccaagtagctgggattacaggtaaccgccatcacgcctggctaattttagagatggagtttcaccatgttggccaggctggtctcaaactcctgacctcaagtgatccacccacctcggcctcccaaagtgctgggattacaggcgtgagccactgcgccctgccacctatagccaatcttaatgagatttcataggcacagacaaggaaggttatcagtcacatattagaggcaccacacagggagagcagtgtgtggccacatgcttcagcccattttttctgattctcttgcttgcaaattaagagtattctccaaatcacttgactttccttttctcagagttatagttctccagagatgtcaccagatgattcacattaaaggtacatttccagttgacttttttatttcagatattagtaaatgattaccagagaactaattcaaactgtcatggttggaaatactctgatgctcaactccctaatctatagagtgagttaaggtctatactcttttgcaagcattgttctagtggcagtgaccctgttcatgattcagcctgacatttactatgctgccctgaaaaccaactagatgggagcttgtttctctctgcattgtgtagtgagtggtgtcacccaggactttcatgtgagaaaaagcaccttgcttttaatctgggaattttgagtgttttttgtaatgcctcagtttattcttatttatggttgattatatgtgatttagaacacttgctatttatgtctgatcccacaaatcagcactcactttatttgcaaagcaccaaatttcgtgtaagaggtgtagtaattgggaatgtgaagctaa

SEQ ID NO: 201389 - DNA, 692 bp, Homo sapiens
  Payload ID: 19745
  Gene Name: zinc finger family member 788
  ENST ID: ENST00000596883
  CDS Start-End: 88-336
tccgccagagctcctgtcgctctgtcagttgcgctgtgttcctctctagtcacaagagccttggggaagacagttggaagctcagacatgagaaatatgattccacaggacaatgaaaacccaccccaacagggtgaagcaaatcaaaatgactcagtggcctttgaggatgtggctgtgaacttcaccccagacgagtgggctttgctggatccttcccaaaagaatctctaccgagaagtgatgcaagaaaccttgaggaacttggcctctatagaggtcttatggaagagagactctttgaaagtgaaggtcatcagcatggagaaattttgacccaggttctggatgacatgctgaagaagaaaactggagtagaatcatgtgaaaggaatgtgtgtgaggtcagcatgggtcatttatcccttaataagcacaccagagctgacactggacacaagccatatgagtatcaggaatatggacagacgccatataaatgtacatactgtaagaaagccttcagctgtctcccctacttttgcagacatgtaattgcacacactggagaaaaaccctatgaatgtaaggattctgcgaagacatttagtttttccatttattttcatagtcataaaagagctcactctggagggaacccctatgaatgtaaacaatctggaaaacccttt

SEQ ID NO: 201390 - DNA, 1603 bp, Homo sapiens
  Payload ID: 19746
  Gene Name: zinc finger homeobox 2
  ENST ID: ENST00000412565
  CDS Start-End: 520-1603
acgcccgttgtggcggtgccgagagcaggccagggctcgagacacgcgctatgtaatgggaggccgcgacccccgcggtggccaggggagcgaggccgccccttgcattctgctcctcattgttggccccgcacggctcccgggggctggtacaggtctcatgcctgaggctgagccaggcaccccgaggcgcggatgcatgatgggagatgtagttccaaagggagactttgccatctcgccccgcccgtcgctatggcgacaggaaagctgcacttggtgcctgcggtactctacctaaagctgaactggggctacaaggcggcggggagagtcgggtgcaaggagctcaagccccagtcccgtctccaacaccccccgccgcacccccaacgcaggcagatgggcctggaatacaagccattcacaccgtccaacagatatctgctatagcagccagctaagcgcagggtactggctgtcacgctgacatgagcccccagcactcctccgtctaccatggccacccttaactcagcctctaccactggtaccaccccctcccctgggcacaatgccccgtccctgccttcggacaccttctcctccagcaccccctctgatcctgtcaccaaagatccccctgctgcctcctccacctctgagaacatgaggtcctcagagccagggggacagctcctggagtcgggctgtggcctcgtcccaccaaaggagattggggagccccaggaagggcctgactgtggtcacttcccaccaaatgacccaggggtggaaaaggacaaggagcaggaggaggaagaagaagggctccctcccatggacctaagcaaccacttattcttcacagctggaggtgaggcctacctagtggccaagctgtccctgccaggtggcagtgaactcctgttaccaaagggcttcccctggggtgaggcgggcatcaaggaagagcccagtctgcccttccttgcctacccacccccctcacacctcactgcccttcacatccaacatggctttgacccaatccaaggctttagctcttctgaccaaattctgtcccatgatacctcagcaccatctccggctgcctgtgaggaaaggcatggagctttctggagctaccagctggctccaaatccacccggagatcccaaagatggccccatggggaacagcgggggcaaccacgtggcggtcttctggctctgccttctgtgccgcctgggtttcagcaagccccaggcctttatggatcacacacagtctcatggggtgaagctaacccctgcccaatatcagggcctgtcaggtagcccagctgtactccaggagggagatgaaggctgcaaggccctcataagctttctggagccaaaactccctgctcgcccctcttctgacataccccttgacaacagcagcacagtgaacatggaggcgaatgtggcccagacagaggatggcccccctgaggcagaagtccaggcccttatcctcctggatgaagaagttatggccctcagcccaccctctccacccacagccacctgggaccccagcccaacccaagccaaag

SEQ ID NO: 201391 - DNA, 9182 bp, Homo sapiens
  Payload ID: 19746
  Gene Name: zinc finger homeobox 2
  Uniprot ID: Q9C0A1
  ENST ID: ENST00000419474
  CDS Start-End: 357-8075
ggagcgagcgagtgcccagggtgaatcaatggaaaccccctcacgaagccggggaaacacttcagccgcagccaaatagcattgattattttccttcacttccctcaccgccgtgaatttatttatttatttttttccgtctccgtccctgacgccccggagcgagcgctggagggagggaggaggaggggaaaaaagaggaatcaacacatcggagaagtcccttccaagagccgccccctcccctccccgcctcgcgctgctcggtggccgcggttcgactcccgtccctgcttccagctgaggtggtactggctgtcacgctgacatgagcccccagcactcctccgtctaccatggccacccttaactcagcctctaccactggtaccaccccctcccctgggcacaatgccccgtccctgccttcggacaccttctcctccagcaccccctctgatcctgtcaccaaagatccccctgctgcctcctccacctctgagaacatgaggtcctcagagccagggggacagctcctggagtcgggctgtggcctcgtcccaccaaaggagattggggagccccaggaagggcctgactgtggtcacttcccaccaaatgacccaggggtggaaaaggacaaggagcaggaggaggaagaagaagggctccctcccatggacctaagcaaccacttattcttcacagctggaggtgaggcctacctagtggccaagctgtccctgccaggtggcagtgaactcctgttaccaaagggcttcccctggggtgaggcgggcatcaaggaagagcccagtctgcccttccttgcctacccacccccctcacacctcactgcccttcacatccaacatggctttgacccaatccaaggctttagctcttctgaccaaattctgtcccatgatacctcagcaccatctccggctgcctgtgaggaaaggcatggagctttctggagctaccagctggctccaaatccacccggagatcccaaagatggccccatggggaacagcgggggcaaccacgtggcggtcttctggctctgccttctgtgccgcctgggtttcagcaagccccaggcctttatggatcacacacagtctcatggggtgaagctaacccctgcccaatatcagggcctgtcaggtagcccagctgtactccaggagggagatgaaggctgcaaggccctcataagctttctggagccaaaactccctgctcgcccctcttctgacataccccttgacaacagcagcacagtgaacatggaggcgaatgtggcccagacagaggatggcccccctgaggcagaagtccaggcccttatcctcctggatgaagaagttatggccctcagcccaccctctccacccacagccacctgggaccccagcccaacccaagccaaagaatcgccagtagcagcaggcgaggcagggccagattggttccctgaggggcaagaagaggatggagggctctgccccccactcaaccaaagctcacccacctccaaggaggggggcactctccctgccccagtgggctcccccgaagaccccagtgacccaccccagccctatcgcctagctgatgactacaccccagcccctgcagccttccagggcctcagcctgtccagccacatgtccctgctccactcacgcaactcctgcaagacactcaagtgtcccaagtgcaactggcactacaagtaccagcagaccctggatgtgcacatgcgagagaagcaccctgagagcaacagtcactgcagctactgcagtgctgggggcgcccacccccgccttgctcgtggagagagctacaactgtggctacaaaccctaccgctgtgacgtctgcaactactctacaaccaccaaaggcaacctcagcatccatatgcagtctgacaagcacctggccaacctacagggcttccaggcgggccctggtgggcagggaagtccaccagaggcatcactcccaccctccgcgggagacaaagagcctaagaccaaatcatcctggcagtgcaaggtgtgcagctacgagacaaacatctcccgtaacctgcgcatccatatgacctctgagaagcacatgcagaatgtcctaatgctgcaccaggggctgccgctgggcctgccacctggattgatggggccaggccctcctcccccaccaggggctacccccactagcccccctgaactcttccagtactttgggccccaggccctagggcagcctcagactcccttggctggcccggggctgaggccagacaagcccctggaagcccagctacttctcaatggtttccaccacgtaggagcacctgcccgcaagttccccacatccgcccctggaagcctatcccctgatgcccacctgcctccaagtcagctcctgggttcctcatctgacagcctgcccacctcaccacccccagacgacagcctgtccctgaaggtgttccgctgcctagtgtgccaggccttcagcacagacagcctggagctgctgctctaccactgcagcataggccggagcctcccggaagctgaatggaaggaggtggctggtgacacccaccgctgcaagctttgctgctatggcacccagctcaaggccaacttccaactccacctcaagactgacaaacatgctcagaagtaccagctggcagcccacctgcgggaggggggtggagccatgggcaccccttccccagcatccctgggagatggggctccttatgggtctgtctccccactacacctgcgctgcaacatctgtgactttgagtccaacagcaaggagaagatgcagctgcatgccaggggtgcagcccacgaagaaaacagccaaatctataagtttctgctggacatggagggagcggaggcaggggcagagctggggctataccactgcctgttgtgtgcgtgggagacaccctcccgcttggctgtgctgcaacacctgcgcacacctgcccaccgcgatgcccaggcccagaggcgtctgcagctgctacagaatggcccaaccactgaggaaggactcgcagctcttcagagcatcctgagcttcagccacgggcagctccggactcccgggaaggctcctgtcacccccttagctgagccacccacccctgagaaagatgcccagaacaagacagaacaattggcttcagaagagacagaaaacaagactggcccttccagagacagtgccaaccagaccacggtatactgctgtccatactgcagcttcctgagcccagagtccagccaggtgagggctcatacactctcccagcatgcagtgcagcccaagtacagatgcccactgtgccaggaacagctggtgggccggcctgccctgcacttccaccttagccaccttcacaacgtggtgcccgagtgcgttgagaagctgctgcttgtagctacaactgtagaaatgacatttacaaccaaagtgctgtctgcacccacattaagccctctggacaatggccaagaaccccccactcatgggccagagcctacaccgagcagagaccaggcagcagaaggccctaacctgaccccagaagccagtccagatcctcttcctgagcctcccctggcctcagttgaggtcccagacaaaccctcaggaagccctggccaacccccttctccagccccatctccagtccctgaacctgatgcccaagctgaagacgtagctcctccgcccaccatggctgaggaggaagaggggaccactggggagctccgctctgcagagccagctccagctgactctcgccaccctctgacctatcggaaaaccaccaactttgccctggacaagtttctcgaccctgcccggccctataagtgcactgtgtgtaaggagtccttcacccagaagaatattctgttggttcattataattctgtctcccaccttcacaagatgaagaaggctgccattgacccctctgcccctgcacggggagaggccggtgccccacccaccaccactgctgccacagacaagccctttaagtgcacagtctgcagagtctcctacaaccagagctccaccctggagatccacatgcggtcagttctgcatcagactcgctctcggggaaccaagactgattccaagattgaagggccagaacgcagccaagaagagcccaaggaaggcgagacagagggggaggtgggcactgagaagaagggccctgacaccagtggcttcatatctggattgcctttcctgtcccctcccccacctcccttggacctgcaccgattcccagcccctctcttcaccccaccagtcctgccccccttccctctggtgcccgaatcactgcttaagctccagcagcagcagctgctcctgcccttctacctccacgatctcaaggtggggcccaagctgacactagctgggcctgcacctgtgctgtccctgccagctgccacccctcctcctccaccccaacctcccaaggctgagctggctgagcgggagtgggagcggccccccatggccaaagagggtaatgaggcagggccttcctcaccccccgacccattgcccaacgaggctgcccgcactgcagccaaagcccttctagaaaactttggctttgagctggtgatccagtacaatgaagggaagcaagctgtgccccctccccctaccccacccccacctgaggccctcgggggtggggacaagctggcctgtggggcctgtgggaaactcttctccaatatgcttatcctcaagacacacgaggaacatgtccaccgccgctttctgccctttgaagccctgagccgttatgctgctcagtttcgaaagagctatgacagcctatacccgccccttgcagagcctcccaaacctcctgatgggtctctggattcacctgttccccatctgggcccacccttcctggtcccagagcctgaggcaggggggacccgtgcccctgaagagcgaagtcgagcagggggacactggcccatagaagaggaagaaagctccagagggaatcttcctcccctggtgcctgccggccgccggttctccagaaccaagttcacagagttccagacccaagccctgcagtctttctttgagactagcgcctaccccaaagacggagaggtggagcgactcgcaagtctgttgggtctggctagccgtgtggtggtggtgtggttccagaatgcccgccagaaagcacgcaaaaatgcctgtgagggtgggtccatgccaaccggaggaggcactgggggagcctccggctgcaggcgttgccacgccactttctcctgtgtttttgagttggtgcgccacctcaagaagtgctatgatgaccagacccttgaagaggaggaggaagaggcagagagaggggaagaggaggaagaggtggaagaagaagaagtagaggaggaacagggccttgaacctccagcagggcctgagggcccattaccagagcctccagatggggaggagctgagccaagcagaggcaacaaaggcaggaggcaaagagcctgaagagaaggctactccatcaccttccccagcccatacctgtgaccagtgtgccatttctttctccagccaggacctcctgaccagtcaccgccgactacatttcctgccatctctgcagcccagtgctcccccccaactcctagatctgcccttgctggtgtttggggagagaaaccccctggtggcagccacctcaccaatgccaggtccacctctcaaacggaagcatgaggacggcagcttgtctcccacaggcagtgaagcagggggaggaggggagggcgagccccccagggacaagcgcctgcgcaccaccatcttgcctgagcagctagagatcctgtaccgttggtacatgcaggattccaacccaacacgcaagatgctcgactgcatctccgaggaggtggggctcaaaaagcgagtggtacaggtctggttccagaataccagggcccgggagaggaaaggccagtttcgaagcacccctgggggggtgcctagtccagcagtgaaaccgcctgccacagccacccctgcatccttgcccaagttcaacctcttattaggcaaggtagatgatggcactgggagggaagccccaaagagggaagcacctgcttttccctaccccactgccacgcttgcttctgggccccagcctttcctaccacctgggaaagaggccaccaccccaacaccagagccacctctacctctcctacctccccctccacccagtgaggaagagggcccagaggaaccacctaaagcttctccagagagtgaggcttgcagtctctctgcaggagatctgagtgattcatctgcttccagcctagctgaaccagaatcccctggggctggagggaccagtgggggacctggaggtgggactggggttccagatggaatggggcagcggcgctacaggacccagatgagcagcctgcagctgaagatcatgaaagcctgctatgaagcttaccgcacccccaccatgcaggagtgtgaggtgctgggagaggagattgggctgcccaagagagtcatccaggtctggttccagaatgctcgtgccaaggaaaagaaggccaaactacaggggacagccgctgggagcactgggggcagcagtgagggcctcttagcagcccagcgcactgactgcccctattgtgatgtcaagtatgatttctatgtctcctgccgaggccatctcttttcccgtcagcacctggccaagctcaaggaggcggttcgagcccagctgaagagtgaaagcaagtgctacgacttggccccagcacctgaggctcccccagctctcaaggccccacctgccaccacacctgcctccatgcccctcggggctgccccaaccttgcctcgcctggcgccggtcctcttatctggcccagctctggctcagcccccgctgggcaacttagctcctttcaattcaggcccggcagcctcctcaggcctcctcggcctcgccacttcggtcctgcctaccaccacagtggtccagactgctggcccaggccgccccttacctcagagacccatgcccgaccaaaccaacacctccacagcaggcaccactgaccctgtcccaggccctcctactgagcccttgggggacaaggtctccagtgagcgaaagccagttgcaggccccaccagctcctccaatgatgccctcaagaacctcaaagcattgaagaccactgtcccagccctgttggggggccagttcctgccctttccattgccccctgctgggggaacagcaccgccagctgtctttggcccccagctacagggggcctacttccaacagctctatggcatgaagaaggggctatttcccatgaaccccatgatacctcagaccctcattgggctgctccccaatgccctcctccagccgccaccccagccccctgagcccacagccacagcacctccaaagcctcctgaactgcctgctccaggggagggggaagctggtgaggttgatgagctgctgacaggcagcactggcatctccaccgtggatgtaacccatcgctacctgtgccgccagtgcaagatggcatttgacggggaggccccggctactgcccaccagagatccttctgcttctttgggcggggctctgggggctccatgccacccccattgcgggtgcccatctgcacctaccactgcctggcatgtgaggtgctgctgagtgggcgtgaagccctagcctcccacctgcgctcctcggcccacaggcgcaaggcagccccacctcaagggggcccacccatctccatcaccaacgccgccactgctgcctcggctgctgtggcttttgccaaagaggaagcaagattacctcacacggactccaacccaaaaactacgactacctctacacttctagctttataaacagattaaccaagatggggagaggggagggcctcagggctccctcttttaccccaaggggtgttcggtgggagctcaaatccctcaccccaccccctggccccgcccacctcacaggaactgttcagttcccaccctcagtgggcaccacacaccccacttccagcagagtcctgcctcctcccaatccccacagacacacacattgatcctcctcctcagctccttgcagatgtagcccttgcccatcttcacagacacatacacccatcttggcaccctgattattcatacatgtctgcctaccacacacaaaatatatccttggttctatcttccttttcctcactgaattcccagctccccatccccataaatgcatacacatacatgcacacacacacgttatcccatgatgttccactgagaaaacaccaaaaaattttgaaaaagaagataaaaagaagaaacgaaaaagaaagcccaaggcaaagaagggggaaggaaaacaaacttcgccactctctcttctccttcctaaccctttgtctagagcaccacaccgctcacaaactctttccaaatgctcagttggctcccaaagttggagcctggcatgggcagggagcccacaaaactctaaccaaactggaggctggcatgggagaagtgcttctggttcactcttcctaccctctccctcctaaccctctccttgcctgacaggggagcccctgtggcctggactctaggggatgccgccaccagaaacccctctgccaatccctaccttgcaccctgggaactgcagtaacttattctcaaaggctttaaacacagagatcctctcagcggccgtgggcctgccccttgtcctagccctgccacgtgagggtccagcctccagggacaggcactgcccaccaacggcaaatccaaagttctttcaaaaaaaaaaactgaaacacaaccaaaaaagcaagagcgagagagagtacgtgcacacgcgcacaaaagagagaaacggacaccagaggaatgaactaaagaaaaacgtaaacttggaaaatacagaaaaaaaaaaaaaggaagaaaactcccatcaga

SEQ ID NO: 201392 - DNA, 949 bp, Homo sapiens
  Payload ID: 19746
  Gene Name: zinc finger homeobox 2
  ENST ID: ENST00000555334
  CDS Start-End: 210-949
atacaggaatcacttgctgctttgccggggtgctgtatcacctacgggccagggcctgggtcgaattggaaatagatgtttttgagagaggatctgggagttactgtaggatttggggcttaggtctgcctagccctactctgagctgtgatcgagcgtgggtactggctgtcacgctgacatgagcccccagcactcctccgtctaccatggccacccttaactcagcctctaccactggtaccaccccctcccctgggcacaatgccccgtccctgccttcggacaccttctcctccagcaccccctctgatcctgtcaccaaagatccccctgctgcctcctccacctctgagaacatgaggtcctcagagccagggggacagctcctggagtcgggctgtggcctcgtcccaccaaaggagattggggagccccaggaagggcctgactgtggtcacttcccaccaaatgacccaggggtggaaaaggacaaggagcaggaggaggaagaagaagggctccctcccatggacctaagcaaccacttattcttcacagctggaggtgaggcctacctagtggccaagctgtccctgccaggtggcagtgaactcctgttaccaaagggcttcccctggggtgaggcgggcatcaaggaagagcccagtctgcccttccttgcctacccacccccctcacacctcactgcccttcacatccaacatggctttgacccaatccaaggctttagctcttctgaccaaattctgtcccatgatacctcagcaccatctccggctgcctgtgaggaaaggcatggagctttctggagctaccagctggctccaaatccacccggagatcccaaagatggccccatggggaacagcgggggcaaccacgtggcggtcttctggctctgccttctgtgccgcctgggtttcag

SEQ ID NO: 201393 - DNA, 1972 bp, Homo sapiens
  Payload ID: 19746
  Gene Name: zinc finger homeobox 2
  ENST ID: ENST00000615307
  CDS Start-End: 266-1492
tccttcacttccctcaccgccgtgaatttatttatttatttttttccgtctccgtccctgacgccccggagcgagcgctggagggagggaggaggaggggaaaaaagaggaatcaacacatcggagaagtcccttccaagagccgccccctcccctccccgcctcgcgctgctcggtggccgcggttcgactcccgtccctgcttccagctgaggtggtactggctgtcacgctgacatgagcccccagcactcctccgtctaccatggccacccttaactcagcctctaccactggtaccaccccctcccctgggcacaatgccccgtccctgccttcggacaccttctcctccagcaccccctctgatcctgtcaccaaagatccccctgctgcctcctccacctctgagaacatgaggtcctcagagccagggggacagctcctggagtcgggctgtggcctcgtcccaccaaaggagattggggagccccaggaagggcctgactgtggtcacttcccaccaaatgacccaggggtggaaaaggacaaggagcaggaggaggaagaagaagggctccctcccatggacctaagcaaccacttattcttcacagctggaggtgaggcctacctagtggccaagctgtccctgccaggtggcagtgaactcctgttaccaaagggcttcccctggggtgaggcgggcatcaaggaagagcccagtctgcccttccttgcctacccacccccctcacacctcactgcccttcacatccaacatggctttgacccaatccaaggctttagctcttctgaccaaattctgtcccatgatacctcagcaccatctccggctgcctgtgaggaaaggcatggagctttctggagctaccagctggctccaaatccacccggagatcccaaagatggccccatggggaacagcgggggcaaccacgtggcggtcttctggctctgccttctgtgccgcctgggtttcagcaagccccaggcctttatggatcacacacagtctcatggggtgaagctaacccctgcccaatatcagggcctgtcaggtagcccagctgtactccaggagggagatgaaggctgcaaggccctcataagctttctggagccaaaactccctgctcgcccctcttctgacataccccttgacaacagcagcacagtgaacatggaggcgaatgtggcccagacagaggatggcccccctgaggcagaagtccaggcccttatcctcctggatgaagaagttatggccctcagcccaccctctccacccacagccacctggggctataccactgcctgttgtgtgcgtgggagacaccctcccgcttggctgtgctgcaacacctgcgcacacctgcccaccgcgatgcccaggcccagaggcgtctgcagctgctacagaatggcccaaccactgaggaaggactcgcagctcttcagagcatcctgagcttcagccacgggcagctccggactcccgggaaggctcctgtcacccccttagctgagccacccacccctgagaaagatgcccagaacaagacagaacaattggcttcagaagagacagaaaacaagactggcccttccagagacagtgccaaccagaccacggtcagaattggggtaactgggaagagctgaagtgggggcctggctttactgagatctgctcatattctaaaggcagacgtaattttgtcatgctttgacttatttcactcagaatagcacagttaagaaattccacccagatccagttccacatgttcagcactttcgggggcagagctggcccagcagggtcaagcacagagggagatgataggagggagacagcaggaacttgagggaaagatgaataaaggaattgtgctgagagtaggaaagagtgggggtacatgctggaaggaggggaggagaaaggcaa

SEQ ID NO: 201394 - DNA, 16064 bp, Homo sapiens
  Payload ID: 19747
  Gene Name: zinc finger homeobox 3
  Uniprot ID: Q15911
  ENST ID: ENST00000268489
  CDS Start-End: 674-11785
ccgcgcgtccctgtgcgtccccgggtccctgcgggcgggcgggcgcggtcgccgccgagcaacccggcctgcgcccggcacgactgtagatgtcaggctttgcccggggagccgagcggcagcggggctgtgagtttcaaattaaccttccgctttgttgctgtgtaatgtggatccccgaaggccccccgccccgcccgccccccttccccgggcggtgcgcgctgcaaactgcgagttgggcttcatttacataaagcgattccgggcgggcggcggcagaggaggaggcggcggcggcgggcaggccggggacccggacgccagcgccgcgccccgtgggtgaatccccgccgcgtcccggggacctccctccggggacgggccgaccgccagccctgccgccaccatgagctcccctcccctgtctccgggccccctgctcctgaccagagccacctccgagtcctggggccagcgggaggtggggagcatgccgcctggggtgggtgagctcggggctcgggtgccactggaatttcccgttgttgcgcatggcggcgcggcccccggacctgcaagtgccgcctccctccggaggtgcgcggaggcttggtgtgccaggtccgagcctccgtactgggtgcaatgaaagctccacgcaggccttaccatggaaggctgtgactcgcccgtcgtctcggggaaggacaatgggtgcggtatccctcagcaccagcaatggactgaactcaacagcacccacctccctgacaaacccagtagcatggagcagtccacaggcgagagccacgggcccttggacagcctgagggcccccttcaatgagcgcctcgcggagagcaccgcgtcggccgggcccccctccgagcccgccagcaaggaggtcacctgcaacgaatgttcggcctcctttgccagcctccagacctacatggagcaccactgccccagcgcgcgccccccgccacccctgagagaggagagcgccagcgacaccggtgaggagggggacgaggagagtgacgtggagaacctggccggggagatcgtctaccagccggacggctccgcgtacattgtggagagcctgagccagctgacccagggcgggggcgcctgtgggagtggcagtggcagtgggcctctcccctcgcttttcctgaactctctccctggcgcggggggcaagcaaggggacccttcgtgtgctgcacccgtgtacccgcagatcatcaacactttccacatagcctcatccttcgggaaatggtttgagggcccagaccaggctttcccgaatacctcagccctggcggggctcagccccgtcctgcacagcttccgcgtgtttgacgtgcgacacaaaagcaacaaggattacctgaacagcgacggttctgccaaaagctcctgcgtatccaaagatgttcccaacaatgtggacctgtccaaattcgatggctttgtgctctatggcaagaggaagcccatcctgatgtgtttcttgtgcaaactctcctttgggtacgtccgttcgtttgtgacccacgcggtgcatgaccatcgaatgaccctgagcgaagacgagcggaaaattcttagcaataagaacatctccgctatcatccaagggatcggcaaagacaaggaaccccttgtaagttttctggaaccaaaaaacaaaaactttcaacaccctttagtttccacagctaacctcataggccccggacacagtttttatggtaaatttagtggcattcgaatggaaggggaggaagctctcccagcgggctccgccgctggccccgagcagccccaggctggtctcttgacccccagcaccctgttgaaccttggcgggctcaccagctcggtactgaagacccccattacctcagtccccctggggcctctggcttccagtcctaccaaatcctcagagggcaaggactctggggcggcagaaggagagaagcaggaagtgggcgacggggattgcttctctgagaaggtagagccagccgaagaggaggcggaggaggaagaggaggaggaagaggcggaggaggaggaggaagaagaggaggaggaagaagaggaggaggaagacgagggttgcaaaggactctttccaagcgagttggatgaggaactggaggacaggccccatgaggagcctggggccgcagcaggtagtagcagcaaaaaggaccttgctctctcaaaccaaagcatttctaactcccccttaatgcctaacgtgctccagaccctgtcgaggggcacagcttctactagttctaattctgcttcttcctttgttgtctttgatggtgcgaacaggaggaatcgtttaagctttaacagtgagggcgtcagggccaatgtggcagagggcggcaggaggctggacttcgctgacgaaagtgccaataaagacaatgccacagcaccagaaccaaatgaaagcacagagggtgacgatgggggcttcgttccccatcaccagcacgctggctccctctgcgagcttggggttggggagtgcccctcggggagtggcgtggagtgccccaaatgcgacacggtcctgggctcctcccgctcgctgggcggccacatgaccatgatgcattctcgtaactcgtgtaagacactcaagtgccccaagtgcaactggcactataagtaccagcagaccctggaggcacacatgaaggagaagcacccggagccggggggctcctgtgtctactgcaaaagcgggcagccccacccccggctggcacgaggcgagagctacacgtgtggttacaagcctttccgctgcgaggtgtgtaactactccacaactaccaaaggcaacctcagtattcatatgcagtctgacaagcatctcaacaacatgcagaacctgcagaatggagggggggagcaggtcttcagccacactgccggggcggcggcggcggcggtggctgcggcggcggcggcagccaatatcagtagctcctgcggggccccctcgccgaccaaaccaaaaaccaaacccacctggcggtgcgaggtgtgtgattatgagaccaacgtggccaggaacctccgcattcacatgaccagtgagaagcacatgcataacatgatgttactgcaacagaacatgacccagatccaacacaaccgccacctgggcctcggcagcctgccctcacccgccgaggccgagctctaccaatactacctggcccagaacatgaacctgcccaacctgaagatggacagtgctgcctcggacgcccagttcatgatgagcggattccagctggatcccgccgggcccatggccgccatgacgcctgctctagtgggcggtgagatccccctagacatgcggctcgggggcgggcagctggtgtcagaggagctgatgaacctgggcgagagcttcatccagaccaacgacccgtcgctgaagctcttccagtgcgccgtctgcaacaagttcacgacggacaacctggacatgctgggcctgcacatgaacgtggagcgcagcctgtcggaggacgagtggaaggcggtgatgggggactcataccagtgcaagctctgccgctacaacacccagctcaaggccaacttccagctgcactgcaagacagacaagcacgtgcagaagtaccagctggtggcccacatcaaggagggcggcaaggccaacgagtggaggctcaagtgtgtggccatcggcaaccccgtgcacctcaagtgcaacgcctgtgactactacaccaacagcctggagaagctgcggctgcacacggtcaactccaggcacgaggccagcctgaagttgtacaagcacctgcagcagcatgagagtggtgtagaaggtgagagctgctactaccactgcgttctgtgcaactactccaccaaggccaagctcaacctcatccagcatgtgcgctccatgaagcaccagcgaagcgagagcctgcgaaagctgcagcggctgcagaagggccttccagaggaggacgaggacctggggcagatcttcaccatccgcaggtgcccctccacggacccagaagaagccattgaagatgttgaaggacccagtgaaacagctgctgatccagaggagcttgctaaggaccaagagggcggagcatcgtccagccaagcagagaaggagctgacagattctcctgcaacctccaaacgcatctccttcccaggtagctcagagtctcccctctcttcgaagcgaccaaaaacagctgaggagatcaaaccggagcagatgtaccagtgtccctactgcaagtacagtaatgccgatgtcaaccggctccgggtgcatgccatgacgcagcactcggtgcaacccatgcttcgctgccccctgtgccaggacatgctcaacaacaagatccacctccagctgcacctcacccacctccacagcgtggcacctgactgcgtggagaagctcattatgacggtgaccacccctgagatggtgatgccaagcagcatgttcctcccagcagctgttccagatcgagatgggaattccaatttggaagaggcaggaaagcagcctgaaacctcagaggatctgggaaagaacatcttgccatccgcaagcacagagcaaagcggagatttgaaaccatcccctgctgacccaggctctgtgagagaagactcaggcttcatctgctggaagaaggggtgcaaccaggttttcaaaacttctgctgcccttcagacgcattttaatgaagtgcatgccaagaggcctcagctgccggtgtcagatcgccatgtgtacaagtaccgctgtaatcagtgtagcctggccttcaagaccattgaaaagttgcagctccattctcagtaccatgtgatcagagctgccaccatgtgctgtctttgtcagcgcagtttccgaactttccaggctctgaagaagcaccttgagacaagccacctggagctgagtgaggctgacatccaacagctttatggtggcctgctggccaatggggacctcctggcaatgggagaccccactctggcagaggaccataccataattgttgaggaagacaaggaggaagagagtgacttggaagataaacagagcccaacgggcagtgactctgggtcagtacaagaagactcgggctcagagccaaagagagctctgcctttcagaaaaggtcccaattttactatggaaaagttcctagacccttctcgcccttacaagtgtaccgtctgcaaggaatctttcactcaaaagaatatcctgctagtacactacaattctgtctcccacctgcataagttaaagagagcccttcaagaatcagcaaccggtcagccagaacccaccagcagcccagacaacaaaccttttaagtgtaacacttgtaatgtggcctacagccagagttccactctggagatccatatgaggtctgtgttacatcaaaccaaggcccgggcagccaagctggaggctgcaagtggcagcagcaatgggactgggaacagcagcagtatttccttgagctcctccacgccaagtcctgtgagcaccagtggcagtaacacctttaccacctccaatccaagcagtgctggcattgctccaagctctaacttactaagccaagtgcccactgagagtgtagggatgccacccctggggaatcctattggtgccaacattgcttccccttcagagcccaaagaggccaatcggaagaaactggcagatatgattgcatccaggcagcagcaacaacagcagcagcaacagcaacaacaacaacaacaacaacaacaacaagcacaaacgctggcccaggcccaggctcaagttcaagctcacctgcagcaggagctgcagcaacaggctgccctgatccagtctcagctgtttaaccccaccctccttcctcacttccccatgacaactgagaccctgctgcaactacagcagcagcagcacctcctcttccctttctacatccccagtgctgagttccagcttaaccccgaggtgagcttgccagtgaccagtggggcactgacactgactgggacaggcccaggcctgctggaagatctgaaggctcaggttcaggtcccacagcagagccatcagcagatcttgccgcagcagcagcagaaccaactctctatagcccagagtcactctgccctccttcagccaagccagcaccccgaaaagaagaacaaattggtcatcaaagaaaaggaaaaagaaagccagagagagagggacagcgccgaggggggagagggcaacaccggtccgaaggaaacactgccagatgccttgaaggccaaagagaagaaagagttggcaccagggggtggttctgagccttccatgctccctccacgcattgcttcagatgccagagggaacgccaccaaggccctgctggagaactttggctttgagttggtcatccagtataatgagaacaagcagaaggtgcagaaaaagaatgggaagactgaccagggagagaacctggaaaagctcgagtgtgactcctgcggcaagttgttttccaacatcttgattttaaagagtcatcaagagcacgttcatcagaattactttcctttcaaacagctcgagaggtttgccaaacagtacagagaccactacgataaactgtacccactgaggccccagaccccagagccaccaccacctccccctccaccccctccacccccacttccggcagcgccgcctcagccggcgtccacaccagccatccccgcatcagccccacccatcacctcacctacaattgcaccggcccagccatcagtgccgctcacccagctctccatgccgatggagctgcccatcttctcgccgctgatgatgcagacgatgccgctgcagaccttgccggctcagctacccccgcagctgggacctgtggagcctctgcctgcggacctggcccaactctaccagcatcagctcaatccaaccctgctccagcagcagaacaagaggcctcgcaccaggatcacagatgatcagctccgagtcttgcggcaatattttgacattaacaactcccccagtgaagagcaaataaaagagatggcagacaagtccgggttgccccagaaagtgatcaagcactggttcaggaacactctcttcaaagagaggcagcgtaacaaggactccccttacaacttcagtaatcctcctatcaccagcctggaggagctcaagattgactcccggcccccttcgccggaacctccaaagcaggagtactggggaagcaagaggtcttcaagaacaaggtttacggactaccagctgagggtcttacaggacttcttcgatgccaatgcttacccaaaggatgatgaatttgagcaactctctaatttactgaaccttccaacccgagtgatagtggtgtggtttcagaatgcccgacagaaggccaggaagaattatgagaatcagggagagggcaaagatggagagcggcgtgagcttacaaatgatagatacattcgaacaagcaacttgaactaccagtgcaaaaaatgtagcctggtgtttcagcgcatctttgatctcatcaagcaccagaagaagctgtgttacaaggatgaggatgaggaggggcaggacgacagccaaaatgaggattccatggatgccatggaaatcctgacgcctaccagctcatcctgcagtaccccgatgccctcacaggcttacagcgccccagcaccatcagccaataatacagcttcctccgctttcttgcagcttacagcggaggctgaggaactggccaccttcaattcaaaaacagaggcaggcgatgagaaaccaaagctggcggaagctcccagtgcacagccaaaccaaacccaagaaaagcaaggacaaccaaagccagagctgcagcagcaagagcagcccgagcagaagaccaacactccccagcagaagctcccccagctggtgtccctgccttcgttgccacagcctcctccacaagcgccccctccacagtgccccttaccccagtcgagccccagtccttcccagctctcccacctgcccctcaagcccctccacacatcaactcctcaacagctcgcaaacctacctcctcagctaatcccctaccagtgtgaccagtgtaagttggcatttccgtcatttgagcactggcaggagcatcagcagctccacttcctgagcgcgcagaaccagttcatccacccccagtttttggacaggtccctggatatgcctttcatgctctttgatcccagtaacccactcctggccagccagctgctctctggggccatacctcagattccagcaagctcagccacttctccttcaactccaacctccacaatgaacactctcaagaggaagctggaggaaaaggccagtgcaagccctggcgaaaacgacagtgggacaggaggagaagagcctcagagagacaagcgtttgagaacaaccatcacaccggaacaactagaaattctctaccagaagtatctactggattccaatccgactcgaaagatgttggatcacattgcacacgaggtgggcttgaagaaacgtgtggtacaagtctggtttcagaacacccgagctcgggaaaggaaaggacagttccgggctgtaggcccagcgcaggcccacaggagatgccctttttgcagagcgctcttcaaagccaagactgctcttgaggctcatatccggtcccgtcactggcatgaagccaagagagctggctacaacctaactctgtctgcgatgctcttagactgtgatgggggactccagatgaaaggagatatttttgacggaactagcttttcccacctacccccaagcagtagtgatggtcagggtgtccccctctcacctgtgagtaaaaccatggaattgtcacccagaactcttctaagcccttcctccattaaggtggaagggattgaagactttgaaagcccctccatgtcctcagttaatctaaactttgaccaaactaagctggacaacgatgactgttcctctgtcaacacagcaatcacagataccacaactggagacgagggcaacgcagataacgacagtgcaacgggaatagcaactgaaaccaaatcctcttctgcacccaacgaagggttgaccaaagcggccatgatggcaatgtctgagtatgaagatcggttgtcatctggtctggtcagcccggccccgagcttttatagcaaggaatatgacaatgaaggtacagtggactacagtgaaacctcaagccttgcagatccctgctccccgagtcctggtgcgagtggatctgcaggcaaatctggtgacagcggagatcggcctgggcagaaacgttttcgcactcaaatgaccaatctgcagctgaaggtcctcaagtcatgctttaatgactacaggacacccactatgctagaatgtgaggtcctgggcaatgacattggactgccaaagagagtcgttcaggtctggttccagaatgcccgggcaaaagaaaagaagtccaagttaagcatggccaagcattttggtataaaccaaacgagttatgagggacccaaaacagagtgcactttgtgtggcatcaagtacagcgctcggctgtctgtacgtgaccatatcttttcccaacagcatatctccaaagttaaagacaccattggaagccagctggacaaggagaaagaatactttgacccagccaccgtacgtcagttgatggctcaacaagagttggaccggattaaaaaggccaacgaggtccttggactggcagctcagcagcaagggatgtttgacaacacccctcttcaggcccttaaccttcctacagcatatccagcgctccagggcattcctcctgtgttgctcccgggcctcaacagcccctccttgccaggctttactccatccaacacagctttaacgtctcctaagccgaacttgatgggtctgcccagcacaactgttccttcccctggcctccccacttctggattaccaaataaaccgtcctcagcgtcgctgagctccccaaccccagcacaagccacgatggcgatgggccctcagcaacccccccagcagcagcagcagcagcagcaaccacaggtgcagcagcctcccccgccgccagcagcccagccgccacccacaccacagctcccactgcaacagcagcagcaacgcaaggacaaagacagtgagaaagtaaaggagaaggaaaaggcacacaaagggaaaggggaacccctgcctgtccccaagaaggagaaaggagaggcccccacggcaactgcagccacgatctcagccccgctgcccaccatggagtatgcggtagaccctgcacagctgcaggccctgcaggccgcgttgacttcggaccccacagcattgctcacaagccagttccttccttactttgtaccaggcttttctccttattatgctccccagatccctggcgccctgcagagcgggtacctgcagcctatgtatggcatggaaggcctgttcccctacagccctgcactgtcgcaggccctgatggggctgtccccaggctccctactgcagcagtaccagcaataccagcagagtctgcaggaggcaattcagcagcagcagcagcggcaactacagcagcagcagcagcaaaaagtgcagcagcagcagcccaaagcaagccaaaccccagtcccccccggggctccttccccagacaaagaccctgccaaagaatcccccaaaccagaagaacagaaaaacaccccccgtgaggtgtcccccctcctgccgaaactccctgaagagccagaagcagaaagcaaaagtgcggactccctctacgaccccttcattgttccaaaggtgcagtacaagttggtctgccgcaagtgccaggcgggcttcagcgacgaggaggcagcgaggagccacctgaagtccctctgcttcttcggccagtctgtggtgaacctgcaagagatggtgcttcacgtccccaccggcggcggcggcggtggcagtggcggcggcggcggcggtggcggcggcggcggcggcggcggctcgtaccactgcctggcgtgcgagagcgcgctctgtggggaggaagctctgagtcaacatctcgagtcggccttgcacaaacacagaacaatcacgagagcagcaagaaacgccaaagagcaccctagtttattacctcactctgcctgcttccccgatcctagcaccgcatctacctcgcagtctgccgctcactcaaacgacagcccccctcccccgtcggccgccgccccctcctccgcttccccccacgcctccaggaagtcttggccgcaagtggtctcccgggcttcggcagcgaagcccccttcttttcctcctctctcctcatcttcaacggttacctcaagttcatgcagcacctcaggggttcagccctcgatgccaacagacgactattcggaggagtctgacacggatctcagccaaaagtccgacggaccggcgagcccggtggagggtcccaaagaccccagctgccccaaggacagtggtctgaccagtgtaggaacggacaccttcagattgtaagctttgaagatgaacaatacaaacaaatgaatttaaatacaaaaattaataacaaaccaatttcaaaaatagactaactgcaattccaaagcttctaaccaaaaaacaaaaaaaaaaaaaaaaagaaaaaaaagaaaaagcgtgggttgttttcccatatacctatctatgccggtgattttacattcttgtctttttcttttcttttaatattaaaaaaaaaaaaaaagccctaaccctgttacattgtgtccttttgaaggtactattggtctgggaaacagaagtccgcagggcctccctaatgtctttggagcttaaaccccttgtatatttgccccttttcaataaacgccccacgctgatagcacagaggagcccggcatgcactgtatgggaaagcagtccaccttgttacagttttaaatttcttgctatcttagcattcagataccaatggcttgctaaaagaaaaaaagaaatgtaatgtctttttattctcaggtcaatcgctcacactttgttttcagaatcattgttttatatattattgttttttcagtttttttttttttttttgttccagaaaagattttttgttttgttaacttaaaaatgggcagaaagtattcaagaaaaacaatgtgaactgctttagctttctggggatttttaaggatagcttttctgctgaagccaatttcaaggggaaaagttaagcactcccactttcaaaaaaaaaaaaaaataataacccacacacacaaagagtgttgaggacttgtagcttaaaaaaaataagttttaaaaactgactttctgtatttatgatagatatgaccatttttggtgttgagtagattgttgcattggaaatgaactgaagcagtatggtagatttaaaaggaaaaaaaaaaaaaaaccttttgtgtacatttagctttttgtatggtccagctgacagctcctcatttgatgttgtcttgttcattcctagcagatgatagattgcaatccgttgattcgcctaagcttttctccccttgtcccttaattccactttctctttcttgtcccttaattccactttctctttccttctcccacctcccgtcctataatctcccacttaaggtagctgccttcatttcttagagggagctgcagaattattttataaaactaaagaaagaatttcaagggattctaggggtcattaggatcctcacagattatttttggttggggagttgaaactttttaaaggcatataattctagttacctgtgtctgttagctttgtgcatttattttttatttatccttcttttggcttttttttctttgtaccccttcttttcctccttgtttggtaggagcttcaaatattctttttttttctatactaaaggatttgtttccatttgtgtaattggctgtgtacttttcttttctaaaaaaagtttttggttagggatttggtttttggttttgtgtttgttttttctttcctctctcagaaaaaaaaatttcatgctttaaataaaatccaaagacacaccctttcactgctgatgcagaaaaaagggaaagggttcttgttacttgagaatttgtttctgatttaaacaaacaagacttagtttaataaaagaaagagaaaaacaaaagattcccaggttgttatgtgcttcttctgcaagcagagaggcaaatgttaatgacaattccatataccaaaagacacattttttacttcaaagttttgtccttgtgttaggcagtctgagcagcgagtgatccagagcgcagccaacaaagcagcagatagcagtgtacagaaagcaaaaaaggaactgtatgtgaggcacttgtttctgttaatatccatattcctgttaacacacaccctttctcatgtaaaaagaaaaataaataaatggtctgaactttgaaaactttgtgctgctaaaacatagattttggagacaaataaatagatgctttgctgtttcactttcatagctaaacatcaacagaaaccatctccccttgcccccaaagtgtgaaatccttcttcccttcgttttcttccttatgtttcaaaagggaactttgaagactgtgaatacaggttccattggtcacctttcgggcttctttccccagtgctgaagccactcatcgactttgcaaaagactggagcattccaagatctgaaaatggattttttttctttttttcttttttagccgggactattttatttttatgaatttgtttttagtttaatgaaatagtagatcctgaaatgttgtacatatttctaactaggctgatgcacagtgcaaattccttttttaattgttttttttaagtagaaatactaaagaaagaataccatctaactattcataccagtatccagttgtagcataaggtgtcaaaagcaagtacgcaaaacatttactgttttaacaagctatttccttttaacaagaaatcttgtatttcttcctgtgtttgagatgaacatttttaaattttaaagttgtacagttttttgttttccattattttatcttgtttgtaactctatgaaatatatatatatatattttttgccatttaactgttgtatgttactctgtgtctgtaccatatagaaaaaaaattgtttttgtttttggttctctatgtgatatcagttaacaatgtaacactagctttacctgtcaaattctgctaggtcttctctgaaaacgttgtttttaaaaatgatattgcttggtaatagtgcaatttctatccttttccctcccccctcaacttttaagttcttttctttataattttgctgccccctccctgatggtttgggtttttgtttttgtttttgtttttttttttcatggagctactatgccatcctccctctgtgaggcagagtgactgtcagtgttttgttatgccatgccttgagctgtgggtgtttggcgacaataaggtggttgaatagattggctgagcacacttccacccacctagtgttctcagaggggttatgtgattgtttcaacctggagtgggttgcacccttaatgctttcctctgcaactaaaccgcccacatatatgttcattgaaaaaagtaagaataattctcagcactaacccagaagtagcaaagcagtcagtgatggtgaacattagaggtcaaacatgagttagatgtttgtgggctgacagccatcgtggctatgaccagtactatttacaaagcatgaattcactacaatgctcaactgtttgtttagctttatctcacttggggaatttattcctgtctgctgcattgtaggtagctgggtaggatatatttccacttgctttttaaattagttcttcacctccattgacactcgttttttggttttctccctatagtgtgggttggtgctagacaccagtctgacccacagaatgggagttatttcatccatctttcctccatccttccaaaaaccacatatctacacaaggaaaaatttaatacatctaggaattttttttttaattacaagctatttaaagagatgaatgtggccaaagttttacacaattgaaaataaagtaaaacagacggcatgtgtttaaacctgagtttatcaggcatggcaggaagttgcaggagagagaggcagtgacccaagccagtgcacttgatgttcatggacatatattttttttaaataataaattaaaacattttaaatagaagcataaattgagttgtttgttggcgctgagatactgcccactgtgaaacaaagctttgactagttttttgtttgtttactttcttcaggggggaggggggcaagtttgggtaggaaagaaagcataaatgaacgtgaccctgaggtgaagaggtatatgaacagcctttgcaatgtacaaaaagaaaaaaaaacaaaaaacaacaaaaaaaatagagcaagtgaaaccaaaaatgatgttcttggtgtttttctataatgtagtcttgttagcttttttgttactgtaacaatgctgatctcgaactgtaccaaaatacatggagactaacaaacagaaccacatggaactttcaaactgaaaaaaaaatttgtcacaaaaactttgttgtcatagttaagttgattgtagatggtaattgaatatactcctttgaaaatatttcatcaagtatgtttcctgctcattgtgatacattaaaaaaaaaatatgagcaaaa

SEQ ID NO: 201395 - DNA, 13841 bp, Homo sapiens
  Payload ID: 19747
  Gene Name: zinc finger homeobox 3
  Uniprot ID: Q15911
  ENST ID: ENST00000397992
  CDS Start-End: 1193-9562
aatttaaagtggtctctattcgaagtctctgctctttcacttaaacctttactctaagctgtccccctccactaatgcccccattctttggagatgctcttttcctagttaatttaaacattgctgcgtttgcttagagagagagagagagagagagagagagagagagagagaaaggggaaaataataagaaagaaaagagaagggggggaagaagaaaggaaaaaaaaaatcttaaaaagattcttagccaggttcctattgttgctcctatgcattccacttctcggtgtgtgtgtgcgtgtgtgtgtgtgtgtgtgtgtgtgcgcgcgctcgtgtgtgtgtcgtgtgtgtgtgtgtgtgtgtttttaatacatgcataaacttttggagcctctctccctcttctaggctcttctcccatcctctcttcctgctctccttgccctgctcatcactttcccctgtttttttttttttttcctcccttcctcccctctgcctccctccacctcccccttttcttttttgctgaatcttattgatccagaaggtggctaattagcccttcccgtcgtgcctgggtaatgaagcacatgcgcactgaattaatcacagccattttttgcaggaaactaattagcagaataaagatccaaagacttttttttcttttcactcatcagctcccacttccagcgcgtcccctccgaccgctgcagccgccaccgccgccgcctcctcctcctcctcctcccggccgcagccgccgccgccgcctgctttgcatcccaattacagcctagagccgctgccgccgccgccgccgcttctcttccgtggcccctgcccgctccgggggctgtaaactccccgccaaccatgctgctcggcggcagcggcggcggcggctccggctccccggctgcggccgcctcccgccccgggctccgccgagcgcgctccagctccgccgccgccgccgccgccgccgccgccgccagcagcgcgtcctccgccgccgccgacccccgccagccgccgctgctgccttgatgggctccgcggcccgagcgcctcttttcgggattaaaagcgccgccagctcccgccgccgccgccgtcgccagcagcgccgctgcagccgccgccgccggagaagcaaccgctgggcggtgagatccccctagacatgcggctcgggggcgggcagctggtgtcagaggagctgatgaacctgggcgagagcttcatccagaccaacgacccgtcgctgaagctcttccagtgcgccgtctgcaacaagttcacgacggacaacctggacatgctgggcctgcacatgaacgtggagcgcagcctgtcggaggacgagtggaaggcggtgatgggggactcataccagtgcaagctctgccgctacaacacccagctcaaggccaacttccagctgcactgcaagacagacaagcacgtgcagaagtaccagctggtggcccacatcaaggagggcggcaaggccaacgagtggaggctcaagtgtgtggccatcggcaaccccgtgcacctcaagtgcaacgcctgtgactactacaccaacagcctggagaagctgcggctgcacacggtcaactccaggcacgaggccagcctgaagttgtacaagcacctgcagcagcatgagagtggtgtagaaggtgagagctgctactaccactgcgttctgtgcaactactccaccaaggccaagctcaacctcatccagcatgtgcgctccatgaagcaccagcgaagcgagagcctgcgaaagctgcagcggctgcagaagggccttccagaggaggacgaggacctggggcagatcttcaccatccgcaggtgcccctccacggacccagaagaagccattgaagatgttgaaggacccagtgaaacagctgctgatccagaggagcttgctaaggaccaagagggcggagcatcgtccagccaagcagagaaggagctgacagattctcctgcaacctccaaacgcatctccttcccaggtagctcagagtctcccctctcttcgaagcgaccaaaaacagctgaggagatcaaaccggagcagatgtaccagtgtccctactgcaagtacagtaatgccgatgtcaaccggctccgggtgcatgccatgacgcagcactcggtgcaacccatgcttcgctgccccctgtgccaggacatgctcaacaacaagatccacctccagctgcacctcacccacctccacagcgtggcacctgactgcgtggagaagctcattatgacggtgaccacccctgagatggtgatgccaagcagcatgttcctcccagcagctgttccagatcgagatgggaattccaatttggaagaggcaggaaagcagcctgaaacctcagaggatctgggaaagaacatcttgccatccgcaagcacagagcaaagcggagatttgaaaccatcccctgctgacccaggctctgtgagagaagactcaggcttcatctgctggaagaaggggtgcaaccaggttttcaaaacttctgctgcccttcagacgcattttaatgaagtgcatgccaagaggcctcagctgccggtgtcagatcgccatgtgtacaagtaccgctgtaatcagtgtagcctggccttcaagaccattgaaaagttgcagctccattctcagtaccatgtgatcagagctgccaccatgtgctgtctttgtcagcgcagtttccgaactttccaggctctgaagaagcaccttgagacaagccacctggagctgagtgaggctgacatccaacagctttatggtggcctgctggccaatggggacctcctggcaatgggagaccccactctggcagaggaccataccataattgttgaggaagacaaggaggaagagagtgacttggaagataaacagagcccaacgggcagtgactctgggtcagtacaagaagactcgggctcagagccaaagagagctctgcctttcagaaaaggtcccaattttactatggaaaagttcctagacccttctcgcccttacaagtgtaccgtctgcaaggaatctttcactcaaaagaatatcctgctagtacactacaattctgtctcccacctgcataagttaaagagagcccttcaagaatcagcaaccggtcagccagaacccaccagcagcccagacaacaaaccttttaagtgtaacacttgtaatgtggcctacagccagagttccactctggagatccatatgaggtctgtgttacatcaaaccaaggcccgggcagccaagctggaggctgcaagtggcagcagcaatgggactgggaacagcagcagtatttccttgagctcctccacgccaagtcctgtgagcaccagtggcagtaacacctttaccacctccaatccaagcagtgctggcattgctccaagctctaacttactaagccaagtgcccactgagagtgtagggatgccacccctggggaatcctattggtgccaacattgcttccccttcagagcccaaagaggccaatcggaagaaactggcagatatgattgcatccaggcagcagcaacaacagcagcagcaacagcaacaacaacaacaacaacaacaacaacaagcacaaacgctggcccaggcccaggctcaagttcaagctcacctgcagcaggagctgcagcaacaggctgccctgatccagtctcagctgtttaaccccaccctccttcctcacttccccatgacaactgagaccctgctgcaactacagcagcagcagcacctcctcttccctttctacatccccagtgctgagttccagcttaaccccgaggtgagcttgccagtgaccagtggggcactgacactgactgggacaggcccaggcctgctggaagatctgaaggctcaggttcaggtcccacagcagagccatcagcagatcttgccgcagcagcagcagaaccaactctctatagcccagagtcactctgccctccttcagccaagccagcaccccgaaaagaagaacaaattggtcatcaaagaaaaggaaaaagaaagccagagagagagggacagcgccgaggggggagagggcaacaccggtccgaaggaaacactgccagatgccttgaaggccaaagagaagaaagagttggcaccagggggtggttctgagccttccatgctccctccacgcattgcttcagatgccagagggaacgccaccaaggccctgctggagaactttggctttgagttggtcatccagtataatgagaacaagcagaaggtgcagaaaaagaatgggaagactgaccagggagagaacctggaaaagctcgagtgtgactcctgcggcaagttgttttccaacatcttgattttaaagagtcatcaagagcacgttcatcagaattactttcctttcaaacagctcgagaggtttgccaaacagtacagagaccactacgataaactgtacccactgaggccccagaccccagagccaccaccacctccccctccaccccctccacccccacttccggcagcgccgcctcagccggcgtccacaccagccatccccgcatcagccccacccatcacctcacctacaattgcaccggcccagccatcagtgccgctcacccagctctccatgccgatggagctgcccatcttctcgccgctgatgatgcagacgatgccgctgcagaccttgccggctcagctacccccgcagctgggacctgtggagcctctgcctgcggacctggcccaactctaccagcatcagctcaatccaaccctgctccagcagcagaacaagaggcctcgcaccaggatcacagatgatcagctccgagtcttgcggcaatattttgacattaacaactcccccagtgaagagcaaataaaagagatggcagacaagtccgggttgccccagaaagtgatcaagcactggttcaggaacactctcttcaaagagaggcagcgtaacaaggactccccttacaacttcagtaatcctcctatcaccagcctggaggagctcaagattgactcccggcccccttcgccggaacctccaaagcaggagtactggggaagcaagaggtcttcaagaacaaggtttacggactaccagctgagggtcttacaggacttcttcgatgccaatgcttacccaaaggatgatgaatttgagcaactctctaatttactgaaccttccaacccgagtgatagtggtgtggtttcagaatgcccgacagaaggccaggaagaattatgagaatcagggagagggcaaagatggagagcggcgtgagcttacaaatgatagatacattcgaacaagcaacttgaactaccagtgcaaaaaatgtagcctggtgtttcagcgcatctttgatctcatcaagcaccagaagaagctgtgttacaaggatgaggatgaggaggggcaggacgacagccaaaatgaggattccatggatgccatggaaatcctgacgcctaccagctcatcctgcagtaccccgatgccctcacaggcttacagcgccccagcaccatcagccaataatacagcttcctccgctttcttgcagcttacagcggaggctgaggaactggccaccttcaattcaaaaacagaggcaggcgatgagaaaccaaagctggcggaagctcccagtgcacagccaaaccaaacccaagaaaagcaaggacaaccaaagccagagctgcagcagcaagagcagcccgagcagaagaccaacactccccagcagaagctcccccagctggtgtccctgccttcgttgccacagcctcctccacaagcgccccctccacagtgccccttaccccagtcgagccccagtccttcccagctctcccacctgcccctcaagcccctccacacatcaactcctcaacagctcgcaaacctacctcctcagctaatcccctaccagtgtgaccagtgtaagttggcatttccgtcatttgagcactggcaggagcatcagcagctccacttcctgagcgcgcagaaccagttcatccacccccagtttttggacaggtccctggatatgcctttcatgctctttgatcccagtaacccactcctggccagccagctgctctctggggccatacctcagattccagcaagctcagccacttctccttcaactccaacctccacaatgaacactctcaagaggaagctggaggaaaaggccagtgcaagccctggcgaaaacgacagtgggacaggaggagaagagcctcagagagacaagcgtttgagaacaaccatcacaccggaacaactagaaattctctaccagaagtatctactggattccaatccgactcgaaagatgttggatcacattgcacacgaggtgggcttgaagaaacgtgtggtacaagtctggtttcagaacacccgagctcgggaaaggaaaggacagttccgggctgtaggcccagcgcaggcccacaggagatgccctttttgcagagcgctcttcaaagccaagactgctcttgaggctcatatccggtcccgtcactggcatgaagccaagagagctggctacaacctaactctgtctgcgatgctcttagactgtgatgggggactccagatgaaaggagatatttttgacggaactagcttttcccacctacccccaagcagtagtgatggtcagggtgtccccctctcacctgtgagtaaaaccatggaattgtcacccagaactcttctaagcccttcctccattaaggtggaagggattgaagactttgaaagcccctccatgtcctcagttaatctaaactttgaccaaactaagctggacaacgatgactgttcctctgtcaacacagcaatcacagataccacaactggagacgagggcaacgcagataacgacagtgcaacgggaatagcaactgaaaccaaatcctcttctgcacccaacgaagggttgaccaaagcggccatgatggcaatgtctgagtatgaagatcggttgtcatctggtctggtcagcccggccccgagcttttatagcaaggaatatgacaatgaaggtacagtggactacagtgaaacctcaagccttgcagatccctgctccccgagtcctggtgcgagtggatctgcaggcaaatctggtgacagcggagatcggcctgggcagaaacgttttcgcactcaaatgaccaatctgcagctgaaggtcctcaagtcatgctttaatgactacaggacacccactatgctagaatgtgaggtcctgggcaatgacattggactgccaaagagagtcgttcaggtctggttccagaatgcccgggcaaaagaaaagaagtccaagttaagcatggccaagcattttggtataaaccaaacgagttatgagggacccaaaacagagtgcactttgtgtggcatcaagtacagcgctcggctgtctgtacgtgaccatatcttttcccaacagcatatctccaaagttaaagacaccattggaagccagctggacaaggagaaagaatactttgacccagccaccgtacgtcagttgatggctcaacaagagttggaccggattaaaaaggccaacgaggtccttggactggcagctcagcagcaagggatgtttgacaacacccctcttcaggcccttaaccttcctacagcatatccagcgctccagggcattcctcctgtgttgctcccgggcctcaacagcccctccttgccaggctttactccatccaacacagctttaacgtctcctaagccgaacttgatgggtctgcccagcacaactgttccttcccctggcctccccacttctggattaccaaataaaccgtcctcagcgtcgctgagctccccaaccccagcacaagccacgatggcgatgggccctcagcaacccccccagcagcagcagcagcagcagcaaccacaggtgcagcagcctcccccgccgccagcagcccagccgccacccacaccacagctcccactgcaacagcagcagcaacgcaaggacaaagacagtgagaaagtaaaggagaaggaaaaggcacacaaagggaaaggggaacccctgcctgtccccaagaaggagaaaggagaggcccccacggcaactgcagccacgatctcagccccgctgcccaccatggagtatgcggtagaccctgcacagctgcaggccctgcaggccgcgttgacttcggaccccacagcattgctcacaagccagttccttccttactttgtaccaggcttttctccttattatgctccccagatccctggcgccctgcagagcgggtacctgcagcctatgtatggcatggaaggcctgttcccctacagccctgcactgtcgcaggccctgatggggctgtccccaggctccctactgcagcagtaccagcaataccagcagagtctgcaggaggcaattcagcagcagcagcagcggcaactacagcagcagcagcagcaaaaagtgcagcagcagcagcccaaagcaagccaaaccccagtcccccccggggctccttccccagacaaagaccctgccaaagaatcccccaaaccagaagaacagaaaaacaccccccgtgaggtgtcccccctcctgccgaaactccctgaagagccagaagcagaaagcaaaagtgcggactccctctacgaccccttcattgttccaaaggtgcagtacaagttggtctgccgcaagtgccaggcgggcttcagcgacgaggaggcagcgaggagccacctgaagtccctctgcttcttcggccagtctgtggtgaacctgcaagagatggtgcttcacgtccccaccggcggcggcggcggtggcagtggcggcggcggcggcggtggcggcggcggcggcggcggcggctcgtaccactgcctggcgtgcgagagcgcgctctgtggggaggaagctctgagtcaacatctcgagtcggccttgcacaaacacagaacaatcacgagagcagcaagaaacgccaaagagcaccctagtttattacctcactctgcctgcttccccgatcctagcaccgcatctacctcgcagtctgccgctcactcaaacgacagcccccctcccccgtcggccgccgccccctcctccgcttccccccacgcctccaggaagtcttggccgcaagtggtctcccgggcttcggcagcgaagcccccttcttttcctcctctctcctcatcttcaacggttacctcaagttcatgcagcacctcaggggttcagccctcgatgccaacagacgactattcggaggagtctgacacggatctcagccaaaagtccgacggaccggcgagcccggtggagggtcccaaagaccccagctgccccaaggacagtggtctgaccagtgtaggaacggacaccttcagattgtaagctttgaagatgaacaatacaaacaaatgaatttaaatacaaaaattaataacaaaccaatttcaaaaatagactaactgcaattccaaagcttctaaccaaaaaacaaaaaaaaaaaaaaaaagaaaaaaaagaaaaagcgtgggttgttttcccatatacctatctatgccggtgattttacattcttgtctttttcttttcttttaatattaaaaaaaaaaaaaaagccctaaccctgttacattgtgtccttttgaaggtactattggtctgggaaacagaagtccgcagggcctccctaatgtctttggagcttaaaccccttgtatatttgccccttttcaataaacgccccacgctgatagcacagaggagcccggcatgcactgtatgggaaagcagtccaccttgttacagttttaaatttcttgctatcttagcattcagataccaatggcttgctaaaagaaaaaaagaaatgtaatgtctttttattctcaggtcaatcgctcacactttgttttcagaatcattgttttatatattattgttttttcagtttttttttttttttttgttccagaaaagattttttgttttgttaacttaaaaatgggcagaaagtattcaagaaaaacaatgtgaactgctttagctttctggggatttttaaggatagcttttctgctgaagccaatttcaaggggaaaagttaagcactcccactttcaaaaaaaaaaaaaaataataacccacacacacaaagagtgttgaggacttgtagcttaaaaaaaataagttttaaaaactgactttctgtatttatgatagatatgaccatttttggtgttgagtagattgttgcattggaaatgaactgaagcagtatggtagatttaaaaggaaaaaaaaaaaaaaaccttttgtgtacatttagctttttgtatggtccagctgacagctcctcatttgatgttgtcttgttcattcctagcagatgatagattgcaatccgttgattcgcctaagcttttctccccttgtcccttaattccactttctctttcttgtcccttaattccactttctctttccttctcccacctcccgtcctataatctcccacttaaggtagctgccttcatttcttagagggagctgcagaattattttataaaactaaagaaagaatttcaagggattctaggggtcattaggatcctcacagattatttttggttggggagttgaaactttttaaaggcatataattctagttacctgtgtctgttagctttgtgcatttattttttatttatccttcttttggcttttttttctttgtaccccttcttttcctccttgtttggtaggagcttcaaatattctttttttttctatactaaaggatttgtttccatttgtgtaattggctgtgtacttttcttttctaaaaaaagtttttggttagggatttggtttttggttttgtgtttgttttttctttcctctctcagaaaaaaaaatttcatgctttaaataaaatccaaagacacaccctttcactgctgatgcagaaaaaagggaaagggttcttgttacttgagaatttgtttctgatttaaacaaacaagacttagtttaataaaagaaagagaaaaacaaaagattcccaggttgttatgtgcttcttctgcaagcagagaggcaaatgttaatgacaattccatataccaaaagacacattttttacttcaaagttttgtccttgtgttaggcagtctgagcagcgagtgatccagagcgcagccaacaaagcagcagatagcagtgtacagaaagcaaaaaaggaactgtatgtgaggcacttgtttctgttaatatccatattcctgttaacacacaccctttctcatgtaaaaagaaaaataaataaatggtctgaactttgaaaactttgtgctgctaaaacatagattttggagacaaataaatagatgctttgctgtttcactttcatagctaaacatcaacagaaaccatctccccttgcccccaaagtgtgaaatccttcttcccttcgttttcttccttatgtttcaaaagggaactttgaagactgtgaatacaggttccattggtcacctttcgggcttctttccccagtgctgaagccactcatcgactttgcaaaagactggagcattccaagatctgaaaatggattttttttctttttttcttttttagccgggactattttatttttatgaatttgtttttagtttaatgaaatagtagatcctgaaatgttgtacatatttctaactaggctgatgcacagtgcaaattccttttttaattgttttttttaagtagaaatactaaagaaagaataccatctaactattcataccagtatccagttgtagcataaggtgtcaaaagcaagtacgcaaaacatttactgttttaacaagctatttccttttaacaagaaatcttgtatttcttcctgtgtttgagatgaacatttttaaattttaaagttgtacagttttttgttttccattattttatcttgtttgtaactctatgaaatatatatatatatattttttgccatttaactgttgtatgttactctgtgtctgtaccatatagaaaaaaaattgtttttgtttttggttctctatgtgatatcagttaacaatgtaacactagctttacctgtcaaattctgctaggtcttctctgaaaacgttgtttttaaaaatgatattgcttggtaatagtgcaatttctatccttttccctcccccctcaacttttaagttcttttctttataattttgctgccccctccctgatggtttgggtttttgtttttgtttttgtttttttttttcatggagctactatgccatcctccctctgtgaggcagagtgactgtcagtgttttgttatgccatgccttgagctgtgggtgtttggcgacaataaggtggttgaatagattggctgagcacacttccacccacctagtgttctcagaggggttatgtgattgtttcaacctggagtgggttgcacccttaatgctttcctctgcaactaaaccgcccacatatatgttcattgaaaaaagtaagaataattctcagcactaacccagaagtagcaaagcagtcagtgatggtgaacattagaggtcaaacatgagttagatgtttgtgggctgacagccatcgtggctatgaccagtactatttacaaagcatgaattcactacaatgctcaactgtttgtttagctttatctcacttggggaatttattcctgtctgctgcattgtaggtagctgggtaggatatatttccacttgctttttaaattagttcttcacctccattgacactcgttttttggttttctccctatagtgtgggttggtgctagacaccagtctgacccacagaatgggagttatttcatccatctttcctccatccttccaaaaaccacatatctacacaaggaaaaatttaatacatctaggaattttttttttaattacaagctatttaaagagatgaatgtggccaaagttttacacaattgaaaataaagtaaaacagacggcatgtgtttaaacctgagtttatcaggcatggcaggaagttgcaggagagagaggcagtgacccaagccagtgcacttgatgttcatggacatatattttttttaaataataaattaaaacattttaaatagaagcataaattgagttgtttgttggcgctgagatactgcccactgtgaaacaaagctttgactagttttttgtttgtttactttcttcaggggggaggggggcaagtttgggtaggaaagaaagcataaatgaacgtgaccctgaggtgaagaggtatatgaacagcctttgcaatgtacaaaaagaaaaaaaaacaaaaaacaacaaaaaaaatagagcaagtgaaaccaaaaatgatgttcttggtgtttttctataatgtagtcttgttagcttttttgttactgtaacaatgctgatctcgaactgtaccaaaatacatggagactaacaaacagaaccacatggaactttcaaactgaaaaaaaaatttgtcacaaaaactttgttgtcatagttaagttgattgtagatggtaattgaatatactcctttgaaaatatttcatcaagtatgtttcctgctcattgtgatacattaaaaaaaaaatatgagcaaaa

SEQ ID NO: 201396 - DNA, 561 bp, Homo sapiens
  Payload ID: 19748
  Gene Name: zinc finger homeobox 4
  ENST ID: ENST00000523809
  CDS Start-End: 142-561
acggaaaccaaagctcatggaaattcctgggaaacatcacataactacagagtgcagctgaagaaattgagtgttcactgcctgataaagaaaaggtccctgacaggctggatgaaatgagatccccatgtagcaattgccatggaaacctgtgactcccctcctatctcaaggcaggaaaatgggcagagcacatcaaagctatgtggaacgacacaacttgataatgaggtgccagagaaagttgcagggatggagcctgacagggaaaacagctccacagatgacaacctgaaaacggatgagcgcaaaagtgaagccttgctgggtttcagcgttgagaatgcagctgccactcaggttacctcagcaaaggagataccctgcaacgaatgtgccacttcttttcccagtttacagaaatacatggaacaccactgccctaatgcccgccttcctgtcctgaaggatgacaacgagagcgagatcagcgagttagaggacagtgacgtggaaaatctaacaggggagatcgtttaccagcctgatgggtcagcatat

SEQ ID NO: 201397 - DNA, 613 bp, Homo sapiens
  Payload ID: 19748
  Gene Name: zinc finger homeobox 4
  ENST ID: ENST00000517585
  CDS Start-End: 148-613
atagcacaatccccttgtttaaccaatacggaaaccaaagctcatggaaattcctgggaaacatcacataactacagagtgcagctgaagaaattgagtgtgtccctgacaggctggatgaaatgagatccccatgtagcaattgccatggaaacctgtgactcccctcctatctcaaggcaggaaaatgggcagagcacatcaaagctatgtggaacgacacaacttgataatgaggtgccagagaaagttgcagggatggagcctgacagggaaaacagctccacagatgacaacctgaaaacggatgagcgcaaaagtgaagccttgctgggtttcagcgttgagaatgcagctgccactcaggttacctcagcaaaggagataccctgcaacgaatgtgccacttcttttcccagtttacagaaatacatggaacaccactgccctaatgcccgccttcctgtcctgaaggatgacaacgagagcgagatcagcgagttagaggacagtgacgtggaaaatctaacaggggagatcgtttaccagcctgatgggtcagcatatataattgaggactccaaagaaagtgggcagaatgcacagactgggg

SEQ ID NO: 201398 - DNA, 618 bp, Homo sapiens
  Payload ID: 19748
  Gene Name: zinc finger homeobox 4
  ENST ID: ENST00000520307
  CDS Start-End: 153-618
atcgcccggcctctgggccagggacccgcgaggcggcggctgcttgctccgaacggaacgccgccgggtgtgcgttagaccagcggatagacgcccgcggcttggggtccctgacaggctggatgaaatgagatccccatgtagcaattgccatggaaacctgtgactcccctcctatctcaaggcaggaaaatgggcagagcacatcaaagctatgtggaacgacacaacttgataatgaggtgccagagaaagttgcagggatggagcctgacagggaaaacagctccacagatgacaacctgaaaacggatgagcgcaaaagtgaagccttgctgggtttcagcgttgagaatgcagctgccactcaggttacctcagcaaaggagataccctgcaacgaatgtgccacttcttttcccagtttacagaaatacatggaacaccactgccctaatgcccgccttcctgtcctgaaggatgacaacgagagcgagatcagcgagttagaggacagtgacgtggaaaatctaacaggggagatcgtttaccagcctgatgggtcagcatatataattgaggactccaaagaaagtgggcagaatgcacagactgggg

SEQ ID NO: 201399 - DNA, 524 bp, Homo sapiens
  Payload ID: 19748
  Gene Name: zinc finger homeobox 4
  ENST ID: ENST00000523885
  CDS Start-End: 222-524
gtagtattatatttttagttgggtggatggatggaagagtgagagagaggctgcggctgccgctgccttttcgggtgttgcttagattaaggctgagacttggctgcgattgggacgcgacagtgacacgggcatcgatcgcttccattgagagcaatgcaaaaacacagcccgggtccctgacaggctggatgaaatgagatccccatgtagcaattgccatggaaacctgtgactcccctcctatctcaaggcaggaaaatgggcagagcacatcaaagctatgtggaacgacacaacttgataatgaggtgccagagaaagttgcagggatggagcctgacagggaaaacagctccacagatgacaacctgaaaacggatgagcgcaaaagtgaagccttgctgggtttcagcgttgagaatgcagctgccactcaggttacctcagcaaaggagataccctgcaacgaatgtgccacttcttttcccagtttacagaaatacatggaacaccactgccct

SEQ ID NO: 201400 - DNA, 491 bp, Homo sapiens
  Payload ID: 19748
  Gene Name: zinc finger homeobox 4
  ENST ID: ENST00000519536
  CDS Start-End: 1-259
caagttgaatctggtacaacatgtccgttcggtgaagcatcagcagactgagggcctacggaagctccagctccaccagcaaggcctggcaccagaggaggacaacctcagtgagatcttttttgttaaagattgcccaccaaatgagcttgcatcttcttgccaaatcttctggagcgcttgtaatttcctctgtacagagcccaacaggctcatcagcagcagaagaaactgcctcattgggagccaggacttgtgatgatgatcttacagagcagcagttgagatcgacctcagaagaacaaagtgaggaggcagaaggagctattaagcctacagcagtggccgaggacgatgaaaaagacacaagtgagagagacaatagtgaaggcaaaaactctaataaagactctgggataatcacaccagagaaggaactaaaagttagtgtggcagggggtacccagccactcctgctggcaaaagaagag

SEQ ID NO: 201401 - DNA, 14019 bp, Homo sapiens
  Payload ID: 19748
  Gene Name: zinc finger homeobox 4
  Uniprot ID: Q86UP3
  ENST ID: ENST00000521891
  CDS Start-End: 449-11299
attcccagagtgcatatcgggaatagacacacaaagacatgcgcactcaacttaatcagccatttttttaaacagggctaaaacgataataattagcagaataaagacatatcggattttcatttcctttcctccttttcccaaccccttcacaaccaaacagcgagaccgcggtcggcacatgctttaactcctcccggacccccgaggaccgctccatgccccccactttctgctccagcgtttttattttcacccaataaagttcgaggattattttttattttttttgtttttttaatgaaccctctcgttttacttggatgtgatcagctgtaagtaaaataaaagcaaaacaaaaaagaggcgaagatcgagtaggaactgcaggggaaatggaaagtccctgacaggctggatgaaatgagatccccatgtagcaattgccatggaaacctgtgactcccctcctatctcaaggcaggaaaatgggcagagcacatcaaagctatgtggaacgacacaacttgataatgaggtgccagagaaagttgcagggatggagcctgacagggaaaacagctccacagatgacaacctgaaaacggatgagcgcaaaagtgaagccttgctgggtttcagcgttgagaatgcagctgccactcaggttacctcagcaaaggagataccctgcaacgaatgtgccacttcttttcccagtttacagaaatacatggaacaccactgccctaatgcccgccttcctgtcctgaaggatgacaacgagagcgagatcagcgagttagaggacagtgacgtggaaaatctaacaggggagatcgtttaccagcctgatgggtcagcatatataattgaggactccaaagaaagtgggcagaatgcacagactggggcaaatagcaaactcttttctacagcgatgttcctggactccctggcatctgctggagagaagagtgatcagtctgcttctgcacctatgtcgttctacccacagatcatcaacacttttcatatcgcttcatccctcgggaaaccatttacagccgatcaggctttcccaaatacctcagcattagcaggagttggtcctgtgttgcacagtttccgtgtctatgatctccgacacaagagagagaaagactatctaaccagtgatggctcagccaaaaactcctgtgtgtccaaagatgtccctaacaatgtggacttgtccaaattcgatggttgtgttagcgatgggaaaaggaaacctgttttaatgtgtttcttgtgcaagttgtcttttggttatatcaggtcatttgtaacccatgctgtgcatgatcatcggatgaccctcaatgacgaggagcagaagctcctcagtaataaatgcgtctccgccataatacaggggattggcaaagacaaagaacctcttataagctttctggaaccaaaaaaatccacttctgtttatccccatttttctactacaaacctcataggacccgatccaaccttccgcggtttatggagcgcttttcatgttgaaaatggtgactctttgccggctggctttgccttcttaaaaggaagcgcgagcacctcgagctcagcagagcagccgctggggattacccaaatgccaaaggctgaagtgaatctgggggggctgtctagtttagtagtgaacaccccaattacctctgtctccctcagccactcatcgtctgagtctagcaagatgtcagagagcaaagaccaagagaacaactgtgaaaggccaaaagaaagcaacgttttacacccaaacggggagtgccctgtcaaaagtgaacccactgaaccgggagatgaggatgaagaagatgcgtactccaatgaacttgatgacgaggaagtattaggtgaactcaccgatagtattggtaacaaagatttccctctcttaaaccaaagcatttctcctttatcatccagtgtgctaaaatttattgaaaagggtacctcgtcctcctcggcgactgtttctgatgacacagaaaagaaaaaacagactgctgctgttagggccagtggcagtgttgctagtaactatggcatcagtggcaaggactttgcagacgcaagtgccagtaaagacagtgccacagctgctcatccaagtgaaatagcccggggagacgaagacagttcagccactcctcaccagcatggctttaccccgagtactcctggcacaccagggcctggaggagacggctcaccgggcagtggcatcgagtgtccaaagtgcgacactgtgttggggtcttcgaggtctcttggtggtcatatgactatgatgcactcgaggaactcatgcaaaaccctcaaatgtcctaaatgtaactggcactacaaatatcagcagaccctggaggcccatatgaaggagaaacaccctgagccgggtggctcttgtgtttattgtaagactggacagcctcaccccaggcttgcccggggtgagagttacacgtgtggctataaacccttccgttgtgaggtttgtaactactctaccactaccaaaggcaacctcagtattcatatgcagtcggacaagcacctgaacaatgttcagaatctccaaaatggcaatggtgagcaggtgtttggccactctgccccagcccccaacaccagcctcagtggctgcggaacaccctctccgtccaaacccaaacagaaacccacctggcggtgtgaagtttgtgattatgaaaccaatgtcgccaggaacctccgaattcatatgaccagcgaaaagcacatgcataatatgatgcttttgcagcagaacatgaagcagatccagcataatctgcacttgggcctcgccccggcggaagcagagctttatcagtactacctagcccagaacataggcctgaccggaatgaagctggaaaaccctgccgaccctcagctgatgatcaatccattccagctggatccagcgacagcagcggctttggcaccagggctcgtaaataatgagctgccgcctgaaatccggcttgccagtggtcagctaatgggtgatgacctgtccctccttactgcaggagagctgtcaccttatatcagtgacccagcgctgaagctattccagtgtgctgtttgcaacaaattcacctctgacagcctggaggccctaagtgtgcatgtgagcagtgagcgctctctccctgaagaggaatggagggcagtaattggagatatctaccagtgcaagctctgcaactacaacactcagctcaaagccaacttccagctacactgcaagactgataaacatatgcagaaatatcaactggtggctcacattaaagaagggggcaaaagcaatgagtggaggttgaagtgtattgccattggcaaccctgttcacctaaaatgtaacgcctgtgactattacaccaacagtgtggataaattacgcttgcataccaccaatcacaggcacgaggcggccctgaagctctacaagcacttgcagaagcaagagggtgcagtgaatcccgaatcctgctattactactgtgccgtgtgtgattacaccaccaaggtcaagttgaatctggtacaacatgtccgttcggtgaagcatcagcagactgagggcctacggaagctccagctccaccagcaaggcctggcaccagaggaggacaacctcagtgagatcttttttgttaaagattgcccaccaaatgagcttgaaactgcctcattgggagccaggacttgtgatgatgatcttacagagcagcagttgagatcgacctcagaagaacaaagtgaggaggcagaaggagctattaagcctacagcagtggccgaggacgatgaaaaagacacaagtgagagagacaatagtgaaggcaaaaactctaataaagactctgggataatcacaccagagaaggaactaaaagttagtgtggcagggggtacccagccactcctgctggcaaaagaagaggatgttgcaacaaaaaggtcaaaacctacagaggacaataaattctgtcatgaacagttctatcaatgtccttattgtaactacaatagtagggaccaaagtcgtatccagatgcacgtcctatcacagcactcggtgcagccggtcatctgctgtcctctctgtcaggacgtcctcagcaacaaaatgcatctccaactgcatctgacgcatttgcacagtgtgtctccagactgtgtggagaagctgcttatgacagtgcctgtccctgatgtgatgatgccaaacagtatgctactgccagcagctgcctctgagaaatcagagcgggacacacctgcagccgtgacagctgaggggtctgggaaatattcaggtgaaagtccaatggatgacaaaagcatggcaggtctcgaggattcaaaggctaatgtggaagtaaagaatgaggagcagaaaccgactaaagaacccttggaagtctcagaatggaataaaaatagcagtaaggatgtgaaaatccccgacacactgcaagatcaattaaatgaacagcaaaaaaggcaaccgctctctgtttctgaccgtcatgtctacaagtatcgctgtaaccattgtagcttggctttcaaaactatgcagaagcttcagatacattcccagtatcatgcaattcgggctgcgacaatgtgtaacctctgccagcgcagtttccgtacattccaggctttaaaaaaacacttggaagcaggccaccctgaactgagtgaagctgaacttcaacagctatatgcctccttgcccgtgaatggagaactgtgggcagagagcgaaactatgtcccaggatgaccatggcctagagcaggaaatggagagagagtatgaggtggaccacgaagggaaagcaagtcctgtaggaagtgatagtagctctattccagatgacatgggctctgaaccaaagcggaccttaccttttagaaaagggcccaattttacgatggaaaaattccttgatccatctcgtccatataaatgtacagtgtgtaaagagtcattcacccaaaagaacattctcttggtccactataattcagtttctcacttgcataagctgaaaaaagttttgcaggaagcctccagtcctgtcccacaagaaaccaacagcaacacagataacaaaccctacaagtgcagcatctgcaatgttgcatacagccaaagctcaacattggaaatccacatgaggtctgtgctccaccagacaaaggctagggctgcaaagctggagcccagtggtcatgtggctggtgggcacagcattgcagcaaatgtcaacagccctggccaggggatgttagattccatgagtttagcagctgtaaacagcaaagatacccatttagatgccaaagaattaaataaaaagcaaactcctgatttaatctctgctcaacctgcacatcacccaccacagtcaccagcacaaattcagatgcaactacagcacgaattacaacagcaagccgcattctttcagcctcagtttctaaacccagcctttttgcctcattttcctatgaccccagaagcactgctgcagtttcagcagcctcagtttctctttccattttatatacctgggacggagttcagcttggggccagatttgggcttgccaggctctgccacatttgggatgcctggcatgacaggaatggctggctccttgcttgaagacctaaagcagcagattcaaacccaacatcacgttggtcaaactcaactccagatactacagcaacaagcacaacaataccaagccacacagccccagctgcagcctcaaaaacaacagcagcagccaccacctccacagcagcagcagcaacagcaggcaagcaaattattgaaacaagagcaaagtaacatagtgagtgcagactgccaaatcatgaaggatgtgccatcttataaggaggcagaagatatttctgaaaagccagaaaaaccaaagcaggaatttataagtgaaggtgaaggactcaaagaaggcaaagacacaaagaagcaaaaatccttggaaccatccatcccaccaccccgaatagcttcaggggccagaggaaatgctgccaaagcgttattggaaaactttggttttgaactggtcattcagtataacgaaaacaggcagaaggtacagaagaagggcaaaagtggtgaaggcgaaaacactgacaaactagaatgtggaacatgtggtaaattgttttccaatgttcttattttaaagagtcaccaagaacatgtacatgggcaattttttccatatgcagcgctagaaaaatttgctcgtcaatacagggaggcctatgacaagctttatccaatttctccatcttctccagaaacgccgcccccgccacctcctcctcctcccttgcctccggctcctccacagccttcttctatgggtcctgtaaagatccccaacacggtttctactcctctgcaagctccaccacccactcctcccccaccaccaccacctcctcctcctcctcctcctccccccccacctcctccaccttctgctcctccacaggtccaactgccggtttctctggacctgccgctctttccttccattatgatgcaacctgtgcaacaccctgcgcttcctccccagcttgccctgcagctgccacagatggacgcactctctgcagacctcacccaactttgccagcagcagctcggattagatcccaacttcttaagacattctcagttcaaacgcccacggacaagaattacagatgatcagctaaaaatcctgagggcttattttgacattaataattctccaagtgaagaacagatccaggaaatggcagagaaatctggcctctcccaaaaagttatcaaacactggtttagaaatacgctttttaaggaacgacagagaaataaagattcaccatacaacttcagtaaccctcctataacggttttagaagatatcagaattgatccacagcccacctctttagaacattacaaatctgatgcatcattcagtaaaaggtcttctagaacgagatttactgactaccagcttagggttctgcaagacttttttgacacaaacgcttacccaaaagatgatgaaatagaacaactctccactgttctcaatctgcctacccgggttattgttgtatggttccagaatgctcgtcagaaagcacgaaagagttatgagaatcaagcagaaacaaaagataatgaaaaaagagaactcactaatgaacggtacattcgaacaagcaacatgcagtaccagtgtaaaaagtgcaatgtggttttccccaggatctttgacttgattacgcatcagaaaaagcagtgttacaaggatgaagatgatgatgcccaagatgaaagccaaacagaagactccatggatgccactgatcaagtggtatacaagcattgcacagtgtctggccaaacggatgcagctaaaaacgctgctgcccctgcagcaagttctggctctgggaccagcacccccctgattccatcacccaaaccagaacctgagaagacttctccaaaacctgaatatcccgcagaaaagccaaagcagagtgacccctctcccccttctcaaggcaccaaaccagccctgccattagcatcgacttcctcggacccaccacaggcatccacagcccagccacagccacagccacagccaccaaaacaaccccaacttatcggaagacctccctcggcctctcaaacaccggtcccttccagtccactgcaaatttccatgacgtctctccagaacagtctacctccacagttactacaataccaatgtgatcagtgtacagttgccttcccaactctggaactctggcaggaacaccagcacatgcacttccttgctgctcaaaaccaattccttcactctccgttcttggaaaggcccatggacatgccctacatgatatttgaccccaacaatccgctgatgactggacaactgctgggcagttccctcactcaaatgccccctcaggccagttcctcccacaccacagcccccacaacggttgctgcttccctaaaaaggaaactagacgataaagaagataataattgcagtgaaaaagaaggagggaatagcggtgaagaccaacaccgagataaacgcttgagaaccacgatcaccccggaacagctggaaatactctatgaaaaatacttgctggattccaatcctaccagaaaaatgcttgatcatattgcccgcgaagtcgggctgaaaaaaagggtcgtgcaagtctggttccagaatacacgagcgcgggagaggaaaggccagttccgggcggtgggtccagcacagtctcataaacggtgtccgttttgccgagccctgtttaaagcaaagtcggccttagaaagccacattcgctctcggcactggaatgaaggaaagcaggcaggttacagcttgccaccaagccctttaatatccaccgaagatgggggagaaagcccacagaaatacatctattttgattacccatctttgccattaactaaaattgatctatcaagtgagaatgaattggcttctacagtgtcaacacctgttagtaaaacagcagagctgtcaccgaagaatcttttaagcccttcttcttttaaagcagagtgttctgaggatgtagagaatttaaatgcccctcctgctgaggctgggtatgatcaaaataaaaccgattttgatgagacttcatcgattaatacggcaatcagtgacgccaccaccggagacgagggaaacactgaaatggaaagcaccacaggaagttccggagatgtgaaaccggctttgtctcccaaagagccaaaaactctggatactctgccaaaacctgcaaccacacctaccacggaggtctgcgatgacaaatttctcttttctctcacaagcccatccatccatttcaatgacaaagatggcgaccacgaccaaagcttttacatcacagatgacccggatgacaacgccgaccgcagcgaaacgtccagcatagcggacccgagctccccaaatccattcggatccagcaatccctttaaatccaaaagtaatgatcggccgggtcacaagcgttttcgaacgcaaatgagcaatcttcaactcaaggttctcaaggcttgctttagtgactaccgaactccaaccatgcaagaatgtgaaatgttagggaatgagattggtctgcccaaacgcgtagtccaggtgtggttccaaaatgcaagggcaaaggaaaagaaatttaaaattaacatagggaagcctttcatgatcaatcaaggcggaacggaaggcaccaaaccagagtgtaccctctgcggggtgaagtactctgcccgcttgtccatcagagatcacattttctccaaacagcacatttcaaaagtgagggagaccgttggcagtcagctcgatcgggagaaagattacttggctccgaccacggttcggcagctgatggcacagcaagaacttgatcgtataaagaaagcttcagacgtgctgggcttgacggtacagcagccaggcatgatggacagcagttctctccacggcatcagcctgccaacagcctaccccggactccccggccttcctccagtccttctccccggaatgaacggtccatcctccttgccgggatttccacaaaattcaaacactttaacacctcccggtgcaggcatgcttgggtttcctacttcagctacttcgtctcctgccctgtctctcagcagtgcccccaccaaacctttgctgcagactccaccacctccaccacctcctcctcctcctcctccttcatcctctctgtcaggacagcagaccgagcaacagaacaaagaatctgagaaaaagcaaactaagccaaacaaggtgaaaaaaatcaaagaggaggaattagaggccaccaaacccgaaaaacaccccaaaaaagaggaaaaaatctcatctgctctttcagtgttgggcaaagttgtaggtgaaacacatgtcgatcctattcagttgcaggcattacagaatgcaattgctggtgacccagcttcctttataggcggacagttcttgccatactttatccctgggtttgcttcttattttacacctcagctccctggaacagtgcaggggggatacttcccacctgtctgtggcatggagagcctctttccttatggccctacaatgccccagacactggcaggtctgtccccaggtgcactgttgcagcagtaccaacagtatcagcagaacctgcaggagtccctgcaaaagcagcaaaagcaacagcaagaacagcagcagaaaccagttcaggcaaagacatccaaagtagaaagtgaccagccgcaaaactccaacgatgcttcagaaacaaaggaagacaaaagtactgctacagaaagcacaaaagaagaaccccagttagaatccaaaagtgcagacttttcagacacttacgttgttccattcgtcaagtatgagtttatatgcagaaagtgccagatgatgtttactgatgaagacgccgcagtaaatcatcaaaagtccttctgttatttcggtcagcctttgattgacccacaagagacagtgcttcgtgtcccagtcagcaaatatcagtgtcttgcctgtgatgtggctatcagtgggaatgaagcacttagccaacacctccagtcaagcttgcacaaagagaaaacaatcaaacaagcaatgagaaatgccaaagagcatgttagattattacctcactcagtctgctcccctaatcctaacaccacatctacctcgcagtctgcagcttcttctaataacacctatcctcatctttcttgcttctccatgaagtcctggcctaatatccttttccaagcgtctgccaggagagctgcttctcccccttcttctcctccttccctttccttgccttcaacggttacctcaagtttgtgcagcacctcaggggttcaaacctcactacccacagaaagttgttcagatgagtctgacagtgagctgagccagaagctagaagacttagataattctttggaagtgaaggctaagcctgcttctggcctagatggtaatttcaatagcatccgaatggatatgttcagtgtgtaggagtgaagacaggatcccgtgcttaaaaaaataaaaaataaaaaaataaaaaaaaaataagactttaactgcagttccaaagcttctctaacccaaaaattacagtaccaaatgattgactcaggattgtttttcccatattgatatgctggcaatataggatggtatgtaatggacagaactgatgcagatggttgaatgcgcttgtactatatgctaaaatatggaaaaggaaaaaaaaatctcacaagttcttttggaacttgtttcaagccaaaaactctcaagaaagcaaattgcacctcagctggattgatttccaaatgctagcatgtactgtatgggaggatgatccagatgtttcaaagagaatttctcttagtttagttaggtgtaattcagtagctttaaattctcaggtcagaacataacatttctcatttgttaaaagcagcaagaagcctggtaaaactgtgacttttccccaaacgtcaatctttattagaaagcattttctaggtgtgtttagtgtacaaagagactttataacccttactggacaacacacagatccttgagctcacgctgcaggatagtacagttttaccgcagagggaatctggaacagtggaatcatgtgtctgccctgtgtattgcagtttgtattgccacaagctatatttataccagtgtcacccttttcttgtagaatatactaataatctgtgccaactctaccttctcacttttacctctgacgtcattctttttttctgaaagaggtaataattctagttttgatagactctgaggattatgtgaacaggacatttttcatttgtgaatttaatgctatactgtcaaggtacttgcttgtgtctgaactctagtgcacttatgattttgtagaccatgtgaaatttaataagataccttttttttcctttctttgtgtgtagtgcagcaacagtttggtctgcatttgttagaagtttaactcctaacaacccaaagacctatttaacaattggtgcataaatgaaagtagtactgtatacttgaaactgtttaagtacaagttgaacaaaaattatgaaaaggtatatttgcttctcgggaaagcaaagaagctgctttaaaaaataaaaaggggactaaaaatttgttttgtataaagaggttagccctgcgcacgtaggactgaattcagtgatatccctatacactgccatttagtggataggttattgtacttccattcatactctgggcacttgtgttgtattgttctgttacatactttttttaacctgttttgttttatcatatatgcattaaaagtattatctttatcaacatttgctgctactgtgttaacatttttgttttgcttgccatgaatttcaacttccaccacccagtgaattgatttataaattgctatgctttgctgtttttctgttgctgtggaacttaaagaatgtgaaagctgtcaaagggtattttacgaatcacttttgtgtttgatatagtaaaacaatgtgattcattccaaagtaacagaaggttatttgtaagaaagttaaaggcttgtgaacaaagaaagctaagctgttgtacatatttgtagttggctgtgcatggtacaaatttattaatatgaagaaatgcaaaatgtattgcttttgatatttctcttccgagatgaacaagtagcatgtaatgcaactgtttgacagtttaactcaagtcatgcttcaaactgttttaatgatcaaatcaagacacatttcattttacattttattattgtacagtttttgtttcggatgatgatcacagcaatctttattctatacattttatgtgaacttttttaatgtctttaatttggattttttttttttttagtattttaacatttattttaatcctgaagacacttttttgattgtgtttcgtaagagacaacatggcctcctaaggtgcaatcctgccgctatagtgagctaatgtcctgaatccaaaggcttcagaaaattgcttttgcctttttcatgaatgttaagcagcagcattgtgagatcgatctgtcctggcagttaacacgatgtgcaacagtgtgttagcatggaacagaacgcttttcacaaaacaaaggactgttttacaaatgattattccgacagtgtgtcgacataaacttttacaactgcacagcagccaaaaaaagaaaaaaaaaagaaaaaaaactttaactggatggacgttgttagggtgagaaataaaaggacagcctccaaaggttgagaatgagaattgttttttcctggatatcaaagggattatcacagcgcaatcattgtctacacaacatgtactctcaacgcctgggttacataggaaatgcaccctgaggttttaataaaagcccctatggctataactttaaataaactaaaccaaaaatgttattgatgttttatatatagagagtagtctcattagtttttgttactgtaatgtttgaagtctcaaatgcaccgtattacggtaaataacatggttttgaaaacttttttttattttgtcacagacctgttgtcatagttgaaatgatgtttattgtagatggtatttgaacttattcttctggaaatagttcatcaagtatgtttgttgctcattgtgatacattaaaaactgtatctacatattta

SEQ ID NO: 201402 - DNA, 12175 bp, Homo sapiens
  Payload ID: 19748
  Gene Name: zinc finger homeobox 4
  ENST ID: ENST00000518282
  CDS Start-End: 45-10817
ccctgacaggctggatgaaatgagatccccatgtagcaattgccatggaaacctgtgactcccctcctatctcaaggcaggaaaatgggcagagcacatcaaagctatgtggaacgacacaacttgataatgaggtgccagagaaagttgcagggatggagcctgacagggaaaacagctccacagatgacaacctgaaaacggatgagcgcaaaagtgaagccttgctgggtttcagcgttgagaatgcagctgccactcaggttacctcagcaaaggagataccctgcaacgaatgtgccacttcttttcccagtttacagaaatacatggaacaccactgccctaatgcccgccttcctgtcctgaaggatgacaacgagagcgagatcagcgagttagaggacagtgacgtggaaaatctaacaggggagatcgtttaccagcctgatgggtcagcatatataattgaggactccaaagaaagtgggcagaatgcacagactggggcaaatagcaaactcttttctacagcgatgttcctggactccctggcatctgctggagagaagagtgatcagtctgcttctgcacctatgtcgttctacccacagatcatcaacacttttcatatcgcttcatccctcgggaaaccatttacagccgatcaggctttcccaaatacctcagcattagcaggagttggtcctgtgttgcacagtttccgtgtctatgatctccgacacaagagagagaaagactatctaaccagtgatggctcagccaaaaactcctgtgtgtccaaagatgtccctaacaatgtggacttgtccaaattcgatggttgtgttagcgatgggaaaaggaaacctgttttaatgtgtttcttgtgcaagttgtcttttggttatatcaggtcatttgtaacccatgctgtgcatgatcatcggatgaccctcaatgacgaggagcagaagctcctcagtaataaatgcgtctccgccataatacaggggattggcaaagacaaagaacctcttataagctttctggaaccaaaaaaatccacttctgtttatccccatttttctactacaaacctcataggacccgatccaaccttccgcggtttatggagcgcttttcatgttgaaaatggtgactctttgccggctggctttgccttcttaaaaggaagcgcgagcacctcgagctcagcagagcagccgctggggattacccaaatgccaaaggctgaagtgaatctgggggggctgtctagtttagtagtgaacaccccaattacctctgtctccctcagccactcatcgtctgagtctagcaagatgtcagagagcaaagaccaagagaacaactgtgaaaggccaaaagaaagcaacgttttacacccaaacggggagtgccctgtcaaaagtgaacccactgaaccgggagatgaggatgaagaagatgcgtactccaatgaacttgatgacgaggaagtattaggtgaactcaccgatagtattggtaacaaagatttccctctcttaaaccaaagcatttctcctttatcatccagtgtgctaaaatttattgaaaagggtacctcgtcctcctcggcgactgtttctgatgacacagaaaagaaaaaacagactgctgctgttagggccagtggcagtgttgctagtaactatggcatcagtggcaaggactttgcagacgcaagtgccagtaaagacagtgccacagctgctcatccaagtgaaatagcccggggagacgaagacagttcagccactcctcaccagcatggctttaccccgagtactcctggcacaccagggcctggaggagacggctcaccgggcagtggcatcgagtgtccaaagtgcgacactgtgttggggtcttcgaggtctcttggtggtcatatgactatgatgcactcgaggaactcatgcaaaaccctcaaatgtcctaaatgtaactggcactacaaatatcagcagaccctggaggcccatatgaaggagaaacaccctgagccgggtggctcttgtgtttattgtaagactggacagcctcaccccaggcttgcccggggtgagagttacacgtgtggctataaacccttccgttgtgaggtttgtaactactctaccactaccaaaggcaacctcagtattcatatgcagtcggacaagcacctgaacaatgttcagaatctccaaaatggcaatggtgagcaggtgtttggccactctgccccagcccccaacaccagcctcagtggctgcggaacaccctctccgtccaaacccaaacagaaacccacctggcggtgtgaagtttgtgattatgaaaccaatgtcgccaggaacctccgaattcatatgaccagcgaaaagcacatgcataatatgatgcttttgcagcagaacatgaagcagatccagcataatctgcacttgggcctcgccccggcggaagcagagctttatcagtactacctagcccagaacataggcctgaccggaatgaagctggaaaaccctgccgaccctcagctgatgatcaatccattccagctggatccagcgacagcagcggctttggcaccagggctcggagagctgtcaccttatatcagtgacccagcgctgaagctattccagtgtgctgtttgcaacaaattcacctctgacagcctggaggccctaagtgtgcatgtgagcagtgagcgctctctccctgaagaggaatggagggcagtaattggagatatctaccagtgcaagctctgcaactacaacactcagctcaaagccaacttccagctacactgcaagactgataaacatatgcagaaatatcaactggtggctcacattaaagaagggggcaaaagcaatgagtggaggttgaagtgtattgccattggcaaccctgttcacctaaaatgtaacgcctgtgactattacaccaacagtgtggataaattacgcttgcataccaccaatcacaggcacgaggcggccctgaagctctacaagcacttgcagaagcaagagggtgcagtgaatcccgaatcctgctattactactgtgccgtgtgtgattacaccaccaaggtcaagttgaatctggtacaacatgtccgttcggtgaagcatcagcagactgagggcctacggaagctccagctccaccagcaaggcctggcaccagaggaggacaacctcagtgagatcttttttgttaaagattgcccaccaaatgagcttgaaactgcctcattgggagccaggacttgtgatgatgatcttacagagcagcagttgagatcgacctcagaagaacaaagtgaggaggcagaaggagctattaagcctacagcagtggccgaggacgatgaaaaagacacaagtgagagagacaatagtgaaggcaaaaactctaataaagactctgggataatcacaccagagaaggaactaaaagttagtgtggcagggggtacccagccactcctgctggcaaaagaagaggatgttgcaacaaaaaggtcaaaacctacagaggacaataaattctgtcatgaacagttctatcaatgtccttattgtaactacaatagtagggaccaaagtcgtatccagatgcacgtcctatcacagcactcggtgcagccggtcatctgctgtcctctctgtcaggacgtcctcagcaacaaaatgcatctccaactgcatctgacgcatttgcacagtgtgtctccagactgtgtggagaagctgcttatgacagtgcctgtccctgatgtgatgatgccaaacagtatgctactgccagcagctgcctctgagaaatcagagcgggacacacctgcagccgtgacagctgaggggtctgggaaatattcaggtgaaagtccaatggatgacaaaagcatggcaggtctcgaggattcaaaggctaatgtggaagtaaagaatgaggagcagaaaccgactaaagaacccttggaagtctcagaatggaataaaaatagcagtaaggatgtgaaaatccccgacacactgcaagatcaattaaatgaacagcaaaaaaggcaaccgctctctgtttctgaccgtcatgtctacaagtatcgctgtaaccattgtagcttggctttcaaaactatgcagaagcttcagatacattcccagtatcatgcaattcgggctgcgacaatgtgtaacctctgccagcgcagtttccgtacattccaggctttaaaaaaacacttggaagcaggccaccctgaactgagtgaagctgaacttcaacagctatatgcctccttgcccgtgaatggagaactgtgggcagagagcgaaactatgtcccaggatgaccatggcctagagcaggaaatggagagagagtatgaggtggaccacgaagggaaagcaagtcctgtaggaagtgatagtagctctattccagatgacatgggctctgaaccaaagcggaccttaccttttagaaaagggcccaattttacgatggaaaaattccttgatccatctcgtccatataaatgtacagtgtgtaaagagtcattcacccaaaagaacattctcttggtccactataattcagtttctcacttgcataagctgaaaaaagttttgcaggaagcctccagtcctgtcccacaagaaaccaacagcaacacagataacaaaccctacaagtgcagcatctgcaatgttgcatacagccaaagctcaacattggaaatccacatgaggtctgtgctccaccagacaaaggctagggctgcaaagctggagcccagtggtcatgtggctggtgggcacagcattgcagcaaatgtcaacagccctggccaggggatgttagattccatgagtttagcagctgtaaacagcaaagatacccatttagatgccaaagaattaaataaaaagcaaactcctgatttaatctctgctcaacctgcacatcacccaccacagtcaccagcacaaattcagatgcaactacagcacgaattacaacagcaagccgcattctttcagcctcagtttctaaacccagcctttttgcctcattttcctatgaccccagaagcactgctgcagtttcagcagcctcagtttctctttccattttatatacctgggacggagttcagcttggggccagatttgggcttgccaggctctgccacatttgggatgcctggcatgacaggaatggctggctccttgcttgaagacctaaagcagcagattcaaacccaacatcacgttggtcaaactcaactccagatactacagcaacaagcacaacaataccaagccacacagccccagctgcagcctcaaaaacaacagcagcagccaccacctccacagcagcagcagcaacagcaggcaagcaaattattgaaacaagagcaaagtaacatagtgagtgcagactgccaaatcatgaaggatgtgccatcttataaggaggcagaagatatttctgaaaagccagaaaaaccaaagcaggaatttataagtgaaggtgaaggactcaaagaaggcaaagacacaaagaagcaaaaatccttggaaccatccatcccaccaccccgaatagcttcaggggccagaggaaatgctgccaaagcgttattggaaaactttggttttgaactggtcattcagtataacgaaaacaggcagaaggtacagaagaagggcaaaagtggtgaaggcgaaaacactgacaaactagaatgtggaacatgtggtaaattgttttccaatgttcttattttaaagagtcaccaagaacatgtacatgggcaattttttccatatgcagcgctagaaaaatttgctcgtcaatacagggaggcctatgacaagctttatccaatttctccatcttctccagaaacgccgcccccgccacctcctcctcctcccttgcctccggctcctccacagccttcttctatgggtcctgtaaagatccccaacacggtttctactcctctgcaagctccaccacccactcctcccccaccaccaccacctcctcctcctcctcctcctccccccccacctcctccaccttctgctcctccacaggtccaactgccggtttctctggacctgccgctctttccttccattatgatgcaacctgtgcaacaccctgcgcttcctccccagcttgccctgcagctgccacagatggacgcactctctgcagacctcacccaactttgccagcagcagctcggattagatcccaacttcttaagacattctcagttcaaacgcccacggacaagaattacagatgatcagctaaaaatcctgagggcttattttgacattaataattctccaagtgaagaacagatccaggaaatggcagagaaatctggcctctcccaaaaagttatcaaacactggtttagaaatacgctttttaaggaacgacagagaaataaagattcaccatacaacttcagtaaccctcctataacggttttagaagatatcagaattgatccacagcccacctctttagaacattacaaatctgatgcatcattcagtaaaaggtcttctagaacgagatttactgactaccagcttagggttctgcaagacttttttgacacaaacgcttacccaaaagatgatgaaatagaacaactctccactgttctcaatctgcctacccgggttattgttgtatggttccagaatgctcgtcagaaagcacgaaagagttatgagaatcaagcagaaacaaaagataatgaaaaaagagaactcactaatgaacggtacattcgaacaagcaacatgcagtaccagtgtaaaaagtgcaatgtggttttccccaggatctttgacttgattacgcatcagaaaaagcagtgttacaaggatgaagatgatgatgcccaagatgaaagccaaacagaagactccatggatgccactgatcaagtggtatacaagcattgcacagtgtctggccaaacggatgcagctaaaaacgctgctgcccctgcagcaagttctggctctgggaccagcacccccctgattccatcacccaaaccagaacctgagaagacttctccaaaacctgaatatcccgcagaaaagccaaagcagagtgacccctctcccccttctcaaggcaccaaaccagccctgccattagcatcgacttcctcggacccaccacaggcatccacagcccagccacagccacagccacagccaccaaaacaaccccaacttatcggaagacctccctcggcctctcaaacaccggtcccttccagtccactgcaaatttccatgacgtctctccagaacagtctacctccacagttactacaataccaatgtgatcagtgtacagttgccttcccaactctggaactctggcaggaacaccagcacatgcacttccttgctgctcaaaaccaattccttcactctccgttcttggaaaggcccatggacatgccctacatgatatttgaccccaacaatccgctgatgactggacaactgctgggcagttccctcactcaaatgccccctcaggccagttcctcccacaccacagcccccacaacggttgctgcttccctaaaaaggaaactagacgataaagaagataataattgcagtgaaaaagaaggagggaatagcggtgaagaccaacaccgagataaacgcttgagaaccacgatcaccccggaacagctggaaatactctatgaaaaatacttgctggattccaatcctaccagaaaaatgcttgatcatattgcccgcgaagtcgggctgaaaaaaagggtcgtgcaagtctggttccagaatacacgagcgcgggagaggaaaggccagttccgggcggtgggtccagcacagtctcataaacggtgtccgttttgccgagccctgtttaaagcaaagtcggccttagaaagccacattcgctctcggcactggaatgaaggaaagcaggcaggttacagcttgccaccaagccctttaatatccaccgaagatgggggagaaagcccacagaaatacatctattttgattacccatctttgccattaactaaaattgatctatcaagtgagaatgaattggcttctacagtgtcaacacctgttagtaaaacagcagagctgtcaccgaagaatcttttaagcccttcttcttttaaagcagagtgttctgaggatgtagagaatttaaatgcccctcctgctgaggctgggtatgatcaaaataaaaccgattttgatgagacttcatcgattaatacggcaatcagtgacgccaccaccggagacgagggaaacactgaaatggaaagcaccacaggaagttccggagatgtgaaaccggctttgtctcccaaagagccaaaaactctggatactctgccaaaacctgcaaccacacctaccacggaggtctgcgatgacaaatttctcttttctctcacaagcccatccatccatttcaatgacaaagatggcgaccacgaccaaagcttttacatcacagatgacccggatgacaacgccgaccgcagcgaaacgtccagcatagcggacccgagctccccaaatccattcggatccagcaatccctttaaatccaaaagtaatgatcggccgggtcacaagcgttttcgaacgcaaatgagcaatcttcaactcaaggttctcaaggcttgctttagtgactaccgaactccaaccatgcaagaatgtgaaatgttagggaatgagattggtctgcccaaacgcgtagtccaggtgtggttccaaaatgcaagggcaaaggaaaagaaatttaaaattaacatagggaagcctttcatgatcaatcaaggcggaacggaaggcaccaaaccagagtgtaccctctgcggggtgaagtactctgcccgcttgtccatcagagatcacattttctccaaacagcacatttcaaaagtgagggagaccgttggcagtcagctcgatcgggagaaagattacttggctccgaccacggttcggcagctgatggcacagcaagaacttgatcgtataaagaaagcttcagacgtgctgggcttgacggtacagcagccaggcatgatggacagcagttctctccacggcatcagcctgccaacagcctaccccggactccccggccttcctccagtccttctccccggaatgaacggtccatcctccttgccgggatttccacaaaattcaaacactttaacacctcccggtgcaggcatgcttgggtttcctacttcagctacttcgtctcctgccctgtctctcagcagtgcccccaccaaacctttgctgcagactccaccacctccaccacctcctcctcctcctcctccttcatcctctctgtcaggacagcagaccgagcaacagaacaaagaatctgagaaaaagcaaactaagccaaacaaggtgaaaaaaatcaaagaggaggaattagaggccaccaaacccgaaaaacaccccaaaaaagaggaaaaaatctcatctgctctttcagtgttgggcaaagttgtaggtgaaacacatgtcgatcctattcagttgcaggcattacagaatgcaattgctggtgacccagcttcctttataggcggacagttcttgccatactttatccctgggtttgcttcttattttacacctcagctccctggaacagtgcaggggggatacttcccacctgtctgtggcatggagagcctctttccttatggccctacaatgccccagacactggcaggtctgtccccaggtgcactgttgcagcagtaccaacagtatcagcagaacctgcaggagtccctgcaaaagcagcaaaagcaacagcaagaacagcagcagaaaccagttcaggcaaagacatccaaagtagaaagtgaccagccgcaaaactccaacgatgcttcagaaacaaaggaagacaaaagtactgctacagaaagcacaaaagaagaaccccagttagaatccaaaagtgcagacttttcagacacttacgttgttccattcgtcaagtatgagtttatatgcagaaagtgccagatgatgtttactgatgaagacgccgcagtaaatcatcaaaagtccttctgttatttcggtcagcctttgattgacccacaagagacagtgcttcgtgtcccagtcagcaaatatcagtgtcttgcctgtgatgtggctatcagtgggaatgaagcacttagccaacacctccagtcaagcttgcacaaagagaaaacaatcaaacaagcaatgagaaatgccaaagagcatgttagattattacctcactcagtctgctcccctaatcctaacaccacatctacctcgcagtctgcagcttcttctaataacacctatcctcatctttcttgcttctccatgaagtcctggcctaatatccttttccaagcgtctgccaggagagctgcttctcccccttcttctcctccttccctttccttgccttcaacggttacctcaagtttgtgcagcacctcaggggttcaaacctcactacccacagaaagttgttcagatgagtctgacagtgagctgagccagaagctagaagacttagataattctttggaagtgaaggctaagcctgcttctggcctagatggtaatttcaatagcatccgaatggatatgttcagtgtgtaggagtgaagacaggatcccgtgcttaaaaaaataaaaaataaaaaaataaaaaaaaaataagactttaactgcagttccaaagcttctctaacccaaaaattacagtaccaaatgattgactcaggattgtttttcccatattgatatgctggcaatataggatggtatgtaatggacagaactgatgcagatggttgaatgcgcttgtactatatgctaaaatatggaaaaggaaaaaaaaatctcacaagttcttttggaacttgtttcaagccaaaaactctcaagaaagcaaattgcacctcagctggattgatttccaaatgctagcatgtactgtatgggaggatgatccagatgtttcaaagagaatttctcttagtttagttaggtgtaattcagtagctttaaattctcaggtcagaacataacatttctcatttgttaaaagcagcaagaagcctggtaaaactgtgacttttccccaaacgtcaatctttattagaaagcattttctaggtgtgtttagtgtacaaagagactttataacccttactggacaacacacagatccttgagctcacgctgcaggatagtacagttttaccgcagagggaatctggaacagtggaatcatgtgtctgccctgtgtattgcagtttgtattgccacaagctatatttataccagtgtcacccttttcttgtagaatatactaataatctgtgccaactctaccttctcacttttacctctgacgtcattctttttttctgaaagaggtaataattctagttttgatagactctgaggattatgtgaacaggacatttttcatttgtgaatttaatgctatactgtcaaggtacttgcttgtgtctgaactctagtgcacttatgattttgtagaccatgtgaaatttaataagataccttttttttcctttctttgtgtgtagtgcagcaacagtttggtctgcatttgttagaagtttaactcctaacaacccaaagacctatttaacaattggtgcataaatgaaagtagtactgtatacttgaaactgtttaagtacaagttgaacaaaaattatgaaaaggtatatttgcttctcgggaaagcaaagaagctgctttaaaaaataaaaaggggactaaaaatttgttttgtataaagaggttagccctgcgcacgtaggactgaattcagtgatatccctatacactgccatttagtggataggttattgtacttccattcatactctgggcacttgtgttgtattgttctgttacatactttttttaacctgttttgttttatcatatatgcattaaaagtattatctttatcaaca

SEQ ID NO: 201403 - DNA, 989 bp, Homo sapiens
  Payload ID: 19748
  Gene Name: zinc finger homeobox 4
  ENST ID: ENST00000523625
  CDS Start-End: 1-247
caaggtcaagttgaatctggtacaacatgtccgttcggtgaagcatcagcagactgagggcctacggaagctccagctccaccagcaaggcctggcaccagaggaggacaacctcagtgagatcttttttgttaaagattgcccaccaaatgagcttgaaactgcctcattgggagccaggacttgtgatgatgatcttacagagcagcagttgagatcgacctcagcttatttatccacctactgagaacatcttggttgattccaagttttggcaattacgaataaaactactatgagcatcggtgtccaggcttttgtgtggacataaattttcaactccctttgataaatgccaaggagtacaattactagattgtatgataagagcatgtttagttttgtaaaaaccaccaaactgtcttccaaagtggttgtaccattttgcattcccaccagcgatgaatgagagttcctgttgccccacatcatcaccagcatttgatgttgtcagtgttctggattttggccattttcatagaagaacaaagtgaggaggcagaaggagctattaagcctacagcagtggccgaggacgatgaaaaagacacaagtgagagagacaatagtgaaggcaaaaactctaataaagactctgggataatcacaccagagaaggaactaaaagttagtgtggcagggggtacccagccactcctgctggcaaaagaagaggatgttgcaacaaaaaggtcaaaacctacagaggacaataaattctgtcatgaacagttctatcaatgtccttattgtaactacaatagtagggaccaaagtcgtatccagatgcacgtcctatcacagcactcggtgcagccggtcatctgctgtcctctctgtcaggacgtcctcagcaacaaaatgcatctccaactgcatctgacgcatttgcacagtgtgtctccagactgtgtggagaagctgcttat

SEQ ID NO: 201404 - DNA, 4441 bp, Homo sapiens
  Payload ID: 19749
  Gene Name: zinc finger protein 10
  Uniprot ID: P21506
  ENST ID: ENST00000248211
  CDS Start-End: 223-1944
acggggaggtggcgccgccgtgccgagccggcctcagactcacctctgacgccgctcttcgcgctccgctggtgaatggagtcgcgttctctgttttgctgttgctgctgcctttgtgacgggatcgctttctcccatcgaaccttctagttgcttattgcagctttgtctcctcagcactctgctgtcactcaaggaagtatcatcaagaacaaggagggcatggatgctaagtcactaactgcctggtcccggacactggtgaccttcaaggatgtatttgtggacttcaccagggaggagtggaagctgctggacactgctcagcagatcgtgtacagaaatgtgatgctggagaactataagaacctggtttccttgggttatcagcttactaagccagatgtgatcctccggttggagaagggagaagagccctggctggtggagagagaaattcaccaagagacccatcctgattcagagactgcatttgaaatcaaatcatcagtttccagcaggagcatttttaaagataagcaatcctgtgacattaaaatggaaggaatggcaaggaatgatctctggtatttgtcattagaagaagtctggaaatgtagagaccagttagacaagtatcaggaaaacccagagagacatttgaggcaagtggcattcacccaaaagaaagtacttactcaggagagagtctctgaaagtggtaaatatgggggaaactgtcttcttcctgctcagctagtactgagagagtatttccataaacgtgactcacatactaaaagtttaaaacatgatttagttcttaatggtcatcaggacagttgtgcaagtaacagtaatgaatgtggtcaaactttctgtcaaaacattcaccttattcagtttgcaagaactcacacaggtgataaatcctacaaatgccctgataatgacaactctcttactcatggttcatctcttggtatatcaaagggcatacatagagagaaaccctatgaatgtaaggaatgtggaaaattcttcagctggcgctctaatcttactaggcatcagcttattcatactggagaaaaaccctatgagtgtaaagaatgtggaaagtctttcagccggagttctcacctcattggacatcaaaagacccatactggtgaggaaccctatgaatgtaaagaatgtggaaaatccttcagctggttctctcaccttgttactcatcagagaactcatacaggagacaaactgtacacatgtaatcagtgtgggaaatcttttgttcatagctctaggcttattagacaccagaggacacatactggagagaaaccctatgaatgtcctgaatgtgggaaatctttcagacagagcacacatctcattctgcatcagagaacccatgtgagagtgaggccctatgaatgcaatgaatgtggaaagtcttacagccagagatctcaccttgttgtgcatcatagaattcacactggactaaaaccttttgagtgtaaggattgtggaaaatgttttagtcgaagctctcacctttattcacatcaaagaacccacactggagagaaaccatatgagtgtcatgattgtggaaaatctttcagccagagttctgcccttattgtgcatcagaggatacacactggagagaaaccatatgaatgctgtcagtgtgggaaagccttcatccggaagaatgacctcattaagcaccagagaattcatgttggagaagagacctataaatgtaatcaatgtggcattatcttcagccagaactctccatttatagttcatcaaatagctcacactggagagcagttcttaacatgcaatcaatgtgggacagcgcttgttaatacctctaaccttattggataccagacaaatcatattagagaaaatgcttactaataaatatgggaatttttcacaaagagcaatgactttattttgcattggagaactcctggagataagctgtacaaattgaatctatgtggaaatgctttcagtcttgttactatcctattgcacattagagaattggtcctggaagggaaagaaaccacagattttatttcagtacacaaatccatcagattttcttcttttcatgaattcctacagaagtaattggcctgagagcattcttgaccaagtcttaaatgctagaatctgagaaggaattattaaataggtgagttgttgagcgagaaccccttcatttgaaaagaaatgagtatgctactatagggagagttgttgctgagaattaagaaatgatacagttaatgcaacaaaagatggaaaataatatttcagtcaatatgtcattgttttcttgactatgtctctcttctgggacatttagtagtgtttggtatgttttatgtgtctggtagaaaccatattttggttaacagcaagaaaaatgcttataatgtagtacaattaaaaacaacacatctccactaccagtgctaacccatttttaagtacatttgcatgtgggcaagaattgaaagtatacagataattgaacagaattgatttgttagataaggagattttgactgagttttatagtctgtttaatgttgctgtaataattattttaagaaacttttaaatattgtaagaggatatctagtttctctattctaccatcaaagaagcttttgagtaccacctgttaatgagctttcctattctaaattgttttgggtcacagagttccactttttccactcttattagcactgcaaaagctcctgagaatttaaaaacacagtaattctctggatgttaggacctaggggaacattgggcatttgaacatatcagggagggtccccattttagtgggaacaagtatttaaacaatatttagagcaagtgtcctcatgtgataaacagagcacagtccaaagataccctctttctcaaggtagtcttttatctttataaagaaagattagtgtttaagagcgtagacttgagctagactacccaggttgaaaccccactagctgggtgatcttgaacatgctgcttagcttctctgtgccaaacttactgatatcctcatctgtaaattagcgataataatagtacttacctggtaggattatggtgagtattaaatgagtaaatggaaacagcttagaatagtgcctgacatatattatgttctctgtagttactggctgtgattattaataatattgccgcaccctaatatctgttatttaattgaaatctgcttgtgtgcttataagaatttactgagttctcacttcccttacagtcatacatggtttttcccttttgcctaaatcagaactcaacagcctgggaaaatcactgacaaatagtggatataggtttcatttctgaggatcaataaacagcttgtaatgttgtatacacatttattctgtttgtacaaaggttttccattctatggagaggatcccagtcttcagattctctggtaagttaataacccacaaaagattcaggaagaggatctattttaattttctctttcattctataaatcagtctgttgtatatagggactgaccatgattctccattttctggcataaatattagctgctcaatgattgattgttgaatgatagatgaagtattgctgaagccaaccagagatcttgatctctctctgaggaaaaaacctagaaatgatggttagaatcaggagacttgagaactacgaggaacatggcagcctctagctcatacttgtcgttgtacaattgagatcaagtgaattggccccggtctcacattttcagtgaagtcagactcagaactaggtcctgggtttcatgtttcctgctgctcttctcactgtgtacacaccatgcccacatacaacatacctatcagaaatggttttcattaagggagtagaatagtcacttaactggggctcttaacattgctaataacctgtggctcaatttcctcaactgtataatgaggttactactagtatctacctcaaagcgttgtcatgtggattgagatgatatgtatgaatcacataaaagagtgcctggcacatagtaggtgccattaataatattactattgttaacaccttaagggtctaacttgtaatgaagacagaaatatgtatgaggatgatcactgaaatatttatgacagtgcataatttgcaaaataaaaaatgtacactagcataatatttgtggcatatccgtgtaatggaagattatgcaggcattaaaatatgtacacaaaaagtttggtaaaggaaaaatgctgtcatgtgttacaaaagcatgataaataattgttaatatggaataagctcaaatatgtcaaaataaatgtaaaaaatgagtgttgcccaaaa

SEQ ID NO: 201405 - DNA, 1967 bp, Homo sapiens
  Payload ID: 19749
  Gene Name: zinc finger protein 10
  ENST ID: ENST00000402932
  CDS Start-End: 625-1944
cactttcaagctcactcttcttggcagaattcagttccttgtggctgcaggactgaggtccctgcttcctagctggctttcagctggtgctgctctttgctgctggagcctgccatgttcctcacactgcattccatcttcaagccagtaatggtgcgtcacatttttcttgggcttctatctctgacttccgttctgtgaccagctggagacaacacttgtttttttaatctgtaaagtgagactatttgattaggtcaggtttggtatttttttccgcaaaaaaaaaatttgtaatggtaggtaggatcattcagttttaaatcttcaaatgtggtgtggaactccagagattaagggggtaaaaatgcaatttatgtagctcttctcttcctaatcttggggagcttcgggcactgtagatttgcttatagaatatctctgatgttcctctgtatagtgggtgtttgtgtcatacccagctggtatgaagaagtttagactgacaatttagggagcctcccagtcatagcaaacttaacttatgtttctttctttttcccagctttgtctcctcagcactctgctgtcactcaaggaagtatcatcaagaacaaggagggcatggatgctaagtcactaactgcctggtcccggacactggtgaccttcaaggatgtatttgtggacttcaccagggaggagtggaagctgctggacactgctcagcagatcgtgtacagaaatgtgatgctggagaactataagaacctggtttccttgggttatcagcttactaagccagatgtgatcctccggttggagaagggagaagagccctggctggtggagagagaaattcaccaagagacccatcctgattcagagactgcatttgaaatcaaatcatcagtttccagcaggagcatttttaaagataagcaatcctgtgacattaaaatggaaggaatggcaaggaatgatctctggtatttgtcattagaagaagtctggaaatgtagagaccagttagacaagtatcaggaaaacccagagagacatttgaggcatcagcttattcatactggagaaaaaccctatgagtgtaaagaatgtggaaagtctttcagccggagttctcacctcattggacatcaaaagacccatactggtgaggaaccctatgaatgtaaagaatgtggaaaatccttcagctggttctctcaccttgttactcatcagagaactcatacaggagacaaactgtacacatgtaatcagtgtgggaaatcttttgttcatagctctaggcttattagacaccagaggacacatactggagagaaaccctatgaatgtcctgaatgtgggaaatctttcagacagagcacacatctcattctgcatcagagaacccatgtgagagtgaggccctatgaatgcaatgaatgtggaaagtcttacagccagagatctcaccttgttgtgcatcatagaattcacactggactaaaaccttttgagtgtaaggattgtggaaaatgttttagtcgaagctctcacctttattcacatcaaagaacccacactggagagaaaccatatgagtgtcatgattgtggaaaatctttcagccagagttctgcccttattgtgcatcagaggatacacactggagagaaaccatatgaatgctgtcagtgtgggaaagccttcatccggaagaatgacctcattaagcaccagagaattcatgttggagaagagacctataaatgtaatcaatgtggcattatcttcagccagaactctccatttatagttcatcaaatagctcacactggagagcagttcttaacatgcaatcaatgtgggacagcgcttgttaatacctctaaccttattggataccagacaaatcatattagagaaaatgcttactaataaatatgggaatttttcacaaa

SEQ ID NO: 201406 - DNA, 2169 bp, Homo sapiens
  Payload ID: 19749
  Gene Name: zinc finger protein 10
  Uniprot ID: P21506
  ENST ID: ENST00000426665
  CDS Start-End: 448-2169
agactcacctctgacgccgctcttcgcgctccgctggtgaatggagtcgcgttctctgttttgctgttgctgctgcctttgtgacgggatcgctttctcccatcgaaccttctagttgcttattgcaggtatatacgaaagtgctgaattttgtgtttgcatcgtcatcaggcgcgtgttgagccctttagtaatgtagcagtgtattagcttcgtatttctaggtagacggtaatttcgtcaatgaaaaaatttaacggtgatcgtcaccccttgcctcagtcactttctgtccctcgcgcggccccggcgttcacggcggacgttcttgttctgtggagaataacggctgcacctggagattgacgcagagtgggcggcggtggtgctttgtctcctcagcactctgctgtcactcaaggaagtatcatcaagaacaaggagggcatggatgctaagtcactaactgcctggtcccggacactggtgaccttcaaggatgtatttgtggacttcaccagggaggagtggaagctgctggacactgctcagcagatcgtgtacagaaatgtgatgctggagaactataagaacctggtttccttgggttatcagcttactaagccagatgtgatcctccggttggagaagggagaagagccctggctggtggagagagaaattcaccaagagacccatcctgattcagagactgcatttgaaatcaaatcatcagtttccagcaggagcatttttaaagataagcaatcctgtgacattaaaatggaaggaatggcaaggaatgatctctggtatttgtcattagaagaagtctggaaatgtagagaccagttagacaagtatcaggaaaacccagagagacatttgaggcaagtggcattcacccaaaagaaagtacttactcaggagagagtctctgaaagtggtaaatatgggggaaactgtcttcttcctgctcagctagtactgagagagtatttccataaacgtgactcacatactaaaagtttaaaacatgatttagttcttaatggtcatcaggacagttgtgcaagtaacagtaatgaatgtggtcaaactttctgtcaaaacattcaccttattcagtttgcaagaactcacacaggtgataaatcctacaaatgccctgataatgacaactctcttactcatggttcatctcttggtatatcaaagggcatacatagagagaaaccctatgaatgtaaggaatgtggaaaattcttcagctggcgctctaatcttactaggcatcagcttattcatactggagaaaaaccctatgagtgtaaagaatgtggaaagtctttcagccggagttctcacctcattggacatcaaaagacccatactggtgaggaaccctatgaatgtaaagaatgtggaaaatccttcagctggttctctcaccttgttactcatcagagaactcatacaggagacaaactgtacacatgtaatcagtgtgggaaatcttttgttcatagctctaggcttattagacaccagaggacacatactggagagaaaccctatgaatgtcctgaatgtgggaaatctttcagacagagcacacatctcattctgcatcagagaacccatgtgagagtgaggccctatgaatgcaatgaatgtggaaagtcttacagccagagatctcaccttgttgtgcatcatagaattcacactggactaaaaccttttgagtgtaaggattgtggaaaatgttttagtcgaagctctcacctttattcacatcaaagaacccacactggagagaaaccatatgagtgtcatgattgtggaaaatctttcagccagagttctgcccttattgtgcatcagaggatacacactggagagaaaccatatgaatgctgtcagtgtgggaaagccttcatccggaagaatgacctcattaagcaccagagaattcatgttggagaagagacctataaatgtaatcaatgtggcattatcttcagccagaactctccatttatagttcatcaaatagctcacactggagagcagttcttaacatgcaatcaatgtgggacagcgcttgttaatacctctaaccttattggataccagacaaatcatattagagaaaatgcttactaa

SEQ ID NO: 201407 - DNA, 648 bp, Homo sapiens
  Payload ID: 19749
  Gene Name: zinc finger protein 10
  ENST ID: ENST00000540609
  CDS Start-End: 508-648
ggccacggggaggtggcgccgccgtgccgagccggcctcagactcacctctgacgccgctcttcgcgctccgctggtgaatggagtcgcgttctctgttttgctgttgctgctgcctttgtgacgggatcgctttctcccatcgaaccttctagttgcttattgcagcttcgtatttctaggtagacggtaatttcgtcaatgaaaaaatttaacggtgatcgtcaccccttgcctcagtcactttctgtccctcgcgcggccccggcgttcacggcggacgttcttgttctgtggagaataacggctgcacctggagattgacgcagagtgggcggcggtggtggaaacattaaagaatgtgcttcagagagaaaggaaatgaaaccaaatggaaatctggatctacacaaacgagtaaacagcactggcgaatggtaactacctagctttgtctcctcagcactctgctgtcactcaaggaagtatcatcaagaacaaggagggcatggatgctaagtcactaactgcctggtcccggacactggtgaccttcaaggatgtatttgtggacttcaccagggaggagtggaagctgctggacactgctcagcagatcgtgtacagaaatgtgatgctggagaactat

SEQ ID NO: 201408 - DNA, 472 bp, Homo sapiens
  Payload ID: 19749
  Gene Name: zinc finger protein 10
  ENST ID: ENST00000536877
  CDS Start-End: 255-472
gtgccgagccggcctcagactcacctctgacgccgctcttcgcgctccgctggtgaatggagtcgcgttctctgttttgctgttgctgctgcctttgtgacgggatcgctttctcccatcgaaccttctagttgcttattgcagtggctgtgggagcaaagagtaagaaacactaaaacttcctggagaaattagctttgtctcctcagcactctgctgtcactcaaggaagtatcatcaagaacaaggagggcatggatgctaagtcactaactgcctggtcccggacactggtgaccttcaaggatgtatttgtggacttcaccagggaggagtggaagctgctggacactgctcagcagatcgtgtacagaaatgtgatgctggagaactataagaacctggtttccttgggttatcagcttactaagccagatgtgatcctccggttggagaagggagaagagccctg

SEQ ID NO: 201409 - DNA, 546 bp, Homo sapiens
  Payload ID: 19749
  Gene Name: zinc finger protein 10
  ENST ID: ENST00000538918
  CDS Start-End: 418-546
gtgcgtgacgtcaggccacggggaggtggcgccgccgtgccgagccggcctcagactcacctctgacgccgctcttcgcgctccgctggtgaatggagtcgcgttctctgttttgctgttgctgctgcctttgtgacgggatcgctttctcccatcgaaccttctagttgcttattgcagcttcgtatttctaggtagacggtaatttcgtcaatgaaaaaatttaacggtgatcgtcaccccttgcctcagtcactttctgtccctcgcgcggccccggcgttcacggcggacgttcttgttctgtggagaataacggctgcacctggagattgacgcagagtgggcggcggtggtgctttgtctcctcagcactctgctgtcactcaaggaagtatcatcaagaacaaggagggcatggatgctaagtcactaactgcctggtcccggacactggtgaccttcaaggatgtatttgtggacttcaccagggaggagtggaagctgctggacactgctcagcagatcgtgtacagaaatgtgatg

SEQ ID NO: 201410 - DNA, 5745 bp, Homo sapiens
  Payload ID: 19750
  Gene Name: zinc finger protein 100
  Uniprot ID: Q8IYN0
  ENST ID: ENST00000358296
  CDS Start-End: 200-1828
aatcaggcatgcagctggagcggactggacggcttccgggtttggcggggtctttgtctctcgctgtagccggagctccaggttttgctctcacttctctgtgtcttctgctcctaggggcctagcctgtgtggccctctgacctgcagatattgggagatccacagctaagacgccaggaccccctagaagcctagaaatggatgacccgaggtatggaatgtgtcctctcaagggagcaagtggatgccctggggctgagaggagtcttctggtgcagtcttattttgaaaaggggccattgacgtttagggatgtggccatagaattctctctggaggagtggcaatgcctggacagtgctcagcagggtttgtataggaaagtgatgttagagaactacagaaacctggtcttcttggcaggtattgctctcactaagccagacctgatcacctgtctggagcaaggaaaagagccctggaatataaagagacatgagatggtagccaaacccccagttatatgttctcattttccccaagacctttgggcagagcaggacattaaagattcttttcaagaagcgattctgaaaaaatatggaaaatatggacatgacaatttacagttacaaaaaggctgtaaaagtgtggatgagtgtaaagtgcacaaagaacatgataacaaattaaaccagtgtttgataactacccagagcaacatatttcaatgtgatccatctgcaaaagtctttcatacattttcaaattcaaacagacataagataagacatactagaaagaaacctttcaaatgtaaaaaatgtgaaaaatcattttgcatgcttttacacctaactcaacataaaagatttcatattacagagaattcctaccaatgtaaagattgtggcaaagccttcaactggttctcaacccttactacacacaggagaattcatactggagagaaaccctacaaatgtgaagaatgtgggaaagcatttaaccggtcctcacaccttactacacataagataattcatactggagagaaaccatacagatgtgaagaatgtgggaaagcttttaaccggtcttcacaccttactacacataaaagaattcatactggagtgaaaccctacaaatgtacagaatgtggcaaagcttttaaccggtcctcacaccttactacacacaggataattcatactggagagaaaccctacaaatgtgaagaatgtggcaaagcctttaaccagtcctcaacccttactacacataagataactcatgctggagagaaaccttacaaatgtgaagaatgtggcaaagctttttaccgattctcataccttactaaacataagacaagtcatactggagagaaattctacaaatgtgaagaatgcggcaaaggctttaactggtcctcagccctcactaaacataagagaattcatactggagagaaaccctacaaatgtgaagaatgtggcaaagcttttaatgagtcctcaaaccttactacccataagatgattcatactggagagaaaccctacaaatgtgacgaatgtggcaaagcctttaaccggtcctcacaactaactgcacataagatgattcatactggagagaaaccctacaaatgtgaggaatgtggcaaagcttttaaccgatcctcaacccttactaaacataagataactcatactggagagaaatcttacaaatgggaagaatgtggtaaagactttaaccagtccctaagccttattaaacaaaataactcatactggagagaaaccctacaaatgtgaaaaatgtggcaaagccttttaccagtcctcaactcttactaaacataaaaaaattcatactggagggaactcctgtgactgtgaagaatatggcaaagcctttaataaattctcaattcctaacagacataagataattcatactagagagaaattctacaaaccagaaagatgtgacagtgctttgaaaacacctcaaacttttcaaaacataaatcatagtgttgagaaatcctagaaatgtgaagaatgtgataaagttttaaatggttgtcacacttgattgtaggtaaggtaagttatactggagaaaacttctacatgtgtgaacagtgtgacaaaacttttaactaatgctcacaccttcacaggaaagcatttatacttgagaaatattgtacaaatataaagactgtgaaaaagccattaatacatgctcacatcttactcaacatcagagagttcatactcaataaaaacataagtgcaactactgtcaaaatatctttaagaaaatataagcttttaaagtgaagagtattttgaagaagaacattgtagtagaattgtaatatgtttacttgtatcacagatcttactgtacacgttttgtattagaggaaacctctgaagcagttgctcaaactttgttcaatatcagggaatttatattgaaaaaaactgtgcgaatgtaataaagttggaaaaatactttttcaaaaactacagcttagaaaacaccagagagttcatactaaaacatatttttgcagatacaggaaaaattttttaaaaattttaatcattaagtctgtaaatatcagagaatttacagtagaaatatgtaaggcactgatgcttcaggtattttactaaatcagagtgctgagtatagaaaataatctaaaactaaaattggtaaaatatttgtatataactttaaaagtagaaattttttgcagttattgcattcaaagtatgcttaactttttgaaaaaattagattttttgaaaagtgagtaataatgtaattcaactcttaaattatttcctgccttttcttcactcctatttacatgtgaaagcatgtgatcaattgttgctgcatcagatatgagagattcttttttattaggtgagcattatttataaactttgctatgaaaaagacattaaaatatgagatgtatgatgaaaatctaagtgaagagacttttatggttaacttataatattaagcaatgtgtgcgttaggcattcagagtaatattctgcattatgagaaaacttaatttcatttataagtaaattaaaattagtatattttactaatacttttatataaaatgcagtatattttttaaatttcagattatatgtgatgttaatatattcaacctttttaacatgttaaatactattgtgcattcagtgaagtgttattatgccacagacattaacctattccaccttactcaagggtgtacgtaaaacatggtaacagtatactatttggtaacataatggattaacatctctagtaatctcttttgctagtggctttgactgcaaataagttaaagaatattatttctgtaggttaaatttttgtttttattttattttatttttgagaggtagtcttgctctgtcacccaggctggagtgcagtggcacgatctcggctcactgtaacctccacctcctgggttcacgcaattctcctgcctcagcctcctaagtagctgggattacaggcacccaccaccatgcccagctaatttttgtattttagtagagacagggtttcataatgtaagtcaagctggtctcgaactcctgaccttaaatgatttgcctgcctcggcttcccaaagttctgggattacaggcatgagccaccgtgcccagccaaatgtttattttatttaaatttatttttcttaattatttggggtacataatatgagtatatattcatgcaatatatggcatattttgatacaagaatacagtatataataatcacatcagggtaaatgaggtatccatcacctctagtatttatcctttgtattacaagcaacccagttttatacttttagttattttaaaatgtaaaattaaattgttattgattacagtgttatttttatggtcataataaaagttatgtagaagtataataaaatccctacatttctgaggcctgaataagtatttttaaagttttctaatatttattttttgagcatgtttcctgtctgcctgcaaacacatgcagacatttagttttgatttacatatagttaaatatatgttagtctaaagataaaccttaagtgtaagaaaattatagagtgagtttgtgtgtatgaatttgtacctgttttccgaagaaaaaagcaatactgaacaaaacaaatcattttaacaagatgactactagaaaactaaaagcctcaaaaatgctaaaagaaaatgtattctctgctttgtattgaatttattactgtacattctgtggcttatagttctgaatctccccatgaaaattctgtttatacttgcctggtactcatgatagacccctaattattttgtatcttttttcatataaatattttacagattatgaagtattcattatgtgagctggtctgtgattataagaataatttttacaaaatttagtgcatacaaaatttttaaatgtaattccacaattagtgtattaagttacattttatttagttagaacacttcattttgtttttagttggagaactctatagccctttagttatttttcttttcactttttatagttgacataagtaaatttatttattgagtcaatttgttcaggtaagtactagggaagctttataagtcgtgaggatgtttttatatttaaatgtagcaaacatacatgacagttcttgctgtgtaacagatgctccatagtaagccataagtattcctgctaaagttagcttgtaacttcagttcagagatggaaaacatcagtggtgaagaaataaaattgattcttcatgtggagaggacatagtttccaggctgcaatgctgaatcttgctgaatttaaagagaagttctgcatcttttatttcttaattatcttcagatttctctgtatttattatgtgtatccccagctatgtatgcagcacagcccatctcctttttctgtgttatggcttcagttttctcactgttgtcttaatgccatttcatttcacatggtactttgtaaattttgacgagaaagttggttgtttttttttttttttttttttttgagacagagtctcactcttgttgcccaagctggagtgcagtggtgcaatgtgggctcactgcaacctctgccttccaggttcaagcaattatcctgcctcagcctcccaagtagctgggattacaggcacctgccaccacatctggctgaatttttttttttttaattttttgtagagacgaagtttcaccatgttggccaggctggtttcaaactcctgacctcatatgatccacctgcctcagcctcccaaagtgcttggattacaggcataagccactgcacccagctgaaagttggtattttttaatgcactgaataattgtttttaactggagagtttggttatcaatataactttcggattagttaagataaaagcatacattgtccacaggtgagaagattaaatcagaatagttgttctttgttaaaaaaaaaattagattcttaaagtgtggcaaacataaaatttgcaagaaaatgtagaaattaaatttttaagagttaatggtaagtgaacaattttaaatttattttttattatgtaacatacttttattaaaatatatacttatataataaaagtataaca

SEQ ID NO: 201411 - DNA, 2283 bp, Homo sapiens
  Payload ID: 19750
  Gene Name: zinc finger protein 100
  ENST ID: ENST00000305570
  CDS Start-End: 357-1793
agcagccgcccctcccccaacaatggcgcagcccaggctgcacccgcgcaagcaggtgcctcctcgctggcagttcacccgcccaccccgcgacccgccccgggcagggctccggcctccctgcacgctcgccgcgctgccgctgcctccgcctccccaagctgactcatctggagataattatgtgtttttctctttcgttctctttatgtgatggattacatttattgatttacatatgttgaaccagccttgcatcccaggggccattgacgtttagggatgtggccatagaattctctctggaggagtggcaatgcctggacagtgctcagcagggtttgtataggaaagtgatgttagagaactacagaaacctggtcttcttgggtattgctctcactaagccagacctgatcacctgtctggagcaaggaaaagagccctggaatataaagagacatgagatggtagccaaacccccagttatatgttctcattttccccaagacctttgggcagagcaggacattaaagattcttttcaagaagcgattctgaaaaaatatggaaaatatggacatgacaatttacagttacaaaaaggctgtaaaagtgtggatgagtgtaaagtgcacaaagaacatgataacaaattaaaccagtgtttgataactacccagagcaacatatttcaatgtgatccatctgcaaaagtctttcatacattttcaaattcaaacagacataagataagacatactagaaagaaacctttcaaatgtaaaaaatgtgaaaaatcattttgcatgcttttacacctaactcaacataaaagatttcatattacagagaattcctaccaatgtaaagattgtggcaaagccttcaactggttctcaacccttactacacacaggagaattcatactggagagaaaccctacaaatgtgaagaatgtgggaaagcatttaaccggtcctcacaccttactacacataagataattcatactggagagaaaccatacagatgtgaagaatgtgggaaagcttttaaccggtcttcacaccttactacacataaaagaattcatactggagtgaaaccctacaaatgtacagaatgtggcaaagcttttaaccggtcctcacaccttactacacacaggataattcatactggagagaaaccctacaaatgtgaagaatgtggcaaagcctttaaccagtcctcaacccttactacacataagataactcatgctggagagaaaccttacaaatgtgaagaatgtggcaaagctttttaccgattctcataccttactaaacataagacaagtcatactggagagaaattctacaaatgtgaagaatgcggcaaaggctttaactggtcctcagccctcactaaacataagagaattcatactggagagaaaccctacaaatgtgaagaatgtggcaaagcttttaatgagtcctcaaaccttactacccataagatgattcatactggagagaaaccctacaaatgtgacgaatgtggcaaagcctttaaccggtcctcacaactaactgcacataagatgattcatactggagagaaaccctacaaatgtgaggaatgtggcaaagcttttaaccgatcctcaacccttactaaacataagataactcatactggagagaaatcttacaaatgggaagaatgtggtaaagactttaaccagtccctaagccttattaaacaaaataactcatactggagagaaaccctacaaatgtgaaaaatgtggcaaagccttttaccagtcctcaactcttactaaacataaaaaaattcatactggagggaactcctgtgactgtgaagaatatggcaaagcctttaataaattctcaattcctaacagacataagataattcatactagagagaaattctacaaaccagaaagatgtgacagtgctttgaaaacacctcaaacttttcaaaacataaatcatagtgttgagaaatcctagaaatgtgaagaatgtgataaagttttaaatggttgtcacacttgattgtaggtaaggtaagttatactggagaaaacttctacatgtgtgaacagtgtgacaaaacttttaactaatgctcacaccttcacaggaaagcatttatacttgagaaatattgtacaaatataaagactgtgaaaaagccattaatacatgctcacatcttactcaacatcagagagttcatactcaataaaaacataagtgcaa

SEQ ID NO: 201412 - DNA, 588 bp, Homo sapiens
  Payload ID: 19750
  Gene Name: zinc finger protein 100
  ENST ID: ENST00000598026
  CDS Start-End: 121-588
aggttttgctctcacttctctgtgtcttctgctcctaggggcctagcctgtgtggccctctgacctgcagatattgggagatccacagctaagacgccaggaccccctagaagcctagaaatggatgacccgaggtatggaatgtgtcctctcaagggagcaagtggatgccctggggctgagaggagtcttctggtgcagtcttattttgaaaaggggccattgacgtttagggatgtggccatagaattctctctggaggagtggcaatgcctggacagtgctcagcagggtttgtataggaaagtgatgttagagaactacagaaacctggtcttcttggcaggtattgctctcactaagccagacctgatcacctgtctggagcaaggaaaagagccctggaatataaagagacatgagatggtagccaaacccccagacggagtctcgctctgtcatcaagttggagtgcagtggcgcgatcttggttcactgcaacctccacctcctgggttcaagcaatcttcctgcctcagcctcctgagtagctgcgactacaggcacatgccaccacgccaagctaat

SEQ ID NO: 201413 - DNA, 548 bp, Homo sapiens
  Payload ID: 19750
  Gene Name: zinc finger protein 100
  ENST ID: ENST00000594401
  CDS Start-End: 360-548
agttcacccgcccaccccgcgacccgccccgggcagggctccggcctccctgcacgctcgccgcgctgccgctgcctccgcctccccaagctgactcatctggagataattatgtgtttttctctttcgttctctttatgtgatggattacatttattgatttacatatgttgaaccagccttgcatcccagagaatttcatctgaaaaggattccaagagaagaaggagaaagaggaaaaatgatgtttttttttcttcagctaagggccattgacgtttagggatgtggccatagaattctctctggaggagtggcaatgcctggacagtgctcagcagggtttgtataggaaagtgatgttagagaactacagaaacctggtcttcttgggtattgctctcactaagccagacctgatcacctgtctggagcaaggaaaagagccctggaatataaagagacatgagatggtagccaaacccccagttatatgttctcattttccccaagacctttgggcagagcaggacattaaagattctttt

SEQ ID NO: 201414 - DNA, 1840 bp, Homo sapiens
  Payload ID: 19750
  Gene Name: zinc finger protein 100
  ENST ID: ENST00000608416
  CDS Start-End: 70-1770
gtggccctctgacctgcagatattgggagatccacagctaagacgccaggaccccctagaagcctagaaatggtggacccgaggtatggaatgtgtcctctcaagggagcaagtggatgccctggggctgagaggagtcttctggtgcagtcttattttgaaaaggggccattgacgtttagggatgtggccatagaattctctctggaggagtggcaatgcctggacagtgctcagcagggtttgtataggaaagtgatgttagagaactacagaaacctggtcttcttgggtattgctctcactaagccagacctgatcacctgtctggagcaaggaaaagagccctggaatataaagagacatgagatggtagccaaacccccagttatatgttctcattttccccaagacctttgggcagagcaggacattaaagattcttttcaagaagcgattctgaaaaaatatggaaaatatggacatgacaatttacagttacaaaaaggctgtaaaagtgtggatgagtgtaaagtgcacaaagaacatgataacaaattaaaccagtgtttgataactacccagagcaacatatttcaatgtgatccatctgcaaaagtctttcatacattttcaaattcaaacagacataagataagacatactagaaagaaacctttcaaatgtaaaaaatgtgaaaaatcattttgcatgcttttacacctaactcaacataaaagatttcatattacagagaattcctaccaatgtaaagattgtggcaaagccttcaactggttctcaacccttactacacacaggagaattcatactggagagaaaccctacaaatgtgaagaatgtgggaaagcatttaaccggtcctcacaccttactacacataagataattcatactggagagaaaccatacagatgtgaagaatgtgggaaagcttttaaccggtcttcacaccttactacacataaaagaattcatactggagtgaaaccctacaaatgtacagaatgtggcaaagcttttaaccggtcctcacaccttactacacacaggataattcatactggagagaaaccctacaaatgtgaagaatgtggcaaagcctttaaccagtcctcaacccttactacacataagataactcatgctggagagaaaccttacaaatgtgaagaatgtggcaaagctttttaccgattctcataccttactaaacataagacaagtcatactggagagaaattctacaaatgtgaagaatgcggcaaaggctttaactggtcctcagccctcactaaacataagagaattcatactggagagaaaccctacaaatgtgaagaatgtggcaaagcttttaatgagtcctcaaaccttactacccataagatgattcatactggagagaaaccctacaaatgtgacgaatgtggcaaagcctttaaccggtcctcacaactaactgcacataagatgattcatactggagagaaaccctacaaatgtgaggaatgtggcaaagcttttaaccgatcctcaacccttactaaacataagataactcatactggagagaaatcttacaaatgggaagaatgtggtaaagactttaaccagtccctaagccttattaaaataactcatactggagagaaaccctacaaatgtgaaaaatgtggcaaagccttttaccagtcctcaactcttactaaacataaaaattcatactggagggaactcctgctgtgaagaatatggcaaagcctttaataaattctcaattcctaacagacataagataattcatactagagagaaa

SEQ ID NO: 201415 - DNA, 5643 bp, Homo sapiens
  Payload ID: 19750
  Gene Name: zinc finger protein 100
  Uniprot ID: Q8IYN0
  ENST ID: ENST00000614218
  CDS Start-End: 98-1726
gtcttctgctcctaggggcctagcctgtgtggccctctgacctgcagatattgggagatccacagctaagacgccaggaccccctagaagcctagaaatggatgacccgaggtatggaatgtgtcctctcaagggagcaagtggatgccctggggctgagaggagtcttctggtgcagtcttattttgaaaaggggccattgacgtttagggatgtggccatagaattctctctggaggagtggcaatgcctggacagtgctcagcagggtttgtataggaaagtgatgttagagaactacagaaacctggtcttcttggcaggtattgctctcactaagccagacctgatcacctgtctggagcaaggaaaagagccctggaatataaagagacatgagatggtagccaaacccccagttatatgttctcattttccccaagacctttgggcagagcaggacattaaagattcttttcaagaagcgattctgaaaaaatatggaaaatatggacatgacaatttacagttacaaaaaggctgtaaaagtgtggatgagtgtaaagtgcacaaagaacatgataacaaattaaaccagtgtttgataactacccagagcaacatatttcaatgtgatccatctgcaaaagtctttcatacattttcaaattcaaacagacataagataagacatactagaaagaaacctttcaaatgtaaaaaatgtgaaaaatcattttgcatgcttttacacctaactcaacataaaagatttcatattacagagaattcctaccaatgtaaagattgtggcaaagccttcaactggttctcaacccttactacacacaggagaattcatactggagagaaaccctacaaatgtgaagaatgtgggaaagcatttaaccggtcctcacaccttactacacataagataattcatactggagagaaaccatacagatgtgaagaatgtgggaaagcttttaaccggtcttcacaccttactacacataaaagaattcatactggagtgaaaccctacaaatgtacagaatgtggcaaagcttttaaccggtcctcacaccttactacacacaggataattcatactggagagaaaccctacaaatgtgaagaatgtggcaaagcctttaaccagtcctcaacccttactacacataagataactcatgctggagagaaaccttacaaatgtgaagaatgtggcaaagctttttaccgattctcataccttactaaacataagacaagtcatactggagagaaattctacaaatgtgaagaatgcggcaaaggctttaactggtcctcagccctcactaaacataagagaattcatactggagagaaaccctacaaatgtgaagaatgtggcaaagcttttaatgagtcctcaaaccttactacccataagatgattcatactggagagaaaccctacaaatgtgacgaatgtggcaaagcctttaaccggtcctcacaactaactgcacataagatgattcatactggagagaaaccctacaaatgtgaggaatgtggcaaagcttttaaccgatcctcaacccttactaaacataagataactcatactggagagaaatcttacaaatgggaagaatgtggtaaagactttaaccagtccctaagccttattaaacaaaataactcatactggagagaaaccctacaaatgtgaaaaatgtggcaaagccttttaccagtcctcaactcttactaaacataaaaaaattcatactggagggaactcctgtgactgtgaagaatatggcaaagcctttaataaattctcaattcctaacagacataagataattcatactagagagaaattctacaaaccagaaagatgtgacagtgctttgaaaacacctcaaacttttcaaaacataaatcatagtgttgagaaatcctagaaatgtgaagaatgtgataaagttttaaatggttgtcacacttgattgtaggtaaggtaagttatactggagaaaacttctacatgtgtgaacagtgtgacaaaacttttaactaatgctcacaccttcacaggaaagcatttatacttgagaaatattgtacaaatataaagactgtgaaaaagccattaatacatgctcacatcttactcaacatcagagagttcatactcaataaaaacataagtgcaactactgtcaaaatatctttaagaaaatataagcttttaaagtgaagagtattttgaagaagaacattgtagtagaattgtaatatgtttacttgtatcacagatcttactgtacacgttttgtattagaggaaacctctgaagcagttgctcaaactttgttcaatatcagggaatttatattgaaaaaaactgtgcgaatgtaataaagttggaaaaatactttttcaaaaactacagcttagaaaacaccagagagttcatactaaaacatatttttgcagatacaggaaaaattttttaaaaattttaatcattaagtctgtaaatatcagagaatttacagtagaaatatgtaaggcactgatgcttcaggtattttactaaatcagagtgctgagtatagaaaataatctaaaactaaaattggtaaaatatttgtatataactttaaaagtagaaattttttgcagttattgcattcaaagtatgcttaactttttgaaaaaattagattttttgaaaagtgagtaataatgtaattcaactcttaaattatttcctgccttttcttcactcctatttacatgtgaaagcatgtgatcaattgttgctgcatcagatatgagagattcttttttattaggtgagcattatttataaactttgctatgaaaaagacattaaaatatgagatgtatgatgaaaatctaagtgaagagacttttatggttaacttataatattaagcaatgtgtgcgttaggcattcagagtaatattctgcattatgagaaaacttaatttcatttataagtaaattaaaattagtatattttactaatacttttatataaaatgcagtatattttttaaatttcagattatatgtgatgttaatatattcaacctttttaacatgttaaatactattgtgcattcagtgaagtgttattatgccacagacattaacctattccaccttactcaagggtgtacgtaaaacatggtaacagtatactatttggtaacataatggattaacatctctagtaatctcttttgctagtggctttgactgcaaataagttaaagaatattatttctgtaggttaaatttttgtttttattttattttatttttgagaggtagtcttgctctgtcacccaggctggagtgcagtggcacgatctcggctcactgtaacctccacctcctgggttcacgcaattctcctgcctcagcctcctaagtagctgggattacaggcacccaccaccatgcccagctaatttttgtattttagtagagacagggtttcataatgtaagtcaagctggtctcgaactcctgaccttaaatgatttgcctgcctcggcttcccaaagttctgggattacaggcatgagccaccgtgcccagccaaatgtttattttatttaaatttatttttcttaattatttggggtacataatatgagtatatattcatgcaatatatggcatattttgatacaagaatacagtatataataatcacatcagggtaaatgaggtatccatcacctctagtatttatcctttgtattacaagcaacccagttttatacttttagttattttaaaatgtaaaattaaattgttattgattacagtgttatttttatggtcataataaaagttatgtagaagtataataaaatccctacatttctgaggcctgaataagtatttttaaagttttctaatatttattttttgagcatgtttcctgtctgcctgcaaacacatgcagacatttagttttgatttacatatagttaaatatatgttagtctaaagataaaccttaagtgtaagaaaattatagagtgagtttgtgtgtatgaatttgtacctgttttccgaagaaaaaagcaatactgaacaaaacaaatcattttaacaagatgactactagaaaactaaaagcctcaaaaatgctaaaagaaaatgtattctctgctttgtattgaatttattactgtacattctgtggcttatagttctgaatctccccatgaaaattctgtttatacttgcctggtactcatgatagacccctaattattttgtatcttttttcatataaatattttacagattatgaagtattcattatgtgagctggtctgtgattataagaataatttttacaaaatttagtgcatacaaaatttttaaatgtaattccacaattagtgtattaagttacattttatttagttagaacacttcattttgtttttagttggagaactctatagccctttagttatttttcttttcactttttatagttgacataagtaaatttatttattgagtcaatttgttcaggtaagtactagggaagctttataagtcgtgaggatgtttttatatttaaatgtagcaaacatacatgacagttcttgctgtgtaacagatgctccatagtaagccataagtattcctgctaaagttagcttgtaacttcagttcagagatggaaaacatcagtggtgaagaaataaaattgattcttcatgtggagaggacatagtttccaggctgcaatgctgaatcttgctgaatttaaagagaagttctgcatcttttatttcttaattatcttcagatttctctgtatttattatgtgtatccccagctatgtatgcagcacagcccatctcctttttctgtgttatggcttcagttttctcactgttgtcttaatgccatttcatttcacatggtactttgtaaattttgacgagaaagttggttgtttttttttttttttttttttttgagacagagtctcactcttgttgcccaagctggagtgcagtggtgcaatgtgggctcactgcaacctctgccttccaggttcaagcaattatcctgcctcagcctcccaagtagctgggattacaggcacctgccaccacatctggctgaatttttttttttttaattttttgtagagacgaagtttcaccatgttggccaggctggtttcaaactcctgacctcatatgatccacctgcctcagcctcccaaagtgcttggattacaggcataagccactgcacccagctgaaagttggtattttttaatgcactgaataattgtttttaactggagagtttggttatcaatataactttcggattagttaagataaaagcatacattgtccacaggtgagaagattaaatcagaatagttgttctttgttaaaaaaaaaattagattcttaaagtgtggcaaacataaaatttgcaagaaaatgtagaaattaaatttttaagagttaatggtaagtgaacaattttaaatttattttttattatgtaacatacttttattaaaatatatacttatataataaaagtataaca

SEQ ID NO: 201416 - DNA, 2283 bp, Homo sapiens; identical to SEQ ID NO: 201411
  Payload ID: 19750
  Gene Name: zinc finger protein 100
  ENST ID: ENST00000624316
  CDS Start-End: 357-1793

SEQ ID NO: 201417 - DNA, 588 bp, Homo sapiens; identical to SEQ ID NO: 201412
  Payload ID: 19750
  Gene Name: zinc finger protein 100
  ENST ID: ENST00000624841
  CDS Start-End: 121-588

SEQ ID NO: 201418 - DNA, 548 bp, Homo sapiens; identical to SEQ ID NO: 201413
  Payload ID: 19750
  Gene Name: zinc finger protein 100
  ENST ID: ENST00000623758
  CDS Start-End: 360-548

SEQ ID NO: 201419 - DNA, 1830 bp, Homo sapiens
  Payload ID: 19751
  Gene Name: zinc finger protein 101
  Uniprot ID: Q8IZC7
  ENST ID: ENST00000318110
  CDS Start-End: 169-1479
aacttccaaagcccgaagcggtctcatttcccgccggccccccattcgggtccgggttttagttcctcggggagcccctggtgccccggatacggctgattttgtcgtgtgggacctgttctggctgctccagccccaggaaggacccaggacacccggaagccggaaatggactcagtggcctttgaggatgtggctgtgaacttcacccaggaggagtgggctttgctgagtccttcccagaagaatctctacagagatgtgacgctggaaaccttcaggaacctggcctcggtcggaatccaatggaaagaccaggacattgagaatctgtaccaaaacctggggattaagctaagaagtctggtggagagactctgtggacgtaaagaagggaatgaacacagagaaactttcagccagattcctgattgtcacctgaacaagaaaagtcaaactggagtgaaaccatgcaaatgcagcgtgtgtgggaaagtcttcctccgtcattcattcctggacaggcacatgagagctcatgctggacacaaacgatctgagtgtggtggggaatggagagagacgccccgtaaacagaaacaacatgggaaagcctccatttcccccagtagtggtgcacggcgcacagtaacaccaactcgaaagagaccttatgaatgcaaggtgtgcgggaaagcctttaattctcccaatttatttcaaatccatcaaagaactcacactggaaagaggtcctataaatgtagggaaatagtgagagccttcacagtttccagtttctttcgaaaacatggaaaaatgcatactggagaaaaacgctatgaatgtaaatactgtggaaaacctatcgattatcccagtttatttcaaattcatgttagaactcacactggagaaaaaccttacaaatgtaaacaatgtggtaaagccttcatttccgcaggttaccttcggacacatgaaatcagatctcacgcgctggagaaatcccaccaatgtcaggaatgtgggaaaaaactcagttgttccagttcccttcacagacatgaaagaactcatagtggaggaaaactctacgaatgtcaaaaatgtgccaaagtctttagatgtcccacgtcccttcaagcacatgaaagagctcacactggagaaagaccttatgaatgtaataaatgtggtaaaaccttcaattatcccagttgttttcgaagacataaaaaaactcatagtggagaaaagccatatgaatgtacaaggtgtggtaaagcctttgggtggtgcagttccctccgaagacatgaaatgactcacactggagaaaaaccctttgattgtaaacagtgtggtaaagtctttactttttcaaattaccttagacttcatgaaagaactcatttggccgggcgtagccagtgctttggcaggaggcagggggatcacctgagcccaggagtttgagaccagcctgggcaacataagaaggccccatatcggctgggtacggtggctcacgcttgtaatcccagcactttgggaggctgaggcgggtggatcacctgaggtcaggagttcaagactagcctggccaacatggtgaaaccccgtctctactaaaaatacaaaaaaattaactgggcatggtggtgggcacctgtaatctcagctactcgggaggccgaggcaggagaatcgcttgaacctgggaggtggaggttgcagtgagccgagatcgcgccgctgcactccagcctggtgacagagcgagacttcgtctcaaaacaaacaaaaaaaagaaggccccatatctcc

SEQ ID NO: 201420 - DNA, 1552 bp, Homo sapiens
  Payload ID: 19751
  Gene Name: zinc finger protein 101
  Uniprot ID: Q8IZC7
  ENST ID: ENST00000415784
  CDS Start-End: 573-1523
cgtgtgggacctgttctggctgctccagccccaggaaggacccaggacacccggaagccggaaatgacaaagtcttgccctgttgcccaggctggagtgcaatggtacaatcttggctcactacaacctccgctaaagtgattctcctgcctcagccctcccccacgcccggtagctgaacccggtagctgaatcctgagtagctgggattacaggactcagtggcctttgaggatgtggctgtgaacttcacccaggaggagtgggctttgctgagtccttcccagaagaatctctacagagatgtgacgctggaaaccttcaggaacctggcctcggtcggaatccaatggaaagaccaggacattgagaatctgtaccaaaacctggggattaagctaagaagtctggtggagagactctgtggacgtaaagaagggaatgaacacagagaaactttcagccagattcctgattgtcacctgaacaagaaaagtcaaactggagtgaaaccatgcaaatgcagcgtgtgtgggaaagtcttcctccgtcattcattcctggacaggcacatgagagctcatgctggacacaaacgatctgagtgtggtggggaatggagagagacgccccgtaaacagaaacaacatgggaaagcctccatttcccccagtagtggtgcacggcgcacagtaacaccaactcgaaagagaccttatgaatgcaaggtgtgcgggaaagcctttaattctcccaatttatttcaaatccatcaaagaactcacactggaaagaggtcctataaatgtagggaaatagtgagagccttcacagtttccagtttctttcgaaaacatggaaaaatgcatactggagaaaaacgctatgaatgtaaatactgtggaaaacctatcgattatcccagtttatttcaaattcatgttagaactcacactggagaaaaaccttacaaatgtaaacaatgtggtaaagccttcatttccgcaggttaccttcggacacatgaaatcagatctcacgcgctggagaaatcccaccaatgtcaggaatgtgggaaaaaactcagttgttccagttcccttcacagacatgaaagaactcatagtggaggaaaactctacgaatgtcaaaaatgtgccaaagtctttagatgtcccacgtcccttcaagcacatgaaagagctcacactggagaaagaccttatgaatgtaataaatgtggtaaaaccttcaattatcccagttgttttcgaagacataaaaaaactcatagtggagaaaagccatatgaatgtacaaggtgtggtaaagcctttgggtggtgcagttccctccgaagacatgaaatgactcacactggagaaaaaccctttgattgtaaacagtgtggtaaagtctttactttttcaaattaccttagacttcatgaaagaactcatttggccgggcgtagccagtgctttggcaggaggcagggggatcacctgagcccaggagtttgagaccagcctgggcaacataagaaggcccc

SEQ ID NO: 201421 - DNA, 1152 bp, Homo sapiens
  Payload ID: 19751
  Gene Name: zinc finger protein 101
  ENST ID: ENST00000444249
  CDS Start-End: 114-299
gttttagttcctcggggagcccctggtgccccggatacggctgattttgtcgtgtgggacctgttctggctgctccagccccaggaaggacccaggacacccggaagccggaaatggactcagtggcctttgaggatgtggctgtgaacttcacccaggaggagtgggctttgctgagtccttcccagaagaatctctacagagatgtgacgctggaaaccttcaggaacctggcctcggaatccaatggaaagaccaggacattgagaatctgtaccaaaacctggggattaagctaagaagtctggtggagagactctgtggacgtaaagaagggaatgaacacagagaaactttcagccagattcctgattgtcacctgaacaagaaaagtcaaactggagtgaaaccatgcaaatgcagcgtgtgtgggaaagtcttcctccgtcattcattcctggacaggcacatgagagctcatgctggacacaaacgatctgagtgtggtggggaatggagagagacgccccgtaaacagaaacaacatgggaaagcctccatttcccccagtagtggtgcacggcgcacagtaacaccaactcgaaagagaccttatgaatgcaaggtgtgcgggaaagcctttaattctcccaatttatttcaaatccatcaaagaactcacactggaaagaggtcctataaatgtagggaaatagtgagagccttcacagtttccagtttctttcgaaaacatggaaaaatgcatactggagaaaaacgctatgaatgtaaatactgtggaaaacctatcgattatcccagtttatttcaaattcatgttagaactcacactggagaaaaaccttacaaatgtaaacaatgtggtaaagccttcatttccgcaggttaccttcggacacatgaaatcagatctcacgcgctggagaaatcccaccaatgtcaggaatgtgggaaaaaactcagttgttccagttcccttcacagacatgaaagaactcatagtggaggaaaactctacgaatgtcaaaaatgtgccaaagtctttagatgtcccacgtcccttcaagcacatgaaagagctcacactggagaaagaccttatgaatgtaataaatgtggtaaaaccttcaa

SEQ ID NO: 201422 - DNA, 581 bp, Homo sapiens
  Payload ID: 19751
  Gene Name: zinc finger protein 101
  ENST ID: ENST00000585565
  CDS Start-End: 1-442
actcagttgttccagttcccttcacagacatgaaagaactcatagtggaggaaaactctacgaatgtcaaaaatgtgccaaagtctttagatgtcccacgtcccttcaagcacatgaaagagctcacactggagaaagaccttatgaatgtaataaatgtggtaaaaccttcaattatcccagttgttttcgaagacataaaaaaactcatagtggagaaaagccatatgaatgtacaaggtgtggtaaagcctttgggtggtgcagttccctccgaagacatgaaatgactcacactggagaaaaaccctttgattgtaaacagtgtggtaaagtctttactttttcaaattaccttagacttcatgaaagaactcatttggccgggcgtagccagtgctttggcaggaggcagggggatcacctgagcccaggagtttgagaccagcctgggcaacataagaaggccccatatcggctgggtacggtggctcacgcttgtaatcccagcactttgggaggctgaggctggtcttgaactcctgacctcaaggaatccatcctcttcagcctcgcaaagt

SEQ ID NO: 201423 - DNA, 575 bp, Homo sapiens
  Payload ID: 19751
  Gene Name: zinc finger protein 101
  ENST ID: ENST00000541458
  CDS Start-End: 402-575
aacttccaaagcccgaagcggtctcatttcccgccggccccccattcgggtccgggttttagttcctcggggagcccctggtgccccggatacggctgattttgtcgtgtgggacctgttctggctgctccagccccaggaaggacccaggacacccggaagccggaaatggaatccaatggaaagaccaggacattgagaatctgtaccaaaacctggggattaagctaagaagtctggtggagagactctgtggacgtaaagaagggaatgaacacagagaaactttcagccagattcctgattgtcacctgaacaagaaaagtcaaactggagtgaaaccatgcaaatgcagcgtgtgtgggaaagtcttcctccgtcattcattcctggacaggcacatgagagctcatgctggacacaaacgatctgagtgtggtggggaatggagagagacgccccgtaaacagaaacaacatgggaaagcctccatttcccccagtagtggtgcacggcgcacagtaacaccaactcgaaagagaccttatgaatgcaaggtgtgcgggaaagccttt

SEQ ID NO: 201424 - DNA, 4627 bp, Homo sapiens
  Payload ID: 19751
  Gene Name: zinc finger protein 101
  Uniprot ID: Q8IZC7
  ENST ID: ENST00000592502
  CDS Start-End: 111-1421
ttagttcctcggggagcccctggtgccccggatacggctgattttgtcgtgtgggacctgttctggctgctccagccccaggaaggacccaggacacccggaagccggaaatggactcagtggcctttgaggatgtggctgtgaacttcacccaggaggagtgggctttgctgagtccttcccagaagaatctctacagagatgtgacgctggaaaccttcaggaacctggcctcggtcggaatccaatggaaagaccaggacattgagaatctgtaccaaaacctggggattaagctaagaagtctggtggagagactctgtggacgtaaagaagggaatgaacacagagaaactttcagccagattcctgattgtcacctgaacaagaaaagtcaaactggagtgaaaccatgcaaatgcagcgtgtgtgggaaagtcttcctccgtcattcattcctggacaggcacatgagagctcatgctggacacaaacgatctgagtgtggtggggaatggagagagacgccccgtaaacagaaacaacatgggaaagcctccatttcccccagtagtggtgcacggcgcacagtaacaccaactcgaaagagaccttatgaatgcaaggtgtgcgggaaagcctttaattctcccaatttatttcaaatccatcaaagaactcacactggaaagaggtcctataaatgtagggaaatagtgagagccttcacagtttccagtttctttcgaaaacatggaaaaatgcatactggagaaaaacgctatgaatgtaaatactgtggaaaacctatcgattatcccagtttatttcaaattcatgttagaactcacactggagaaaaaccttacaaatgtaaacaatgtggtaaagccttcatttccgcaggttaccttcggacacatgaaatcagatctcacgcgctggagaaatcccaccaatgtcaggaatgtgggaaaaaactcagttgttccagttcccttcacagacatgaaagaactcatagtggaggaaaactctacgaatgtcaaaaatgtgccaaagtctttagatgtcccacgtcccttcaagcacatgaaagagctcacactggagaaagaccttatgaatgtaataaatgtggtaaaaccttcaattatcccagttgttttcgaagacataaaaaaactcatagtggagaaaagccatatgaatgtacaaggtgtggtaaagcctttgggtggtgcagttccctccgaagacatgaaatgactcacactggagaaaaaccctttgattgtaaacagtgtggtaaagtctttactttttcaaattaccttagacttcatgaaagaactcatttggccgggcgtagccagtgctttggcaggaggcagggggatcacctgagcccaggagtttgagaccagcctgggcaacataagaaggccccatatcggctgggtacggtggctcacgcttgtaatcccagcactttgggaggctgaggcgggtggatcacctgaggtcaggagttcaagactagcctggccaacatggtgaaaccccgtctctactaaaaatacaaaaaaattaactgggcatggtggtgggcacctgtaatctcagctactcgggaggccgaggcaggagaatcgcttgaacctgggaggtggaggttgcagtgagccgagatcacgccattgcactccagcctgggcgacaaaagtgagactccatcacacacacacacaaaaaagccccatatcacgtggtggctcatgcctgtaaaaccagcactttgggaagccgaggtgggtggatcacgaggtccagagatggagactatcttggccaacatggtgaaaccccgtctctactaaaaatacaaaaattagccaggcgtggtggtgtgtgcctgtagtcccagctactcgggaggctgaggcaggagaattgcttgaaccagggacttggaggttgcagtgagccgagatcgcgccgctgcactccagcctggtgacagagcgagacttcgtctcaaaacaaacaaaaaaaagaaggccccatatctccaaagaaaaaaaaaattaactgggtgaggtggtgcatccctgtagttctagctgctcagaaagctgaggtgggaggaacccttgagcctgggaggttgaggctgcagtgagctgagatcgtgccactacactccagcctggatgacggtgacactctgtctcagaaaaaaagggaaagaaataattctcatttatacaggagagaaatcctatgaatgtaaggaatatgggaatacattcagtttccaaagatatgaaaagactaactggaaaaaaatccaaagacctcagatattccagttctattcagagccataaaaggactcatactggagaaaaattgtagaaatgtacagaatatggggaaactctcattgctctcatctccattcaaagacacgtgtcagtgcacactggagatggatggtatgaatcgaagaatacacactggatggaaacgttagtagtttggaaaatacaggaaacttccattttaacaataattaaaattcacatgggctgtgcacagtggctctcccctgtaatcccagcattttgggaggctggggtgggtagattgcttgaggccaggtattcaagaccagcctggcaacctggagaaatcccatgtatacaaaaaatagaaaagttagccagggatgatggtgttcgcctgtagtcccagctactcaggaagctgaggtgggaggattgcttgagtttgggaggtcgaggttgcagtgagtggagattgcgccactggactccagcctgggcaacagtgagaccctgtctaaaaaaattaatcatgtgagaacatccactcgaaagaaatcctataaacgtaagtaattttgaaagcctgatgcaaattaattattatataatgctcaaaaacttaatcatgaatgagttattacacaaagttataaatatatagcatttatcagtggctcattcttttttctttcttttttttttttttttttgagatggagttttgccctgtcgcccaggctggagtgcagtggcacaatctcggctcactgcaacctccgcctcctgggtgtgagcaattttcctgcctcagcctcctgagtaactgggattataagcacatgccaccacgcctggctaatttttttgtatttttagtagagacggggcttcaccatgtggttcaggctggtctcagactcctgaccttgtgatccgccctccttggcctcccaaagtgctgagattacaggtgtgagccaccgcgcctggccttttttttttttcccgagacacagtctcactctgttgcccaggctagagtgcagtggcgcgatcttgactcactgtaacctctgacttctgggttcaagcaattctcctgcttcagtctccgaagcatctgggattacaggcgcacgccaccatgcccagctaaatttttggtatttttgtagaaacagggtttttccacattggccaggctggtcttgaactcctgacctcaaggaatccatcctcttcagcctcgcaaagtgctgagattataggcatgagacaccttgcccggcccctgtgactcattcttaaaaaggatctttggattatgggtttccacttttgcaaggaaatgtgagaatgatactctttaagcagtggtacctgaggtttaataggaagtgtttttatcctaagttagttaataaaatttttttctatccattttggttttcatttttttctatccattttaaagtgttggatctgtgggtgaagtgaaatttatttctaatatgtaagcaggtttaatttttatgtagtgtttaattgttctgtgatgaatgggccattacaaaatgagtctatttttgtttgttttcttttgtttttgagactgagtcttgctctgtcgccaggctgaagtgtagtggcgcgatcttggctcactgcaacctccacctcccgggttcaagtaatccccctgccttagcctcctacaggcgcgtgccgacatgcctggctaattttttgtattttagtagagacggggtttcattgtactggccaggatggtcttgatttcctgaccttgtgatccaccccaccttggcctcccaaagtgctgagattacaggagtgagccactgcgaccggcccatgagtctttattaatagagatttcttactggtgttatgtggcagattctgcatattcctcacccatcatatgtattccactttcctttattatggggaaaactactctttttggcatgatacaatgttgactccattttctttgctaataaggacttggtatcaatttatcagtatgtaaagtttaccatagagtattgtctcatgtgaatcattcccattttttgctctttactctttgtcgttatttctgagtattatttggatggttcattttgacttaaggatagccctgtgatatgacaatatttttatctaatctgatggagaaagcatttagtctcctgatcaagtatgatgttagctgcaggtttttaataaatgccttaattcagtttgaa

SEQ ID NO: 201425 - DNA, 10460 bp, Homo sapiens
  Payload ID: 19752
  Gene Name: zinc finger protein 106
  Uniprot ID: Q9H2Y7
  ENST ID: ENST00000263805
  CDS Start-End: 328-5979
gagtgcagctggcaccatgggtgtgctccagagcaacttctgcttgctctgagccccctgccctgcctcccctttcaccatgtttcctctgacaagattttaagtacagcaattcaagaagatttctcctcctaaacgacatttatctgaagtctattgcctcttgattgctggaaaagaatcttaaaatcatttcaaaagtaacttataaacaaacttattaaaagtgatgaaaggagcattgaaattaattagcactaatttttcactgtgccaaagtgtgcagtgtccttcagaggaaacaataacagatctggtgagtgtgccatgccagtggggagaattgaatgtccctcatctccctctttccctagggacattagtcatgagtgccgagtgtgcggggtcacagaagtgggtctttctgcatatgcaaagcacatttctggccagttgcacaaagataacgttgatgcccaggaaagagaagatgatggaaaaggagaggaagaggaagaagattattttgacaaggaactcattcagttaataaaacaaaggaaagaacaaagtcgacaagatgaaccttccaatagcaaccaagaaataaactctgatgacagacgaccccaatggagacgagaagaccgaattccttaccaagacagagagagttacagtcagcctgcatggcatcatcgtggacctccacagcgggattggaaatgggaaaaagatggctttaataatactaggaaaaacagctttccacattctttgaggaatggtggtggaccaagaggacgttccgggtggcataagggtgttgcaggaggctcctcgacttggtttcacaaccatagtaattctggaggtggttggctttcaaatagtggagcagtagattggaatcataatggtacaggaaggaattccagttggctttctgaaggaacaggtggcttttccagttggcatatgaacaacagtaacggaaactggaaatccagtgtacgtagtacaaataattggaattacagtggccctggagacaaatttcaaccaggcagaaacagaaattctaactgtcaaatggaagacatgactatgctatggaacaagaaatctaataagtcaaacaaatacagtcacgacagatataattggcagcggcaagaaaatgacaaacttggtacagttgccacatatagaggtccttctgaaggatttacaagtgataaatttccttcagaaggcttactcgacttcaattttgagcagctggaaagccaaaccactaaacaagcagacactgctacttccaaagttagtggaaagaatggcagtgcggcaagggaaaagcctcgtcgctggacgccttacccttctcagaagactctggatttacagtcgggattgaaagacatcactggtaacaagtcagaaatgatagagaaacctctctttgattttagcttgataactacaggaatacaggagccccaaactgatgaaacacgtaattccccaacacagaaaacacaaaaagaaatacatactggatctcttaatcacaaggcctcttctgattccgctgcttccttcgaggtggtgagacagtgccccactgcagaaaaacctgaacaagagcatacaccaaataaaatgccatcattgaaatccccactccttccatgtccagccactaaatcattgtctcaaaagcaagatccaaagaatatctcaaaaaacaccaaaacaaattttttttcccctggagaacactcaaatccctcgaacaagcccactgtggaagataaccatggtccttacatatccaaactgcgtagttcatgtcctcatgttttaaaagggaataaaagtacatttggctctcaaaagcaatctggtgataatttaaatgatactttacgaaaggccaaagaggtgctacagtgtcatgagtcattgcaaaatccacttcttagcacttctaaaagtaccaggaactatgcaaaagcaagtagaaatgtagaagaatctgaaaaagggtctttgaaaattgagtttcaagtgcacgcactagaagatgaaagtgatggagagacatctgacacggaaaagcatggaacaaaaattggaaccctaggttctgcaactacagaattgttatctggcagcactcgaactgctgatgagaaagaggaggatgaccgcatcctgaagacttctagagagctatccacttccccatgtaatcccatagttcgccagaaagaatctgaattacaaatgacatctgcagccagtccacaccctggcttattgctagacttgaaaacctctctagaagatgcacaggttgatgactctattaaatctcatgtatcttatgaaacagaaggctttgagagtgctagcttggatgcagagcttcaaaaaagtgacatcagtcagccctcgggccctctcctgcctgaactaagtaagcttggctttcctgcctcacttcagagggatctaacccggcacattagtttgaagagcaaaactggagtacaccttcctgagccaaacctcaatagtgcccgccgcattcgcaatattagcggtcaccgaaagagtgagacagagaaggagtctgggctcaagccaaccctacggcagattctaaatgcatctcggagaaatgtcaactgggaacaggtcattcagcaagtaaccaagaaaaagcaagagctgggcaaaggcttacccaggtttggcatagaaatggtaccccttgttcaaaatgaacaagaagccttagatttggatggggaacctgatctgtccagtctagaaggattccagtgggaaggtgtttccatttcctcgtcccctggcttggcaagaaagcgaagcctttctgagagcagcgtgatcatggacagagctccttctgtgtatagcttcttcagtgaggaaggtacaggcaaagaaaatgagccccagcagatggtttcacctagtaactcattgagggctggacagagccagaaagcaaccatgcacctcaaacaagaagtgacacctcgggctgcctccctccgaacaggtgaaagggctgaaaatgttgctacccaaaggcgacatagtgcacaattatcctctgaccatataatacctttgatgcatttggcaaaagacttgaacagccaggagaggtctataccaccgtcagagaatcagaattcccaggagagtaatggagagggaaactgtctgtcatcaagcgcatcctcagcccttgcgatctccagtttagcggatgcagccacagatagtagctgtacctctggtgctgaacaaaatgatggccaaagtattagaaagaaacgaagagccactggagatggatcttctcctgaactcccaagtcttgagagaaaaaataaaagaaggaaaattaaaggaaaaaaagaacgttctcaggttgaccagctgctgaatatttctttaagggaggaagaacttagtaagtcattgcagtgcatggataacaatcttctgcaagcccgtgcagcccttcagacagcttatgtggaagttcagaggctacttatgctcaagcagcagataactatggagatgagtgcactgaggacccatagaatacagattctacagggattacaagaaacatatgaaccttctgagcacccagaccaggttccctgtagcctcacacgagaacgaaggaacagtagatctcaaacatccattgatgccgcactgctgcccactccctttttcccactttttctggagcctccatcttcccatgtgtctccatcacccaccggagcctctcttcaaataaccacgtctcctactttccaaacccatggcagtgtccctgctccagactcatcagttcagattaaacaagagcccatgtctcctgaacaagatgagaatgtgaatgctgtgccaccaagctctgcctgcaatgtgtccaaggaattactggaagctaatagagagatcagtgacagttgtccagtttatccagtcatcactgctagattgtccttaccagagtcaacagaaagtttccatgagcctagccaagaactgaagttttctgtggagcaaagaaataccagaaacagagaaaactctccctcttcccaatcagctggtctttctagcataaataaagaaggggaagagccaaccaaaggcaatagtgggtctgaagcctgtaccagttcttttctaagattgtcttttgcttcagaaacccctttggagaaggaaccccactctccagctgaccagcctgaacaacaggcagaatccactttgacatcagctgagactaggggaagcaagaaaaagaagaaactccggaagaagaaaagtctacgggctgcccatgttcctgagaatagtgacactgaacaggatgttttgactgttaaacctgtaaggaaagtaaaagctggaaagttaattaaaggggggaaagtaacaacctccacttgggaagacagcaggactggtcgggagcaggagagtgtcagagatgagccagatagtgactcgtctctggaagtcctagaaattcctaatcctcagttagaagtagtagccattgattcttcagaatcaggagaagagaaaccagacagcccatctaaaaaggatatttggaactctacagagcaaaacccactagaaacgtctcgttctgggtgtgatgaagttagctctaccagtgaaattggcactcgctataaagatggcatccctgtaagtgtggcagaaactcagactgtgatctcctccataaaaggatcaaagaattcttcagaaatatcttcagagccaggagatgatgatgaacccacagaaggaagctttgagggacaccaagctgccgtaaatgcaattcagatatttgggaacttgctatatacctgttcagcagataaaactgttcgggtttataatctggtgagtcggaaatgtattggtgtctttgagggtcatacctccaaagttaactgcctcctggttactcagacctccgggaagaatgctgccctttacaccgggtccagtgaccataccatccgctgctataatgttaagagccgagagtgtgtggagcagttacagctggaagaccgggtcctctgcctccacagtagatggcgaatcctctatgcgggactggcaaatggcactgtggtcaccttcaacataaagaacaacaaacgacttgagatctttgaatgccatggccctcgggcagtcagctgtcttgctacagctcaggaaggtgcccgaaaactgctggtcgtggggtcttatgactgcacaattagtgtacgcgatgcccggaatggactgctcctcagaactctggagggccatagcaaaaccattctttgcatgaaggtggtgaatgatctcgtgttcagtggctccagtgatcagtcagtccatgctcacaacattcacactggtgagctcgtgcggatctataaaggtcacaatcatgcagtgactgtggtgaatatcctaggaaaagtgatggtgactgcttgcctggataaatttgttcgtgtctatgaattacagtctcatgatcgattacaagtttatggaggacacaaagacatgattatgtgtatgaccatccataaaagcatgatttacactggctgttatgatggcagtattcaggccgtgaggcttaatctgatgcagaattaccgctgttggtggcatggttgctctctgatatttggcgttgtagatcatttaaaacaacacttgctgaccgaccacactaatcccaacttccagactctgaaatgtcgctggaagaactgcgatgcttttttcactgctaggaaaggatccaaacaggatgctgcaggacatattgaacgacatgctgaagatgacagcaaaattgattcatgaagttttttgcctcccacgttgggaagtcattagttgaactattttcacattggccccccacacaggccactctcttccctttcttggtgaagtaaggaaggagaaagtggttactagccaggcatacccctagcataagtctgggcagctctatgggatgataaattacacttttaagttcttgctggaggttttaaatagatttagacaaatgttaaggaaccatacttctctgggacagcatggcatatagtgatatatgctatttgcgttctccagatgtttattgaagatacagatcctaattggttacccagtttgaccctaatcatatgtatattttattgatttcagtttgcaatttttaatttatgttcttatgatggtttaaacctatagtcaggcttttaagtacaagtttgtttaagtgccagactttgaggatcagttttaatttctccatttgtaatagctgggtatttaaactggaagcaaatagttttctttcttaacaattatgtgcagtgtgtgtcactgttttcttgctttatagatagagctggctttaagtgctaaaggacacagtagatttttgacaaacagtggctgctctgctgactatcttttaggaattcaggaagcaaatcacatagtgacaagtccttacagacaccacttctagtaaatctctgtaaatgtggatagaaagctcagtgtgaggcagtgcgtagacctaacgtctacctttacatctgctgttgaacctgggcactacctgttacagatcctgtcaggctgttgaactggaggtgtacctttatcttcctttctagtgtctgaccctgcaagcctaatgttggtttgaacccttttggtttgttcagttgccagcctccatctctcccactgtatggccgtgcctagaccgatggcagccatcgaatattcctctgggctcacggggtgttttccacccccctgcagcaactaagatggtgggggagagggggttagaataaagcatctgaatacagttttcaggacctcaagcagacttcctagagacttgtttctgagacagttctttgccttcacttccctgctagctgggaaagaagagtggagcagagactctgcctggccactgagaacagccaaattcacaaaccctcagtggggctttgtttttggattttctccggactcatcagtaaacctgtagaagtgtcgctttccagccttttgtttctggatcctcaaaactcagaacgtggccgggcgtggtggctcacgcctgtaatcccagcactttgggaggctgaggcaggcagatcacctgaggctaggagttgcagaccagcctggccaacatggcaaaaccccgtctctactaaaaatacaaaaagccgggcgtggtgggcgcctgtaatcccagctgctcaggaggctgaggcaggagaatcgcttgaacccgggaggcagagattgcagtaagctgagatcgtgccactgcactccagcctggtgacagagtgagactccgtctcaaaaaaaaaaaaaaaaactcagcttcttcagagagataaaattgggggaggagcccagggccacataccaagctttgggacatggtgcctcatgctctctgggattgcagaccatccaggtctgtcttcgcccctgttagtgcacatatatccactcacatgtcttccctcaggctatcgggcagggggacttcaccagggggtttatggataggcttcaagagggtctgtgagcccccagaaattgtgtgtgagactgagtatgtgttcttttttccaggaaaggctccagtggttcttacttgatccaaaaaatgtcaagaattaatctaggaggccgggcctggtggctcacacctgtaatcccagctctttgggaggccgaggcgggtggatcactcaaggtcaggcatttgagaccagcctggccaacatagtgaaaccccgtctctattaaaaatacaaaaattagctgggtgtggtggtatgtgcctgtagtctcagctactcaggaggctgagacaggagaatcacttgaaccctggaggtagaagttgcagtgagccaagatcatactactgcactccagcctgggcgacaagagtgaaactccacctcaaaaaaaaaaaaaaaagagttaatctaggagataatgaatggcctagtactagataatatatggccccacaagctcttgacttctgtccttggggaaagccattttgttaaccacactagtgagatttacatgatgcttaatggagaacagagaagatcttgttgcaaaaggtgtattaaatatttgtgctgtttctgtatgagattgagaagcttttcccacctctcacccctatttcctataaggatatccagagaagccaaactgttctgtgggtttgggaatggtcatttcccgggaaaatgcatctggatcgatgactaaacctggcccttttctctgggctgtagtgaagccgcattttcacgctggctggcagtgtgctgagagcctcgaatgctctgcggcgtagtgcccttctgccctgcctgacgatgtatcgaaaagatgagagtgaaggagactttgtgcagcaggaaacgggtaggtgaggtgttgggcagttgtgggaacttctgagagtattacagagtggtagaatcggtaagaactctgatttggacttcgctttggtggaactgtgtgcctatacctgcctgtgtgtgtgcaagtgtgcaggttcctttgtatgtatgtgtacgtgtgggaacctgtgtttgtcatatttttcttcatttcacaaaggctttttttgaagcagtggcagtatgcctttgtttcaagaacacatgaaattcttttaacaccagattagtgtgttaccccaaatgaacggttctagccctctattaagaaataaagggaccataagcattttggctgcttatggctgtgtgttactacttacaagagtcttgaaaattatacagaactttgccttctttttttaatgtcttccacaatgttgtgactgattataaccctgtttcccctcagagaagagctatggctcagggatctgtgttgactctggcatttagtggctttgtgaaggaaagaaaccattaaatgacctgacaaaaactgactcatgtctttaaagtagttgaagccacttttagaatgttactctcggttgcttttgtctaattctaatggcttaaagccaagaaaaccatagtataaatctttttgtgtacctatgctagtgtttaaatggcagttcgttgtgataaagtatcagtcacttcaagttttctgtgaaagtttttaattaggttaaaaataattttggcatacgtctctactcagtttataaagcagttccacaccatgcaaacaaaactctaacagcaaaggttatcttgacctgatgttacttgaatctgagagaaagtcattacttactactgcactcctgcttttgtgggaaaaattttcttcttccccagaagagttaacagttgagtgttcagctcctgacttacctttaatttagaggcaatattattactgtttaagtgattatttgcttaacacaggttttattttgtctttttgctggtagattatacaagggacaactttagtgatgaggcatgtggatgatttggtgggagtaggtatatacttagtggaatggtttattttatggaagagaattcattggaggtgagattgaagtatattgtgaagtgggatttgaacagcacatatgctctggtttgctcaaataactgcagtttatgcttacatctaaattttgtttctgttacctaaacgggagcttctagaattacgaaggccatacctgccacatttataaaataatggttttatccctgcccccaaatcatcaggttcctcgggtttaagagaagtggtctaatagacaggaatagaagttgtggtggaggtgatttgggatagactaggtttccttatgcaagtggatatgagctcctcatagaaaccagacctactgtattagacagtaacctctaacctcacctccaagcccaagtatatggccctgctgggttacctggtgactacatttcccagattcactctaaattcaaggtagtgacccaaataaattgggaaaggagggggtcaaggaggaaaagctgttgaaaatctttctcctatttaagagaaatatatgccctagagctgctccagcacccttggtttctgatttttttaatattgaatatggattagaagaatgaaatcagatgacacctgactgcaaaaatgtttataagcaaatagccttcttacattttggtataaagctgtgaacttcgtaactttgtaaagcaagatataaagcaaatacaagaggaaaataaagtacttttactaattga

SEQ ID NO: 201426 - DNA, 719 bp, Homo sapiens
  Payload ID: 19752
  Gene Name: zinc finger protein 106
  ENST ID: ENST00000567041
  CDS Start-End: 115-719
atctttgagagtaagattaaggcatcttattgagaagtttgagatatccgtggcttttagcaacttgagactgtcatcctagctgtgacgttgagtgcttcagatctggtcactatggtacgagaacgaaaatgcatattatgccacatcgtgtacagctcaaaaaaggagatggacgaacacatgcggagcatgttgcatcacagggaacttgagaacctcaagggcagggacattagtcatgagtgccgagtgtgcggggtcacagaagtgggtctttctgcatatgcaaagcacatttctggccagttgcacaaagataacgttgatgcccaggaaagagaagatgatggaaaaggagaggaagaggaagaagattattttgacaaggaactcattcagttaataaaacaaaggaaagaacaaagtcgacaagatgaaccttccaatagcaaccaagaaataaactctgatgacagacgaccccaatggagacgagaagaccgaattccttaccaagacagagagagttacagtcagcctgcatggcatcatcgtggacctccacagcgggattggaaatgggaaaaagatggctttaataatactaggaaaaacagctttccacattctttgaggaatggtggtggaccaagaggacgttccgggtggcataagggtgttgcaggaggctcctcgacttggtttcacaaccatag

SEQ ID NO: 201427 - DNA, 3191 bp, Homo sapiens
  Payload ID: 19752
  Gene Name: zinc finger protein 106
  ENST ID: ENST00000565948
  CDS Start-End: 744-3191
gtaagcgctgtcaccaggccttctgagtgcagctggcaccatgggtgtgctccagagcaacttctgcttgctctgagccccctgccctgcctcccctttcaccatgtttcctctgacaagattttaagtacagcaattcaagaagatttctcctcctaaacgacatttatctgaagtctattgcctcttgattgctggaaaagaatcttaaaatcatttcaaaagtaacttataaacaaacttattaaaagtgatgaaaggagcattgaaattaattagcactaatttttcactgtgccaaagtgtgcagtgtccttcagaggaaacaataacagatctgacaagatgaaccttccaatagcaaccaagaaataaactctgatgacagacgaccccaatggagacgagaagaccgaattccttaccaagacagagagagttacagtcagcctgcatggcatcatcgtggacctccacagcgggattggaaatgggaaaaagatggctttaataatactaggaaaaacagctttccacattctttgaggaatggtggtggaccaagaggacgttccgggtggcataagggtgttgcaggaggctcctcgacttggtttcacaaccatagtaattctggaggtggttggctttcaaatagtggagcagtagattggaatcataatggtacaggaaggaattccagttggctttctgaaggaacaggtggcttttccagttggcatatgaacaacagtaacggaaactggaaatccagtgtacgtagtacaaataattggaattacagtggccctggagacaaatttcaaccaggcagaaacagaaattctaactgtcaaatggaagacatgactatgctatggaacaagaaatctaataagtcaaacaaatacagtcacgacagatataattggcagcggcaagaaaatgacaaacttggtacagttgccacatatagaggtccttctgaaggatttacaagtgataaatttccttcagaaggcttactcgacttcaattttgagcagctggaaagccaaaccactaaacaagcagacactgctacttccaaagttagtggaaagaatggcagtgcggcaagggaaaagcctcgtcgctggacgccttacccttctcagaagactctggatttacagtcgggattgaaagacatcactggtaacaagtcagaaatgatagagaaacctctctttgattttagcttgataactacaggaatacaggagccccaaactgatgaaacacgtaattccccaacacagaaaacacaaaaagaaatacatactggatctcttaatcacaaggcctcttctgattccgctgcttccttcgaggtggtgagacagtgccccactgcagaaaaacctgaacaagagcatacaccaaataaaatgccatcattgaaatccccactccttccatgtccagccactaaatcattgtctcaaaagcaagatccaaagaatatctcaaaaaacaccaaaacaaattttttttcccctggagaacactcaaatccctcgaacaagcccactgtggaagataaccatggtccttacatatccaaactgcgtagttcatgtcctcatgttttaaaagggaataaaagtacatttggctctcaaaagcaatctggtgataatttaaatgatactttacgaaaggccaaagaggtgctacagtgtcatgagtcattgcaaaatccacttcttagcacttctaaaagtaccaggaactatgcaaaagcaagtagaaatgtagaagaatctgaaaaagggtctttgaaaattgagtttcaagtgcacgcactagaagatgaaagtgatggagagacatctgacacggaaaagcatggaacaaaaattggaaccctaggttctgcaactacagaattgttatctggcagcactcgaactgctgatgagaaagaggaggatgaccgcatcctgaagacttctagagagctatccacttccccatgtaatcccatagttcgccagaaagaatctgaattacaaatgacatctgcagccagtccacaccctggcttattgctagacttgaaaacctctctagaagatgcacaggttgatgactctattaaatctcatgtatcttatgaaacagaaggctttgagagtgctagcttggatgcagagcttcaaaaaagtgacatcagtcagccctcgggccctctcctgcctgaactaagtaagcttggctttcctgcctcacttcagagggatctaacccggcacattagtttgaagagcaaaactggagtacaccttcctgagccaaacctcaatagtgcccgccgcattcgcaatattagcggtcaccgaaagagtgagacagagaaggagtctgggctcaagccaaccctacggcagattctaaatgcatctcggagaaatgtcaactgggaacaggtcattcagcaagtaaccaagaaaaagcaagagctgggcaaaggcttacccaggtttggcatagaaatggtaccccttgttcaaaatgaacaagaagccttagatttggatggggaacctgatctgtccagtctagaaggattccagtgggaaggtgtttccatttcctcgtcccctggcttggcaagaaagcgaagcctttctgagagcagcgtgatcatggacagagctccttctgtgtatagcttcttcagtgaggaaggtacaggcaaagaaaatgagccccagcagatggtttcacctagtaactcattgagggctggacagagccagaaagcaaccatgcacctcaaacaagaagtgacacctcgggctgcctccctccgaacaggtgaaagggctgaaaatgttgctacccaaaggcgacatagtgcacaattatcctctgaccatataatacctttgatgcatttggcaaaagacttgaacagccaggagaggtctataccaccgtcagagaatcagaattcccaggagagtaatggagagggaaactgtctgtcatcaagcgcatcctcagcccttgcgatctccagtttagcggatgcagccacagatagtagctgtacctctggtgctgaacaaaatgatggccaaagtattagaaagaaacgaagagccactggagatggatcttctcctgaactcccaagtcttgag

SEQ ID NO: 201428 - DNA, 5677 bp, Homo sapiens
  Payload ID: 19752
  Gene Name: zinc finger protein 106
  Uniprot ID: Q9H2Y7
  ENST ID: ENST00000565380
  CDS Start-End: 159-3494
gcccggcggggagcgggtccggagcaggctcccggacccaaaactgaagggggcgtctgaggcgtcagggagctccctcgcctggctctcggcggcctgatggagtaagaggggttggctgtgaatctgtgacgttgagtgcttcagatctggtcactatggtacgagaacgaaaatgcatattatgccacatcgtgtacagctcaaaaaaggagatggacgaacacatgcggagcatgttgcatcacagggaacttgagaacctcaagggcaggtttggcatagaaatggtaccccttgttcaaaatgaacaagaagccttagatttggatggggaacctgatctgtccagtctagaaggattccagtgggaaggtgtttccatttcctcgtcccctggcttggcaagaaagcgaagcctttctgagagcagcgtgatcatggacagagctccttctgtgtatagcttcttcagtgaggaaggtacaggcaaagaaaatgagccccagcagatggtttcacctagtaactcattgagggctggacagagccagaaagcaaccatgcacctcaaacaagaagtgacacctcgggctgcctccctccgaacaggtgaaagggctgaaaatgttgctacccaaaggcgacatagtgcacaattatcctctgaccatataatacctttgatgcatttggcaaaagacttgaacagccaggagaggtctataccaccgtcagagaatcagaattcccaggagagtaatggagagggaaactgtctgtcatcaagcgcatcctcagcccttgcgatctccagtttagcggatgcagccacagatagtagctgtacctctggtgctgaacaaaatgatggccaaagtattagaaagaaacgaagagccactggagatggatcttctcctgaactcccaagtcttgagagaaaaaataaaagaaggaaaattaaaggaaaaaaagaacgttctcaggttgaccagctgctgaatatttctttaagggaggaagaacttagtaagtcattgcagtgcatggataacaatcttctgcaagcccgtgcagcccttcagacagcttatgtggaagttcagaggctacttatgctcaagcagcagataactatggagatgagtgcactgaggacccatagaatacagattctacagggattacaagaaacatatgaaccttctgagcacccagaccaggttccctgtagcctcacacgagaacgaaggaacagtagatctcaaacatccattgatgccgcactgctgcccactccctttttcccactttttctggagcctccatcttcccatgtgtctccatcacccaccggagcctctcttcaaataaccacgtctcctactttccaaacccatggcagtgtccctgctccagactcatcagttcagattaaacaagagcccatgtctcctgaacaagatgagaatgtgaatgctgtgccaccaagctctgcctgcaatgtgtccaaggaattactggaagctaatagagagatcagtgacagttgtccagtttatccagtcatcactgctagattgtccttaccagagtcaacagaaagtttccatgagcctagccaagaactgaagttttctgtggagcaaagaaataccagaaacagagaaaactctccctcttcccaatcagctggtctttctagcataaataaagaaggggaagagccaaccaaaggcaatagtgggtctgaagcctgtaccagttcttttctaagattgtcttttgcttcagaaacccctttggagaaggaaccccactctccagctgaccagcctgaacaacaggcagaatccactttgacatcagctgagactaggggaagcaagaaaaagaagaaactccggaagaagaaaagtctacgggctgcccatgttcctgagaatagtgacactgaacaggatgttttgactgttaaacctgtaaggaaagtaaaagctggaaagttaattaaaggggggaaagtaacaacctccacttgggaagacagcaggactggtcgggagcaggagagtgtcagagatgagccagatagtgactcgtctctggaagtcctagaaattcctaatcctcagttagaagtagtagccattgattcttcagaatcaggagaagagaaaccagacagcccatctaaaaaggatatttggaactctacagagcaaaacccactagaaacgtctcgttctgggtgtgatgaagttagctctaccagtgaaattggcactcgctataaagatggcatccctgtaagtgtggcagaaactcagactgtgatctcctccataaaaggatcaaagaattcttcagaaatatcttcagagccaggagatgatgatgaacccacagaaggaagctttgagggacaccaagctgccgtaaatgcaattcagatatttgggaacttgctatatacctgttcagcagataaaactgttcgggtttataatctggtgagtcggaaatgtattggtgtctttgagggtcatacctccaaagttaactgcctcctggttactcagacctccgggaagaatgctgccctttacaccgggtccagtgaccataccatccgctgctataatgttaagagccgagagtgtgtggagcagttacagctggaagaccgggtcctctgcctccacagtagatggcgaatcctctatgcgggactggcaaatggcactgtggtcaccttcaacataaagaacaacaaacgacttgagatctttgaatgccatggccctcgggcagtcagctgtcttgctacagctcaggaaggtgcccgaaaactgctggtcgtggggtcttatgactgcacaattagtgtacgcgatgcccggaatggactgctcctcagaactctggagggccatagcaaaaccattctttgcatgaaggtggtgaatgatctcgtgttcagtggctccagtgatcagtcagtccatgctcacaacattcacactggtgagctcgtgcggatctataaaggtcacaatcatgcagtgactgtggtgaatatcctaggaaaagtgatggtgactgcttgcctggataaatttgttcgtgtctatgaattacagtctcatgatcgattacaagtttatggaggacacaaagacatgattatgtgtatgaccatccataaaagcatgatttacactggctgttatgatggcagtattcaggccgtgaggcttaatctgatgcagaattaccgctgttggtggcatggttgctctctgatatttggcgttgtagatcatttaaaacaacacttgctgaccgaccacactaatcccaacttccagactctgaaatgtcgctggaagaactgcgatgcttttttcactgctaggaaaggatccaaacaggatgctgcaggacatattgaacgacatgctgaagatgacagcaaaattgattcatgaagttttttgcctcccacgttgggaagtcattagttgaactattttcacattggccccccacacaggccactctcttccctttcttggtgaagtaaggaaggagaaagtggttactagccaggcatacccctagcataagtctgggcagctctatgggatgataaattacacttttaagttcttgctggaggttttaaatagatttagacaaatgttaaggaaccatacttctctgggacagcatggcatatagtgatatatgctatttgcgttctccagatgtttattgaagatacagatcctaattggttacccagtttgaccctaatcatatgtatattttattgatttcagtttgcaatttttaatttatgttcttatgatggtttaaacctatagtcaggcttttaagtacaagtttgtttaagtgccagactttgaggatcagttttaatttctccatttgtaatagctgggtatttaaactggaagcaaatagttttctttcttaacaattatgtgcagtgtgtgtcactgttttcttgctttatagatagagctggctttaagtgctaaaggacacagtagatttttgacaaacagtggctgctctgctgactatcttttaggaattcaggaagcaaatcacatagtgacaagtccttacagacaccacttctagtaaatctctgtaaatgtggatagaaagctcagtgtgaggcagtgcgtagacctaacgtctacctttacatctgctgttgaacctgggcactacctgttacagatcctgtcaggctgttgaactggaggtgtacctttatcttcctttctagtgtctgaccctgcaagcctaatgttggtttgaacccttttggtttgttcagttgccagcctccatctctcccactgtatggccgtgcctagaccgatggcagccatcgaatattcctctgggctcacggggtgttttccacccccctgcagcaactaagatggtgggggagagggggttagaataaagcatctgaatacagttttcaggacctcaagcagacttcctagagacttgtttctgagacagttctttgccttcacttccctgctagctgggaaagaagagtggagcagagactctgcctggccactgagaacagccaaattcacaaaccctcagtggggctttgtttttggattttctccggactcatcagtaaacctgtagaagtgtcgctttccagccttttgtttctggatcctcaaaactcagaacgtggccgggcgtggtggctcacgcctgtaatcccagcactttgggaggctgaggcaggcagatcacctgaggctaggagttgcagaccagcctggccaacatggcaaaaccccgtctctactaaaaatacaaaaagccgggcgtggtgggcgcctgtaatcccagctgctcaggaggctgaggcaggagaatcgcttgaacccgggaggcagagattgcagtaagctgagatcgtgccactgcactccagcctggtgacagagtgagactccgtctcaaaaaaaaaaaaaaaaactcagcttcttcagagagataaaattgggggaggagcccagggccacataccaagctttgggacatggtgcctcatgctctctgggattgcagaccatccaggtctgtcttcgcccctgttagtgcacatatatccactcacatgtcttccctcaggctatcgggcagggggacttcaccagggggtttatggataggcttcaagagggtctgtgagcccccagaaattgtgtgtgagactgagtatgtgttcttttttccaggaaaggctccagtggttcttacttgatccaaaaaatgtcaagaattaatctaggaggccgggcctggtggctcacacctgtaatcccagctctttgggaggccgaggcgggtggatcactcaaggtcaggcatttgagaccagcctggccaacatagtgaaaccccgtctctattaaaaatacaaaaattagctgggtgtggtggtatgtgcctgtagtctcagctactcaggaggctgagacaggagaatcacttgaaccctggaggtagaagttgcagtgagccaagatcatactactgcactccagcctgggcgacaagagtgaaactccacctcaaaaaaaaaaaaaaaaga

SEQ ID NO: 201429 - DNA, 788 bp, Homo sapiens
  Payload ID: 19752
  Gene Name: zinc finger protein 106
  ENST ID: ENST00000569648
  CDS Start-End: 1-654
gaagaccgggtcctctgcctccacagtagatggcgaatcctctatgcgggactggcaaatggcactgtggtcaccttcaacataaagaacaacaaacgacttgagatctttgaatgccatggccctcgggcagtcagctgtcttgctacagctcaggaaggtgcccgaaaactgctggtcgtggggtcttatgactgcacaattagtgtacgcgatgcccggaatggactgctcctcagaactctggagggccatagcaaaaccattctttgcatgaaggtggtgaatgatctcgtgttcagtggctccagtgatcagtcagtccatgctcacaacattcacactggtgagctcgtgcggatctataaaggtcacaatcatgcagtgactgtggtgaatatcctaggaaaagtgatggtgactgcttgcctggataaatttgttcgtgtctatgaattacagtctcatgatcgattacaagtttatggaggacacaaagacatgattatgtgtatgaccatccataaaagcatgatttacactggctgttatgatggcagtattcaggccgtgaggcttaatctgatgcagaattaccgctgttgggaaaggctccagtggttcttacttgatccaaaaaatgtcaagaattaatctaggaggccgggcctggtggctcacacctgtaatcccagctctttgggaggccgaggcgggtggatcactcaaggtcaggcatttgagaccagcctggccaacatagtgaaaccccgtctctattaaaaata

SEQ ID NO: 201430 - DNA, 4733 bp, Homo sapiens
  Payload ID: 19752
  Gene Name: zinc finger protein 106
  ENST ID: ENST00000565500
  CDS Start-End: 1-2552
ctttgatgcatttggcaaaagacttgaacagccaggagaggtctataccaccgtcagagaatcagaattcccaggagagtaatggagagggaaactgtctgtcatcaagcgcatcctcagcccttgcgatctccagtttagcggatgcagccacagatagtagctgtacctctggtgctgaacaaaatgatggccaaagtattagaaagaaacgaagagccactggagatggatcttctcctgaactcccaagtcttgagagaaaaaataaaagaaggaaaattaaaggaaaaaaagaacgttctcaggttgaccagctgctgaatatttctttaagggaggaagaacttagtaagtcattgcagtgcatggataacaatcttctgcaagcccgtgcagcccttcagacagcttatgtggaagttcagaggctacttatgctcaagcagcagataactatggagatgagtgcactgaggacccatagaatacagattctacagggattacaagaaacatatgaaccttctgagcacccagaccaggttccctgtagcctcacacgagaacgaaggaacagtagatctcaaacatccattgatgccgcactgctgcccactccctttttcccactttttctggagcctccatcttcccatgtgtctccatcacccaccggagcctctcttcaaataaccacgtctcctactttccaaacccatggcagtgtccctgctccagactcatcagttcagattaaacaagagcccatgtctcctgaacaagatgagaatgtgaatgctgtgccaccaagctctgcctgcaatgtgtccaaggaattactggaagctaataaaacccctttggagaaggaaccccactctccagctgaccagcctgaacaacaggcagaatccactttgacatcagctgagactaggggaagcaagaaaaagaagaaactccggaagaagaaaagtctacgggctgcccatgttcctgagaatagtgacactgaacaggatgttttgactgttaaacctgtaaggaaagtaaaagctggaaagttaattaaaggggggaaagtaacaacctccacttgggaagacagcaggactggtcgggagcaggagagtgtcagagatgagccagatagtgactcgtctctggaagtcctagaaattcctaatcctcagttagaagtagtagccattgattcttcagaatcaggagaagagaaaccagacagcccatctaaaaaggatatttggaactctacagagcaaaacccactagaaacgtctcgttctgggtgtgatgaagttagctctaccagtgaaattggcactcgctataaagatggcatccctgtaagtgtggcagaaactcagactgtgatctcctccataaaaggatcaaagaattcttcagaaatatcttcagagccaggagatgatgatgaacccacagaaggaagctttgagggacaccaagctgccgtaaatgcaattcagatatttgggaacttgctatatacctgttcagcagataaaactgttcgggtttataatctggtgagtcggaaatgtattggtgtctttgagggtcatacctccaaagttaactgcctcctggttactcagacctccgggaagaatgctgccctttacaccgggtccagtgaccataccatccgctgctataatgttaagagccgagagtgtgtggagcagttacagctggaagaccgggtcctctgcctccacagtagatggcgaatcctctatgcgggactggcaaatggcactgtggtcaccttcaacataaagaacaacaaacgacttgagatctttgaatgccatggccctcgggcagtcagctgtcttgctacagctcaggaaggtgcccgaaaactgctggtcgtggggtcttatgactgcacaattagtgtacgcgatgcccggaatggactgctcctcagaactctggagggccatagcaaaaccattctttgcatgaaggtggtgaatgatctcgtgttcagtggctccagtgatcagtcagtccatgctcacaacattcacactggtgagctcgtgcggatctataaaggtcacaatcatgcagtgactgtggtgaatatcctaggaaaagtgatggtgactgcttgcctggataaatttgttcgtgtctatgaattacagtctcatgatcgattacaagtttatggaggacacaaagacatgattatgtgtatgaccatccataaaagcatgatttacactggctgttatgatggcagtattcaggccgtgaggcttaatctgatgcagaattaccgctgttggtggcatggttgctctctgatatttggcgttgtagatcatttaaaacaacacttgctgaccgaccacactaatcccaacttccagactctgaaatgtcgctggaagaactgcgatgcttttttcactgctaggaaaggatccaaacaggatgctgcaggacatattgaacgacatgctgaagatgacagcaaaattgattcatgaagttttttgcctcccacgttgggaagtcattagttgaactattttcacattggccccccacacaggccactctcttccctttcttggtgaagtaaggaaggagaaagtggttactagccaggcatacccctagcataagtctgggcagctctatgggatgataaattacacttttaagttcttgctggaggttttaaatagatttagacaaatgttaaggaaccatacttctctgggacagcatggcatatagtgatatatgctatttgcgttctccagatgtttattgaagatacagatcctaattggttacccagtttgaccctaatcatatgtatattttattgatttcagtttgcaatttttaatttatgttcttatgatggtttaaacctatagtcaggcttttaagtacaagtttgtttaagtgccagactttgaggatcagttttaatttctccatttgtaatagctgggtatttaaactggaagcaaatagttttctttcttaacaattatgtgcagtgtgtgtcactgttttcttgctttatagatagagctggctttaagtgctaaaggacacagtagatttttgacaaacagtggctgctctgctgactatcttttaggaattcaggaagcaaatcacatagtgacaagtccttacagacaccacttctagtaaatctctgtaaatgtggatagaaagctcagtgtgaggcagtgcgtagacctaacgtctacctttacatctgctgttgaacctgggcactacctgttacagatcctgtcaggctgttgaactggaggtgtacctttatcttcctttctagtgtctgaccctgcaagcctaatgttggtttgaacccttttggtttgttcagttgccagcctccatctctcccactgtatggccgtgcctagaccgatggcagccatcgaatattcctctgggctcacggggtgttttccacccccctgcagcaactaagatggtgggggagagggggttagaataaagcatctgaatacagttttcaggacctcaagcagacttcctagagacttgtttctgagacagttctttgccttcacttccctgctagctgggaaagaagagtggagcagagactctgcctggccactgagaacagccaaattcacaaaccctcagtggggctttgtttttggattttctccggactcatcagtaaacctgtagaagtgtcgctttccagccttttgtttctggatcctcaaaactcagaacgtggccgggcgtggtggctcacgcctgtaatcccagcactttgggaggctgaggcaggcagatcacctgaggctaggagttgcagaccagcctggccaacatggcaaaaccccgtctctactaaaaatacaaaaagccgggcgtggtgggcgcctgtaatcccagctgctcaggaggctgaggcaggagaatcgcttgaacccgggaggcagagattgcagtaagctgagatcgtgccactgcactccagcctggtgacagagtgagactccgtctcaaaaaaaaaaaaaaaaactcagcttcttcagagagataaaattgggggaggagcccagggccacataccaagctttgggacatggtgcctcatgctctctgggattgcagaccatccaggtctgtcttcgcccctgttagtgcacatatatccactcacatgtcttccctcaggctatcgggcagggggacttcaccagggggtttatggataggcttcaagagggtctgtgagcccccagaaattgtgtgtgagactgagtatgtgttcttttttccaggaaaggctccagtggttcttacttgatccaaaaaatgtcaagaattaatctaggaggccgggcctggtggctcacacctgtaatcccagctctttgggaggccgaggcgggtggatcactcaaggtcaggcatttgagaccagcctggccaacatagtgaaaccccgtctctattaaaaatacaaaaattagctgggtgtggtggtatgtgcctgtagtctcagctactcaggaggctgagacaggagaatcacttgaaccctggaggtagaagttgcagtgagccaagatcatactactgcactccagcctgggcgacaagagtgaaactccacctcaaaaaaaaaaaaaaaa

SEQ ID NO: 201431 - DNA, 1470 bp, Homo sapiens
  Payload ID: 19752
  Gene Name: zinc finger protein 106
  ENST ID: ENST00000564754
  CDS Start-End: 177-1470
ggcggcggctgtggcggggcccggcggggagcgggtccggagcaggctcccggacccaaaactgaagggggcgtctgaggcgtcagggagctccctcgcctggctctcggcggcctgatggagtaagaggggttggctgtgaatctgtgacgttgagtgcttcagatctggtcactatggtacgagaacgaaaatgcatattatgccacatcgtgtacagctcaaaaaaggagatggacgaacacatgcggagcatgttgcatcacagggaacttgagaacctcaagggcagggacattagtcatgagtgccgagtgtgcggggtcacagaagtgggtctttctgcatatgcaaagcacatttctggccagttgcacaaagataacgttgatgcccaggaaagagaagatgatggaaaaggagaggaagaggaagaagattattttgacaaggaactcattcagttaataaaacaaaggaaagaacaaagtcgacaagatgaaccttccaatagcaaccaagaaataaactctgatgacagacgaccccaatggagacgagaagaccgaattccttaccaagacagagagagttacagtcagcctgcatggcatcatcgtggacctccacagcgggattggaaatgggaaaaagatggctttaataatactaggaaaaacagctttccacattctttgaggaatggtggtggaccaagaggacgttccgggtggcataagggtgttgcaggaggctcctcgacttggtttcacaaccatagtaattctggaggtggttggctttcaaatagtggagcagtagattggaatcataatggtacaggaaggaattccagttggctttctgaaggaacaggtggcttttccagttggcatatgaacaacagtaacggaaactggaaatccagtgtacgtagtacaaataattggaattacagtggccctggagacaaatttcaaccaggcagaaacagaaattctaactgtcaaatggaagacatgactatgctatggaacaagaaatctaataagtcaaacaaatacagtcacgacagatataattggcagcggcaagaaaatgacaaacttggtacagttgccacatatagaggtccttctgaaggatttacaagtgataaatttccttcagaaggcttactcgacttcaattttgagcagctggaaagccaaaccactaaacaagcagacactgctacttccaaagttagtggaaagaatggcagtgcggcaagggaaaagcctcgtcgctggacgccttacccttctcagaagactctggatttacagtcgggattgaaagacatcactggtaacaagtcagaaatgatagagaaacctctctttgattttagcttgataactacaggaatacaggagccccaaactgatgaaacacgtaattccccaacacagaaaacacaaaaagaaa

SEQ ID NO: 201432 - DNA, 5081 bp, Homo sapiens
  Payload ID: 19752
  Gene Name: zinc finger protein 106
  ENST ID: ENST00000565611
  CDS Start-End: 311-3517
ggtgtgctccagagcaacttctgcttgctctgagccccctgccctgcctcccctttcaccatgtttcctctgacaagattttaagtacagcaattcaagaagatttctcctcctaaacgacatttatctgaagtctattgcctcttgattgctggaaaagaatcttaaaatcatttcaaaagtaacttataaacaaacttattaaaagtgatgaaaggagcattgaaattaattagcactaatttttcactgtgccaaagtgtgcagtgtccttcagaggaaacaataacagatctggtttggcatagaaatggtaccccttgttcaaaatgaacaagaagccttagatttggatggggaacctgatctgtccagtctagaaggattccagtgggaaggtgtttccatttcctcgtcccctggcttggcaagaaagcgaagcctttctgagagcagcgtgatcatggacagagctccttctgtgtatagcttcttcagtgaggaaggtacaggcaaagaaaatgagccccagcagatggtttcacctagtaactcattgagggctggacagagccagaaagcaaccatgcacctcaaacaagaagtgacacctcgggctgcctccctccgaacaggtgaaagggctgaaaatgttgctacccaaaggcgacatagtgcacaattatcctctgaccatataatacctttgatgcatttggcaaaagacttgaacagccaggagaggtctataccaccgtcagagaatcagaattcccaggagagtaatggagagggaaactgtctgtcatcaagcgcatcctcagcccttgcgatctccagtttagcggatgcagccacagatagtagctgtacctctggtgctgaacaaaatgatggccaaagtattagaaagaaacgaagagccactggagatggatcttctcctgaactcccaagtcttgagagaaaaaataaaagaaggaaaattaaaggaaaaaaagaacgttctcaggttgaccagctgctgaatatttctttaagggaggaagaacttagtaagtcattgcagtgcatggataacaatcttctgcaagcccgtgcagcccttcagacagcttatgtggaagttcagaggctacttatgctcaagcagcagataactatggagatgagtgcactgaggacccatagaatacagattctacagggattacaagaaacatatgaaccttctgagcacccagaccaggttccctgtagcctcacacgagaacgaaggaacagtagatctcaaacatccattgatgccgcactgctgcccactccctttttcccactttttctggagcctccatcttcccatgtgtctccatcacccaccggagcctctcttcaaataaccacgtctcctactttccaaacccatggcagtgtccctgctccagactcatcagttcagattaaacaagagcccatgtctcctgaacaagatgagaatgtgaatgctgtgccaccaagctctgcctgcaatgtgtccaaggaattactggaagctaatagagagatcagtgacagttgtccagtttatccagtcatcactgctagattgtccttaccagagtcaacagaaagtttccatgagcctagccaagaactgaagttttctgtggagcaaagaaataccagaaacagagaaaactctccctcttcccaatcagctggtctttctagcataaataaagaaggggaagagccaaccaaaggcaatagtgggtctgaagcctgtaccagttcttttctaagattgtcttttgcttcagaaacccctttggagaaggaaccccactctccagctgaccagcctgaacaacaggcagaatccactttgacatcagctgagactaggggaagcaagaaaaagaagaaactccggaagaagaaaagtctacgggctgcccatgttcctgagaatagtgacactgaacaggatgttttgactgttaaacctgtaaggaaagtaaaagctggaaagttaattaaaggggggaaagtaacaacctccacttgggaagacagcaggactggtcgggagcaggagagtgtcagagatgagccagatagtgactcgtctctggaagtcctagaaattcctaatcctcagttagaagtagtagccattgattcttcagaatcaggagaagagaaaccagacagcccatctaaaaaggatatttggaactctacagagcaaaacccactagaaacgtctcgttctgggtgtgatgaagttagctctaccagtgaaattggcactcgctataaagatggcatccctgtaagtgtggcagaaactcagactgtgatctcctccataaaaggatcaaagaattcttcagaaatatcttcagagccaggagatgatgatgaacccacagaaggaagctttgagggacaccaagctgccgtaaatgcaattcagatatttgggaacttgctatatacctgttcagcagataaaactgttcgggtttataatctggtgagtcggaaatgtattggtgtctttgagggtcatacctccaaagttaactgcctcctggttactcagacctccgggaagaatgctgccctttacaccgggtccagtgaccataccatccgctgctataatgttaagagccgagagtgtgtggagcagttacagctggaagaccgggtcctctgcctccacagtagatggcgaatcctctatgcgggactggcaaatggcactgtggtcaccttcaacataaagaacaacaaacgacttgagatctttgaatgccatggccctcgggcagtcagctgtcttgctacagctcaggaaggtgcccgaaaactgctggtcgtggggtcttatgactgcacaattagtgtacgcgatgcccggaatggactgctcctcagaactctggagggccatagcaaaaccattctttgcatgaaggtggtgaatgatctcgtgttcagtggctccagtgatcagtcagtccatgctcacaacattcacactggtgagctcgtgcggatctataaaggtcacaatcatgcagtgactgtggtgaatatcctaggaaaagtgatggtgactgcttgcctggataaatttgttcgtgtctatgaattacagtctcatgatcgattacaagtttatggaggacacaaagacatgattatgtgtatgaccatccataaaagcatgatttacactggctgttatgatggcagtattcaggccgtgaggcttaatctgatgcagaattaccgctgttggtggcatggttgctctctgatatttggcgttgtagatcatttaaaacaacacttgctgaccgaccacactaatcccaacttccagactctgaaatgtcgctggaagaactgcgatgcttttttcactgctaggaaaggatccaaacaggatgctgcaggacatattgaacgacatgctgaagatgacagcaaaattgattcatgaagttttttgcctcccacgttgggaagtcattagttgaactattttcacattggccccccacacaggccactctcttccctttcttggtgaagtaaggaaggagaaagtggttactagccaggcatacccctagcataagtctgggcagctctatgggatgataaattacacttttaagttcttgctggaggttttaaatagatttagacaaatgttaaggaaccatacttctctgggacagcatggcatatagtgatatatgctatttgcgttctccagatgtttattgaagatacagatcctaattggttacccagtttgaccctaatcatatgtatattttattgatttcagtttgcaatttttaatttatgttcttatgatggtttaaacctatagtcaggcttttaagtacaagtttgtttaagtgccagactttgaggatcagttttaatttctccatttgtaatagctgggtatttaaactggaagcaaatagttttctttcttaacaattatgtgcagtgtgtgtcactgttttcttgctttatagatagagctggctttaagtgctaaaggacacagtagatttttgacaaacagtggctgctctgctgactatcttttaggaattcaggaagcaaatcacatagtgacaagtccttacagacaccacttctagtaaatctctgtaaatgtggatagaaagctcagtgtgaggcagtgcgtagacctaacgtctacctttacatctgctgttgaacctgggcactacctgttacagatcctgtcaggctgttgaactggaggtgtacctttatcttcctttctagtgtctgaccctgcaagcctaatgttggtttgaacccttttggtttgttcagttgccagcctccatctctcccactgtatggccgtgcctagaccgatggcagccatcgaatattcctctgggctcacggggtgttttccacccccctgcagcaactaagatggtgggggagagggggttagaataaagcatctgaatacagttttcaggacctcaagcagacttcctagagacttgtttctgagacagttctttgccttcacttccctgctagctgggaaagaagagtggagcagagactctgcctggccactgagaacagccaaattcacaaaccctcagtggggctttgtttttggattttctccggactcatcagtaaacctgtagaagtgtcgctttccagccttttgtttctggatcctcaaaactcagaacgtggccgggcgtggtggctcacgcctgtaatcccagcactttgggaggctgaggcaggcagatcacctgaggctaggagttgcagaccagcctggccaacatggcaaaaccccgtctctactaaaaatacaaaaagccgggcgtggtgggcgcctgtaatcccagctgctcaggaggctgaggcaggagaatcgcttgaacccgggaggcagagattgcagtaagctgagatcgtgccactgcactccagcctggtgacagagtgagactccgtctcaaaaaaaaaaaaaaaaa

SEQ ID NO: 201433 - DNA, 900 bp, Homo sapiens
  Payload ID: 19752
  Gene Name: zinc finger protein 106
  ENST ID: ENST00000567772
  CDS Start-End: 1-576
ggaaaaaaagaacgttctcaggttgaccagctgctgaatatttctttaagggaggaagaacttagtaagtcattgcagtgcatggataacaatcttctgcaagcccgtgcagcccttcagacagcttatgtggaagttcagaggctacttatgctcaagcagcagataactatggagatgagtgcactgaggacccatagaatacagattctacagggattacaagaaacatatgaaccttctgagcacccagaccaggttccctgtagcctcacacgagaacgaaggaacagtagatctcaaacatccattgatgccgcactgctgcccactccctttttcccactttttctggagcctccatcttcccatgtgtctccatcacccaccggagcctctcttcaaataaccacgtctcctactttccaaacccatggcagtgtccctgctccagactcatcagttcagattaaacaagagcccatgtctcctgaacaagatgagaatgtgaatgctgtgccaccaagctctgcctgcaatgtgtccaaggaattactggaagctaatagtatgtaagcttttctctgggttaagggcatcccagtagtgagactggggcatttttatatgagtgatataagccatacttgctcattaaaactaaaatgagcaagtacaactaatttgtcactggaattctcttcatatatacaggaggattcttttaaaatattttagagaatgtaatttaaatatcagtcattttctttcatttcctctaatctagggttagagttgactttgtattagcacccacaaggttccatttattaggataagtacaaaatttgtttcgtgtgaaataaatggggttgaagttaattcagccaattttctgaa

SEQ ID NO: 201434 - DNA, 5174 bp, Homo sapiens
  Payload ID: 19753
  Gene Name: zinc finger protein 107
  Uniprot ID: Q9UII5
  ENST ID: ENST00000344930
  CDS Start-End: 453-2804
tagaggcccagcctctgtgtccctgtgacctgcagatattgggagatccacagctaagacgccgggactccctggaaacctagaaatgactgtgccataacacacatttgatgctgaaatccgggataggggaactcctttgggagtcgtgtcccttaaccccttcccccgacttcttgaagagacccacccgcgacctcggtacctcggaccagctctgtaaaagccccgcctctgccttcggataggaaccactgacatttaaagatgtcgccatagaattctctctggaggagtggcaatgcctggatactgcacagcgggatttatataggaatgtgttgttagagaactacagaaacctggtctttttgggtattgctgtctctaagccatatctgatcacctgtctggagcaaaaaaaagagccctggaatataaaaagacatgagatggtagccaaacccccagtaatgtcttttcattttgcccaagacctttggccagagcagaacataaaagattctttccagaaagtgacactgagaagatacggaaaatgtgaatatgagaatttacagttaagaaaaggctgtaaacatgtggatgagtgtacggggcacaaaggaggtcataatacagttaaccaatgtttgacagctaccccaagcaaaatattccagtgtaataaatatgtgaaagtctttgataaattttcaaattcaaatagatataagagaagacatacaggaaacaaacacttcaaatgtaaagaatgtagcaaatcattttgcgtgctttcacaactaactcagcatagaagaattcatactagagtgaattcctacaaatgtgaagaatgtggaaaagcctttaactggttctcaactcttactaaacataagagaattcatactggagaaaagccctacaaatgtgaagaatgtggcaaagcctttaaccagtcctcacaacttactaggcataagataattcatactgaagagaaacccaacaaatgtgaagaatgtggcaaggcctttaaacaggcctcacaccttactatacataaaataattcatactggagaaaaaccttacaaatatgaagaatgtggcaaagtctttagccagtcctcacaccttactacacaaaagatacttcacactggagagaacctctacaagtgtaaagaatgtggaaaagcttttaacctattctcaaatcttactaaccataagagaattcatgctggggagaaaccctacaaatgtaaagaatgtggcagagcttttaacatatcctcaaaccttaataaacaggagaaaattcatactggagggaaactcaacaaatgtgaagaatgtgacaaagcttttaaccgatccttaaaacttactgcacataagaaaattctaatggaagagaaaccctacaaatgtgaagaatgtggcaaagtctttaaccagttctcaactcttactagacataagataattcatactggagagaaaccctacaaatgtaaagaatgtggcaaagcttttaaccaatcttcaaaccttactgaacataagaaaattcatactgcagagaaatcctataaatgtgaagaatgtggcaaagcttttaaccaacactcaaacctaattaaccataggaaaatttattctggagagaaaccatacaaatgtgaagaatgtggaaaagcttttaatcgatcctcaacccttactagacataagaaaattcatactggagagaaaccctacaaatgtgaagaatgtgacagagcttttagccagtcttcaaaccttactgaacataagaaaattcatactggagagaaaccctataaatgtgaggaatgtggcaaagcttttaaccgattctcaacccttactaaacataagagaattcatactggagaaaaaccctataaatgtgaagaatgtggaaaagcctttaatcaatcctatcaacttactagacataagatagttcatactaaagagaaactcaacaaatgtgaagaatttggcaaggcctttaaacagtcctcacaccgtactatacataaaattattcatactggagagaaaccctacaaatgtgaagaacatggcaaagtttttaaccagtcctcaaaccttactacacaaaagataattcatactggagagaacctctacaaatttgaagaacatggaaaagcttttaacctattctcaaacattactaaccataagataatttatactggagagaaaccccacaaatgtgaagaatgtggaaaagcttataaccgattctcaaacctaactatacataagagaattcatacgggagagaaaccttaccaatgtgcagaatgtggcaaagcctttaactgctcctcaacccttaatagacataagataattcatactggagagaaaccttacaaatgtaaagaatgtggcaaagcttttaacctatcctcaacccttactgcacataagaaaattcatactggagagaaaccctataaatgtgaagaatgtggcaaagcttttaaccaatcctcaaaccttactacacataagaaaattcatacttcagagaaaccctacaaatgtgaagaatgtggcaaatcctttaaccagttctcatctcttaatatacataagataattcatactggagagaaaccctacaaatgtggagattatggcagagctttcaacctatcctcaaatcttactacacataagaaaattcatactggagagaaaccctacaaatgtgagtatggcaaaacttaattgatcctacaagcttactacacataggaaaattcatactggagagaaactacaaatgtgaagaatgtgttaaagcctttaacaagtcttcaactttttctgcacacacgaggtattttatactggtgagaaaccttacaatgtaaagaatgtggcacagcttttaactaatcttcaaaccttactgaaagttgagaaaattcgtactggagagaatcctacaaatgtgaaaaatgtggcaaatcctttaactgatcctcaacttttactaaacataaggtaattcatactggagaaaagccatacaaatgagaagaatgtggcaatgcctttaatcagtcctcacacctttctacacataagataatttatactggagaggaactctatagttgtgaagaatgtggcaaagcttttaaccaatcctcataccttactatacagaaattcatactggagagaaagcctacaattgtgaagaatgtggcaaagcttttaaccttccttaacccttaactgtagataagaaaattcatactggaaagaaaccctacaaatgtgaagtctgtggcaaagcttttaactgattctcaactcttactacatgtaagagtatttatactggaaagaaaccctacaaatgtaaaaaacgtggcaatgcctttaactggtcctcacaccttgctacatataagacagtttatactttgagagaaaccctgcaaatgtgaataatgtggcaatactttaaaccaatcctcaaacctcactaaacataagataatactgaaaactttacaaacctgaatgatgtgacaataattttgacaacacctcgaactttctaacataaatcatactggtgaaaaatcctagaaatgtgaaaaatatcacaaagcctttaaatggttgtcacacttgattgtaggtaagaatccatactgaagaaaactcctggaagtgtaaaaaatgtggcaacacttttaataaatgctcaccccttattgcacaggaaagcatttatacttcagaaagattgtacaaatacaaggaatgtggaaaagccattattatctgctcagattttactcaacattagagagttagtacgtaataaaagcattataaatgcaatttttgtcaagagatctttcagaaaatataagcctttaaagtgaagaagaggagccagttgtgctggctcacatctgtaatgccagcactttgggaggccaaggtgggtggatcacctgagggcaggagtctgagaccagcctggccaacatagcaaaaccccatctctattaaaaattttacaaaaattagctgcgtgtggtggcaggcccctgtaatcccagctaattgggaggctgaagcaggagaattgctcaaacctgggaggcgaagattgcagtgagctgaaatcacaccactacactccagccaaagcaacaagagcaaaaacttcgtctcaaaaacaaaacaaaaaaagagtattcattgtgaggacaaacaatacaaatacgaagagggttgtagtacctttacttgtatcacagatacttttgtacccattttgcactagaggaaaaccatgaagcagttgctcaaatgttgttcaacaccagaaaatttatattggagaaaagcactgtaaatgtaatgcatttgtgaaaacattttttaaaaaactacagcttagaaaataccagaggcctcatactaaaatatatttttgcaagtgaagtaaatataaaaataatttaatccaaaattaagtctatataaatatcagagaattcacagtagaaatatctaaggtactgacacttcagacattgctgagtatagaatcagaatgctgagtatagaaaataatttaaaactaaagttggtaggtaaataatgtgtatataactttaaaagaagtagaatttttttgtagatgtataattacattcaaattatattttttcttgaaaaattagtttttgaaaagcaaatgatgtaattcaactcaaattcatgctcttcattcctattgtattcacatgtgaaagcatgtgattaatttttcatgcatcaaagatatgagaaatcatttctgttaggtcggtattatttatgacactttctatgaaagaataaggacattaaaatgtaagatgcatgatgaaaacctgagtgaagaggctgtttgtgtttaacttataatattgagtgatccatgaagtaggttttcagagcaatattcttctgcattatagtaagagaaaaccatttttaatcttagttaaaattaaagtgaattagtagtatatcattttactatttgtacttttatgtaataaaatgcaatgtgtttaaaaa

SEQ ID NO: 201435 - DNA, 1061 bp, Homo sapiens
  Payload ID: 19753
  Gene Name: zinc finger protein 107
  ENST ID: ENST00000360117
  CDS Start-End: 787-1061
gcctttgtctctggctgcagccggagctcctgctctcctcctcactgctcagtgtcctctgctcctagaggcccagcctctgtgtccctgtgacctgcagatattgggagatccacagctaagacgccgggactccctggaaacctagaaatgatggagtctcgctctgttgctcaggctgaagggcagtggtgcgatctcggctcactgaaacctccgccttccgggctcaagcaattctcctgcctcaacctcgcaagtagctgggattacaggcatgcaccaccatgcccagactgtgccataacacacatttgatgctgaaatccgggataggggaactcctttgggagtcgtgtcccttaaccccttcccccgacttcttgaagagacccacccgcgacctcggtacctcggaccagctctgtaaaagccccgcctctgccttcggataggtctggccccaccctggagtcttgcctcacagaactgattagaagagatcagagttttggctggtgcctttccggagtggttgctaacaattcccgaattccacaaggagataaatgggaaaaaaaggaaccactgacatttaaagatgtcgccatagaattctctctggaggagtggcaatgcctggatactgcacagcgggatttatataggaatgtgttgttagagaactacagaaacctggtctttttgggtattgctgtctctaagccatatctgatcacctgtctggagcaaaaaaaagagccctggaatataaaaagacatgagatggtagccaaacccccagtaatgtcttttcattttgcccaagacctttggccagagcagaacataaaagattctttccagaaagtgacactgagaagatacggaaaatgtgaatatgagaatttacagttaagaaaaggctgtaaacatgtggatgagtgtacggggcacaaaggaggtcataatacagttaaccaatgtttgacagctaccccaagcaaaatattccagtgtaataaatatgtgaaagtctttgataaattttcaaattcaaa

SEQ ID NO: 201436 - DNA, 6094 bp, Homo sapiens
  Payload ID: 19753
  Gene Name: zinc finger protein 107
  Uniprot ID: Q9UII5
  ENST ID: ENST00000395391
  CDS Start-End: 1376-3727
catcttaaagcttccctttgagagtgttgctcttagaacttttcagatcttgttcagtgacctgctacagttatgtgagaggatccaggtgtaaatagaatctgatgacagattctgtaagcgtaaacaagcatcttaggggtgagagatgaaggccacaaagtatcgagagtcatgatcacaattatacctacccgtaaaatgtaatactggactagagtattttttctttccttttgcccaagagctagctaattaggacccgtaatctggagctccactgtggcagttccactttctatttagaatcagcctgagtctctcctgcctgccttatccttggccatcagcccagggtcactgggaactctctcacaatcacctaggcatctttgagatatttgaggatgtccagagcagaattgtgtcaggttgacaagagtggttaattctgcctctgtctcagtgtaagagaaatgagacatcctgtgtttgctcctcccctcatacaagagatgtctttggttggtatccagttgagagtttcccagtttcctgatagttggatgaaaaacaaggaggaggtctggagactcaagcagataaactaattgctaccatttcatatggcccttagaaaaatagataaagcagtcatggtccctaccatctaggaactgttagtctagactagcaactgaatacgtggttgaattaagcatcatatggttggcaaagtgaatagatgtgtgggaaaacgtgtgggctttatttgggccactttctttatatcgttgtgacttctgaggtcatcatttgaatgaatgtttatgaccacaagagttttaaatatttttatttcttttactttgctaagaatacatatttatcttataataaaattaccctagaaaaccccaggagatttgtttaaatggctaattagtatatttacacagttgatgggttgagcagagtaatatatagggtttactcccagctgcagttctgttcagattcaccctttttggaggctttatttaggtctggccccaccctggagtcttgcctcacagaactgattagaagagatcagagttttggctggtgcctttccggagtggttgctaacaattcccgaattccacaaggagataaatgggaaaaaaaggaaccactgacatttaaagatgtcgccatagaattctctctggaggagtggcaatgcctggatactgcacagcgggatttatataggaatgtgttgttagagaactacagaaacctggtctttttgggtattgctgtctctaagccatatctgatcacctgtctggagcaaaaaaaagagccctggaatataaaaagacatgagatggtagccaaacccccagtaatgtcttttcattttgcccaagacctttggccagagcagaacataaaagattctttccagaaagtgacactgagaagatacggaaaatgtgaatatgagaatttacagttaagaaaaggctgtaaacatgtggatgagtgtacggggcacaaaggaggtcataatacagttaaccaatgtttgacagctaccccaagcaaaatattccagtgtaataaatatgtgaaagtctttgataaattttcaaattcaaatagatataagagaagacatacaggaaacaaacacttcaaatgtaaagaatgtagcaaatcattttgcgtgctttcacaactaactcagcatagaagaattcatactagagtgaattcctacaaatgtgaagaatgtggaaaagcctttaactggttctcaactcttactaaacataagagaattcatactggagaaaagccctacaaatgtgaagaatgtggcaaagcctttaaccagtcctcacaacttactaggcataagataattcatactgaagagaaacccaacaaatgtgaagaatgtggcaaggcctttaaacaggcctcacaccttactatacataaaataattcatactggagaaaaaccttacaaatatgaagaatgtggcaaagtctttagccagtcctcacaccttactacacaaaagatacttcacactggagagaacctctacaagtgtaaagaatgtggaaaagcttttaacctattctcaaatcttactaaccataagagaattcatgctggggagaaaccctacaaatgtaaagaatgtggcagagcttttaacatatcctcaaaccttaataaacaggagaaaattcatactggagggaaactcaacaaatgtgaagaatgtgacaaagcttttaaccgatccttaaaacttactgcacataagaaaattctaatggaagagaaaccctacaaatgtgaagaatgtggcaaagtctttaaccagttctcaactcttactagacataagataattcatactggagagaaaccctacaaatgtaaagaatgtggcaaagcttttaaccaatcttcaaaccttactgaacataagaaaattcatactgcagagaaatcctataaatgtgaagaatgtggcaaagcttttaaccaacactcaaacctaattaaccataggaaaatttattctggagagaaaccatacaaatgtgaagaatgtggaaaagcttttaatcgatcctcaacccttactagacataagaaaattcatactggagagaaaccctacaaatgtgaagaatgtgacagagcttttagccagtcttcaaaccttactgaacataagaaaattcatactggagagaaaccctataaatgtgaggaatgtggcaaagcttttaaccgattctcaacccttactaaacataagagaattcatactggagaaaaaccctataaatgtgaagaatgtggaaaagcctttaatcaatcctatcaacttactagacataagatagttcatactaaagagaaactcaacaaatgtgaagaatttggcaaggcctttaaacagtcctcacaccgtactatacataaaattattcatactggagagaaaccctacaaatgtgaagaacatggcaaagtttttaaccagtcctcaaaccttactacacaaaagataattcatactggagagaacctctacaaatttgaagaacatggaaaagcttttaacctattctcaaacattactaaccataagataatttatactggagagaaaccccacaaatgtgaagaatgtggaaaagcttataaccgattctcaaacctaactatacataagagaattcatacgggagagaaaccttaccaatgtgcagaatgtggcaaagcctttaactgctcctcaacccttaatagacataagataattcatactggagagaaaccttacaaatgtaaagaatgtggcaaagcttttaacctatcctcaacccttactgcacataagaaaattcatactggagagaaaccctataaatgtgaagaatgtggcaaagcttttaaccaatcctcaaaccttactacacataagaaaattcatacttcagagaaaccctacaaatgtgaagaatgtggcaaatcctttaaccagttctcatctcttaatatacataagataattcatactggagagaaaccctacaaatgtggagattatggcagagctttcaacctatcctcaaatcttactacacataagaaaattcatactggagagaaaccctacaaatgtgagtatggcaaaacttaattgatcctacaagcttactacacataggaaaattcatactggagagaaactacaaatgtgaagaatgtgttaaagcctttaacaagtcttcaactttttctgcacacacgaggtattttatactggtgagaaaccttacaatgtaaagaatgtggcacagcttttaactaatcttcaaaccttactgaaagttgagaaaattcgtactggagagaatcctacaaatgtgaaaaatgtggcaaatcctttaactgatcctcaacttttactaaacataaggtaattcatactggagaaaagccatacaaatgagaagaatgtggcaatgcctttaatcagtcctcacacctttctacacataagataatttatactggagaggaactctatagttgtgaagaatgtggcaaagcttttaaccaatcctcataccttactatacagaaattcatactggagagaaagcctacaattgtgaagaatgtggcaaagcttttaaccttccttaacccttaactgtagataagaaaattcatactggaaagaaaccctacaaatgtgaagtctgtggcaaagcttttaactgattctcaactcttactacatgtaagagtatttatactggaaagaaaccctacaaatgtaaaaaacgtggcaatgcctttaactggtcctcacaccttgctacatataagacagtttatactttgagagaaaccctgcaaatgtgaataatgtggcaatactttaaaccaatcctcaaacctcactaaacataagataatactgaaaactttacaaacctgaatgatgtgacaataattttgacaacacctcgaactttctaacataaatcatactggtgaaaaatcctagaaatgtgaaaaatatcacaaagcctttaaatggttgtcacacttgattgtaggtaagaatccatactgaagaaaactcctggaagtgtaaaaaatgtggcaacacttttaataaatgctcaccccttattgcacaggaaagcatttatacttcagaaagattgtacaaatacaaggaatgtggaaaagccattattatctgctcagattttactcaacattagagagttagtacgtaataaaagcattataaatgcaatttttgtcaagagatctttcagaaaatataagcctttaaagtgaagaagaggagccagttgtgctggctcacatctgtaatgccagcactttgggaggccaaggtgggtggatcacctgagggcaggagtctgagaccagcctggccaacatagcaaaaccccatctctattaaaaattttacaaaaattagctgcgtgtggtggcaggcccctgtaatcccagctaattgggaggctgaagcaggagaattgctcaaacctgggaggcgaagattgcagtgagctgaaatcacaccactacactccagccaaagcaacaagagcaaaaacttcgtctcaaaaacaaaacaaaaaaagagtattcattgtgaggacaaacaatacaaatacgaagagggttgtagtacctttacttgtatcacagatacttttgtacccattttgcactagaggaaaaccatgaagcagttgctcaaatgttgttcaacaccagaaaatttatattggagaaaagcactgtaaatgtaatgcatttgtgaaaacattttttaaaaaactacagcttagaaaataccagaggcctcatactaaaatatatttttgcaagtgaagtaaatataaaaataatttaatccaaaattaagtctatataaatatcagagaattcacagtagaaatatctaaggtactgacacttcagacattgctgagtatagaatcagaatgctgagtatagaaaataatttaaaactaaagttggtaggtaaataatgtgtatataactttaaaagaagtagaatttttttgtagatgtataattacattcaaattatattttttcttgaaaaattagtttttgaaaagcaaatgatgtaattcaactcaaattcatgctcttcattcctattgtattcacatgtgaaagcatgtgattaatttttcatgcatcaaagatatgagaaatcatttctgttaggtcggtattatttatgacactttctatgaaagaataaggacattaaaatgtaagatgcatgatgaaaacctgagtgaagaggctgtttgtgtttaacttataatattgagtgatccatgaagtaggttttcagagcaatattcttctgcattatagtaagagaaaaccatttttaatcttagttaaaattaaagtgaattagtagtatatcattttactatttgtacttttatgtaataaaatgcaatgtgtttaa

SEQ ID NO: 201437 - DNA, 5773 bp, Homo sapiens
  Payload ID: 19753
  Gene Name: zinc finger protein 107
  Uniprot ID: Q9UII5
  ENST ID: ENST00000423627
  CDS Start-End: 496-2847
ccagactgtgccataacacacatttgatgctgaaatccgggataggggaactcctttgggagtcgtgtcccttaaccccttcccccgacttcttgaagagacccacccgcgacctcggtacctcggaccagctctgtaaaagccccgcctctgccttcggataggtctggccccaccctggagtcttgcctcacagaactgattagaagagatcagagttttggctggtgcctttccggagtggttgctaacaattcccgaattccacaaggagataaatgggaaaaaaaggaaccactgacatttaaagatgtcgccatagaattctctctggaggagtggcaatgcctggatactgcacagcgggatttatataggaatgtgttgttagagaactacagaaacctggtctttttgggtattgctgtctctaagccatatctgatcacctgtctggagcaaaaaaaagagccctggaatataaaaagacatgagatggtagccaaacccccagtaatgtcttttcattttgcccaagacctttggccagagcagaacataaaagattctttccagaaagtgacactgagaagatacggaaaatgtgaatatgagaatttacagttaagaaaaggctgtaaacatgtggatgagtgtacggggcacaaaggaggtcataatacagttaaccaatgtttgacagctaccccaagcaaaatattccagtgtaataaatatgtgaaagtctttgataaattttcaaattcaaatagatataagagaagacatacaggaaacaaacacttcaaatgtaaagaatgtagcaaatcattttgcgtgctttcacaactaactcagcatagaagaattcatactagagtgaattcctacaaatgtgaagaatgtggaaaagcctttaactggttctcaactcttactaaacataagagaattcatactggagaaaagccctacaaatgtgaagaatgtggcaaagcctttaaccagtcctcacaacttactaggcataagataattcatactgaagagaaacccaacaaatgtgaagaatgtggcaaggcctttaaacaggcctcacaccttactatacataaaataattcatactggagaaaaaccttacaaatatgaagaatgtggcaaagtctttagccagtcctcacaccttactacacaaaagatacttcacactggagagaacctctacaagtgtaaagaatgtggaaaagcttttaacctattctcaaatcttactaaccataagagaattcatgctggggagaaaccctacaaatgtaaagaatgtggcagagcttttaacatatcctcaaaccttaataaacaggagaaaattcatactggagggaaactcaacaaatgtgaagaatgtgacaaagcttttaaccgatccttaaaacttactgcacataagaaaattctaatggaagagaaaccctacaaatgtgaagaatgtggcaaagtctttaaccagttctcaactcttactagacataagataattcatactggagagaaaccctacaaatgtaaagaatgtggcaaagcttttaaccaatcttcaaaccttactgaacataagaaaattcatactgcagagaaatcctataaatgtgaagaatgtggcaaagcttttaaccaacactcaaacctaattaaccataggaaaatttattctggagagaaaccatacaaatgtgaagaatgtggaaaagcttttaatcgatcctcaacccttactagacataagaaaattcatactggagagaaaccctacaaatgtgaagaatgtgacagagcttttagccagtcttcaaaccttactgaacataagaaaattcatactggagagaaaccctataaatgtgaggaatgtggcaaagcttttaaccgattctcaacccttactaaacataagagaattcatactggagaaaaaccctataaatgtgaagaatgtggaaaagcctttaatcaatcctatcaacttactagacataagatagttcatactaaagagaaactcaacaaatgtgaagaatttggcaaggcctttaaacagtcctcacaccgtactatacataaaattattcatactggagagaaaccctacaaatgtgaagaacatggcaaagtttttaaccagtcctcaaaccttactacacaaaagataattcatactggagagaacctctacaaatttgaagaacatggaaaagcttttaacctattctcaaacattactaaccataagataatttatactggagagaaaccccacaaatgtgaagaatgtggaaaagcttataaccgattctcaaacctaactatacataagagaattcatacgggagagaaaccttaccaatgtgcagaatgtggcaaagcctttaactgctcctcaacccttaatagacataagataattcatactggagagaaaccttacaaatgtaaagaatgtggcaaagcttttaacctatcctcaacccttactgcacataagaaaattcatactggagagaaaccctataaatgtgaagaatgtggcaaagcttttaaccaatcctcaaaccttactacacataagaaaattcatacttcagagaaaccctacaaatgtgaagaatgtggcaaatcctttaaccagttctcatctcttaatatacataagataattcatactggagagaaaccctacaaatgtggagattatggcagagctttcaacctatcctcaaatcttactacacataagaaaattcatactggagagaaaccctacaaatgtgagtatggcaaaacttaattgatcctacaagcttactacacataggaaaattcatactggagagaaactacaaatgtgaagaatgtgttaaagcctttaacaagtcttcaactttttctgcacacacgaggtattttatactggtgagaaaccttacaatgtaaagaatgtggcacagcttttaactaatcttcaaaccttactgaaagttgagaaaattcgtactggagagaatcctacaaatgtgaaaaatgtggcaaatcctttaactgatcctcaacttttactaaacataaggtaattcatactggagaaaagccatacaaatgagaagaatgtggcaatgcctttaatcagtcctcacacctttctacacataagataatttatactggagaggaactctatagttgtgaagaatgtggcaaagcttttaaccaatcctcataccttactatacagaaattcatactggagagaaagcctacaattgtgaagaatgtggcaaagcttttaaccttccttaacccttaactgtagataagaaaattcatactggaaagaaaccctacaaatgtgaagtctgtggcaaagcttttaactgattctcaactcttactacatgtaagagtatttatactggaaagaaaccctacaaatgtaaaaaacgtggcaatgcctttaactggtcctcacaccttgctacatataagacagtttatactttgagagaaaccctgcaaatgtgaataatgtggcaatactttaaaccaatcctcaaacctcactaaacataagataatactgaaaactttacaaacctgaatgatgtgacaataattttgacaacacctcgaactttctaacataaatcatactggtgaaaaatcctagaaatgtgaaaaatatcacaaagcctttaaatggttgtcacacttgattgtaggtaagaatccatactgaagaaaactcctggaagtgtaaaaaatgtggcaacacttttaataaatgctcaccccttattgcacaggaaagcatttatacttcagaaagattgtacaaatacaaggaatgtggaaaagccattattatctgctcagattttactcaacattagagagttagtacgtaataaaagcattataaatgcaatttttgtcaagagatctttcagaaaatataagcctttaaagtgaagaagaggagccagttgtgctggctcacatctgtaatgccagcactttgggaggccaaggtgggtggatcacctgagggcaggagtctgagaccagcctggccaacatagcaaaaccccatctctattaaaaattttacaaaaattagctgcgtgtggtggcaggcccctgtaatcccagctaattgggaggctgaagcaggagaattgctcaaacctgggaggcgaagattgcagtgagctgaaatcacaccactacactccagccaaagcaacaagagcaaaaacttcgtctcaaaaacaaaacaaaaaaagagtattcattgtgaggacaaacaatacaaatacgaagagggttgtagtacctttacttgtatcacagatacttttgtacccattttgcactagaggaaaaccatgaagcagttgctcaaatgttgttcaacaccagaaaatttatattggagaaaagcactgtaaatgtaatgcatttgtgaaaacattttttaaaaaactacagcttagaaaataccagaggcctcatactaaaatatatttttgcaagtgaagtaaatataaaaataatttaatccaaaattaagtctatataaatatcagagaattcacagtagaaatatctaaggtactgacacttcagacattgctgagtatagaatcagaatgctgagtatagaaaataatttaaaactaaagttggtaggtaaataatgtgtatataactttaaaagaagtagaatttttttgtagatgtataattacattcaaattatattttttcttgaaaaattagtttttgaaaagcaaatgatgtaattcaactcaaattcatgctcttcattcctattgtattcacatgtgaaagcatgtgattaatttttcatgcatcaaagatatgagaaatcatttctgttaggtcggtattatttatgacactttctatgaaagaataaggacattaaaatgtaagatgcatgatgaaaacctgagtgaagaggctgtttgtgtttaacttataatattgagtgatccatgaagtaggttttcagagcaatattcttctgcattatagtaagagaaaaccatttttaatcttagttaaaattaaagtgaattagtagtatatcattttactatttgtacttttatgtaataaaatgcaatgtgtttaaaaatttttggattatgcgtgaacttagttttttaattaaactttttttaacatgttaaaactattgtgcattcaatgaagtgttttcatgccactgactttacctatcccacattactcaagggtttaggtaaaagagggtaacagtatactacttgataacataatgggctaacatctctaataattatttttgctagtgactttaaactgctaataaagaatattgttcccataggttagatttttattctttttaaaatttaaacttatttctcttaatttttgtggatacatagtatgtgtatatctttatgccatgtatggcatattttgatacaggcatataattttatgtattaatcacatcagggcaaaagatgtatccatcaactccagcatttctcctttgtattacaaaccaattctgcacttttagatactttagaatgtacagtcgttactacagggtcattttatggttataataaaaattatatacaagtataaataaaccatgagaaaattctgagttctgaataaacatttaaaaaatgtta

SEQ ID NO: 201438 - DNA, 5589 bp, Homo sapiens
  Payload ID: 19753
  Gene Name: zinc finger protein 107
  ENST ID: ENST00000613690
  CDS Start-End: 201-2663
aatcaggcacgcagctggagcggacaggacggcttccgggatttggcggggcctttgtctctggctgcagccggagctcctgctctcctcctcactgctcagtgtcctctgctcctagaggcccagcctctgtgtccctgtgacctgcagatattgggagatccacagctaagacgccgggactccctggaaacctagaaatggaaccactgacatttaaagatgtcgccatagaattctctctggaggagtggcaatgcctggatactgcacagcgggatttatataggaatgtgttgttagagaactacagaaacctggtctttttggtaatgtcttttcattttgcccaagacctttggccagagcagaacataaaagattctttccagaaagtgacactgagaagatacggaaaatgtgaatatgagaatttacagttaagaaaaggctgtaaacatgtggatgagtgtacggggcacaaaggaggtcataatacagttaaccaatgtttgacagctaccccaagcaaaatattccagtgtaataaatatgtgaaagtctttgataaattttcaaattcaaatagatataagagaagacatacaggaaacaaacacttcaaatgtaaagaatgtagcaaatcattttgcgtgctttcacaactaactcagcatagaagaattcatactagagtgaattcctacaaatgtgaagaatgtggaaaagcctttaactggttctcaactcttactaaacataagagaattcatactggagaaaagccctacaaatgtgaagaatgtggcaaagcctttaaccagtcctcacaacttactaggcataagataattcatactgaagagaaacccaacaaatgtgaagaatgtggcaaggcctttaaacaggcctcacaccttactatacataaaataattcatactggagaaaaaccttacaaatatgaagaatgtggcaaagtctttagccagtcctcacaccttactacacaaaagatacttcacactggagagaacctctacaagtgtaaagaatgtggaaaagcttttaacctattctcaaatcttactaaccataagagaattcatgctggggagaaaccctacaaatgtaaagaatgtggcagagcttttaacatatcctcaaaccttaataaacaggagaaaattcatactggagggaaactcaacaaatgtgaagaatgtgacaaagcttttaaccgatccttaaaacttactgcacataagaaaattctaatggaagagaaaccctacaaatgtgaagaatgtggcaaagtctttaaccagttctcaactcttactagacataagataattcatactggagagaaaccctacaaatgtaaagaatgtggcaaagcttttaaccaatcttcaaaccttactgaacataagaaaattcatactgcagagaaatcctataaatgtgaagaatgtggcaaagcttttaaccaacactcaaacctaattaaccataggaaaatttattctggagagaaaccatacaaatgtgaagaatgtggaaaagcttttaatcgatcctcaacccttactagacataagaaaattcatactggagagaaaccctacaaatgtgaagaatgtgacagagcttttagccagtcttcaaaccttactgaacataagaaaattcatactggagagaaaccctataaatgtgaggaatgtggcaaagcttttaaccgattctcaacccttactaaacataagagaattcatactggagaaaaaccctataaatgtgaagaatgtggaaaagcctttaatcaatcctatcaacttactagacataagatagttcatactaaagagaaactcaacaaatgtgaagaatttggcaaggcctttaaacagtcctcacaccgtactatacataaaattattcatactggagagaaaccctacaaatgtgaagaacatggcaaagtttttaaccagtcctcaaaccttactacacaaaagataattcatactggagagaacctctacaaatttgaagaacatggaaaagcttttaacctattctcaaacattactaaccataagataatttatactggagagaaaccccacaaatgtgaagaatgtggaaaagcttataaccgattctcaaacctaactatacataagagaattcatacgggagagaaaccttaccaatgtgcagaatgtggcaaagcctttaactgctcctcaacccttaatagacataagataattcatactggagagaaaccttacaaatgtaaagaatgtggcaaagcttttaacctatcctcaacccttactgcacataagaaaattcatactggagagaaaccctataaatgtgaagaatgtggcaaagcttttaaccaatcctcaaaccttactacacataagaaaattcatacttcagagaaaccctacaaatgtgaagaatgtggcaaatcctttaaccagttctcatctcttaatatacataagataattcatactggagagaaaccctacaaatgtggagattatggcagagctttcaacctatcctcaaatcttactacacataagaaaattcatactggagagaaaccctacaaatgtgagtatggcaaaacttaattgatcctacaagcttactacacataggaaaattcatactggagagaaactacaaatgtgaagaatgtgttaaagcctttaacaagtcttcaactttttctgcacacacgaggtattttatactggtgagaaaccttacaatgtaaagaatgtggcacagcttttaactaatcttcaaaccttactgaaagttgagaaaattcgtactggagagaatcctacaaatgtgaaaaatgtggcaaatcctttaactgatcctcaacttttactaaacataaggtaattcatactggagaaaagccatacaaatgagaagaatgtggcaatgcctttaatcagtcctcacacctttctacacataagataatttatactggagaggaactctatagttgtgaagaatgtggcaaagcttttaaccaatcctcataccttactatacagaaattcatactggagagaaagcctacaattgtgaagaatgtggcaaagcttttaaccttccttaacccttaactgtagataagaaaattcatactggaaagaaaccctacaaatgtgaagtctgtggcaaagcttttaactgattctcaactcttactacatgtaagagtatttatactggaaagaaaccctacaaatgtaaaaaacgtggcaatgcctttaactggtcctcacaccttgctacatataagacagtttatactttgagagaaaccctgcaaatgtgaataatgtggcaatactttaaaccaatcctcaaacctcactaaacataagataatactgaaaactttacaaacctgaatgatgtgacaataattttgacaacacctcgaactttctaacataaatcatactggtgaaaaatcctagaaatgtgaaaaatatcacaaagcctttaaatggttgtcacacttgattgtaggtaagaatccatactgaagaaaactcctggaagtgtaaaaaatgtggcaacacttttaataaatgctcaccccttattgcacaggaaagcatttatacttcagaaagattgtacaaatacaaggaatgtggaaaagccattattatctgctcagattttactcaacattagagagttagtacgtaataaaagcattataaatgcaatttttgtcaagagatctttcagaaaatataagcctttaaagtgaagaagaggagccagttgtgctggctcacatctgtaatgccagcactttgggaggccaaggtgggtggatcacctgagggcaggagtctgagaccagcctggccaacatagcaaaaccccatctctattaaaaattttacaaaaattagctgcgtgtggtggcaggcccctgtaatcccagctaattgggaggctgaagcaggagaattgctcaaacctgggaggcgaagattgcagtgagctgaaatcacaccactacactccagccaaagcaacaagagcaaaaacttcgtctcaaaaacaaaacaaaaaaagagtattcattgtgaggacaaacaatacaaatacgaagagggttgtagtacctttacttgtatcacagatacttttgtacccattttgcactagaggaaaaccatgaagcagttgctcaaatgttgttcaacaccagaaaatttatattggagaaaagcactgtaaatgtaatgcatttgtgaaaacattttttaaaaaactacagcttagaaaataccagaggcctcatactaaaatatatttttgcaagtgaagtaaatataaaaataatttaatccaaaattaagtctatataaatatcagagaattcacagtagaaatatctaaggtactgacacttcagacattgctgagtatagaatcagaatgctgagtatagaaaataatttaaaactaaagttggtaggtaaataatgtgtatataactttaaaagaagtagaatttttttgtagatgtataattacattcaaattatattttttcttgaaaaattagtttttgaaaagcaaatgatgtaattcaactcaaattcatgctcttcattcctattgtattcacatgtgaaagcatgtgattaatttttcatgcatcaaagatatgagaaatcatttctgttaggtcggtattatttatgacactttctatgaaagaataaggacattaaaatgtaagatgcatgatgaaaacctgagtgaagaggctgtttgtgtttaacttataatattgagtgatccatgaagtaggttttcagagcaatattcttctgcattatagtaagagaaaaccatttttaatcttagttaaaattaaagtgaattagtagtatatcattttactatttgtacttttatgtaataaaatgcaatgtgtttaaaaatttttggattatgcgtgaacttagttttttaattaaactttttttaacatgttaaaactattgtgcattcaatgaagtgttttcatgccactgactttacctatcccacattactcaagggtttaggtaaaagagggtaacagtatactacttgataacataatgggctaacatctctaataattatttttgctagtgactttaaactgctaataaagaatattgttcccataggttagatttttattctttttaaaatttaaacttatttctcttaatttttgtggatacatagtatgtgtatatctttatgccatgtatggcatattttgatacaggcatataattttatgtattaatcacatcagggcaaaagatgtatccatcaactccagcatttctcctttgtattacaaaccaattctgcacttttagatactttagaatgtacagtcgttactacagggtcattttatggttataataaaaattatatacaagtataaataaaccatgagaaaattctgagttctgaataaacatttaaaaaatgtta

SEQ ID NO: 201439 - DNA, 5685 bp, Homo sapiens
  Payload ID: 19753
  Gene Name: zinc finger protein 107
  ENST ID: ENST00000620827
  CDS Start-End: 201-2759
aatcaggcacgcagctggagcggacaggacggcttccgggatttggcggggcctttgtctctggctgcagccggagctcctgctctcctcctcactgctcagtgtcctctgctcctagaggcccagcctctgtgtccctgtgacctgcagatattgggagatccacagctaagacgccgggactccctggaaacctagaaatggaaccactgacatttaaagatgtcgccatagaattctctctggaggagtggcaatgcctggatactgcacagcgggatttatataggaatgtgttgttagagaactacagaaacctggtctttttgggtattgctgtctctaagccatatctgatcacctgtctggagcaaaaaaaagagccctggaatataaaaagacatgagatggtagccaaacccccagtaatgtcttttcattttgcccaagacctttggccagagcagaacataaaagattctttccagaaagtgacactgagaagatacggaaaatgtgaatatgagaatttacagttaagaaaaggctgtaaacatgtggatgagtgtacggggcacaaaggaggtcataatacagttaaccaatgtttgacagctaccccaagcaaaatattccagtgtaataaatatgtgaaagtctttgataaattttcaaattcaaatagatataagagaagacatacaggaaacaaacacttcaaatgtaaagaatgtagcaaatcattttgcgtgctttcacaactaactcagcatagaagaattcatactagagtgaattcctacaaatgtgaagaatgtggaaaagcctttaactggttctcaactcttactaaacataagagaattcatactggagaaaagccctacaaatgtgaagaatgtggcaaagcctttaaccagtcctcacaacttactaggcataagataattcatactgaagagaaacccaacaaatgtgaagaatgtggcaaggcctttaaacaggcctcacaccttactatacataaaataattcatactggagaaaaaccttacaaatatgaagaatgtggcaaagtctttagccagtcctcacaccttactacacaaaagatacttcacactggagagaacctctacaagtgtaaagaatgtggaaaagcttttaacctattctcaaatcttactaaccataagagaattcatgctggggagaaaccctacaaatgtaaagaatgtggcagagcttttaacatatcctcaaaccttaataaacaggagaaaattcatactggagggaaactcaacaaatgtgaagaatgtgacaaagcttttaaccgatccttaaaacttactgcacataagaaaattctaatggaagagaaaccctacaaatgtgaagaatgtggcaaagtctttaaccagttctcaactcttactagacataagataattcatactggagagaaaccctacaaatgtaaagaatgtggcaaagcttttaaccaatcttcaaaccttactgaacataagaaaattcatactgcagagaaatcctataaatgtgaagaatgtggcaaagcttttaaccaacactcaaacctaattaaccataggaaaatttattctggagagaaaccatacaaatgtgaagaatgtggaaaagcttttaatcgatcctcaacccttactagacataagaaaattcatactggagagaaaccctacaaatgtgaagaatgtgacagagcttttagccagtcttcaaaccttactgaacataagaaaattcatactggagagaaaccctataaatgtgaggaatgtggcaaagcttttaaccgattctcaacccttactaaacataagagaattcatactggagaaaaaccctataaatgtgaagaatgtggaaaagcctttaatcaatcctatcaacttactagacataagatagttcatactaaagagaaactcaacaaatgtgaagaatttggcaaggcctttaaacagtcctcacaccgtactatacataaaattattcatactggagagaaaccctacaaatgtgaagaacatggcaaagtttttaaccagtcctcaaaccttactacacaaaagataattcatactggagagaacctctacaaatttgaagaacatggaaaagcttttaacctattctcaaacattactaaccataagataatttatactggagagaaaccccacaaatgtgaagaatgtggaaaagcttataaccgattctcaaacctaactatacataagagaattcatacgggagagaaaccttaccaatgtgcagaatgtggcaaagcctttaactgctcctcaacccttaatagacataagataattcatactggagagaaaccttacaaatgtaaagaatgtggcaaagcttttaacctatcctcaacccttactgcacataagaaaattcatactggagagaaaccctataaatgtgaagaatgtggcaaagcttttaaccaatcctcaaaccttactacacataagaaaattcatacttcagagaaaccctacaaatgtgaagaatgtggcaaatcctttaaccagttctcatctcttaatatacataagataattcatactggagagaaaccctacaaatgtggagattatggcagagctttcaacctatcctcaaatcttactacacataagaaaattcatactggagagaaaccctacaaatgtgagtatggcaaaacttaattgatcctacaagcttactacacataggaaaattcatactggagagaaactacaaatgtgaagaatgtgttaaagcctttaacaagtcttcaactttttctgcacacacgaggtattttatactggtgagaaaccttacaatgtaaagaatgtggcacagcttttaactaatcttcaaaccttactgaaagttgagaaaattcgtactggagagaatcctacaaatgtgaaaaatgtggcaaatcctttaactgatcctcaacttttactaaacataaggtaattcatactggagaaaagccatacaaatgagaagaatgtggcaatgcctttaatcagtcctcacacctttctacacataagataatttatactggagaggaactctatagttgtgaagaatgtggcaaagcttttaaccaatcctcataccttactatacagaaattcatactggagagaaagcctacaattgtgaagaatgtggcaaagcttttaaccttccttaacccttaactgtagataagaaaattcatactggaaagaaaccctacaaatgtgaagtctgtggcaaagcttttaactgattctcaactcttactacatgtaagagtatttatactggaaagaaaccctacaaatgtaaaaaacgtggcaatgcctttaactggtcctcacaccttgctacatataagacagtttatactttgagagaaaccctgcaaatgtgaataatgtggcaatactttaaaccaatcctcaaacctcactaaacataagataatactgaaaactttacaaacctgaatgatgtgacaataattttgacaacacctcgaactttctaacataaatcatactggtgaaaaatcctagaaatgtgaaaaatatcacaaagcctttaaatggttgtcacacttgattgtaggtaagaatccatactgaagaaaactcctggaagtgtaaaaaatgtggcaacacttttaataaatgctcaccccttattgcacaggaaagcatttatacttcagaaagattgtacaaatacaaggaatgtggaaaagccattattatctgctcagattttactcaacattagagagttagtacgtaataaaagcattataaatgcaatttttgtcaagagatctttcagaaaatataagcctttaaagtgaagaagaggagccagttgtgctggctcacatctgtaatgccagcactttgggaggccaaggtgggtggatcacctgagggcaggagtctgagaccagcctggccaacatagcaaaaccccatctctattaaaaattttacaaaaattagctgcgtgtggtggcaggcccctgtaatcccagctaattgggaggctgaagcaggagaattgctcaaacctgggaggcgaagattgcagtgagctgaaatcacaccactacactccagccaaagcaacaagagcaaaaacttcgtctcaaaaacaaaacaaaaaaagagtattcattgtgaggacaaacaatacaaatacgaagagggttgtagtacctttacttgtatcacagatacttttgtacccattttgcactagaggaaaaccatgaagcagttgctcaaatgttgttcaacaccagaaaatttatattggagaaaagcactgtaaatgtaatgcatttgtgaaaacattttttaaaaaactacagcttagaaaataccagaggcctcatactaaaatatatttttgcaagtgaagtaaatataaaaataatttaatccaaaattaagtctatataaatatcagagaattcacagtagaaatatctaaggtactgacacttcagacattgctgagtatagaatcagaatgctgagtatagaaaataatttaaaactaaagttggtaggtaaataatgtgtatataactttaaaagaagtagaatttttttgtagatgtataattacattcaaattatattttttcttgaaaaattagtttttgaaaagcaaatgatgtaattcaactcaaattcatgctcttcattcctattgtattcacatgtgaaagcatgtgattaatttttcatgcatcaaagatatgagaaatcatttctgttaggtcggtattatttatgacactttctatgaaagaataaggacattaaaatgtaagatgcatgatgaaaacctgagtgaagaggctgtttgtgtttaacttataatattgagtgatccatgaagtaggttttcagagcaatattcttctgcattatagtaagagaaaaccatttttaatcttagttaaaattaaagtgaattagtagtatatcattttactatttgtacttttatgtaataaaatgcaatgtgtttaaaaatttttggattatgcgtgaacttagttttttaattaaactttttttaacatgttaaaactattgtgcattcaatgaagtgttttcatgccactgactttacctatcccacattactcaagggtttaggtaaaagagggtaacagtatactacttgataacataatgggctaacatctctaataattatttttgctagtgactttaaactgctaataaagaatattgttcccataggttagatttttattctttttaaaatttaaacttatttctcttaatttttgtggatacatagtatgtgtatatctttatgccatgtatggcatattttgatacaggcatataattttatgtattaatcacatcagggcaaaagatgtatccatcaactccagcatttctcctttgtattacaaaccaattctgcacttttagatactttagaatgtacagtcgttactacagggtcattttatggttataataaaaattatatacaagtataaataaaccatgagaaaattctgagttctgaataaacatttaaaaaatgtta

SEQ ID NO: 201440 - DNA, 3321 bp, Homo sapiens
  Payload ID: 19754
  Gene Name: zinc finger protein 112
  Uniprot ID: Q9UJU3
  ENST ID: ENST00000337401
  CDS Start-End: 90-2831
agagccacttccgccccaggtacgctaggccgcggccttcgttcctcccagaaaggtctctgcctttctctagaaaaagaaagagaaaaatgaccaaattccaggagatggtgacattcaaggatgttgctgtggtcttcactgaggaggagctggggctgctggactctgtccagaggaagctgtaccgagatgtgatgctggagaacttcaggaacctgctcttagtagcacatcagcccttcaagccagacctaatatcccagctggagagagaagaaaagcttttgatggtggagacagaaaccccaagagatggatgttcaggaaggaagaatcaacaaaagatggagagtattcaggaagtaacagtaagctacttttcccccaaagagctttcctcccgtcagacctggcaacaaagtgcaggtgggttaatcaggtgtcaagatttcctgaaagtttttcaagggaagaattctcagttgcaagaacaaggtaattccctcggccaggtttgggcaggaataccagttcagatttctgaagataagaactatatattcactcatatagggaatggctccaattatataaaaagtcaagggtatccatcttggagggcacatcattcttggaggaaaatgtatctgaaagagtcacataattatcagtgtagatgtcagcaaatttccatgaaaaatcatttctgtaagtgtgacagtgtcagttggctctcacatcacaatgataaactggaagtacacagaaaagaaaactacagctgccatgactgtggagaagatatcatgaaggtatcattacttaatcaggagtcaattcaaacagaggagaagccctatccatgtactgggtatagaaaagccttcagtaatgactccagctctgaggttcatcagcagttccacttggaagggaagccctatacatacagttcatgtggaaagggctgtaattatagttcacttcttcatattcatcaaaatattgagagagaagatgatattgagaattcacatctgaaatcctatcagagagtgcatacagaggagaaaccatgcaaatgtggtgaatatggtgagaacttcaatcactgttcccctcttaacacttatgaacttatccacacaggtgagatgtcctataggcacaacatttatgagaaagccttcagtcatagcttagaccttaatagtatttttagggtccatactagggatgaaccccatgaatatgaggaaaatgagaatgtctttaatcagagttcatgtcttcaagtccatcaaaaaatccacactgaagagaaactatacacagatatagagtatggaaagagtttcatttgtagttcaaatcttgacattcagcatagggttcatatggaagagaattcatataattctgaggagtgtggtaatggcttcagtctggcctcacattttcaggaccttcagatagtccacactaaggaacaaccatataaacgctatgtgtgtagtaacagcttcagccataatttatatcttcaaggtcatccaaaaattcacattggagagaaaccacgtaaggagcatgggaatggcttcaactggagctcaaaacttaaagatcatcagagagtccacactggacagaagccatacaaatgcaatatatgcggcaaaggtttcaatcatagatcagttctgaatgttcatcagagagtccacacaggagagaaaccttataaatgcgaggaatgtgataagggattcagtcggagttcatatcttcaagcccatcagagagtccacactggagaaaaaccttataaatgtgaggaatgtgggaaggggttcagtcgaaattcataccttcaaggccatcagagagttcacactggagaaaaaccatacaagtgtgaggagtgtgggaagggcttcagtcggagttcacaccttcaaggccatcagagagtccacactggagaaaaaccattcaaatgtgaggaatgtgggaaggggttcagttggagctttaatcttcaaattcatcagagggttcacacaggagaaaaaccctataaatgtgaagaatgtggtaaaggcttcagtaaggcctcaacacttttggcccatcagagggtccacacgggagagaagccataccaatgtgatgagtgtggtaagagtttcagtcagagatcataccttcagagtcatcagagtgtccattctggagaaagaccatatatatgtgaggtatgtggaaagggcttcagtcagagagcatatcttcaaggtcatcagagagtccacactagagtgaaaccgtataaatgtgagatgtgtgggaagggctttagtcagagttcgcgccttgaagcacatcggagggttcacacaggagggaaaccatacaaatgtgaggtgtgtacaaagggtttcagtgagagttcacgccttcaagcacaccaaagggttcatgtggaagggagaccctataaatgtgaacagtgtggtaagggtttcagtgggtattcaagtcttcaagcccatcacagagtccacacaggagagaaaccatacaaatgtgaggtatgtggaaagggcttcagtcagagatcaaatcttcaggctcaccagagagtccacacaggagagaaaccatacaaatgtgatgcatgtggtaagggtttccgttggagctcaggtcttctcattcatcaaagagtccatagtagtgataaattctataaaagcgaagactatggtaaggactacccttcatcagagaatctacacagaaatgaagattctgttttgttttgaagtcctcaaatgggagctgaaattttccagtcactagagttctttcagtagaaaaagaatttttaaaaattaaaatgtaatgttgctgcccaacttcaacattcataatggccaggagaccacacaacagagacatttaatgagaggggtttcacgagggattttgttagaactttaacatcagtcattgcacaggagctaaggcttataaaatatgagtatggtcaggaatttaataaaagtacagtgatgagcatgcctaaatccatgttctctagaatgtaagcttggtgaaagaagggactttgttcattgctagtctacaaaactaggacatttcataacgcaatgtaggtgctcagtactttttgctaaataactaaaagtatgtaaaggtaaaaggtttgaaatttttaagcgcattttttaaaacttaaaatgtatttggaggagaaatcctgcaagtaatcttaataaaatcatttcaagt

SEQ ID NO: 201441 - DNA, 3654 bp, Homo sapiens
  Payload ID: 19754
  Gene Name: zinc finger protein 112
  Uniprot ID: Q9UJU3
  ENST ID: ENST00000354340
  CDS Start-End: 53-2776
acttccgccccaggtacgctaggccgcggccttcgttcctcccagaaaggagatggtgacattcaaggatgttgctgtggtcttcactgaggaggagctggggctgctggactctgtccagaggaagctgtaccgagatgtgatgctggagaacttcaggaacctgctcttagtagcacatcagcccttcaagccagacctaatatcccagctggagagagaagaaaagcttttgatggtggagacagaaaccccaagagatggatgttcaggaaggaagaatcaacaaaagatggagagtattcaggaagtaacagtaagctacttttcccccaaagagctttcctcccgtcagacctggcaacaaagtgcaggtgggttaatcaggtgtcaagatttcctgaaagtttttcaagggaagaattctcagttgcaagaacaaggtaattccctcggccaggtttgggcaggaataccagttcagatttctgaagataagaactatatattcactcatatagggaatggctccaattatataaaaagtcaagggtatccatcttggagggcacatcattcttggaggaaaatgtatctgaaagagtcacataattatcagtgtagatgtcagcaaatttccatgaaaaatcatttctgtaagtgtgacagtgtcagttggctctcacatcacaatgataaactggaagtacacagaaaagaaaactacagctgccatgactgtggagaagatatcatgaaggtatcattacttaatcaggagtcaattcaaacagaggagaagccctatccatgtactgggtatagaaaagccttcagtaatgactccagctctgaggttcatcagcagttccacttggaagggaagccctatacatacagttcatgtggaaagggctgtaattatagttcacttcttcatattcatcaaaatattgagagagaagatgatattgagaattcacatctgaaatcctatcagagagtgcatacagaggagaaaccatgcaaatgtggtgaatatggtgagaacttcaatcactgttcccctcttaacacttatgaacttatccacacaggtgagatgtcctataggcacaacatttatgagaaagccttcagtcatagcttagaccttaatagtatttttagggtccatactagggatgaaccccatgaatatgaggaaaatgagaatgtctttaatcagagttcatgtcttcaagtccatcaaaaaatccacactgaagagaaactatacacagatatagagtatggaaagagtttcatttgtagttcaaatcttgacattcagcatagggttcatatggaagagaattcatataattctgaggagtgtggtaatggcttcagtctggcctcacattttcaggaccttcagatagtccacactaaggaacaaccatataaacgctatgtgtgtagtaacagcttcagccataatttatatcttcaaggtcatccaaaaattcacattggagagaaaccacgtaaggagcatgggaatggcttcaactggagctcaaaacttaaagatcatcagagagtccacactggacagaagccatacaaatgcaatatatgcggcaaaggtttcaatcatagatcagttctgaatgttcatcagagagtccacacaggagagaaaccttataaatgcgaggaatgtgataagggattcagtcggagttcatatcttcaagcccatcagagagtccacactggagaaaaaccttataaatgtgaggaatgtgggaaggggttcagtcgaaattcataccttcaaggccatcagagagttcacactggagaaaaaccatacaagtgtgaggagtgtgggaagggcttcagtcggagttcacaccttcaaggccatcagagagtccacactggagaaaaaccattcaaatgtgaggaatgtgggaaggggttcagttggagctttaatcttcaaattcatcagagggttcacacaggagaaaaaccctataaatgtgaagaatgtggtaaaggcttcagtaaggcctcaacacttttggcccatcagagggtccacacgggagagaagccataccaatgtgatgagtgtggtaagagtttcagtcagagatcataccttcagagtcatcagagtgtccattctggagaaagaccatatatatgtgaggtatgtggaaagggcttcagtcagagagcatatcttcaaggtcatcagagagtccacactagagtgaaaccgtataaatgtgagatgtgtgggaagggctttagtcagagttcgcgccttgaagcacatcggagggttcacacaggagggaaaccatacaaatgtgaggtgtgtacaaagggtttcagtgagagttcacgccttcaagcacaccaaagggttcatgtggaagggagaccctataaatgtgaacagtgtggtaagggtttcagtgggtattcaagtcttcaagcccatcacagagtccacacaggagagaaaccatacaaatgtgaggtatgtggaaagggcttcagtcagagatcaaatcttcaggctcaccagagagtccacacaggagagaaaccatacaaatgtgatgcatgtggtaagggtttccgttggagctcaggtcttctcattcatcaaagagtccatagtagtgataaattctataaaagcgaagactatggtaaggactacccttcatcagagaatctacacagaaatgaagattctgttttgttttgaagtcctcaaatgggagctgaaattttccagtcactagagttctttcagtagaaaaagaatttttaaaaattaaaatgtaatgttgctgcccaacttcaacattcataatggccaggagaccacacaacagagacatttaatgagaggggtttcacgagggattttgttagaactttaacatcagtcattgcacaggagctaaggcttataaaatatgagtatggtcaggaatttaataaaagtacagtgatgagcatgcctaaatccatgttctctagaatgtaagcttggtgaaagaagggactttgttcattgctagtctacaaaactaggacatttcataacgcaatgtaggtgctcagtactttttgctaaataactaaaagtatgtaaaggtaaaaggtttgaaatttttaagcgcattttttaaaacttaaaatgtatttggaggagaaatcctgcaagtaatcttaataaaatcatttcaagtaaatatttgaaatgtagaacaataagcattatgatgatctgaaataacattaatttgattgtaaccctattggggttagttcccaccctttgttccatcttgagcagagatgtgctgcatttcttaacgtttggtctctatacattataccatctgctgaagtttagctttgtgtgtgtgtatatgtacccatgtgtgcacttgaaatatcagtacaaactgataaacaatgtttctggttaatgttgcaaaaatggaacactgtattttacataattgattttctactcctgccctgtgaattaaggcagagttttactgtaatatttgcaagtatccaaaatggttactgatgacaaatactttttaataaatgtcaaaatcacaa

SEQ ID NO: 201442 - DNA, 534 bp, Homo sapiens
  Payload ID: 19754
  Gene Name: zinc finger protein 112
  ENST ID: ENST00000592151
  CDS Start-End: 84-248
acttccgccccaggtacgctaggccgcggccttcgttcctcccagaaaggtctctgcctttctctagaaaaagaaagagaaaaatgaccaaattccaggagatggtgacattcaaggatgttgctgtggtcttcactgaggaggagctggggctgctggactctgtccagaggaagctgtaccgagatgtgatgctggagaacttcaggaacctgctcttacacatcagcccttcaagccagacctaatatcccagctggagagagaagaaaagcttttgatggtggagacagaaaccccaagagatggatgttcaggaaggaagaatcaacaaaagatggagagtattcaggaagtaacagtaagctacttttcccccaaagagctttcctcccgtcagacctggcaacaaagtgcaggtgggttaatcaggtgtcaagatttcctgaaagtttttcaagggaagaattctcagttgcaagaacaaggtaattccctcggccaggtttgggcaggaataccagttcagatttc

SEQ ID NO: 201443 - DNA, 569 bp, Homo sapiens
  Payload ID: 19754
  Gene Name: zinc finger protein 112
  ENST ID: ENST00000587909
  CDS Start-End: 117-569
gcagagccacttccgccccaggtacgctaggccgcggccttcgttcctcccagaaagcacatcagcccttcaagccagacctaatatcccagctggagagagaagaaaagcttttgatggtggagacagaaaccccaagagatggatgttcaggaaggaagaatcaacaaaagatggagagtattcaggaagtaacagtaagctacttttcccccaaagagctttcctcccgtcagacctggcaacaaagtgcaggtgggttaatcaggtgtcaagatttcctgaaagtttttcaagggaagaattctcagttgcaagaacaaggtaattccctcggccaggtttgggcaggaataccagttcagatttctgaagataagaactatatattcactcatatagggaatggctccaattatataaaaagtcaagggtatccatcttggagggcacatcattcttggaggaaaatgtatctgaaagagtcacataattatcagtgtagatgtcagcaaatttccatgaaaaatcatttctgtaagtgtgacagtgtcagttggctctcacat

SEQ ID NO: 201444 - DNA, 577 bp, Homo sapiens
  Payload ID: 19754
  Gene Name: zinc finger protein 112
  ENST ID: ENST00000590687
  CDS Start-End: 129-577
atcattcctttcaggaagttgagtgaggcctgagacagcaatgtttcgtttagcctggcggcggccctccttgtcttcgagaagagcatccgcggctagcagtggaagatggggttgggccccaggagatggtgacattcaaggatgttgctgtggtcttcactgaggaggagctggggctgctggactctgtccagaggaagctgtaccgagatgtgatgctggagaacttcaggaacctgctcttagtagcacatcagcccttcaagccagacctaatatcccagctggagagagaagaaaagcttttgatggtggagacagaaaccccaagagatggatgttcaggaaggaagaatcaacaaaagatggagagtattcaggaagtaacagtaagctacttttcccccaaagagctttcctcccgtcagacctggcaacaaagtgcaggtgggttaatcaggtgtcaagatttcctgaaagtttttcaagggaagaattctcagttgcaagaacaaggtaattccctcggccaggtttgggcaggaataccagttcagatttctgaagataagaa

SEQ ID NO: 201445 - DNA, 558 bp, Homo sapiens
  Payload ID: 19754
  Gene Name: zinc finger protein 112
  ENST ID: ENST00000588057
  CDS Start-End: 121-558
gaaagtgaggtcatcattcctttcaggaagttgagtgaggcctgagacagcaatgtttcgtttagcctggcggcggccctccttgtcttcgagaagagcatccgcggctagcagtggaagatggggttgggccccaggtctctgcctttctctagaaaaagaaagagaaaaatgaccaaattccaggagatggtgacattcaaggatgttgctgtggtcttcactgaggaggagctggggctgctggactctgtccagaggaagctgtaccgagatgtgatgctggagaacttcaggaacctgctcttagtagcacatcagcccttcaagccagacctaatatcccagctggagagagaagaaaagcttttgatggtggagacagaaaccccaagagatggatgttcaggaaggaagaatcaacaaaagatggagagtattcaggaagtaacagtaagctacttttcccccaaagagctttcctcccgtcagacctggcaacaaagtgcaggtgggttaatcaggtgtcaagatttcctgaaagtttttcaagggaag

SEQ ID NO: 201446 - DNA, 2206 bp, Homo sapiens
  Payload ID: 19755
  Gene Name: zinc finger protein 114
  Uniprot ID: Q8NC26
  ENST ID: ENST00000315849
  CDS Start-End: 225-1478
acagcgaggacccaaggctggggtttcctgcttggatcaggagtgcctggggatttgatccccatcctggtgcagctccgagacgctcctgggctgcgcgcgcttttgggctgcgccaccgacagagacatctggaagccggagctagtggaagactctgcctcacctgcctccttgaaggaaacacggggaagccaggactggccgtcacgttggtgacaaatatgtcccaggactcggtgaccttcgcagacgtggctgtgaacttcaccaaagaggagtggaccctgctggacccagctcagaggaatctctacagagacgtgatgctggaaaattctaggaacttggcattcatagattgggcaactccatgtaaaaccaaagacgcaacccctcagccggatattcttcctaaaagaacatttcctgaagccaacagagtgtgtctcacgagcatcagttcccagcactccacattaagagaagactggagatgccccaaaacagaggaaccacacaggcagggggtgaataatgtgaagccacctgcagttgcccctgagaaagatgaatctcctgttagcatttgtgaagatcatgaaatgaggaaccactctaaacctacctgcaggcttgtgccttcacagggagattccataagacaatgtatcctaacacgtgactcaagtattttcaagtataatcctgtcttaaacgatagtcaaaaaacacatgaaaacaacgaagacgatggagtcttggggtggaacattcagtgggttccgtgtgggagaaaaacagagctgaaatcaagcacatggactggcagtcagaacactgtgcatcatatacgtgatgaaattgatacgggggccaacaggcaccagcggaatccatttggaaaagctttccgtgaagacggatcccttagggcacacaacactcatggtcgagagaaaatgtatgattttactcagtgcgagaacacctccagaaataactcaattcacgccatgcagatgcagttgtataccgcagagacaaacaagaaggattgtcaaactggggcaacctctgccaacgctccaaattccggttcacacaagagtcattgcactggagagaaaacccataaatgccccgaatgtgggagagcctttttttatcagtcattccttatgagacatatgaaaattcacactggagagaaaccgtatgaatgtgggaaatgtgggaaagcctttagatattccttacaccttaataaacatttaagaaagcatgttgtgcagaagaagccctacgaatgtgaagaatgtgggaaagtcattcgggagtcctcaaaatatacacatataaggagccacactggagagaaaccctataaatgtaagacatgtggaaaagactttgcaaagtcgtcaggacttaaaaaacatcttaagactcacaaagatgagaagccctgtgaatgaaaggaaggtggaaaatttttcattaattttctgactgtaccaaacatgtgaggaggacatattggaagggagctcaaggggttagcatgagtgagaacatcttccctgaactctcgtatcttacagaaatgtgaaaaaaaaccctgtgaaggtaaagtctacagaaagcctttcatcttcattcatcttgagtagacatttgttctcaccctggagagaaactgcgaatctaaaaggaatatgacaaagccttcagcgtggtctcaaattcatggttcatacaagaactcacactgcagagactccttacggaaataaaaaatgtaggaaagacctgccggccgcggtggctcatgcctgtaatcccagcactttgggaggccgaggcgggcggatcacgaggtcaggagatcaagaccatcctggctaacacggtgataccccgtctctactaaaaatacaaaaaaaattagccaggcgtggtggcaggtgcctgtagtcccagctacttgggaggctgaggtaggagaatggtgtaaacctgggaggtggagcttgcagtgagccgagatggagccactgcactccagcctgggggaaagagcgagactccgtctcaaaaaaaaaaaaaagtaggaaagacctctttaaacacttaccactcatgttgcatgtgaatccacatcctgaagggaggctacaactggaataaaaataagaaagctttc

SEQ ID NO: 201447 - DNA, 569 bp, Homo sapiens
  Payload ID: 19755
  Gene Name: zinc finger protein 114
  ENST ID: ENST00000594024
  CDS Start-End: 228-569
aggaacggtggcgcgggcggaggcgacagcgaggacccaaggctggggtttcctgcttggatcaggagtgcctggggactccgagacgctcctgggctgcgcgcgcttttgggctgcgccaccgacagagacatctggaagccggagctagtggaagactctgcctcacctgcctccttgaaggaaacacggggaagccaggactggccgtcacgttggtgacaaatatgtcccagggtcttgctctgttgcccaggctggactgcagtgggaggatcatagcttattgcaacctccacctcccaggctcaggcaatcctccctcctcagcctcccgggtagctgagactacaggcacccgcccacactcacgggactcggtgaccttcgcagacgtggctgtgaacttcaccaaagaggagtggaccctgctggacccagctcagaggaatctctacagagacgtgatgctggaaaattctaggaacttggcattcatagattgggcaactccatgtaaaaccaaagacgcaacccctcagccggatattcttcctaaaagaacattt

SEQ ID NO: 201448 - DNA, 2478 bp, Homo sapiens
  Payload ID: 19755
  Gene Name: zinc finger protein 114
  Uniprot ID: Q8NC26
  ENST ID: ENST00000595607
  CDS Start-End: 495-1748
agcccacttgcacccaagtgaataaacagcctttgttgcttacacaaagcctgtttaggtggtcttctatacggacacgcgtgacacccaggagttcgagacgagtctgggcagcatatactgaggggaaaaaaaagccttctttccttgggaaatgcaggaagccagcaagcggccggagtctccggagcccgcaaggaggcgcgttggctgcgcagagagcgcgcttcccagctggagagcctaggaacggtggcgcgggcggaggcgacagcgaggacccaaggctggggtttcctgcttggatcaggagtgcctggggatttgatccccatcctggtgcagctccgagacgctcctgggctgcgcgcgcttttgggctgcgccaccgacagagacatctggaagccggagctagtggaagactctgcctcacctgcctccttgaaggaaacacggggaagccaggactggccgtcacgttggtgacaaatatgtcccaggactcggtgaccttcgcagacgtggctgtgaacttcaccaaagaggagtggaccctgctggacccagctcagaggaatctctacagagacgtgatgctggaaaattctaggaacttggcattcatagattgggcaactccatgtaaaaccaaagacgcaacccctcagccggatattcttcctaaaagaacatttcctgaagccaacagagtgtgtctcacgagcatcagttcccagcactccacattaagagaagactggagatgccccaaaacagaggaaccacacaggcagggggtgaataatgtgaagccacctgcagttgcccctgagaaagatgaatctcctgttagcatttgtgaagatcatgaaatgaggaaccactctaaacctacctgcaggcttgtgccttcacagggagattccataagacaatgtatcctaacacgtgactcaagtattttcaagtataatcctgtcttaaacgatagtcaaaaaacacatgaaaacaacgaagacgatggagtcttggggtggaacattcagtgggttccgtgtgggagaaaaacagagctgaaatcaagcacatggactggcagtcagaacactgtgcatcatatacgtgatgaaattgatacgggggccaacaggcaccagcggaatccatttggaaaagctttccgtgaagacggatcccttagggcacacaacactcatggtcgagagaaaatgtatgattttactcagtgcgagaacacctccagaaataactcaattcacgccatgcagatgcagttgtataccgcagagacaaacaagaaggattgtcaaactggggcaacctctgccaacgctccaaattccggttcacacaagagtcattgcactggagagaaaacccataaatgccccgaatgtgggagagcctttttttatcagtcattccttatgagacatatgaaaattcacactggagagaaaccgtatgaatgtgggaaatgtgggaaagcctttagatattccttacaccttaataaacatttaagaaagcatgttgtgcagaagaagccctacgaatgtgaagaatgtgggaaagtcattcgggagtcctcaaaatatacacatataaggagccacactggagagaaaccctataaatgtaagacatgtggaaaagactttgcaaagtcgtcaggacttaaaaaacatcttaagactcacaaagatgagaagccctgtgaatgaaaggaaggtggaaaatttttcattaattttctgactgtaccaaacatgtgaggaggacatattggaagggagctcaaggggttagcatgagtgagaacatcttccctgaactctcgtatcttacagaaatgtgaaaaaaaaccctgtgaaggtaaagtctacagaaagcctttcatcttcattcatcttgagtagacatttgttctcaccctggagagaaactgcgaatctaaaaggaatatgacaaagccttcagcgtggtctcaaattcatggttcatacaagaactcacactgcagagactccttacggaaataaaaaatgtaggaaagacctgccggccgcggtggctcatgcctgtaatcccagcactttgggaggccgaggcgggcggatcacgaggtcaggagatcaagaccatcctggctaacacggtgataccccgtctctactaaaaatacaaaaaaaattagccaggcgtggtggcaggtgcctgtagtcccagctacttgggaggctgaggtaggagaatggtgtaaacctgggaggtggagcttgcagtgagccgagatggagccactgcactccagcctgggggaaagagcgagactccgtctcaaaaaaaaaaaaaagtaggaaagacctctttaaacacttaccactcatgttgcatgtgaatccacatcctgaagggaggctacaactggaataaaaataagaaagctttcaa

SEQ ID NO: 201449 - DNA, 457 bp, Homo sapiens
  Payload ID: 19755
  Gene Name: zinc finger protein 114
  ENST ID: ENST00000601320
  CDS Start-End: 276-457
attttgaggaaggggtcaagaagcgagtacaaaatgtctgggcaggacgaatctctgtagtcggtccttcctggcggcctcgttaggttgatttatttcaacagtttgatccccatcctggtgcagctccgagacgctcctgggctgcgcgcgcttttgggctgcgccaccgacagagacatctggaagccggagctagtggaagactctgcctcacctgcctccttgaaggaaacacggggaagccaggactggccgtcacgttggtgacaaatatgtcccagggtcttgctctgttgcccaggctggactgcagtgggaggatcatagcttattgcaacctccacctcccaggctcaggcaatcctccctcctcagcctcccgggtagctgagactacaggcacccgcccacactcacgggactcggtgaccttcgcagacgtggctgtgaactt

SEQ ID NO: 201450 - DNA, 634 bp, Homo sapiens
  Payload ID: 19755
  Gene Name: zinc finger protein 114
  ENST ID: ENST00000595408
  CDS Start-End: 240-634
gcgcgggcggaggcgacagcgaggacccaaggctggggtttcctgcttggatcaggagtgcctggggatttgatccccatcctggtgcagctccgagacgctcctgggctgcgcgcgcttttgggctgcgccaccgacagagacatctggaagccggagctagtggaagactctgcctcacctgcctccttgaaggaaacacggggaagccaggactggccgtcacgttggtgacaaatatgtcccagggtcttgctctgttgcccaggctggactgcagtgggaggatcatagcttattgcaacctccacctcccaggctcaggcaatcctccctcctcagcctcccgggtagctgagactacaggcacccgcccacactcacgggactcggtgaccttcgcagacgtggctgtgaacttcaccaaagaggagtggaccctgctggacccagctcagaggaatctctacagagacgtgatgctggaaaattctaggaacttggcattcatagattgggcaactccatgtaaaaccaaagacgcaacccctcagccggatattcttcctaaaagaacatttcctgaagccaacagagtgtgtctcacgagcatcagttcccagcactccacatt

SEQ ID NO: 201451 - DNA, 1742 bp, Homo sapiens
  Payload ID: 19755
  Gene Name: zinc finger protein 114
  Uniprot ID: Q8NC26
  ENST ID: ENST00000600687
  CDS Start-End: 297-1550
aaaaaaaaaaaagaaagaaagaaaagaaaggaaggaaggaagaaaaaaatcatttcaagggtaggaagccagcaagcggccggagtctccggagcccgcaaggaggcgcgttggctgcgcagagagcgcgcttcccagctggagagcctaggaacggtggcgcgggcggaggcgacagcgaggacccaaggctggggtttcctgcttggatcaggagtgcctggggactctgcctcacctgcctccttgaaggaaacacggggaagccaggactggccgtcacgttggtgacaaatatgtcccaggactcggtgaccttcgcagacgtggctgtgaacttcaccaaagaggagtggaccctgctggacccagctcagaggaatctctacagagacgtgatgctggaaaattctaggaacttggcattcatagattgggcaactccatgtaaaaccaaagacgcaacccctcagccggatattcttcctaaaagaacatttcctgaagccaacagagtgtgtctcacgagcatcagttcccagcactccacattaagagaagactggagatgccccaaaacagaggaaccacacaggcagggggtgaataatgtgaagccacctgcagttgcccctgagaaagatgaatctcctgttagcatttgtgaagatcatgaaatgaggaaccactctaaacctacctgcaggcttgtgccttcacagggagattccataagacaatgtatcctaacacgtgactcaagtattttcaagtataatcctgtcttaaacgatagtcaaaaaacacatgaaaacaacgaagacgatggagtcttggggtggaacattcagtgggttccgtgtgggagaaaaacagagctgaaatcaagcacatggactggcagtcagaacactgtgcatcatatacgtgatgaaattgatacgggggccaacaggcaccagcggaatccatttggaaaagctttccgtgaagacggatcccttagggcacacaacactcatggtcgagagaaaatgtatgattttactcagtgcgagaacacctccagaaataactcaattcacgccatgcagatgcagttgtataccgcagagacaaacaagaaggattgtcaaactggggcaacctctgccaacgctccaaattccggttcacacaagagtcattgcactggagagaaaacccataaatgccccgaatgtgggagagcctttttttatcagtcattccttatgagacatatgaaaattcacactggagagaaaccgtatgaatgtgggaaatgtgggaaagcctttagatattccttacaccttaataaacatttaagaaagcatgttgtgcagaagaagccctacgaatgtgaagaatgtgggaaagtcattcgggagtcctcaaaatatacacatataaggagccacactggagagaaaccctataaatgtaagacatgtggaaaagactttgcaaagtcgtcaggacttaaaaaacatcttaagactcacaaagatgagaagccctgtgaatgaaaggaaggtggaaaatttttcattaattttctgactgtaccaaacatgtgaggaggacatattggaagggagctcaaggggttagcatgagtgagaacatcttccctgaactctcgtatcttacagaaatgtgaaaaaaaaccctgtgaaggtaaagtctacagaaagcctttcatcttcattcatcttgag

SEQ ID NO: 201452 - DNA, 2105 bp, Homo sapiens
  Payload ID: 19755
  Gene Name: zinc finger protein 114
  Uniprot ID: Q8NC26
  ENST ID: ENST00000597695
  CDS Start-End: 256-1407
acttttttttttttttcgagatggagtctcgctctgtcgcccaggctggagtgcagttgcacgatctcggctcactgcaacctccgcctcccaggctcaggcaatcctccctcctcagcctcccgggtagctgagactacaggcacccgcccacactcacgggactcggtgaccttcgcagacgtggctgtgaacttcaccaaagaggagtggaccctgctggacccagctcagaggaatctctacagagacgtgatgctggaaaattctaggaacttggcattcatagattgggcaactccatgtaaaaccaaagacgcaacccctcagccggatattcttcctaaaagaacatttcctgaagccaacagagtgtgtctcacgagcatcagttcccagcactccacattaagagaagactggagatgccccaaaacagaggaaccacacaggcagggggtgaataatgtgaagccacctgcagttgcccctgagaaagatgaatctcctgttagcatttgtgaagatcatgaaatgaggaaccactctaaacctacctgcaggcttgtgccttcacagggagattccataagacaatgtatcctaacacgtgactcaagtattttcaagtataatcctgtcttaaacgatagtcaaaaaacacatgaaaacaacgaagacgatggagtcttggggtggaacattcagtgggttccgtgtgggagaaaaacagagctgaaatcaagcacatggactggcagtcagaacactgtgcatcatatacgtgatgaaattgatacgggggccaacaggcaccagcggaatccatttggaaaagctttccgtgaagacggatcccttagggcacacaacactcatggtcgagagaaaatgtatgattttactcagtgcgagaacacctccagaaataactcaattcacgccatgcagatgcagttgtataccgcagagacaaacaagaaggattgtcaaactggggcaacctctgccaacgctccaaattccggttcacacaagagtcattgcactggagagaaaacccataaatgccccgaatgtgggagagcctttttttatcagtcattccttatgagacatatgaaaattcacactggagagaaaccgtatgaatgtgggaaatgtgggaaagcctttagatattccttacaccttaataaacatttaagaaagcatgttgtgcagaagaagccctacgaatgtgaagaatgtgggaaagtcattcgggagtcctcaaaatatacacatataaggagccacactggagagaaaccctataaatgtaagacatgtggaaaagactttgcaaagtcgtcaggacttaaaaaacatcttaagactcacaaagatgagaagccctgtgaatgaaaggaaggtggaaaatttttcattaattttctgactgtaccaaacatgtgaggaggacatattggaagggagctcaaggggttagcatgagtgagaacatcttccctgaactctcgtatcttacagaaatgtgaaaaaaaaccctgtgaaggtaaagtctacagaaagcctttcatcttcattcatcttgagtagacatttgttctcaccctggagagaaactgcgaatctaaaaggaatatgacaaagccttcagcgtggtctcaaattcatggttcatacaagaactcacactgcagagactccttacggaaataaaaaatgtaggaaagacctgccggccgcggtggctcatgcctgtaatcccagcactttgggaggccgaggcgggcggatcacgaggtcaggagatcaagaccatcctggctaacacggtgataccccgtctctactaaaaatacaaaaaaaattagccaggcgtggtggcaggtgcctgtagtcccagctacttgggaggctgaggtaggagaatggtgtaaacctgggaggtggagcttgcagtgagccgagatggagccactgcactccagcctgggggaaagagcgagactccgtctcaaaaaaaaaaaaaagtaggaaagacctctttaaacacttaccactcatgttgcatgtgaatccacatcctgaagggaggc

SEQ ID NO: 201453 - DNA, 9080 bp, Homo sapiens
  Payload ID: 19756
  Gene Name: zinc finger protein 117
  Uniprot ID: Q03924
  ENST ID: ENST00000282869
  CDS Start-End: 1286-2737
gactaatggccctaactaagtattaacccctgccaagaaaagagctacttcctcttgaagtaaatgaagatagtgatgctttctcttaaactttacttataaaaagcatcaaaggggggaatgaagcaggaaatataaaaggaaaaacaagtaaagggaaaacaagtcctttcctgaccagtctgactcactccaaagtcctgctggagctatgataattatctgcaaggccaggcaggggctccgaaggagtgggctccaggagcagggatgagaaaaacaagttctccttatcagtttccctgtttgaaattctctccccataacattattctttgttctgctctcacaactatttttgtaactatttctgcaagtctgtaaagattttgtaagttcttgtttttctttctgtagcatggcaaggtcacaagacatgtttaagtaaggtaggctcatgttgcaaatcctgttgtaaaacctgtcacggtatgattaactgcctttgttctgcttctgtaagactgctttctcacctcgcaggttttgcgccaaaaacccgacttgcccctgcctgatgcatgtataaaagtcaagccctgtctttgttcagggctcagcctttggatgttaatccgctgggccagtggccacctaaataaaaccttcctgttgcacccagtgatctctccggcctcctgattcccacaacatataagcattcctttttctctgcaacctagcccgcatctgtcattgactttttaacaataggcattctgactggatgagatggtatctcactgtggtttttctctgcatttttctaataattaacaacgtgaattttgttttcatatgcttgtcagccacatgtatgtcttcttttgaaaagtatctgttcatgtttttgcttactttttaattaggtttttggttttctttttgttgttgttgttgttttctgagatggagtcttgctgtgtcaccaggatggagtgcagtggcatgatctcgactcactgcaacctccacctcccaggttcagatgattcttctgcttcagtctcctgagtagctgggatcacagggaccattgacatttatggatgtggccatagaattctctttggaggagtggcaatgcctggacactgcacagcagaatttatataggcatgtgatgtgagagaactacagaaacctggttttcttgggtgaaggtattgctgtctctaagccagacctgattacctgtctggagcaaggaaaagagccctggaatatgaagagacatgagatggtagctaaacatttagttatgttttattattttgcccaacacctttggccagagcagaacataagagattctttccagaaagtgaccctaagaagatatagaaaatgtggatatgagaatttacagttaagaaaaggctgtaaaagtgtggttgagtgtaaacagcacaaaggagattatagtggacttaaccaatgtttgaaaactaccttgagcaaaatatttcaatgtaataaatatgtagaagttttccataaaatttcaaattcaaatagacacaagatgagacatactgaaaataaacattttaaatgtaaagaatgtcgcaaaacattttgcatgctttcacacctaactcaacataaaagaatccaaactagagtgaatttctacaaatgtgaagcatatggaagagcctttaactggtcctcaacccttaataaacataagagaattcatactggagaaaaaccttacaaatgtaaagaatgtggcaaagcctttaaccagacctcacaccttattagacataagagaattcatactgaagagaaaccctacaaatgtgaagaatgtggcaaagcctttaaccagtcatcgacccttactacacataatataattcatactggggaaattccctacaaatgtgagaaatgtgttagagcttttaaccaagcctcaaagcttactgaacataagttaattcataccggagagaaacgttatgaatgtgaagaatgcggcaaagcttttaaccgatcctcaaaacttactgaacataagtacattcatactggagagaagctgtacaaatgtgaagaatgtggtaaagcctttaaccagtcctcaacccttactacacataagagaattcatagtggagagaagccctacaaatgtgaagaatgtggcaaagcttttaaacaattttcaaatcttactgaccataaaaaaattcatactggagagaaaccctacaaatgtgaggaatgtggcaaagcttttaaccaactctcaaaccttactagacataaggtaattcatactggagagaaaccctacaaatgtggagaatgtggcaaagcctttaaccagtcctcagcccttaatacacataagataatccatactggagagaatccccacaaatgtagagaatctggcaaagttttccacctatcctcaaaacttagtacatgtaagaaaattcatactggagagaaactctacaaatgtgaagaatgtggcaaagcctttaaccgatcttcaacccttattggacataagagaattcatactggagagaaaccctacaaatgtgaagaatgtggcaaagcttttaaccaatcttcaacacttactacacataagataattcatactgaagagaaacagtacaaatgtgatgaatgtggcaaagcttctacctgatcctcaaaactcattgaacacaagaaaattcatactggagagaaaccttacaagtgtgaagaatgtggcaaaacttctaaccatttctcaacccttactaaacataagatgattcatactggagagaagttacacaaatgtgatgaatgtgacaaagcttttaaccaatcttcaaccctttctacacataaaagaattcatactggagagaaaccctacaaatgtgaagaatgtggcagagcttttaattgatcatcaaaccttattaaacataagaaaattcatattggagagaaaccctacaaatgtgaagaatgtggaaaagcttttaaccagttctcaactcttactacacataaaataattcatactggagagaaaccatataaatgtgaagaatgtggcaaagctttcaacctatacgtaaaccttactacacataagaaaattcatactggagagaaaccctacaagtgtgaagaatgtggcaaagcttttagccaagtgtcaactcttactatacataaaagaattcatactggagagaaaccctacaagtgtgaagaatgtggcaaagcttttaaccaagtgtcaactcttactatacataaaagaattcatactggagagaaaccttacaaatgtgaggaatgtggcaaaactttcagtcgatgctcaaaacttactacacataagaaaattcatacaggagagaaaccttacaaatgtgaaaaatgtgctaaagcttttagccagtcttcaaccctttctacatataagataattcacactggagagaaatgctacaaatgtgaagaatgtggcaaagtttttaaccgatcttcaaaccttacagaccataaaaaaattcatacaggagagaaatcctacaaatgtgaagaatgtgacaaggcctttaacctgtcctcaacgcttactaaacataaggtaattcatactggagagaaactgtacaaatgtaaagaatgtggtaaagcttttaaacagttctcacaccttgctatacataatataattcatactggagagaaactctacaaatgtgaagaatgtggcaaagcttttaacttatcctcaaaccttactgcacataagaaaaatcgtactggagagaaaccctacaaatgtgaagaatgtggcaaagctaacctatcatcaacccttactccacataagacaattcatatttgagagaaaccctgcaaatgtgaagaatgtggcaatgcttgtaactaaatctcaaactttactaaacataagaaaattaatactggaaactttacaaacctgaaagatgtgacaatgattttgacaacaccttcaaacttttctaaacataaaataaatcatactggtgagaaatcttaaaaatatgaagaatggtacaaagcctttaaatggttgtcacacttgattgtaggtaagataatttatactggaggaaactcccagaagtgtgaagaatgtggcaaaacttttaatttttcacaccttatagcacaggaaagcacttcagaaaaattgtacaaatataaatgtggaaaagccattaatatctgcttacatcttactcaacattagagagttagtgcttaataaaagcattataaaagcaattagtgtaaaatcagaaaatgaaagttttttttttttttttagatggagtcttgctctgtcacccaggctggagtgcagtggtgtgatcttggctcactgcaacctctgcctcccaggttcaagcaattctcctgccttagcctccagagtagctgagactacaggcacacaccaccacatttggctaatttttttatttttagtagagactggctatcaccatgttggccaggctgatcttgaactcctgacctcaagtgatccacatgcctctgcctcccaaagtgctgggattataggtgtgagtcactgtgcctgacaaatataagcctttaaagagaagaaggttttcattttgaagacaaacattaggtacataaagagggttgtagtgtctttatttgtatcacagattttattgtacacattatgtactaaaggaaaatcctgaagcagtgctcaaactttgatcaacatcagggagtttatattggagaaaaactgcaaatgtaatatatttggaaaaacatttttcaaaaactactgcttagaaaacaccaggggatttatactaaaatatatttttgcagatgcagtaagtataaaagaaatttaatccaaaattaagtgtgtgtaaatatcagagaattcacagtagaaatatctaaggcactgacattttagacattgaactaatcagtgtgctgagtacagaaaataatccaaaattaaagttggtagataaattatttatatataactttaaaagaggtagaaatatttttagttataattacatttaaagtatacttttttctttgaaaaaattacaaaatttttaaaaagtgaatgatgtaattcaactcaaattacttcatgcttttcattctattgtattcacatgtgaaagcatgtgatcaattgctgcttcatcaaagatatgagacattcttttttgttaggtgggcaatattttttaccttttctatggaagagtaaagacattacaatgtaggatgcatgataaaaatctaagtggagaggctctttgtgtttaatttataatattgaatgatgtatgagggaagtgttcagaggaatattctgcattctagtgaaaatatcttttattttagttaaaattaaattaaaattagtagtatatcattttactaactgtacttttatgtaataaaatgcagcacatttaaaaaattttagattattgtgaacttaattttttaattaaactttttttttaacatgttaagaccaattgtgcattcagtgaagtattatcatgccactaacttcaacctatcccaccttactcaagggtgttggtaaaagatagtaacaatgtactatttaataacagagtggactaacatctctaataatttctcttgccagtgactttaaactaaagaacttaattaaagaacattgttcccataggttaaatttttattctttttcttatttaaacatatttttcttaacttttgtgggtacatagtgtgtgtatatatttatgccatatatggcatattttgatacaggcatatgaataggtattaatcacatcagggcaaatgaaatatccatcaactccagcatttatcatttgtattacaaaccgattctacacttttagttactttaaaatgtacaagtaaattgctattgactatagggtcattttcatgggtataataaaaattatatacaagtataaataaaatcctgagtcttaaaattctgagtcctgcttaaacattttaaaaattttgttatgtatttttctttgaacatgtctctctgcctgcaaacataacagaattttagtattggtttacatagagttaactatacccatatattactctaaaaataaatgttaagtgcaagaaagttatggactgtttttgtgtgagtgtgagtttgtacctattttcaaaagaaaagagcaatattggagcaaaacaaatattttaataaagtaatgtactagacaactgaaaacttcaaaaatgctgaaagtaaatgtatactctgctttgtattgaattcattactgccaaatcttctgacttatgattcagaatctctccatgcaaattatgtttttacttgcctgttagtcatgctagacctataattttcttgtttcttaccatttttttcttttatactttatgaggtattatgtgagctgttcatggattataagaatgatttttataaaattcagtactgcacacaagataagttttagatgtatttccaaaattgtgtattaattatatttagttagaacattccatttgttcttttaattggagaatcctatataagcctatatttcttattcttttctcttgttataattgacataagtaaatttatttatttattgagccaatttgttcaggtaagaactaggaatgcttcataagtcatgaggatgtttttatatatatatgtggcaaacaaatatgacagtgcttgctgtgtaacagatgttccataataacctgtaaacattcctgctggagttagtttgtaacttcaagtcagagatggaaaataccaatagtgaagaaataacattgattcttcatgtgcagataacattttttttccatgctgcaaagctaaattttgctgaatttaaaaagaaattttggttcttttatttcctaattacctttagttttgtttgtcttattatgtgacttctgtgtattcatcacagcccttctccttctttttctatgtgatggctacactttgctcactgttgtcttcatgccatgtcattttatacagtactttgtaggttttgatgagaaagttggtatttttaatgcactcaaaaattgctttttattggagagtacttatcaatataactttctgatcagttaattaagataaaaggcatacattgtccacaggtgagaggattaaatcagttagcattatttttttctgtttgtaaaaggaaaaacttattaaatttttaaacggagttattaaacagagtttcactcttattgcccaggctggagtgcaaatatattgtggcaaatataaaatttgctagaaaatacatcttagaaattaagttataagagagcaaatggtaagtgaagaattttaaatttaattttctatgatatagcataacatacatttccatgcagaatcttttatttttaaatgtgaaatttaaaggttgcaaaataataaaatgacttctgtggatttgatatttggaatgatatttcttttttatattgatattacaattccgaggaatttttcactcattatttttttagtgggtgaaggtgagtgtacagttattgctttttgtcacctaactatagtcagcttcttggtcattttctctagaaaacttttgaagattatggcagctttttgattaaacattttctgttatttttatgcaaattcatttattgtgttcacagggtggccagtcatgagaccataagcaacagctgcccttttagtgtctttcatgccattaccatctgtaataaataaatgtgtactttattctgcaaaacatgatgtttggaagtatatgttgtcaaatgcttaattctaggtaattaaggctttacctcacatcgttaacatttttgtggtcagagtatgtgacattgtcaatgtttttcaaaaacacaactacattattatgatctgtagtcactatgctgtacaaaaagatctcttaaacttattcctcctattaaactataattatgtattctttgaccaacatcttccaaaaccccccttttttctaaataccttggtgtctggtggtcaccactttactctctactttaatgggattaagtttcttagaatccctgtgtaagtaaaatcatgaaaaataatctttgtgtctggctcatgtagacaaatatgatgtcctccaggttaattcatgtgattgaaaataatagaaatttcttttttaaagacgaagagtattccattgtgtatatgtaccacattgtctttatttactcataaatgttgaactgttgattgtgtattttggtaattgtgaagagtgttgcaaacaacatagaagcataaatgtttcttcattctgatttcacttgttttggatatatacagtaaaattgctgtattgtggtttaattttaaattttttgacaaatttttgtttttcatagtgactctcctcattcacattcaaaccaacagtgtgcaagcattccttttcttcatactttgactaacactttcttttctttttagtaagagtaattctaacaggagtgagttgataatctcctggtttttctttttgctttcctgattatagttgatattgagcattttttatatatcttgaccatttgtcttttcttgaaaaatatttaagccttttgctcatttttaatagttatttgtcttctgttgtatagtcatttaagttgtttatatgtttctgttattaaccctttgtcccacgtatgatttgcaaatattttctcccatttttttcagttgtctcattttgttgattgtatcagattccatgaagcagctttttaatttcaagtaatctaacgtatctatttttcttttgatttccttggattttgaggttaaataataaaagtcacagcctaga

SEQ ID NO: 201454 - DNA, 5317 bp, Homo sapiens
  Payload ID: 19756
  Gene Name: zinc finger protein 117
  Uniprot ID: Q03924
  ENST ID: ENST00000620222
  CDS Start-End: 199-1650
cagggaccattgacatttatggatgtggccatagaattctctttggaggagtggcaatgcctggacactgcacagcagaatttatataggcatgtgatgtgagagaactacagaaacctggttttcttgggtgaaggtattgctgtctctaagccagacctgattacctgtctggagcaaggaaaagagccctggaatatgaagagacatgagatggtagctaaacatttagttatgttttattattttgcccaacacctttggccagagcagaacataagagattctttccagaaagtgaccctaagaagatatagaaaatgtggatatgagaatttacagttaagaaaaggctgtaaaagtgtggttgagtgtaaacagcacaaaggagattatagtggacttaaccaatgtttgaaaactaccttgagcaaaatatttcaatgtaataaatatgtagaagttttccataaaatttcaaattcaaatagacacaagatgagacatactgaaaataaacattttaaatgtaaagaatgtcgcaaaacattttgcatgctttcacacctaactcaacataaaagaatccaaactagagtgaatttctacaaatgtgaagcatatggaagagcctttaactggtcctcaacccttaataaacataagagaattcatactggagaaaaaccttacaaatgtaaagaatgtggcaaagcctttaaccagacctcacaccttattagacataagagaattcatactgaagagaaaccctacaaatgtgaagaatgtggcaaagcctttaaccagtcatcgacccttactacacataatataattcatactggggaaattccctacaaatgtgagaaatgtgttagagcttttaaccaagcctcaaagcttactgaacataagttaattcataccggagagaaacgttatgaatgtgaagaatgcggcaaagcttttaaccgatcctcaaaacttactgaacataagtacattcatactggagagaagctgtacaaatgtgaagaatgtggtaaagcctttaaccagtcctcaacccttactacacataagagaattcatagtggagagaagccctacaaatgtgaagaatgtggcaaagcttttaaacaattttcaaatcttactgaccataaaaaaattcatactggagagaaaccctacaaatgtgaggaatgtggcaaagcttttaaccaactctcaaaccttactagacataaggtaattcatactggagagaaaccctacaaatgtggagaatgtggcaaagcctttaaccagtcctcagcccttaatacacataagataatccatactggagagaatccccacaaatgtagagaatctggcaaagttttccacctatcctcaaaacttagtacatgtaagaaaattcatactggagagaaactctacaaatgtgaagaatgtggcaaagcctttaaccgatcttcaacccttattggacataagagaattcatactggagagaaaccctacaaatgtgaagaatgtggcaaagcttttaaccaatcttcaacacttactacacataagataattcatactgaagagaaacagtacaaatgtgatgaatgtggcaaagcttctacctgatcctcaaaactcattgaacacaagaaaattcatactggagagaaaccttacaagtgtgaagaatgtggcaaaacttctaaccatttctcaacccttactaaacataagatgattcatactggagagaagttacacaaatgtgatgaatgtgacaaagcttttaaccaatcttcaaccctttctacacataaaagaattcatactggagagaaaccctacaaatgtgaagaatgtggcagagcttttaattgatcatcaaaccttattaaacataagaaaattcatattggagagaaaccctacaaatgtgaagaatgtggaaaagcttttaaccagttctcaactcttactacacataaaataattcatactggagagaaaccatataaatgtgaagaatgtggcaaagctttcaacctatacgtaaaccttactacacataagaaaattcatactggagagaaaccctacaagtgtgaagaatgtggcaaagcttttagccaagtgtcaactcttactatacataaaagaattcatactggagagaaaccctacaagtgtgaagaatgtggcaaagcttttaaccaagtgtcaactcttactatacataaaagaattcatactggagagaaaccttacaaatgtgaggaatgtggcaaaactttcagtcgatgctcaaaacttactacacataagaaaattcatacaggagagaaaccttacaaatgtgaaaaatgtgctaaagcttttagccagtcttcaaccctttctacatataagataattcacactggagagaaatgctacaaatgtgaagaatgtggcaaagtttttaaccgatcttcaaaccttacagaccataaaaaaattcatacaggagagaaatcctacaaatgtgaagaatgtgacaaggcctttaacctgtcctcaacgcttactaaacataaggtaattcatactggagagaaactgtacaaatgtaaagaatgtggtaaagcttttaaacagttctcacaccttgctatacataatataattcatactggagagaaactctacaaatgtgaagaatgtggcaaagcttttaacttatcctcaaaccttactgcacataagaaaaatcgtactggagagaaaccctacaaatgtgaagaatgtggcaaagctaacctatcatcaacccttactccacataagacaattcatatttgagagaaaccctgcaaatgtgaagaatgtggcaatgcttgtaactaaatctcaaactttactaaacataagaaaattaatactggaaactttacaaacctgaaagatgtgacaatgattttgacaacaccttcaaacttttctaaacataaaataaatcatactggtgagaaatcttaaaaatatgaagaatggtacaaagcctttaaatggttgtcacacttgattgtaggtaagataatttatactggaggaaactcccagaagtgtgaagaatgtggcaaaacttttaatttttcacaccttatagcacaggaaagcacttcagaaaaattgtacaaatataaatgtggaaaagccattaatatctgcttacatcttactcaacattagagagttagtgcttaataaaagcattataaaagcaattagtgtaaaatcagaaaatgaaagttttttttttttttttagatggagtcttgctctgtcacccaggctggagtgcagtggtgtgatcttggctcactgcaacctctgcctcccaggttcaagcaattctcctgccttagcctccagagtagctgagactacaggcacacaccaccacatttggctaatttttttatttttagtagagactggctatcaccatgttggccaggctgatcttgaactcctgacctcaagtgatccacatgcctctgcctcccaaagtgctgggattataggtgtgagtcactgtgcctgacaaatataagcctttaaagagaagaaggttttcattttgaagacaaacattaggtacataaagagggttgtagtgtctttatttgtatcacagattttattgtacacattatgtactaaaggaaaatcctgaagcagtgctcaaactttgatcaacatcagggagtttatattggagaaaaactgcaaatgtaatatatttggaaaaacatttttcaaaaactactgcttagaaaacaccaggggatttatactaaaatatatttttgcagatgcagtaagtataaaagaaatttaatccaaaattaagtgtgtgtaaatatcagagaattcacagtagaaatatctaaggcactgacattttagacattgaactaatcagtgtgctgagtacagaaaataatccaaaattaaagttggtagataaattatttatatataactttaaaagaggtagaaatatttttagttataattacatttaaagtatacttttttctttgaaaaaattacaaaatttttaaaaagtgaatgatgtaattcaactcaaattacttcatgcttttcattctattgtattcacatgtgaaagcatgtgatcaattgctgcttcatcaaagatatgagacattcttttttgttaggtgggcaatattttttaccttttctatggaagagtaaagacattacaatgtaggatgcatgataaaaatctaagtggagaggctctttgtgtttaatttataatattgaatgatgtatgagggaagtgttcagaggaatattctgcattctagtgaaaatatcttttattttagttaaaattaaattaaaattagtagtatatcattttactaactgtacttttatgtaataaaatgcagcacatttaaaaaattttagattattgtgaacttaattttttaattaaactttttttttaacatgttaagaccaattgtgcattcagtgaagtattatcatgccactaacttcaacctatcccaccttactcaagggtgttggtaaaagatagtaacaatgtactatttaataacagagtggactaacatctctaataatttctcttgccagtgactttaaactaaagaacttaattaaagaacattgttcccataggttaaatttttattctttttcttatttaaacatatttttcttaacttttgtgggtacatagtgtgtgtatatatttatgccatatatggcatattttgatacaggcatatgaataggtattaatcacatcagggcaaatgaaatatccatcaactccagcatttatcatttgtattacaaaccgattctacacttttagttactttaaaatgtacaagtaaattgctattgactatagggtcattttcatgggtataataaaaattatatacaagtataaataaaatcctgagtcttaaaattctgagtcctgcttaaacattttaaaaattttgttatgtatttttctttgaacatgtctctctgcctgcaaacataacagaattttagtattggtttacatagagttaactatacccatatattactctaaaaataaatgttaagtgcaagaaagttatggactgtttttgtgtgagtgtgagtttgtacctattttcaaaagaaaagagcaatattggagcaaaacaaatattttaataaagtaatgtactagacaactgaaaacttc

SEQ ID NO: 201455 - DNA, 1374 bp, Homo sapiens
  Payload ID: 19756
  Gene Name: zinc finger protein 117
  ENST ID: ENST00000610793
  CDS Start-End: 101-1252
gtgagagaactacagaaacctggttttcttgggtgaaggtattgctgtctctaagccagacctgattacctgtctggagcaaggaaaagagccctggaatatgaagagacatgagatggtagctaaacatttagttatgttttattattttgcccaacacctttggccagagcagaacataagagattctttccagaaagtgaccctaagaagatatagaaaatgtggatatgagaatttacagttaagaaaaggctgtaaaagtgtggttgagtgtaaacagcacaaaggagattatagtggacttaaccaatgtttgaaaactaccttgagcaaaatatttcaatgtaataaatatgtagaagttttccataaaatttcaaattcaaatagacacaagatgagacatactgaaaataaacattttaaatgtaaagaatgtcgcaaaacattttgcatgctttcacacctaactcaacataaaagaatccaaactagagtgaatttctacaaatgtgaagcatatggaagagcctttaactggtcctcaacccttaataaacataagagaattcatactggagaaaaaccttacaaatgtaaagaatgtggcaaagcctttaaccagacctcacaccttattagacataagagaattcatactgaagagaaaccctacaaatgtgaagaatgtggcaaagcctttaaccagtcatcgacccttactacacataatataattcatactggggaaattccctacaaatgtgagaaatgtgttagagcttttaaccaagcctcaaagcttactgaacataagttaattcataccggagagaaacgttatgaatgtgaagaatgcggcaaagcttttaaccgatcctcaaaacttactgaacataagtacattcatactggagagaagctgtacaaatgtgaagaatgtgacaaggcctttaacctgtcctcaacgcttactaaacataaggtaattcatactggagagaaactgtacaaatgtaaagaatgtggtaaagcttttaaacagttctcacaccttgctatacataatataattcatactggagagaaactctacaaatgtgaagaatgtggcaaagcttttaacttatcctcaaaccttactgcacataagaaaaatcgtactggagagaaaccctacaaatgtgaagaatgtggcaaagctaacctatcatcaacccttactccacataagacaattcatatttgagagaaaccctgcaaatgtgaagaatgtggcaatgcttgtaactaaatctcaaactttactaaacataagaaaattaatactggaaactttacaaacctgaaagatgtgacaatgattttgac

SEQ ID NO: 201456 - DNA, 2921 bp, Homo sapiens
  Payload ID: 19757
  Gene Name: zinc finger protein 12
  Uniprot ID: P17014
  ENST ID: ENST00000342651
  CDS Start-End: 543-2522
ccaggtcaccgctcgccctagttcccaggctttggcctccggtgggcgagaatcgcggagcctgcggggctgggcgccgaagagccgggccggcacccaagcgggcgcggggctgtgcgggccaggcggaggctcaagcggggatccccgagcacgacccccggagccgacggcgctggggcccaaggggccggccgggcggtgacgacggcggaggcgaaggggcggcgggacccgggcccggcccgtgtgcgtcctcgacggcccggccccggctccgcaggacggtgagccccagggagacggatctgggctccgggagggacgccccgcctggatttgtcccgtaggcccggcccgggcccctctggagcagaacggccttggtgaggtggacaggaagggacctcgcgagcagacgcgcgcccgcgacagcaatcccgccccggcctgtcgggagcggtggggcagaggctgcggagccccaggaggatctgcctccgctttcacagtcctccagatttttccaagagcagcagaaaatgaataaatccctggggccagtgtcattcaaggacgtggctgtggacttcacccaggaggaatggcagcagctggatcctgagcagaagataacttacagggatgtgatgctggagaactacagcaatctagtttctgtggggtatcacattatcaaaccggatgttatcagcaagttggagcaaggagaagagccatggatagtagaaggagaattcctacttcagagctatccagatgaagtctggcaaactgatgacctaatagagagaatccaggaagaggaaaataaaccttcaaggcaaactgtgttcattgagaccctgattgaagagagagaatatattagtagtgatggaagctatgcaagaatgaaagctgatgaatgtagtggatgtgggaaatcactcctccatattaagcttgagaaaactcatccaggagatcaagcttatgaatttaatcaaaatggggaaccttatactctaaatgaagaaagtctttatcagaaaattcgtattttggagaaaccttttgaatatattgaatgccagaaagccttccaaaaggacactgtttttgttaatcacatggaagaaaagccctataagtggaatggatctgaaatagcctttctccagatgtcggacctcactgtacatcagacatctcatatggaaatgaagccctatgaatgcagtgaatgtgggaaatccttctgtaaaaagtcaaaatttattatacatcagaggactcacacaggagagaaaccttacgaatgtaatcagtgtgggaaatccttctgccagaagggaacccttactgtgcatcagagaacacacacaggggagaagccctatgaatgtaatgaatgtgggaagaacttttaccagaagttacacctcattcagcatcagagaactcactcaggagagaagccctatgaatgtagttattgtggaaaatccttttgccagaagacacacctcacacaacatcagagaacacattcaggagagagaccttatgtttgtcatgactgtgggaaaaccttctcgcagaagtcagcacttaatgaccatcagaaaattcacacaggtgtgaaactctacaagtgtagtgaatgtgggaaatgcttctgccgcaagtctactctcacgacccacctgaggacccacacaggagagaaaccgtatgaatgtaatgagtgtggaaaattcttctctcggttgtcatatctcactgtacattatagaactcattcaggagagaaaccctatgaatgtaatgaatgtggaaaaaccttctacctgaattcagccctcatgagacatcagagagtgcacacaggagagaaaccttacgaatgtaatgaatgtggaaagttattctcccagttgtcatacctcactatccatcatagaactcattcaggagtaaaaccctatgaatgtagtgaatgtgggaaaaccttctaccagaactcagccctttgtagacatcggagaatacacaaaggagagaagccctatgaatgctatatatgtggaaaattcttctctcagatgtcatacctcactatacatcatagaattcattcaggagagaagccctatgaatgtagtgaatgtgggaaaaccttctgccagaattcagcccttaatcgacatcagagaacacacacaggagagaaagcctacgaatgttatgaatgtgggaagtgcttctctcagatgtcctatctcactatacatcatcgaattcattcaggagagaaaccctttgaatgtaatgagtgtggaaaagccttctctcggatgtcatacctcactgtacattatagaactcattcaggagagaaaccctatgagtgtactgaatgtggaaaaaaattctaccacaaatcagcattcaacagccatcagagaattcataggagaggcaatatgaatgtaatagatgtgggaaggcttctctgaagtcagacctcattttatatcagagaaccctttcagtatagtgaatcagaaactcctgcctgaagtcaaacaccttgtacatcagagagttcacacaggttagtgtggacatccccttgtgtgttggactcataatctgaagactcacagaatggaaaccatgattataacaagaccacatggtataacaatactagactatagacaagtaaaaatttataaatattaagaatgtatatacatgtcaccatggattggaactgttttgcatatcagggaaatcatagccaaggggaaatctatcagtataaggaatgtggaagacataatcctttggaaactgttaatactaaaagatatgtttctgatacaatagcaaacttgaaaaaaaaaaaagaa

SEQ ID NO: 201457 - DNA, 662 bp, Homo sapiens
  Payload ID: 19757
  Gene Name: zinc finger protein 12
  ENST ID: ENST00000394917
  CDS Start-End: 463-662
agagccgggccggcacccaagcgggcgcggggctgtgcgggccaggcggaggctcaagcggggatccccgagcacgacccccggagccgacggcgctggggcccaaggggccggccgggcggtgacgacggcggaggcgaaggggcggcgggacccgggcccggcccgtgtgcgtcctcgacggcccggccccggctccgcaggacggtgagccccagggagacggatctgggctccgggagggacgccccgcctggatttgtcccgtaggcccggcccgggcccctctggagcagaacggccttggtgaggtggacaggaagggacctcgcgagcagacgcgcgcccgcgacagcaatcccgccccggcctgtcgggagcggtggggcagaggctgcggagccccaggaggatctgcctccgctttcacagtcctccagatttttccaagagcagcagaaaatgaataaatccctggggccagtgtcattcaaggacgtggctgtggacttcacccaggaggaatggcagcagctggatcctgagcagaagataacttacagggatgtgatgctggagaactacagcaatctagtttctggtatcacattatcaaaccggatgttatcagcaagttggagcaaggagaagagccatggata

SEQ ID NO: 201458 - DNA, 4474 bp, Homo sapiens
  Payload ID: 19757
  Gene Name: zinc finger protein 12
  Uniprot ID: P17014
  ENST ID: ENST00000404360
  CDS Start-End: 188-2059
ggaagggaaaggtggcatttgccagccctggaataattcgggttagtggcagaggcttgtaaaggcactcaggagaccagcattaggggcctgagggccagtgtcattcaaggacgtggctgtggacttcacccaggaggaatggcagcagctggatcctgagcagaagataacttacagggatgtgatgctggagaactacagcaatctagtttctgtggggtatcacattatcaaaccggatgttatcagcaagttggagcaaggagaagagccatggatagtagaaggagaattcctacttcagagctatccagatgaagtctggcaaactgatgacctaatagagagaatccaggaagaggaaaataaaccttcaaggcaaactgtgttcattgagaccctgattgaagagagagaatatattagtagtgatggaagctatgcaagaatgaaagctgatgaatgtagtggatgtgggaaatcactcctccatattaagcttgagaaaactcatccaggagatcaagcttatgaatttaatcaaaatggggaaccttatactctaaatgaagaaagtctttatcagaaaattcgtattttggagaaaccttttgaatatattgaatgccagaaagccttccaaaaggacactgtttttgttaatcacatggaagaaaagccctataagtggaatggatctgaaatagcctttctccagatgtcggacctcactgtacatcagacatctcatatggaaatgaagccctatgaatgcagtgaatgtgggaaatccttctgtaaaaagtcaaaatttattatacatcagaggactcacacaggagagaaaccttacgaatgtaatcagtgtgggaaatccttctgccagaagggaacccttactgtgcatcagagaacacacacaggggagaagccctatgaatgtaatgaatgtgggaagaacttttaccagaagttacacctcattcagcatcagagaactcactcaggagagaagccctatgaatgtagttattgtggaaaatccttttgccagaagacacacctcacacaacatcagagaacacattcaggagagagaccttatgtttgtcatgactgtgggaaaaccttctcgcagaagtcagcacttaatgaccatcagaaaattcacacaggtgtgaaactctacaagtgtagtgaatgtgggaaatgcttctgccgcaagtctactctcacgacccacctgaggacccacacaggagagaaaccgtatgaatgtaatgagtgtggaaaattcttctctcggttgtcatatctcactgtacattatagaactcattcaggagagaaaccctatgaatgtaatgaatgtggaaaaaccttctacctgaattcagccctcatgagacatcagagagtgcacacaggagagaaaccttacgaatgtaatgaatgtggaaagttattctcccagttgtcatacctcactatccatcatagaactcattcaggagtaaaaccctatgaatgtagtgaatgtgggaaaaccttctaccagaactcagccctttgtagacatcggagaatacacaaaggagagaagccctatgaatgctatatatgtggaaaattcttctctcagatgtcatacctcactatacatcatagaattcattcaggagagaagccctatgaatgtagtgaatgtgggaaaaccttctgccagaattcagcccttaatcgacatcagagaacacacacaggagagaaagcctacgaatgttatgaatgtgggaagtgcttctctcagatgtcctatctcactatacatcatcgaattcattcaggagagaaaccctttgaatgtaatgagtgtggaaaagccttctctcggatgtcatacctcactgtacattatagaactcattcaggagagaaaccctatgagtgtactgaatgtggaaaaaaattctaccacaaatcagcattcaacagccatcagagaattcataggagaggcaatatgaatgtaatagatgtgggaaggcttctctgaagtcagacctcattttatatcagagaaccctttcagtatagtgaatcagaaactcctgcctgaagtcaaacaccttgtacatcagagagttcacacaggttagtgtggacatccccttgtgtgttggactcataatctgaagactcacagaatggaaaccatgattataacaagaccacatggtataacaatactagactatagacaagtaaaaatttataaatattaagaatgtatatacatgtcaccatggattggaactgttttgcatatcagggaaatcatagccaaggggaaatctatcagtataaggaatgtggaagacataatcctttggaaactgttaatactaaaagatatgtttctgatacaatagcaaacttgaaaaaaaaaaaagaaatagaagattcctgctgtgaataaacatacttcttgtgtaaatagaaactgtaaagtcatcaggatagctagttaagtcggtaaccttaaactcatgtaagcagttcccaaagaacataggacttatgtttggggagagggttgtttttattacagtacattacaggaattgtatgttcacttcgaatcatgtttgaaaaaacgttgtatccttattttgtaattcatatagtaagagtattctaaacagcactacattaatatcatttgataggtataaagtatactttttcttgcactcttctctaggatttaatgcattgatcattcttaatgaacaatatcagctctaaaggaccaatgcttttataatgttttcaactgtatctgagtcagccagagagataaatatccatgtataaaatagatagaaaactttgcttggtaatttaaaattaataatgccagttttccaagagtgagaaaatcattgcactctatacagttttaagatatacttaaaatattcccatttgtatctatttttttttctactgttttttatttggacacttacataacagtgcagagcacaatgctgtgtaacataggaattcactgtgttttcatttgatgtcgtactggttttaaaccttgtgctctactccttcctgttaatgaattaagaacacattctaacaagggtctgtggcagacattgccgagtgactttctaacataggaattcactgtgttttcatttgatgtcgtactggttttaaaccttgtgctctactccttcctgttaatgaattaagaacacattctaacaagggtctgtggcagacattgccgagtgactttcttagtcactcccttactctgctggcggagtttggttatccatttatcctcaaaaggaagtgagataaatcctgattagttttaaccagtgacactccccttctcgttgccagcagttgatttacagtggtcacagggcccaattctagacataaaacaaaggatatacctgacagactacttctggaaaaggttttctcaaaggcccaaggattcaagcaaagggaagtggaatcttgtggtgaacagtaccttgtctggatgtggtgcctggtaaccatctttcagcaatggattatagtttaatcatggcctgagcagaaatactgaaagaccctgagacctggatgatgtctttgagccaccaaaccaagcagccttgtagccactcctcctttggactgtttcttttgtgagagactaaacttatttttaagccagttgatttaggatgctctattactaataactgaagacattctaattggtacagactgaaacctttataggagttatgcagttcagaagtggactttaggtaagtcatttattttaagctgttgatatagagatttattttctgtaaattttgacgtaaatagtttgagcattagaaatcaacttgaaacaataaaatgtatgcttccttgaactgtcatatcgttgacctgcaaaattcacctttggaacgtgacacaatgttaggcatacctccttttttctaatacatggaatacattttgttggaggtaatttatgtgattcatataccactgctacagtgttagctgacaacatatagtatgaggtaaggatctaattctgtttcctctcacatgattacttgatagctaagcatctgattggtttactgctttaccactgagctgaaatgccgtgttttccatttattaaaatcacacatggctcctgtttttgtcactcagcactttttctccatattcttcaagacgattgtgagtatggtacgtaacaggaattacatctggtaagttgtatagttttgtgtaggaactctatattcatagcatatttgtggaaatgatacctatggaggtttctcacactggtgtgtcattatacattaattgtacaatatgcattttcagtaaaatatttgaaaactgtaaa

SEQ ID NO: 201459 - DNA, 5051 bp, Homo sapiens
  Payload ID: 19757
  Gene Name: zinc finger protein 12
  Uniprot ID: P17014
  ENST ID: ENST00000405858
  CDS Start-End: 543-2636
ccaggtcaccgctcgccctagttcccaggctttggcctccggtgggcgagaatcgcggagcctgcggggctgggcgccgaagagccgggccggcacccaagcgggcgcggggctgtgcgggccaggcggaggctcaagcggggatccccgagcacgacccccggagccgacggcgctggggcccaaggggccggccgggcggtgacgacggcggaggcgaaggggcggcgggacccgggcccggcccgtgtgcgtcctcgacggcccggccccggctccgcaggacggtgagccccagggagacggatctgggctccgggagggacgccccgcctggatttgtcccgtaggcccggcccgggcccctctggagcagaacggccttggtgaggtggacaggaagggacctcgcgagcagacgcgcgcccgcgacagcaatcccgccccggcctgtcgggagcggtggggcagaggctgcggagccccaggaggatctgcctccgctttcacagtcctccagatttttccaagagcagcagaaaatgaataaatccctggggccagtgtcattcaaggacgtggctgtggacttcacccaggaggaatggcagcagctggatcctgagcagaagataacttacagggatgtgatgctggagaactacagcaatctagtttctgtggggtatcacattatcaaaccggatgttatcagcaagttggagcaaggagaagagccatggatagtagaaggagaattcctacttcagagctatccagatgaagtctggcaaactgatgacctaatagagagaatccaggaagaggaaaataaaccttcaaggcaaactgtgttcattgagaccctgattgaagagagaggtaatgttcctggtaaaacttttgatgtagaaacgaaccctgttccttcaagaaaaatagcctataaaaatagcctctgtgactcatgtgaaaagtgtttaacgtctgtttcagaatatattagtagtgatggaagctatgcaagaatgaaagctgatgaatgtagtggatgtgggaaatcactcctccatattaagcttgagaaaactcatccaggagatcaagcttatgaatttaatcaaaatggggaaccttatactctaaatgaagaaagtctttatcagaaaattcgtattttggagaaaccttttgaatatattgaatgccagaaagccttccaaaaggacactgtttttgttaatcacatggaagaaaagccctataagtggaatggatctgaaatagcctttctccagatgtcggacctcactgtacatcagacatctcatatggaaatgaagccctatgaatgcagtgaatgtgggaaatccttctgtaaaaagtcaaaatttattatacatcagaggactcacacaggagagaaaccttacgaatgtaatcagtgtgggaaatccttctgccagaagggaacccttactgtgcatcagagaacacacacaggggagaagccctatgaatgtaatgaatgtgggaagaacttttaccagaagttacacctcattcagcatcagagaactcactcaggagagaagccctatgaatgtagttattgtggaaaatccttttgccagaagacacacctcacacaacatcagagaacacattcaggagagagaccttatgtttgtcatgactgtgggaaaaccttctcgcagaagtcagcacttaatgaccatcagaaaattcacacaggtgtgaaactctacaagtgtagtgaatgtgggaaatgcttctgccgcaagtctactctcacgacccacctgaggacccacacaggagagaaaccgtatgaatgtaatgagtgtggaaaattcttctctcggttgtcatatctcactgtacattatagaactcattcaggagagaaaccctatgaatgtaatgaatgtggaaaaaccttctacctgaattcagccctcatgagacatcagagagtgcacacaggagagaaaccttacgaatgtaatgaatgtggaaagttattctcccagttgtcatacctcactatccatcatagaactcattcaggagtaaaaccctatgaatgtagtgaatgtgggaaaaccttctaccagaactcagccctttgtagacatcggagaatacacaaaggagagaagccctatgaatgctatatatgtggaaaattcttctctcagatgtcatacctcactatacatcatagaattcattcaggagagaagccctatgaatgtagtgaatgtgggaaaaccttctgccagaattcagcccttaatcgacatcagagaacacacacaggagagaaagcctacgaatgttatgaatgtgggaagtgcttctctcagatgtcctatctcactatacatcatcgaattcattcaggagagaaaccctttgaatgtaatgagtgtggaaaagccttctctcggatgtcatacctcactgtacattatagaactcattcaggagagaaaccctatgagtgtactgaatgtggaaaaaaattctaccacaaatcagcattcaacagccatcagagaattcataggagaggcaatatgaatgtaatagatgtgggaaggcttctctgaagtcagacctcattttatatcagagaaccctttcagtatagtgaatcagaaactcctgcctgaagtcaaacaccttgtacatcagagagttcacacaggttagtgtggacatccccttgtgtgttggactcataatctgaagactcacagaatggaaaccatgattataacaagaccacatggtataacaatactagactatagacaagtaaaaatttataaatattaagaatgtatatacatgtcaccatggattggaactgttttgcatatcagggaaatcatagccaaggggaaatctatcagtataaggaatgtggaagacataatcctttggaaactgttaatactaaaagatatgtttctgatacaatagcaaacttgaaaaaaaaaaaagaaatagaagattcctgctgtgaataaacatacttcttgtgtaaatagaaactgtaaagtcatcaggatagctagttaagtcggtaaccttaaactcatgtaagcagttcccaaagaacataggacttatgtttggggagagggttgtttttattacagtacattacaggaattgtatgttcacttcgaatcatgtttgaaaaaacgttgtatccttattttgtaattcatatagtaagagtattctaaacagcactacattaatatcatttgataggtataaagtatactttttcttgcactcttctctaggatttaatgcattgatcattcttaatgaacaatatcagctctaaaggaccaatgcttttataatgttttcaactgtatctgagtcagccagagagataaatatccatgtataaaatagatagaaaactttgcttggtaatttaaaattaataatgccagttttccaagagtgagaaaatcattgcactctatacagttttaagatatacttaaaatattcccatttgtatctatttttttttctactgttttttatttggacacttacataacagtgcagagcacaatgctgtgtaacataggaattcactgtgttttcatttgatgtcgtactggttttaaaccttgtgctctactccttcctgttaatgaattaagaacacattctaacaagggtctgtggcagacattgccgagtgactttctaacataggaattcactgtgttttcatttgatgtcgtactggttttaaaccttgtgctctactccttcctgttaatgaattaagaacacattctaacaagggtctgtggcagacattgccgagtgactttcttagtcactcccttactctgctggcggagtttggttatccatttatcctcaaaaggaagtgagataaatcctgattagttttaaccagtgacactccccttctcgttgccagcagttgatttacagtggtcacagggcccaattctagacataaaacaaaggatatacctgacagactacttctggaaaaggttttctcaaaggcccaaggattcaagcaaagggaagtggaatcttgtggtgaacagtaccttgtctggatgtggtgcctggtaaccatctttcagcaatggattatagtttaatcatggcctgagcagaaatactgaaagaccctgagacctggatgatgtctttgagccaccaaaccaagcagccttgtagccactcctcctttggactgtttcttttgtgagagactaaacttatttttaagccagttgatttaggatgctctattactaataactgaagacattctaattggtacagactgaaacctttataggagttatgcagttcagaagtggactttaggtaagtcatttattttaagctgttgatatagagatttattttctgtaaattttgacgtaaatagtttgagcattagaaatcaacttgaaacaataaaatgtatgcttccttgaactgtcatatcgttgacctgcaaaattcacctttggaacgtgacacaatgttaggcatacctccttttttctaatacatggaatacattttgttggaggtaatttatgtgattcatataccactgctacagtgttagctgacaacatatagtatgaggtaaggatctaattctgtttcctctcacatgattacttgatagctaagcatctgattggtttactgctttaccactgagctgaaatgccgtgttttccatttattaaaatcacacatggctcctgtttttgtcactcagcactttttctccatattcttcaagacgattgtgagtatggtacgtaacaggaattacatctggtaagttgtatagttttgtgtaggaactctatattcatagcatatttgtggaaatgatacctatggaggtttctcacactggtgtgtcattatacattaattgtacaatatgcattttcagtaaaatatttgaaaactgtaaa

SEQ ID NO: 201460 - DNA, 1563 bp, Homo sapiens
  Payload ID: 19758
  Gene Name: zinc finger protein 121
  Uniprot ID: P58317
  ENST ID: ENST00000320451
  CDS Start-End: 233-1405
atcttttccggcgctggctccgcatggtcagtgccatttcgcctttatcgtggtggagtccaccctggctgtggacctattcaaactcagtctgtctcttgactggaggaggagaaggaaaagttgagcacattgccaaccggagttccccaagaatggcaagttaaaaccaaagtgtcagcacctcaacaacatttttttttggcttaacaaaacatcaaacggcatacaaatggcagaaatccacaatggaggggaactctgtgactttatggaaaatggagaaatcttcagtgaacactcatgccttaatgcacacatgggaactgaaaatacaggggacacttatgactgtgatgagtatggagaaaactttcccatgttacacaacagtgcccctgctggagagacactttctgtgttgaatcagtgcagaaaagccttcagcctgccaccaaatgttcaccagagaacgtggataggagacaaatcctttgaatacagtgactgtgaggaagcctttgttgatcagtcacatcttcaggcaaataggataactcacaatggagaaacactctatgaacagaagcaatgtgggagagcttttacttactccacaagccatgctgtgtctgttaaaatgcatactgtagaaaaaccctacgaatgtaaggaatgtggaaaattctttagatattcttcatatcttaatagtcacatgcgaacccatactggggagaaaccctatgaatgtaaggaatgtgggaaatgcttcactgtttcttcacacctagttgaacatgtaagaattcatactggagagaaaccttatcaatgtaaggaatgtggaagagccttcgctgggcgctcaggccttactaaacatgtacgaatacacactggagagaagccctatgaatgtaacgaatgtgggaaagcctacaataggttttatctactaactgaacattttaaaactcacacagaggagaagccctttgaatgtaaggtatgtggaaaatccttcagaagctcttcatgccttaagaatcactttagaattcacactggaataaaaccctataaatgtaaggagtgtgggaaagcattcactgtttcctcaagcttacataatcatgtaaaaatccatactggagagaagccctatgaatgtaaggactgtgggaaagcctttgctacatcttcacaactcattgaacatataagaactcacactggagagaaaccgtatatatgtaaggaatgtgggaaaaccttccgtgcttcttcacatctacagaaacatgttagaattcacactggagagaaaccctatatatgtaacgaatgtgggaaagcctacaatagattttatttacttactaaacatttaaaaacacactgaagaaaaactctgaatgtaaggaatgtggaaatcttttaggaatttctcataccataattaccacatttgaattcacactgaagagaaattttattggtacaaagaatgtgaggaggccttcagttatccccattcacttcgaagacatgaaagaactc

SEQ ID NO: 201461 - DNA, 546 bp, Homo sapiens
  Payload ID: 19758
  Gene Name: zinc finger protein 121
  ENST ID: ENST00000591447
  CDS Start-End: 94-546
atgagactgatgatctgtcactgtctcccatcacctagatgggactgtctagttgcaggaaaacaagctcaggcctcctgctgatcctattttatggcagaaatccacaatggaggggaactctgtgactttatggaaaatggagaaatcttcagtgaacactcatgccttaatgcacacatgggaactgaaaatacaggggacacttatgactgtgatgagtatggagaaaactttcccatgttacacaacagtgcccctgctggagagacactttctgtgttgaatcagtgcagaaaagccttcagcctgccaccaaatgttcaccagagaacgtggataggagacaaatcctttgaatacagtgactgtgaggaagcctttgttgatcagtcacatcttcaggcaaataggataactcacaatggagaaacactctatgaacagaagcaatgtgggagagcttttacttactccacaagccatgctgtgtctgttaaaatgcatactgtagaaaaaccctacgaatgtaaggaatgtggaaaa

SEQ ID NO: 201462 - DNA, 7177 bp, Homo sapiens
  Payload ID: 19758
  Gene Name: zinc finger protein 121
  Uniprot ID: P58317
  ENST ID: ENST00000586602
  CDS Start-End: 418-1590
tttcgcctttatcgtggtggagtccaccctggctgtggggctgtcggtcctccttgcgcggccagtggctagaggccgcaggctcagtgggtcccagtcaggagccaggtcgggaagtgtgtttgtcccgactccgcgcgttttctggagtggtttcatccgctgtgctcccttcttcaaaagcttggaaagcaacctttgacctattcaaactcagtctgtctcttgactggaggaggagaaggaaaagttgagcacattgccaaccggagttccccaagaatggcaagttaaaaccaaagtgtcagcacctcaacaacatttttttttggcttaacaaaacatcaaacggcatacaaatgatgggactgtctagttgcaggaaaacaagctcaggcctcctgctgatcctattttatggcagaaatccacaatggaggggaactctgtgactttatggaaaatggagaaatcttcagtgaacactcatgccttaatgcacacatgggaactgaaaatacaggggacacttatgactgtgatgagtatggagaaaactttcccatgttacacaacagtgcccctgctggagagacactttctgtgttgaatcagtgcagaaaagccttcagcctgccaccaaatgttcaccagagaacgtggataggagacaaatcctttgaatacagtgactgtgaggaagcctttgttgatcagtcacatcttcaggcaaataggataactcacaatggagaaacactctatgaacagaagcaatgtgggagagcttttacttactccacaagccatgctgtgtctgttaaaatgcatactgtagaaaaaccctacgaatgtaaggaatgtggaaaattctttagatattcttcatatcttaatagtcacatgcgaacccatactggggagaaaccctatgaatgtaaggaatgtgggaaatgcttcactgtttcttcacacctagttgaacatgtaagaattcatactggagagaaaccttatcaatgtaaggaatgtggaagagccttcgctgggcgctcaggccttactaaacatgtacgaatacacactggagagaagccctatgaatgtaacgaatgtgggaaagcctacaataggttttatctactaactgaacattttaaaactcacacagaggagaagccctttgaatgtaaggtatgtggaaaatccttcagaagctcttcatgccttaagaatcactttagaattcacactggaataaaaccctataaatgtaaggagtgtgggaaagcattcactgtttcctcaagcttacataatcatgtaaaaatccatactggagagaagccctatgaatgtaaggactgtgggaaagcctttgctacatcttcacaactcattgaacatataagaactcacactggagagaaaccgtatatatgtaaggaatgtgggaaaaccttccgtgcttcttcacatctacagaaacatgttagaattcacactggagagaaaccctatatatgtaacgaatgtgggaaagcctacaatagattttatttacttactaaacatttaaaaacacactgaagaaaaactctgaatgtaaggaatgtggaaatcttttaggaatttctcataccataattaccacatttgaattcacactgaagagaaattttattggtacaaagaatgtgaggaggccttcagttatccccattcacttcgaagacatgaaagaactcatactctatgtgtcccctataaattttaggaatgttagggagccaatggaatctttttttattattttattttattttattttattttattttattttattttattttatttgagacagagttttgctgttgtcatcacacaggctggagtgcaatggcatgatcccagctcactgcaacctttgtctcctgggttcaggcgattctgcctcagccttcaagtagcttggattacaggtgccgtcaaccacacccagctaatttttgtatttttagtagagatggggtttcaccatgttggccaggctggtctcgagctcctgacctcaggtgatccacccgccttggcctcccaaagtgctgggattataggagtgagccactgctcctggccttttttttttttttttttttttttttttttttttgtaagtcgttgttaatacacattcttttctcaagggattggattgtggtcacaatccaacatttgagaactcaccatggggccatacaatgtagaaaacacagaaagccctcattatttccttaggcctttctaagtatataagatgttgcaatggagaagagaaaccctattgatacaagatacaggcatgccctgtagatattgtgagttttgttccagactaccactataaagtgaatatcacaataacatgaatcatacaaatgttttggtttcccagtgcatataagttaggtttacatcatatggtagtctcttgtgtgcagttgtgttatgtctaagtaaagtaccttagtttaaaatactttattgccaaaaagtgctaatgatcatgtgagactttggtgagttgtaatctttttgcttgtggtaggtcttgcctcagtgttgatggctgttgatcagggtggctgtggcagtttcttaaaataagacagcagtgaagattgctgcattgattgactcttcattacatgaaaaacttctctttagcattcgacgctgtttgataacattttacgcatagtggaacttcttttagaattggacttaatcctctcaaacttcgccactgcttgatcaactaagttgatgtaatattctaagtctgttgtcttttcaacaatgttcacagcatcttcaggagtagatttcatttcaggaaaccactttctttgcttatctatacaaagcagcctctcatctgttcaagttttttcacgagattgaaacaattctgtcacatcttcaggctccacttctaattctagttctcttttttccatcacatccacagttactttttccactgaagacttgaacccctcagagtcacctatgaaggttggaatcaacttcttccaaactctggttaatgttggtttttatttttttaattaaaaaaattttttttagagacaaggtctcgctgtgttgttcatgctggagtacaagtgggtattcaccagcacgatgagagcacactgtagccttgaactcctggcctcaagtgatcctccttcctatgcctcctgagtagccaagactccaggcacacaccaccacacctgccttaatgttgatattttgacctccttccatgaatcataaatgttgttaatggcatctagaatggagaatcctttctgcaaggtctgcaacttaatttatccagatccctcagaagaagcattattagtggcagctatagccttatgaaatgtatttcttaaataataagacttgaaagtcagaattattccagaatccatgggctgcggttagcagacatgaaaacgccaatcttgtttatacctccataagagctcttggttagtaggttcattatcagtggtaatattttgaaaggaatctctgaacagtatgttttacagtgggcttaaaatattcagtaaaccatgctgtaaatagatgtaaatagataccacaggaagagtagatgtagcataattcttaactggctcttggatttttggaatggtaattgaatattagcattcatttaaagtcaccaactgcattgacctctaacaagaaagccagcccaggctgggaaaagtggcttacacctgtaattccagtgctttgggaggctgaggttggaggatcacttgaggtcaagagttcaagaccagccagcacaacagagcgtgacgctgtctctacaaagtaaagagtcagcccgtcctttgaatctttgaagtcagatattagcttacctagagctgtgaaagtcctaaatggcatctcctgaagtaaggctgttttgtctctgttaaaactctagtagagctacctctgccatttatctagatattctggaaatgcttgctgcagattccacatcagcaattgctacttcactttgtacttttatgttatggaaatgacttgttaaacctcacgaactgatctttgccagcttccagcatttcttctgcagctaactcacctctcagccttcatagaattagagttagggccttgctctggattaggttttggcttaagggaatgttgtggctggtctgatcttctatccagaccactaaaacttattccgtgttagtggtgaggctgttttcctttcttattatgtgtgtgttcactggagtagcacttttagtttccttcaagaactttacattcacaacttggctaactggcacaagaggcctagattttggcctatcccagttttttttttttttttttttttgagacatggtctcccttttgcccaggctggagtgtagtacagttatagcccattgcagcctcaaacttacgggttccagtgatcttcctgtctcctgagtagctaaagactgcaggtgtgcaccaccatggccagctaatttttttttttttttttttttttttttaaagaggcaggactttactgtttacccggctgatcttgaacttaaaacctcaagtgatgctcccctatctgcctcccaacactctgggattacaggtgtgagccactgcacctggctcttatcttggcttttgacatgactttctcactgaggttaatcatttccagcttttgatctaaagtgagaaatttgcaactccttctttcacttgaacagttagaggccattgtggggtaatgaattggcctaatttcaatattgtccctcagggaattaggaggcctgggaagaggaggagagaggggagagtggccagttggtggagcagtgagaacatagcatttgttaagtttgctgtcttcgaaggttgtggtttgtggtaccccaaaacaattaaaataggaacatcaaagatcacagagcagccgggcacggtggctcacacctgtaatcccagcaccttgagaggctgaggtgagtgaatcatgaggtcaggagttcgagaccagcctggccaccatggtgaaaccccgtctctactaaaaatacaaaaaattagccgggcatggtggcaggcacctatagtcccagctattcaggaggctgaggcaggagaatcacttgaatccaggaggtggaggttagagtgagctgagatcacaccactgcactccagcccaggtgacagagtgagattccttctcaaaaaaaaaaaaaaaaaaaaatcacacagcaccacagtaagtataataataaggaaaatgtttgaaatattgtcagaattgtcaggatgtgagagacaaagtaagcacatgctgttggaaaaaatggtgttatagatttattcgacatgacattgccacaggacttctacttgtgaaaaatatctgtaaagtgagatgaagcaaagtgaagtaacatgaggtatgtctgtagctgttgctgtagtggtttccaaatggtggttttcttttccttttttttttttttctttttggtctgcattggggtcttgctctgttgcctagggtgtggagtgcggtggcatgatcatgcctcactatagccttgacctcctgggctcaagcgatcctcccacctgagtctcctgagtacctgggaccacaggcacatgctaacgcacccacttaatttttttattcgtagagccgaggtctcactatgttgcccagactggtctcaagctcttgggctcaagcagtcctcctgcctcagcctcccaaagtgccaggattacaggtgtgagccaccacacccagtccaaaaagtgattttctaattccatagtttcttctacatttcttaactggaattttgtaaggaagagttatccttattcatttatttacccatttacttgtaggagcatgtatcataaattcttaatctatggggtgtagttagctactgtaaatttgatgcacatatttttccagattcaataagtaggatccccatcaagctatcttctgaatctttaaaaatgtattctccttatttcatgggtatataattattttctgggcaacagtttgttcatggtacatttgtctccagccctagactcagaaaaatgtaatttattttaatggagaatactatttagaagctgcagtctctgtgtagggaggtgttcctaggtaatagtgccctggcttttaggtcttctctatggaggatatggcaaagacatacaaaattatatatacgtatccacacattaataactctatttctatattaaaaacatgaccacaagccaacacttttaattccactgcagcactgctgggttatttcttgctttccaaattcccttgtctgtagctatctttcatcacttgcaaaaatagcacgtgctcaatcctagattaaaatataagctactctcagaattgataactcataccactctttttaaaaatcaactaaccagaattcagtttttattcacagttcttatctttagctcagggcgtaatataaaagcactaggtttaaaacttacttggtcagcagcaatccacttctaggtacatgtccaaaggaactgaagaaagcatctcaatgtgtgaatgcctacctgtgttcattgcagcattattcagaagagccaagaggtggaagcaaagtaaatgtccattgacagatgaattggtaaacaaaatgcattatatacatacaatgcaatatcatttagccttaaaaacaaaattctgccatatgctacaacatggacgttatgctaagtgaaataaaccagttccgaaaggacaaatacacccatttccacttatatggggtatctaacgtcaaactcagaagaacaaagtactgcggtatttgccacaagctggtggaggagaaaatgagttgttcaatgggtattgagtgtcagccacgcaagatggaaaagctttttgagatttgttgtataaaaatatgcctatagttaacaatactcttcggtacacacaaagtatgtgaaagggtaaattttatgtgtttttatc

SEQ ID NO: 201463 - DNA, 1674 bp, Homo sapiens
  Payload ID: 19759
  Gene Name: zinc finger protein 124
  Uniprot ID: Q15973
  ENST ID: ENST00000340684
  CDS Start-End: 140-1009
ggcctttgtctctcgtgcccgcacgtgcgtgtctcggtcagtagccctgcgcttctccttcactctcggcggttcaggaggctctgccgcagccggggccctcctgtgacctgcatgtactgggggattcgcagggaggatgtcgggacaccccggaagctgggaaatgaactcggttgcctttgaggatgtggctgtgaacttcacccaggaggagtgggctttgttggatccttcccagaagaatctctatagagacgtgatgcaggaaaccttcaggaatctggcttccataggaaacaaaggggaagaccagagcattgaagatcagtacaaaaattcttcaagaaatctaagttcatttcagatacatcagagaaatcacactggagagaaaccctatgaatgtatggaatgtgggaaagccttaggtttttcccgttctcttaatagacataaaaggattcacactggagaaaaacgctatgaatgtaagcaatgtgggaaagccttcagtcgttccagtcaccttcgtgaccatgaaagaactcatactggagagaaaccctatgaatgtaagcactgtgggaaagccttccgttactccaattgccttcattaccatgaaagaactcacactggagagaaaccttatgtgtgcatggaatgtggcaaagctttcagttgtctcagttccttgcaaggacatataaaggctcatgctggtgaagaaccctatccatgtaagcaatgtgggaaagccttcagatacgccagttcccttcagaaacacgagaaaactcatattgcacagaaaccctatgtatgtaacaattgtggtaaaggcttcagatgttccagttcccttcgtgaccatgaaaggactcatactggagagaaaccctatgaatgtcagaaatgtggcaaagcctttagtcgtgctagtaccctttggaagcataaaaaaactcatactggagaaaagccctataaatgtaaaaaaatgtaaaggctttaatcactacagtttttgtcaaaaacatgaacagtcacatacttgagagaaactgtgaatgtaaggtgtaggaaagtacttaattttcccagatttcctcaaatacatgaaacgaatcaaactggagataaaccctatgactataagcaataaggtaaagcattcaatttttccatttctttttgaaaacttgaaaggactcactgaagaaaatccatatgaatgtttaaaatgtggtaaggcctgcagttgttccagtggtatttgatggtataacataactcattctagagaaaaactttatgaaggtatcgaatgtgagaatgccttcatttatcctataactcactcagagacacatggtaacacatactccagattgaccttataaataaaagaatgcccaccagattgaaatcctagaaatacagaaaattctgaattttaacaattactttaaaggtcatgtgaaaactcccactggaaataaatcctgtaaatgtaaatattatggaaaaccttatggaaaataattatagtacaattctcaagaaaattcactatgtgaatgagatgttttaggagctataaataaattgaatatattggttgctcatttttgaagagagtctctagaatatagattttcacttcttttg

SEQ ID NO: 201464 - DNA, 1292 bp, Homo sapiens
  Payload ID: 19759
  Gene Name: zinc finger protein 124
  Uniprot ID: Q15973
  ENST ID: ENST00000543802
  CDS Start-End: 91-1146
cgcttctccttcactctcggcggttcaggaggctctgccgcagccggggccctcctgtgacctgcatgtactgggggattcgcagggaggatgtcgggacaccccggaagctgggaaatgaactcggttgcctttgaggatgtggctgtgaacttcacccaggaggagtgggctttgttggatccttcccagaagaatctctatagagacgtgatgcaggaaaccttcaggaatctggcttccataggaaacaaaggggaagaccagagcattgaagatcagtacaaaaattcttcaagaaatctaaggcacatcatatctcattctggaaacaacccatatgggtgtgaggaatgcggaaagaagccatgtacatgtaaacaatgtcagaaaacttccctttctgtcacaagggttcacagagacacagtaatgcacactggaaatggacattatggttgtacaatatgtgagaaagtttttaatattcccagttcatttcagatacatcagagaaatcacactggagagaaaccctatgaatgtatggaatgtgggaaagccttaggtttttcccgttctcttaatagacataaaaggattcacactggagaaaaacgctatgaatgtaagcaatgtgggaaagccttcagtcgttccagtcaccttcgtgaccatgaaagaactcatactggagagaaaccctatgaatgtaagcactgtgggaaagccttccgttactccaattgccttcattaccatgaaagaactcacactggagagaaaccttatgtgtgcatggaatgtggcaaagctttcagttgtctcagttccttgcaaggacatataaaggctcatgctggtgaagaaccctatccatgtaagcaatgtgggaaagccttcagatacgccagttcccttcagaaacacgagaaaactcatattgcacagaaaccctatgtatgtaacaattgtggtaaaggcttcagatgttccagttcccttcgtgaccatgaaaggactcatactggagagaaaccctatgaatgtcagaaatgtggcaaagcctttagtcgtgctagtaccctttggaagcataaaaaaactcatactggagaaaagccctataaatgtaaaaaaatgtaaaggctttaatcactacagtttttgtcaaaaacatgaacagtcacatacttgagagaaactgtgaatgtaaggtgtaggaaagtacttaattttcccagatttcctcaaatacatgaaacgaatcaaactggagataaaccctatga

SEQ ID NO: 201465 - DNA, 2243 bp, Homo sapiens
  Payload ID: 19759
  Gene Name: zinc finger protein 124
  Uniprot ID: Q15973
  ENST ID: ENST00000472531
  CDS Start-End: 129-350
ctcgtgcccgcacgtgcgtgtctcggtcagtagccctgcgcttctccttcactctcggcggttcaggaggctctgccgcagccggggccctcctgtgacctgcatgtactgggggattcgcagggaggatgtcgggacaccccggaagctgggaaatgaactcggttgcctttgaggatgtggctgtgaacttcacccaggaggagtgggctttgttggatccttcccagaagaatctctatagagacgtgatgcaggaaaccttcaggaatctggcttccataggaaacaaaggggaagaccagagcattgaagatcagtacaaaaattcttcaagaaatctaagatgaggtttatataactttccaagacaaggaagttgtgcaaagcctcacagctactaagaggctgggctgggactcaggattaacttcgtgactccaaagcccatgcacctctgcaagccacacgaatcaagcagcttctctaaacctttgaagtcctggaaagtaactcttctgcaatagaagcaagaatcctgtgagattgggatccatctagtactcttcaccatttggaacaactgcctccagagaatgcttctgacgcatcttggaagaacttggaataacctgaggaaatggtcgatttgctaatttaggaaaccaatgttcgatacgtgtgtgatcccaataaagctattaacaaaaaacggctcacgtaggccgggcgcagtggctcacgcctgtaatcccagcactttgggaggccgaggcgggcagatcacaaggtcaggagatcgagaccatcctggctaacacggtgaaaccccatctctactaaaaatacaaaaagtagccgggcgtggtggtggatgcctgcggtcccagctactcaggaggctgaggcaggagaatggcatgaacccgggaggcggagattgcagtgagccgagatcgcgccactgtactccagcctgcgtgacagagcgagactccgtctcagaaaaaaaaaaaaagaacataatatgtgtattgtgtctcatgtacactgttgaagaggtagcagcccatgattgatgaaatagtccagtgatcttatgagatacaagtttgttttcatgttctctctctgacattgtctatgcttagttattgtgttcatgcttattccttcatggtccaagttggctgtcccacctccaggcatcaaaccacattccaaacagcaaccaggaggaaatagtaagctgataggtcatggggaattaggttggaagccattgctttttaatttacagaagtccattctccccaggcacttctttctaagtctcattgatcagaactcaaccacgtggccaccatcagcagaaacatctctctgtagcaccgtgaaacacatgagaacataactggggatgaccgttgttacttgaactattttgaaagatctgacataaaggtcatcgccttgtgcacttcaatgggtgttactgcaaaactcccagggctaggcatggcgacatacacccgaaatctcagctatctgggaggctgaggtgggaggattgcttgagcccacgagtttgaggctgaagtgtgcctgtgaatagctactgcactccagtgcctaggacacatagggagacctcacttttttatggctgcatagtattccatggtaaagaaatgtaccacattttctttatccacttcactgttgatgggcatttatccacttcactgttggtgggaatttaggttgaatccatgtctttgctattgaagtcacactttttaatcaagttatttaactttcctgtgttcatttgtgttatataccagaacatttttatttctatggttttaatgccacctaatatgattatcaatgtgtcattctccataaatcattgtgttatacatgttaaacgattaggtattaagtgtataggtataaatcacttagaataatgactaacacattgtatgaactaaataagtactgattcatctgattcatcaaatttccattattcataccattcattatttattaagtggtgtagtatttgttcttatcaacatttgcttttctgtcctatctaaatattaatgaaacagtggatgtgggctcagtgtgctgtcttgaaataatccaaagtcaaatggcatgcttcactggtttcctttagatgcaataactcatttgactcacacaataaaaatgagtattaagta

SEQ ID NO: 201466 - DNA, 956 bp, Homo sapiens
  Payload ID: 19759
  Gene Name: zinc finger protein 124
  ENST ID: ENST00000491356
  CDS Start-End: 126-359
gtgcccgcacgtgcgtgtctcggtcagtagccctgcgcttctccttcactctcggcggttcaggaggctctgccgcagccggggccctcctgtgacctgcatgtactgggggattcgcagggaggatgtcgggacaccccggaagctgggaaatgaactcggttgcctttgaggatgtggctgtgaacttcacccaggaggagtgggctttgttggatccttcccagaagaatctctatagagacgtgatgcaggaaaccttcaggaatctggcttccataggaaacaaaggggaagaccagagcattgaagatcagtacaaaaattcttcaagaaatctaagatgtactggttcatgaagatgtgcttatgggtttctactctagtaagttttgggtctatgtatgtacctttctttctctgcactcttggggcaaggaattgccatgtgattgatcggagaattgttcattttaaattagtccagaatttttatgttttatttcttctaaaacaaacgaaaacgggatacgtgtagaacatgtgagtttgttacatgggtatacatgtgccgcggtggtttgctgcacctattgacctgtcctctaagttccctcccctcaccccccaacccccaacagcccctggtgtgtgttgttccccctctgtttccatgtgttctcaatgttcagctctcacttatgagtgagaacgtgcagtgtttagttttctgttcctgtgtttgctgaggatgatgacttccagcttcatccatgtccctgcaaagcacatgatctcattcctttttatgtctacatagtgttctatggtatatatatacacatatatatatacaccacattttctttatccagtctatcattgatgggcatttgggttggttccatgtctttgctgttgtaaataatgttgcaataaacatacgtgtgcacgtg

SEQ ID NO: 201467 - DNA, 2400 bp, Homo sapiens
  Payload ID: 19760
  Gene Name: zinc finger protein 131
  Uniprot ID: P52739
  ENST ID: ENST00000306938
  CDS Start-End: 45-1814
gcaagcctgggccgctcctccttccctcaagcagcccgacggccatggaggctgaagagacgatggaatgccttcaggagttccctgaacatcataaaatgatcctcgaccgattgaatgaacagcgagagcaggaccggtttactgacatcaccctaattgtcgacggacaccattttaaggctcacaaggctgttttggctgcttgtagtaagttcttctacaaattctttcaggagtttacccaagaaccattggtggagatagaaggtgttagtaaaatggcctttcgccatttaattgagttcacatatacagcaaaattaatgatacaaggagaagaagaagccaatgatgtatggaaagcagcagagtttctacaaatgctagaagctatcaaagcccttgaagtcaggaacaaagaaaactcagctcccttagaggaaaataccacaggaaaaaatgaggccaaaaaaaggaagattgcagaaacttcaaatgttatcactgagtcattgccatctgcagaatcagaacctgttgaaattgaggtagagattgccgaaggcaccattgaagtggaagatgaaggcatcgaaacattagaggaagtggcttctgccaagcagtccgtaaagtacatacagagcacaggttcctctgatgattctgctctagcactgttggcagatattaccagcaagtaccgtcaaggtgacagaaaagggcagattaaagaagatggctgtccatctgaccccacgagcaaacaggagcacatgaaatcacactccactgagagtttcaagtgtgaaatatgcaataaacgatatcttcgagagagcgcatggaaacagcacctaaattgttaccaccttgaagaaggtggagtcagtaagaagcaaagaactgggaaaaaaattcatgtatgtcagtactgtgagaaacagtttgaccattttggacattttaaagaacatcttcgaaaacatacaggtgaaaaaccttttgaatgtccaaattgtcatgaacgatttgctagaaatagcactctgaaatgtcacctcactgcatgccaaactggagtaggggcaaaaaaaggaaggaagaagctctacgaatgccaggtctgcaacagtgtgtttaacagctgggaccagttcaaagatcacttggtaatacacactggagataaacccaaccattgtactttatgtgatttgtggtttatgcaaggaaatgaattaaggaggcatctcagtgatgctcacaatatttcagagcgtctagtaacggaagaagttctttcagtagaaacacgtgtgcaaactgaacctgtaacatcaatgactattatagaacaagttgggaaggtgcatgtgctaccattgcttcaggttcaggtggattcagcacaagtgactgtggaacaagtccatccagatctgctccaggacagccaggtgcacgattcacacatgagtgagcttccagagcaggtccaagtgagttatctagaagtgggccgaattcagactgaagaaggtactgaagtacatgtagaggagctgcatgttgaacgggtcaatcaaatgccagtggaagtacaaactgaacttctagaagcagatttggaccacgtgaccccagaaatcatgaaccaagaggagagagagtctagccaagcagatgctgctgaggctgccagggaagatcacgaagatgctgaggatttagagaccaagccaacagtggattctgaagcagaaaaggcagagaatgaggacagaacagctctgccagttttagaatgaaattacacatgaatatatttttaaatttacttgttgggtttttgaactgattatgggcagtttgactgtccttaattaagcctaacagacaagtggaccaaagttaagctgtttcctgttgtgctgaactgttgtccgttgaaacacattgattcccctccccctacttattgccacagaggagggatcttttccataactgaaggggagttttgagaagtatatttctggaaacttaaatggattatattcttattatatagttgggtacgaatgtatctattttcattgtggtaaaagttcttccttttctctttcccaggtcatgttcttcctcaaattttttccatattgtaaaatcaaacttaaatcattagaatacaagtttatgtattctaatgcatgttagaaaattgaataatataggaaacacaaggctgcatgatgaaaagtgcattgttactgtgcagttaaattttggcttctggctttctttagtttgaacaaacgttcttgtctaccccagtagtcacagatgccatctttgcaacagaaagagtggtggtggcaaaatttctagaatgtt

SEQ ID NO: 201468 - DNA, 3340 bp, Homo sapiens
  Payload ID: 19760
  Gene Name: zinc finger protein 131
  Uniprot ID: P52739
  ENST ID: ENST00000509634
  CDS Start-End: 457-2226
gaagagggagggcgggggagggagaggcgacccgagagtcgttgtgggtcgcgggccggaccgggtcccggggcggtgggagccccggccgggcagaagggcttggcgggccgttagaggaccgccacggctgtcgagtcccctcccttgttggacttgcgcgccctggcgctcggaacctccggcgctgtgcccaccccgctctagctcgcgtctcccgactccaattaggtcaggctcggagtcccgcggccgcggctccggtctcaacgctccggggccgctcggctcgcctttcttccctcgcctttctctcctcttgcttcaccctccccccttcttttcacgttgctggttttttttgttgttgttttatgctttaggggttttgttcctcggctcgagctcatgggtgtacattatcatgctcttcttttgtagagcagcccgacggccatggaggctgaagagacgatggaatgccttcaggagttccctgaacatcataaaatgatcctcgaccgattgaatgaacagcgagagcaggaccggtttactgacatcaccctaattgtcgacggacaccattttaaggctcacaaggctgttttggctgcttgtagtaagttcttctacaaattctttcaggagtttacccaagaaccattggtggagatagaaggtgttagtaaaatggcctttcgccatttaattgagttcacatatacagcaaaattaatgatacaaggagaagaagaagccaatgatgtatggaaagcagcagagtttctacaaatgctagaagctatcaaagcccttgaagtcaggaacaaagaaaactcagctcccttagaggaaaataccacaggaaaaaatgaggccaaaaaaaggaagattgcagaaacttcaaatgttatcactgagtcattgccatctgcagaatcagaacctgttgaaattgaggtagagattgccgaaggcaccattgaagtggaagatgaaggcatcgaaacattagaggaagtggcttctgccaagcagtccgtaaagtacatacagagcacaggttcctctgatgattctgctctagcactgttggcagatattaccagcaagtaccgtcaaggtgacagaaaagggcagattaaagaagatggctgtccatctgaccccacgagcaaacaggagcacatgaaatcacactccactgagagtttcaagtgtgaaatatgcaataaacgatatcttcgagagagcgcatggaaacagcacctaaattgttaccaccttgaagaaggtggagtcagtaagaagcaaagaactgggaaaaaaattcatgtatgtcagtactgtgagaaacagtttgaccattttggacattttaaagaacatcttcgaaaacatacaggtgaaaaaccttttgaatgtccaaattgtcatgaacgatttgctagaaatagcactctgaaatgtcacctcactgcatgccaaactggagtaggggcaaaaaaaggaaggaagaagctctacgaatgccaggtctgcaacagtgtgtttaacagctgggaccagttcaaagatcacttggtaatacacactggagataaacccaaccattgtactttatgtgatttgtggtttatgcaaggaaatgaattaaggaggcatctcagtgatgctcacaatatttcagagcgtctagtaacggaagaagttctttcagtagaaacacgtgtgcaaactgaacctgtaacatcaatgactattatagaacaagttgggaaggtgcatgtgctaccattgcttcaggttcaggtggattcagcacaagtgactgtggaacaagtccatccagatctgctccaggacagccaggtgcacgattcacacatgagtgagcttccagagcaggtccaagtgagttatctagaagtgggccgaattcagactgaagaaggtactgaagtacatgtagaggagctgcatgttgaacgggtcaatcaaatgccagtggaagtacaaactgaacttctagaagcagatttggaccacgtgaccccagaaatcatgaaccaagaggagagagagtctagccaagcagatgctgctgaggctgccagggaagatcacgaagatgctgaggatttagagaccaagccaacagtggattctgaagcagaaaaggcagagaatgaggacagaacagctctgccagttttagaatgaaattacacatgaatatatttttaaatttacttgttgggtttttgaactgattatgggcagtttgactgtccttaattaagcctaacagacaagtggaccaaagttaagctgtttcctgttgtgctgaactgttgtccgttgaaacacattgattcccctccccctacttattgccacagaggagggatcttttccataactgaaggggagttttgagaagtatatttctggaaacttaaatggattatattcttattatatagttgggtacgaatgtatctattttcattgtggtaaaagttcttccttttctctttcccaggtcatgttcttcctcaaattttttccatattgtaaaatcaaacttaaatcattagaatacaagtttatgtattctaatgcatgttagaaaattgaataatataggaaacacaaggctgcatgatgaaaagtgcattgttactgtgcagttaaattttggcttctggctttctttagtttgaacaaacgttcttgtctaccccagtagtcacagatgccatctttgcaacagaaagagtggtggtggcaaaatttctagaatgttaaaaaaaaaaaaaaatccacacccatgtgccttctcaaaaccaactgaacttctataaagcatctctggttctttcaaagtttgtgttgtaaggagcaatgtagatgatgctataatactttatatttttggttataatgacaaccaccagttctttttcacttaagttaggttgagaaattttatttaatggccactgaagggccattttcaattgggaaaatttatttacatctgtggtaaactttattttgatgaaaagttgcactagtattttaccaccagatgagaaaaagatgagcagcatttaaaaattaatgtatttaaaataaagtacagagaaagacatgtatataattatcaggctttgttttgaatggaatcttttcccccaattcttaatgtaaagatcttgtgctataacttttaaagccatacaaataagagtgctaaactgtggacttaaaagtaggtgtgtaaatatttttaatcagtattacttggaaaataaaatataacaaacccata

SEQ ID NO: 201469 - DNA, 1050 bp, Homo sapiens
  Payload ID: 19760
  Gene Name: zinc finger protein 131
  ENST ID: ENST00000515326
  CDS Start-End: 257-1050
gaacgtgctcgcgcccgtagctgccgctgccggggccgcggccgcccgggtgcccaaccgaacgcacgtgcgccagcggggcccgagcagaaggggagccccggctctcacgaagaaaatggagggcgacccacgggttaggggtcaggaaaggcgtggggcgcattatgccctgggaggggaaagcacggaacaagaggctctgagggacggagaggaaggagggcgacccacgagctagagcagcccgacggccatggaggctgaagagacgatggaatgccttcaggagttccctgaacatcataaaatgatcctcgaccgattgaatgaacagcgagagcaggaccggtttactgacatcaccctaattgtcgacggacaccattttaaggctcacaaggctgttttggctgcttgtagtaagttcttctacaaattctttcaggagtttacccaagaaccattggtggagatagaaggtgttagtaaaatggcctttcgccatttaattgagttcacatatacagcaaaattaatgatacaaggagaagaagaagccaatgatgtatggaaagcagcagagtttctacaaatgctagaagctatcaaagcccttgaagtcaggaacaaagaaaactcagctcccttagaggaaaataccacaggaaaaaatgaggccaaaaaaaggaagattgcagaaacttcaaatgttatcactgagtcattgccatctgcagaatcagaacctgttgaaattgaggtagagattgccgaaggcaccattgaagtggaagatgaaggcatcgaaacattagaggaagtggcttctgccaagcagtccgtaaagtacatacagagcacaggttcctctgatgattctgctctagcactgttggcagatattaccagcaagtaccgtcaaggtgacagaaaagggcagattaaagaagatggctgtccatctgaccccacgagcaaacaggagcacatgaaatcacactccactgagagtttcaagtgtgaaatatgcaataaacgatatcttcg

SEQ ID NO: 201470 - DNA, 501 bp, Homo sapiens
  Payload ID: 19760
  Gene Name: zinc finger protein 131
  ENST ID: ENST00000508259
  CDS Start-End: 47-501
gtgacgcgcaagcctgggccgctcctccttccctcacccgacggccatggaggctgaagagacgatggaatgccttcaggagttccctgaacatcataaaatgatcctcgaccgattgaatgaacagcgagagcaggaccggtttactgacatcaccctaattgtcgacggacaccattttaaggctcacaaggctgttttggctgcttgtagtaagttcttctacaaattctttcaggagtttacccaagaaccattggtggagatagaaggtgttagtaaaatggcctttcgccatttaattgagttcacatatacagcaaaattaatgatacaaggagaagaagaagccaatgatgtatggaaagcagcagagtttctacaaatgctagaagctatcaaagcccttgaagtcaggaacaaagaaaactcagctcccttagaggaaaataccacaggaaaaaatgaggccaaaaaaaggaagattgcagaaacttcaaa

SEQ ID NO: 201471 - DNA, 760 bp, Homo sapiens
  Payload ID: 19760
  Gene Name: zinc finger protein 131
  ENST ID: ENST00000502623
  CDS Start-End: 1-205
taagaagcaaagaactgggaaaaaaattcatgtatgtcagtactgtgagaaacagtttgaccattttggacattttaaagaacatcttcgaaaacatacagttctggatgctaagaagttcactgttatgaggccacatctggtgagagccctgccagtggcgactctgcagagtcctgaggccatgcagggcatcacatggtgaaaaaccttttgaatgtccaaattgtcatgaacgatttgctagaaatagcactctgaaatgtcacctcactgcatgccaaactggagtaggggcaaaaaaaggaaggaagaagctctacgaatgccaggtctgcaacagtgtgtttaacagctgggaccagttcaaagatcacttggtcatgttcttcctcaaattttttccatattgtaaaatcaaacttaaatcattagaatacaagtttatgtattctaatgcatgttagaaaattgaataatataggaaacacaaggctgcatgatgaaaagtgcattgttactgtgcagttaaattttggcttctggctttctttagtttgaacaaacgttcttgtctaccccagtagtcacagatgccatctttgcaacagaaagagtggtggtggcaaaatttctagaatgttaaaaaaaaaaaaaaatccacacccatgtgccttctcaaaaccaactgaacttctataaagcatctctggttctttcaaagtttgtgttgtaaggagcaatgtagatgatgctataa

SEQ ID NO: 201472 - DNA, 3209 bp, Homo sapiens
  Payload ID: 19760
  Gene Name: zinc finger protein 131
  Uniprot ID: P52739
  ENST ID: ENST00000505606
  CDS Start-End: 249-2018
gagaagagggagggcgggggagggagaggcgacccgagagtcgttgtgggtcgcgggccggaccgggtcccggggcggtgggagccccggccgggcagaagggcttggcgggccgttagaggaccgccacggctgtcgagtcccctcccttgttggacttgcgcgccctggcgctcggaacctccggcgctgtgcccaccccgctctagctcgcgtctcccgactccaattagagcagcccgacggccatggaggctgaagagacgatggaatgccttcaggagttccctgaacatcataaaatgatcctcgaccgattgaatgaacagcgagagcaggaccggtttactgacatcaccctaattgtcgacggacaccattttaaggctcacaaggctgttttggctgcttgtagtaagttcttctacaaattctttcaggagtttacccaagaaccattggtggagatagaaggtgttagtaaaatggcctttcgccatttaattgagttcacatatacagcaaaattaatgatacaaggagaagaagaagccaatgatgtatggaaagcagcagagtttctacaaatgctagaagctatcaaagcccttgaagtcaggaacaaagaaaactcagctcccttagaggaaaataccacaggaaaaaatgaggccaaaaaaaggaagattgcagaaacttcaaatgttatcactgagtcattgccatctgcagaatcagaacctgttgaaattgaggtagagattgccgaaggcaccattgaagtggaagatgaaggcatcgaaacattagaggaagtggcttctgccaagcagtccgtaaagtacatacagagcacaggttcctctgatgattctgctctagcactgttggcagatattaccagcaagtaccgtcaaggtgacagaaaagggcagattaaagaagatggctgtccatctgaccccacgagcaaacaggagcacatgaaatcacactccactgagagtttcaagtgtgaaatatgcaataaacgatatcttcgagagagcgcatggaaacagcacctaaattgttaccaccttgaagaaggtggagtcagtaagaagcaaagaactgggaaaaaaattcatgtatgtcagtactgtgagaaacagtttgaccattttggacattttaaagaacatcttcgaaaacatacaggtgaaaaaccttttgaatgtccaaattgtcatgaacgatttgctagaaatagcactctgaaatgtcacctcactgcatgccaaactggagtaggggcaaaaaaaggaaggaagaagctctacgaatgccaggtctgcaacagtgtgtttaacagctgggaccagttcaaagatcacttggtaatacacactggagataaacccaaccattgtactttatgtgatttgtggtttatgcaaggaaatgaattaaggaggcatctcagtgatgctcacaatatttcagagcgtctagtaacggaagaagttctttcagtagaaacacgtgtgcaaactgaacctgtaacatcaatgactattatagaacaagttgggaaggtgcatgtgctaccattgcttcaggttcaggtggattcagcacaagtgactgtggaacaagtccatccagatctgctccaggacagccaggtgcacgattcacacatgagtgagcttccagagcaggtccaagtgagttatctagaagtgggccgaattcagactgaagaaggtactgaagtacatgtagaggagctgcatgttgaacgggtcaatcaaatgccagtggaagtacaaactgaacttctagaagcagatttggaccacgtgaccccagaaatcatgaaccaagaggagagagagtctagccaagcagatgctgctgaggctgccagggaagatcacgaagatgctgaggatttagagaccaagccaacagtggattctgaagcagaaaaggcagagaatgaggacagaacagctctgccagttttagaatgaaattacacatgaatatatttttaaatttacttgttgggtttttgaactgattatgggcagtttgactgtccttaattaagcctaacagacaagtggaccaaagttaagctgtttcctgttgtgctgaactgttgtccgttgaaacacattgattcccctccccctacttattgccacagaggagggatcttttccataactgaaggggagttttgagaagtatatttctggaaacttaaatggattatattcttattatatagttgggtacgaatgtatctattttcattgtggtaaaagttcttccttttctctttcccaggtcatgttcttcctcaaattttttccatattgtaaaatcaaacttaaatcattagaatacaagtttatgtattctaatgcatgttagaaaattgaataatataggaaacacaaggctgcatgatgaaaagtgcattgttactgtgcagttaaattttggcttctggctttctttagtttgaacaaacgttcttgtctaccccagtagtcacagatgccatctttgcaacagaaagagtggtggtggcaaaatttctagaatgttaaaaaaaaaaaaaaatccacacccatgtgccttctcaaaaccaactgaacttctataaagcatctctggttctttcaaagtttgtgttgtaaggagcaatgtagatgatgctataatactttatatttttggttataatgacaaccaccagttctttttcacttaagttaggttgagaaattttatttaatggccactgaagggccattttcaattgggaaaatttatttacatctgtggtaaactttattttgatgaaaagttgcactagtattttaccaccagatgagaaaaagatgagcagcatttaaaaattaatgtatttaaaataaagtacagagaaagacatgtatataattatcaggctttgttttgaatggaatcttttcccccaattcttaatgtaaagatcttgtgctataacttttaaagccatacaaataagagtgctaaactgtggacttaaaagtaggtgtgtaaatatttttaatcagtattacttggaaaataaaatataacaaacccatagaccaatatgctattttttttacctgttaaatattgggagttctttacattttttaagtaaactttaaaattatgtg

SEQ ID NO: 201473 - DNA, 572 bp, Homo sapiens
  Payload ID: 19760
  Gene Name: zinc finger protein 131
  ENST ID: ENST00000509341
  CDS Start-End: 156-572
ggccgggcagaagggcttggcgggccgttagaggaccgccacggctgtcgagtcccctcccttgttggacttgcgcgccctggcgctcggaacctccggcgctgtgcccaccccgctctagctcgcgtctcccgactccaattagcccgacggccatggaggctgaagagacgatggaatgccttcaggagttccctgaacatcataaaatgatcctcgaccgattgaatgaacagcgagagcaggaccggtttactgacatcaccctaattgtcgacggacaccattttaaggctcacaaggctgttttggctgcttgtagtaagttcttctacaaattctttcaggagtttacccaagaaccattggtggagatagaaggtgttagtaaaatggcctttcgccatttaattgagttcacatatacagcaaaattaatgatacaaggagaagaagaagccaatgatgtatggaaagcagcagagtttctacaaatgctagaagctatcaaagcccttgaagtcaggaacaaagaaaactcagctcccttagaggaaaataccacaggaaaa

SEQ ID NO: 201474 - DNA, 1352 bp, Homo sapiens
  Payload ID: 19760
  Gene Name: zinc finger protein 131
  ENST ID: ENST00000507218
  CDS Start-End: 44-295
acgcgcaagcctgggccgctcctccttccctcacccgacggccatggaggctgaagagacgatggaatgccttcaggagttccctgaacatcataaaatgatcctcgaccgattgaatgaacagcgagagcaggaccggtttactgacatcaccctaattgtcgacggacaccattttaaggctcacaaggctgttttggctgcttgtagtaagttcttctacaaattctttcaggagtttacccaagaaccattggtggagatagaaggaacaaagaaaactcagctcccttagaggaaaataccacaggaaaaaatgaggccaaaaaaaggaagattgcagaaacttcaaatgttatcactgagtcattgccatctgcagaatcagaacctgttgaaattgaggtagagattgccgaaggcaccattgaagtggaagatgaaggcatcgaaacattagaggaagtggcttctgccaagcagtccgtaaagtacatacagagcacaggttcctctgatgattctgctctagcactgttggcagatattaccagcaagtaccgtcaaggtgacagaaaagggcagattaaagaagatggctgtccatctgaccccacgagcaaacaggtagaaggtattgaaattgtggaacttcagctgtcacatgtgaaggacttgttccattgtgagaaatgtaaccgttcatttaaattgttttaccattttaaggagcacatgaaatcacactccactgagagtttcaagtgtgaaatatgcaataaacgatatcttcgagagagcgcatggaaacagcacctaaattgttaccaccttgaagaaggtggagtcagtaagaagcaaagaactgggaaaaaaattcatgtatgtcagtactgtgagaaacagtttgaccattttggacattttaaagaacatcttcgaaaacatacaggtgaaaaaccttttgaatgtccaaattgtcatgaacgatttgctagaaatagcactctgaaatgtcacctcactgcatgccaaactggagtaggggcaaaaaaaggaaggaagaagctctacgaatgccaggtctgcaacagtgtgtttaacagctgggaccagttcaaagatcacttggtaatacacactggagataaacccaaccattgtactttatgtgatttgtggtttatgcaaggaaatgaattaaggaggcatctcagtgatgctcacaatatttcagagcgtctagtaacggaagaagttctttcagtagaaacacgtgtgcaaactgaacctgtaacatcaatgactattatagaacaagttgggaaggtgcatgtgctaccattgcttca

SEQ ID NO: 201475 - DNA, 2599 bp, Homo sapiens
  Payload ID: 19760
  Gene Name: zinc finger protein 131
  ENST ID: ENST00000510026
  CDS Start-End: 222-983
ccgcggccgcccgggtgcccaaccgaacgcacgtgcgccagcggggcccgagcagaaggggagccccggctctcacgaagaaaatggagggcgacccacgggttaggggtcaggaaaggcgtggggcgcattatgccctgggaggggaaagcacggaacaagaggctctgagggacggagaggaaggagggcgacccacgagctagagcagcccgacggccatggaggctgaagagacgatggaatgccttcaggagttccctgaacatcataaaatgatcctcgaccgattgaatgaacagcgagagcaggaccggtttactgacatcaccctaattgtcgacggacaccattttaaggctcacaaggctgttttggctgcttgtagtaagttcttctacaaattctttcaggagtttacccaagaaccattggtggagatagaaggtgttagtaaaatggcctttcgccatttaattgagttcacatatacagcaaaattaatgatacaaggagaagaagaagccaatgatgtatggaaagcagcagagtttctacaaatgctagaagctatcaaagcccttgaagtcaggaacaaagaaaactcagctcccttagaggaaaataccacaggaaaaaatgaggccaaaaaaaggaagattgcagaaacttcaaatgttatcactgagtcattgccatctgcagaatcagaacctgttgaaattgaggtagagattgccgaaggcaccattgaagtggaagatgaaggcatcgaaacattagaggaagtggcttctgccaagcagtccgtaaagtacatacagagcacaggttcctctgatgattctgctctagcactgttggcagatattaccagcaagtaccgtcaaggtgacagaaaagggcagattaaagaagatggctgtccatctgaccccacgagcaaacaggtagaaggagcacatgaaatcacactccactgagagtttcaagtgtgaaatatgcaataaacgatatcttcgagagagcgcatggaaacagcacctaaattgttaccaccttgaagaaggtggagtcagtaagaagcaaagaactgggaaaaaaattcatgtatgtcagtactgtgagaaacagtttgaccattttggacattttaaagaacatcttcgaaaacatacaggtgaaaaaccttttgaatgtccaaattgtcatgaacgatttgctagaaatagcactctgaaatgtcacctcactgcatgccaaactggagtaggggcaaaaaaaggaaggaagaagctctacgaatgccaggtctgcaacagtgtgtttaacagctgggaccagttcaaagatcacttggtaatacacactggagataaacccaaccattgtactttatgtgatttgtggtttatgcaaggaaatgaattaaggaggcatctcagtgatgctcacaatatttcagagcgtctagtaacggaagaagttctttcagtagaaacacgtgtgcaaactgaacctgtaacatcaatgactattatagaacaagttgggaaggtgcatgtgctaccattgcttcaggttcaggtggattcagcacaagtgactgtggaacaagtccatccagatctgctccaggacagccaggtgcacgattcacacatgagtgagcttccagagcaggtccaagtgagttatctagaagtgggccgaattcagactgaagaaggtactgaagtacatgtagaggagctgcatgttgaacgggtcaatcaaatgccagtggaagtacaaactgaacttctagaagcagatttggaccacgtgaccccagaaatcatgaaccaagaggagagagagtctagccaagcagatgctgctgaggctgccagggaagatcacgaagatgctgaggatttagagaccaagccaacagtggattctgaagcagaaaaggcagagaatgaggacagaacagctctgccagttttagaatgaaattacacatgaatatatttttaaatttacttgttgggtttttgaactgattatgggcagtttgactgtccttaattaagcctaacagacaagtggaccaaagttaagctgtttcctgttgtgctgaactgttgtccgttgaaacacattgattcccctccccctacttattgccacagaggagggatcttttccataactgaaggggagttttgagaagtatatttctggaaacttaaatggattatattcttattatatagttgggtacgaatgtatctattttcattgtggtaaaagttcttccttttctctttcccaggtcatgttcttcctcaaattttttccatattgtaaaatcaaacttaaatcattagaatacaagtttatgtattctaatgcatgttagaaaattgaataatataggaaacacaaggctgcatgatgaaaagtgcattgttactgtgcagttaaattttggcttctggctttctttagtttgaacaaacgttcttgtctaccccagtagtcacagatgccatctttgcaacagaaagagtggtggtggcaaaatttctagaatgttaaaaaaaaaaaaaaa

SEQ ID NO: 201476 - DNA, 970 bp, Homo sapiens
  Payload ID: 19760
  Gene Name: zinc finger protein 131
  ENST ID: ENST00000509931
  CDS Start-End: 16-216
agcagcccgacggccatggaggctgaagagacgatggaatgccttcaggagttccctgaacatcataaaatgatcctcgaccgattgaatgaacagcgagagcaggaccggtttactgacatcaccctaattgtcgacggacaccattttaaggctcacaaggctgttttggctgcttgtagtcatgttcttcctcaaattttttccatattgtaaaatcaaacttaaatcattagaatacaagtttatgtattctaatgcatgttagaaaattgaataatataggaaacacaaggctgcatgatgaaaagtgcattgttactgtgcagttaaattttggcttctggctttctttagtttgaacaaacgttcttgtctaccccagtagtcacagatgccatctttgcaacagaaagagtggtggtggcaaaatttctagaatgttaaaaaaaaaaaaaaatccacacccatgtgccttctcaaaaccaactgaacttctataaagcatctctggttctttcaaagtttgtgttgtaaggagcaatgtagatgatgctataatactttatatttttggttataatgacaaccaccagttctttttcacttaagttaggttgagaaattttatttaatggccactgaagggccattttcaattgggaaaatttatttacatctgtggtaaactttattttgatgaaaagttgcactagtattttaccaccagatgagaaaaagatgagcagcatttaaaaattaatgtatttaaaataaagtacagagaaagacatgtatataattatcaggctttgttttgaatggaatcttttcccccaattcttaatgtaaagatcttgtgctataacttttaaagccatacaaataagagtgctaaactgtggacttaaaagtaggtgtgtaaatatttttaatcagtattacttggaaaataaaatataacaaaccc

SEQ ID NO: 201477 - DNA, 2063 bp, Homo sapiens
  Payload ID: 19760
  Gene Name: zinc finger protein 131
  Uniprot ID: P52739
  ENST ID: ENST00000509156
  CDS Start-End: 37-1908
gcggtgacggtgtgcgtcgacagcagcccgacggccatggaggctgaagagacgatggaatgccttcaggagttccctgaacatcataaaatgatcctcgaccgattgaatgaacagcgagagcaggaccggtttactgacatcaccctaattgtcgacggacaccattttaaggctcacaaggctgttttggctgcttgtagtaagttcttctacaaattctttcaggagtttacccaagaaccattggtggagatagaaggtgttagtaaaatggcctttcgccatttaattgagttcacatatacagcaaaattaatgatacaaggagaagaagaagccaatgatgtatggaaagcagcagagtttctacaaatgctagaagctatcaaagcccttgaagtcaggaacaaagaaaactcagctcccttagaggaaaataccacaggaaaaaatgaggccaaaaaaaggaagattgcagaaacttcaaatgttatcactgagtcattgccatctgcagaatcagaacctgttgaaattgaggtagagattgccgaaggcaccattgaagtggaagatgaaggcatcgaaacattagaggaagtggcttctgccaagcagtccgtaaagtacatacagagcacaggttcctctgatgattctgctctagcactgttggcagatattaccagcaagtaccgtcaaggtgacagaaaagggcagattaaagaagatggctgtccatctgaccccacgagcaaacaggtagaaggtattgaaattgtggaacttcagctgtcacatgtgaaggacttgttccattgtgagaaatgtaaccgttcatttaaattgttttaccattttaaggagcacatgaaatcacactccactgagagtttcaagtgtgaaatatgcaataaacgatatcttcgagagagcgcatggaaacagcacctaaattgttaccaccttgaagaaggtggagtcagtaagaagcaaagaactgggaaaaaaattcatgtatgtcagtactgtgagaaacagtttgaccattttggacattttaaagaacatcttcgaaaacatacaggtgaaaaaccttttgaatgtccaaattgtcatgaacgatttgctagaaatagcactctgaaatgtcacctcactgcatgccaaactggagtaggggcaaaaaaaggaaggaagaagctctacgaatgccaggtctgcaacagtgtgtttaacagctgggaccagttcaaagatcacttggtaatacacactggagataaacccaaccattgtactttatgtgatttgtggtttatgcaaggaaatgaattaaggaggcatctcagtgatgctcacaatatttcagagcgtctagtaacggaagaagttctttcagtagaaacacgtgtgcaaactgaacctgtaacatcaatgactattatagaacaagttgggaaggtgcatgtgctaccattgcttcaggttcaggtggattcagcacaagtgactgtggaacaagtccatccagatctgctccaggacagccaggtgcacgattcacacatgagtgagcttccagagcaggtccaagtgagttatctagaagtgggccgaattcagactgaagaaggtactgaagtacatgtagaggagctgcatgttgaacgggtcaatcaaatgccagtggaagtacaaactgaacttctagaagcagatttggaccacgtgaccccagaaatcatgaaccaagaggagagagagtctagccaagcagatgctgctgaggctgccagggaagatcacgaagatgctgaggatttagagaccaagccaacagtggattctgaagcagaaaaggcagagaatgaggacagaacagctctgccagttttagaatgaaattacacatgaatatatttttaaatttacttgttgggtttttgaactgattatgggcagtttgactgtccttaattaagcctaacagacaagtggaccaaagttaagctgtttcctgttgtgctgaactgttgtccgttgaaacacattgattc

SEQ ID NO: 201478 - DNA, 956 bp, Homo sapiens
  Payload ID: 19760
  Gene Name: zinc finger protein 131
  ENST ID: ENST00000511736
  CDS Start-End: 16-390
agcagcccgacggccatggaggctgaagagacgatggaatgccttcaggagttccctgaacatcataaaatgatcctcgaccgattgaatgaacagcgagagcaggaccggtttactgacatcaccctaattgtcgacggacaccattttaaggctcacaaggctgttttggctgcttgtagtaagttcttctacaaattctttcaggagtttacccaagaaccattggtggagatagaaggtgttagtaaaatggcctttcgccatttaattgagttcacatatacagcaaaattaatgatacaaggagaagaagaagccaatgatgtatggaaagcagcagagtttctacaaatgctagaagctatcaaagcccttgaagtcaggtgaaaaaccttttgaatgtccaaattgtcatgaacgatttgctagaaatagcactctgaaatgtcacctcactgcatgccaaactggagtaggggcaaaaaaaggaaggaagaagctctacgaatgccaggtctgcaacagtgtgtttaacagctgggaccagttcaaagatcacttgacagggtctcgctgtgtcacccaggctagagtgcagtggcacaatctcggcttactgcaacctttaacttctgggctcaagcaaccctcccacttcagcctcctgagtagctacgactacagaacctaaaccctgcccgactcacccggaggagctgtcacggtggtttgctggaaaccccctttctgttgggaggattactgggtcacggtttcccaaggacatggaaacccttgctgaagcgctggaaccgctcggcacgaggcgtacgtcggtgggagctgtgtcagcccgctttcggccgtgtagctgctcccatccagactctagaaggggtcctctttgcgtcaggcccaatcacccccctccccgagcgactgcactgggtgtc

SEQ ID NO: 201479 - DNA, 583 bp, Homo sapiens
  Payload ID: 19760
  Gene Name: zinc finger protein 131
  ENST ID: ENST00000507393
  CDS Start-End: 346-583
atcccccaaagagacctccagactctaccatgagtgtctccagctgaactcatcgtgtctaatcctcaccctagcttatcctgttcaaatcatttccatctttttctggatgaacctgggcggatgtcagaccagagaagagcacagaatgtaccagagagctgccatgtcctgtggagagcctggcatgaacagaggccttgcggagaactgaagccttcagtccaagagccagggaggaactgaattctgtcaagaaccacttgagtgaccttggaagcagatcctttcccattggagccttgagattaaagccaccttacctgacaacttgataggagccttatggggtctcgctatgtgcccaggctggcctcaaactcctgggctgaactcctcctccccaactcggcctcccaaagtgctgggattacaagcgtgagccaccgcgcccgcccacatctcttcttacagagcagcccgacggccatggaggctgaagagacgatggaatgccttcaggagttccctgaacatcataaaatgatcctcgaccgattgaatgaacagcgagagcaggacc

SEQ ID NO: 201480 - DNA, 3031 bp, Homo sapiens
  Payload ID: 19761
  Gene Name: zinc finger protein 132
  Uniprot ID: P52740
  ENST ID: ENST00000254166
  CDS Start-End: 402-2522
gagccaatgaaagctcggaccagtggcaagtccgagctgtcattgagaggcgggacttccggcgccgccattgcggtcctcattttgctgctggtgggttgggctacagcaggcctctggagccacaccagggcacgggagtgggtgcagggaccgtcaccgcgccttcacacgcaccatagtgcccggctaattactctgcttttatgagccaaggtgttcccgaaagtggagccagcgccacgcgtctccagggtctccatacccagccttcgtccctgcggtgcccagaggccttgcgcgcattttgcatttgggaagacaggtcctgagtgcgaccgtcacccagcggaagtgtgagggttcggcccagcggcagggctagccctgggcctcctgttatggccctgcccagcccacaggttctaatggggttgccagcgttgctgatgggcccggcgcagcatacttcttggccctgtggctcagctgtccccacattgaagagcatggtaacctttgaagatgtggctgtatacttctcccaagaggagtgggagctccttgatgcagcccagaggcacctgtaccacagtgtgatgctggaaaaccttgagcttgtgacctcacttggttcttggcatggagtagagggtgagggggcccatcccaagcagaatgtttctgtagaagtgttacaggtcaggatccctaatgcagatccttccaccaagaaagctaactcctgtgacatgtgtgggccattcttgaaagacattttgcacctggctgagcatcagggaacacagtctgaggagaaaccctacacatgtggagcatgtgggagagacttttggttgaatgcaaaccttcaccagcaccagaaggagcacagtggagggaagccctttagatggtacaaggacagggacgcacttatgaagagctctaaagtccacctgtcagagaaccccttcacttgcagggaaggtgggaaggtcatcctgggcagctgtgacctcctccagcttcaagctgttgacagtgggcagaagccatattccaatcttgggcagcttccagaagtctgtaccacacagaaactcttcgagtgcagcaactgtggaaaagccttcctgaagagctccactctccccaaccatctgagaactcactctgaagagataccatttacatgcccaacaggtggaaatttcttagaggagaaatcaatccttggtaataaaaagtttcacactggggaaataccccatgtgtgtaaggagtgtgggaaggcctttagtcactcatctaagctgaggaagcaccagaaatttcacactgaagtaaaatattatgagtgcattgcatgtgggaaaaccttcaaccacaaactcacatttgttcatcatcagagaattcactcaggagaaagaccttatgagtgtgatgaatgtgggaaagccttcagtaacagatcacacctcattcggcatgagaaagttcacactggagaaaggccttttgagtgcctgaaatgtggaagagccttcagccaaagctccaatttccttcggcatcagaaagttcacacacaggtaagaccttatgagtgcagtcaatgtggtaaatccttcagccgaagctctgctctcattcagcactggagagttcacactggagaaagaccgtatgaatgcagtgaatgtggaagagcttttaacaataactccaaccttgctcagcaccagaaagttcacaccggagaacggccttttgagtgcagtgaatgtggaagagacttcagccaaagctcccatctccttcgacatcagaaagttcacactggagaacggccttttgaatgctgtgattgtggtaaagccttcagtaatagctccaccctcatccagcaccagaaagtacatactgggcaaaggccttatgagtgcagcgaatgtaggaaatccttcagccgcagctccagcctgattcagcactggagaattcacactggagaaaagccttacgagtgtagtgagtgtgggaaagcctttgctcacagctccactctcattgaacactggagagttcacacaaaagaaaggccttatgagtgcaatgaatgtgggaaattctttagccaaaactccattctcattaagcatcagaaagttcatactggagaaaagccttataaatgcagtgaatgtgggaaattctttagccgaaaatccagccttatttgtcactggagagttcacactggagaaaggccttacgaatgcagtgaatgtgggagagcctttagcagtaactcccacctggttcgtcatcagagagttcacacacaagaaaggccctatgagtgcatccagtgtggaaaagcctttagtgaaagatctacacttgttcggcaccagaaagttcacaccagagaaaggacttatgagtgtagccagtgtgggaaactcttcagccatctttgtaaccttgcacagcataaaaagattcatacctgagtggagccttatggaagtggtctttgtgagaaaatcttcagccaagtcaaacttcatgcagcagaatccccataccagaaaaattacctacatgtactgctaatgtggaaaagccttcagaagctactctgtttctgaccagcccaggaacctttgcagggccatctcacccatgcagcataaggcagaagccatagtcactttccatcttgcctggatccaaaaatttgcagcagtcctgtcctcatgcatggggaaaacagtaccctgagccttccttcctgtgttctctagggattcaggactgtgctcagctgaaccgatgctggttgaggggccttgagggaaatctaatttgagctcaggaagatgcacattccttgtggatgtggtcaagtctgtgtttaacccctaagatgtgtccattgaggccacaaatcaccctccactggaatcacctaccttgcctgcactaactggtgataataaagaccttattgatcaggtca

SEQ ID NO: 201481 - DNA, 2242 bp, Homo sapiens
  Payload ID: 19762
  Gene Name: zinc finger protein 133
  Uniprot ID: P52736
  ENST ID: ENST00000316358
  CDS Start-End: 98-2062
atctaccttctgagatatcatccttcttcagggagataaggaaaaaaagccacagggtcccggagagccaggggaatgttttgtgttacaggcacacatggcattcagggatgtggctgtggatttcacccaggatgagtggaggctgctgagccctgctcaaaggactctgtacagagaggtgatgctggagaactacagcaacctggtctcactgggaatttcattttctaaaccagaactcatcacccagctggagcaagggaaagagacctggagagaggaaaaaaaatgttcaccggcaacctgtccagcagatccagagccagagctctacctcgatcctttctgccctccgggtttctccagtcagaaattccccatgcagcatgtgctgtgtaatcatcccccctggatcttcacatgcttgtgtgcagaaggtaacatccagcctggggatccgggcccaggggaccaggagaagcagcaacaagcctctgaggggagaccctggagtgatcaagcagaaggtcctgagggagaaggtgccatgcctttgtttggaagaaccaagaaaaggactctgggagcgttctccaggccaccccagaggcagccagtcagctctcggaacggcctcagaggggtggagttagaagccagcccagctcagtcagggaaccctgaggaaacagacaaattgttgaagaggatagaagtcttaggatttggaacagtcaactgtggagagtgtggactgagcttcagcaagatgacaaacctgctcagtcaccagcggatacactcaggggagaagccctacgtgtgtggggtatgtgagaagggcttcagcctaaagaagagcctcgccagacaccagaaggcacactcgggggagaagccaattgtgtgcagggagtgtggacgaggctttaaccggaagtcaacgctaatcatacacgaacggacacactccggtgagaaaccttacatgtgcagtgagtgtgggcgaggcttcagccagaagtcaaacctcatcatacaccagaggacacactcaggggaaaagccttacgtgtgccgggaatgtggcaaaggcttcagccagaagtcagctgtcgtgagacaccagaggacacacttggaggagaagaccatcgtgtgcagtgactgtggcctgggcttcagcgacaggtcaaacctcatctcccaccagaggacgcactctggggagaagccctacgcctgcaaggagtgtgggcgatgcttcaggcagaggaccacccttgtcaaccaccagaggacacactcaaaggagaagccctatgtgtgcggggtgtgtgggcacagcttcagccagaattcaaccctcatctctcacaggcggacacacactggggagaagccgtatgtttgtggggtgtgtgggcgaggctttagtctcaagtcacacctcaacagacaccagaacatacactcaggagagaagcccattgtgtgcaaggactgtggccggggcttcagccagcaatccaacctcatcagacaccagaggacgcactcaggcgagaagcccatggtgtgtggggagtgcgggcgaggcttcagccagaagtcaaaccttgttgcacaccagaggacgcactcaggggagaggccgtatgtgtgccgagagtgcgggcgaggctttagccaccaggccggtctcatcaggcacaagcggaagcactcgagggagaagccctacatgtgcaggcagtgtggactgggctttggcaataagtcagctctaattacacacaagcgggctcactcggaagagaagccttgtgtgtgcagagagtgtggccaaggctttctccaaaagtcacacctcaccttacatcaaatgacacatacgggggagaagccatatgtgtgcaagacgtgtgggcggggcttcagcctcaagtctcacctcagcagacacaggaagaccacgtctgtccaccacagactgccagtgcagcccgaccctgagccgtgtgcagggcaaccttcggattccttatactctctctgaaggcaaagatggggacaaggactaagagtcagaatgttgacactttgatgaaatggagtagagaaatgcattctgtaagtggtcaaaggacatttgactgtttactttctccacactaagtcttctccatgttttgtggccttcggttgtaataaacttggcttctttatacatctgtaa

SEQ ID NO: 201482 - DNA, 481 bp, Homo sapiens
  Payload ID: 19762
  Gene Name: zinc finger protein 133
  ENST ID: ENST00000360010
  CDS Start-End: 185-481
ggcgctgtgccgaggattcggggtagtgtagtcctggcgccccgctggaggagctccccagctggtggctggagcgaccccttgttctttggtggcgctgatctaccttctgagatatcatccttcttcagggagataaggaaaaaaagccacagggtcccggagagccaggggaatggcacacatggcattcagggatgtggctgtggatttcacccaggatgagtggaggctgctgagccctgctcaaaggactctgtacagagaggtgatgctggagaactacagcaacctggtctcactgggaatttcattttctaaaccagaactcatcacccagctggagcaagggaaagagacctggagagaggaaaaaaaatgttcaccggcaacctgtccagatcatcaagaatatggaaacaactgtgacctacagaaagaagcagatccagagccagagctctacctcgatcctttctgc

SEQ ID NO: 201483 - DNA, 2701 bp, Homo sapiens
  Payload ID: 19762
  Gene Name: zinc finger protein 133
  Uniprot ID: P52736
  ENST ID: ENST00000377671
  CDS Start-End: 560-2521
cgccgagcatcctgggaggtgtggtccgggcgctgtgccgaggattcggggtagtgtagtcctggcgccccgctggaggagctccccagctggtggctggagcgaccccttgttctttggtggcgctgatctaccttctgagatatcatccttcttcagggagataaggaaaaaaagccacagggtcccggagagccaggggaatgcttcaaaagttctgctgcctgagagtaacgtcacagtaatggaacgggaagattctggaatctgtgtccccacctagacaacgattatactggcaggatctatcaggtgtacctattttggaactctggagtctagttgaaggcctccagttcccagggggaaggaagcatggaggtgtgtcctccatttggaagtagtgctaagaaaattaaaagaataaaactgggcaggggcatgagaataggatgcaaagatgaatttttggactgagtggccaagaagctccatggtgagcactcacagtctaaggctggaagtttaatgaactgttttctacatttcacaggcacacatggcattcagggatgtggctgtggatttcacccaggatgagtggaggctgctgagccctgctcaaaggactctgtacagagaggtgatgctggagaactacagcaacctggtctcactgggaatttcattttctaaaccagaactcatcacccagctggagcaagggaaagagacctggagagaggaaaaaaaatgttcaccggcaacctgtccagatccagagccagagctctacctcgatcctttctgccctccgggtttctccagtcagaaattccccatgcagcatgtgctgtgtaatcatcccccctggatcttcacatgcttgtgtgcagaaggtaacatccagcctggggatccgggcccaggggaccaggagaagcagcaacaagcctctgaggggagaccctggagtgatcaagcagaaggtcctgagggagaaggtgccatgcctttgtttggaagaaccaagaaaaggactctgggagcgttctccaggccaccccagaggcagccagtcagctctcggaacggcctcagaggggtggagttagaagccagcccagctcagtcagggaaccctgaggaaacagacaaattgttgaagaggatagaagtcttaggatttggaacagtcaactgtggagagtgtggactgagcttcagcaagatgacaaacctgctcagtcaccagcggatacactcaggggagaagccctacgtgtgtggggtatgtgagaagggcttcagcctaaagaagagcctcgccagacaccagaaggcacactcgggggagaagccaattgtgtgcagggagtgtggacgaggctttaaccggaagtcaacgctaatcatacacgaacggacacactccggtgagaaaccttacatgtgcagtgagtgtgggcgaggcttcagccagaagtcaaacctcatcatacaccagaggacacactcaggggaaaagccttacgtgtgccgggaatgtggcaaaggcttcagccagaagtcagctgtcgtgagacaccagaggacacacttggaggagaagaccatcgtgtgcagtgactgtggcctgggcttcagcgacaggtcaaacctcatctcccaccagaggacgcactctggggagaagccctacgcctgcaaggagtgtgggcgatgcttcaggcagaggaccacccttgtcaaccaccagaggacacactcaaaggagaagccctatgtgtgcggggtgtgtgggcacagcttcagccagaattcaaccctcatctctcacaggcggacacacactggggagaagccgtatgtttgtggggtgtgtgggcgaggctttagtctcaagtcacacctcaacagacaccagaacatacactcaggagagaagcccattgtgtgcaaggactgtggccggggcttcagccagcaatccaacctcatcagacaccagaggacgcactcaggcgagaagcccatggtgtgtggggagtgcgggcgaggcttcagccagaagtcaaaccttgttgcacaccagaggacgcactcaggggagaggccgtatgtgtgccgagagtgcgggcgaggctttagccaccaggccggtctcatcaggcacaagcggaagcactcgagggagaagccctacatgtgcaggcagtgtggactgggctttggcaataagtcagctctaattacacacaagcgggctcactcggaagagaagccttgtgtgtgcagagagtgtggccaaggctttctccaaaagtcacacctcaccttacatcaaatgacacatacgggggagaagccatatgtgtgcaagacgtgtgggcggggcttcagcctcaagtctcacctcagcagacacaggaagaccacgtctgtccaccacagactgccagtgcagcccgaccctgagccgtgtgcagggcaaccttcggattccttatactctctctgaaggcaaagatggggacaaggactaagagtcagaatgttgacactttgatgaaatggagtagagaaatgcattctgtaagtggtcaaaggacatttgactgtttactttctccacactaagtcttctccatgttttgtggccttcggttgtaataaacttggcttctttatacatctgtaa

SEQ ID NO: 201484 - DNA, 2642 bp, Homo sapiens
  Payload ID: 19762
  Gene Name: zinc finger protein 133
  Uniprot ID: P52736
  ENST ID: ENST00000401790
  CDS Start-End: 500-2464
gctcagaaggagggtcacagtagggccaggcactcttctcgggagctcctacgtgttttatgcacgtggttaagaaaaaagagggagaattcaggtgccacagtggccattctccggtgaccggagcgtgttactcagaaacggatccgtcagaggccaatgggagctgccggccttcagggcgcgcctggtggcgccgagcatcctgggaggtgtggtccgggcgctgtgccgaggattcggggtagtgtagtcctggcgccccgctggaggagctccccagctggtggctggagcgaccccttgttctttggtggcgctgtgtgtcctccatttggaagtagtgctaagaaaattaaaagaataaaactgggcaggggcatgagaataggatgcaaagatgaatttttggactgagtggccaagaagctccatggtgagcactcacagtctaaggctggaagtttaatgaactgttttctacatttcacaggcacacatggcattcagggatgtggctgtggatttcacccaggatgagtggaggctgctgagccctgctcaaaggactctgtacagagaggtgatgctggagaactacagcaacctggtctcactgggaatttcattttctaaaccagaactcatcacccagctggagcaagggaaagagacctggagagaggaaaaaaaatgttcaccggcaacctgtccagcagatccagagccagagctctacctcgatcctttctgccctccgggtttctccagtcagaaattccccatgcagcatgtgctgtgtaatcatcccccctggatcttcacatgcttgtgtgcagaaggtaacatccagcctggggatccgggcccaggggaccaggagaagcagcaacaagcctctgaggggagaccctggagtgatcaagcagaaggtcctgagggagaaggtgccatgcctttgtttggaagaaccaagaaaaggactctgggagcgttctccaggccaccccagaggcagccagtcagctctcggaacggcctcagaggggtggagttagaagccagcccagctcagtcagggaaccctgaggaaacagacaaattgttgaagaggatagaagtcttaggatttggaacagtcaactgtggagagtgtggactgagcttcagcaagatgacaaacctgctcagtcaccagcggatacactcaggggagaagccctacgtgtgtggggtatgtgagaagggcttcagcctaaagaagagcctcgccagacaccagaaggcacactcgggggagaagccaattgtgtgcagggagtgtggacgaggctttaaccggaagtcaacgctaatcatacacgaacggacacactccggtgagaaaccttacatgtgcagtgagtgtgggcgaggcttcagccagaagtcaaacctcatcatacaccagaggacacactcaggggaaaagccttacgtgtgccgggaatgtggcaaaggcttcagccagaagtcagctgtcgtgagacaccagaggacacacttggaggagaagaccatcgtgtgcagtgactgtggcctgggcttcagcgacaggtcaaacctcatctcccaccagaggacgcactctggggagaagccctacgcctgcaaggagtgtgggcgatgcttcaggcagaggaccacccttgtcaaccaccagaggacacactcaaaggagaagccctatgtgtgcggggtgtgtgggcacagcttcagccagaattcaaccctcatctctcacaggcggacacacactggggagaagccgtatgtttgtggggtgtgtgggcgaggctttagtctcaagtcacacctcaacagacaccagaacatacactcaggagagaagcccattgtgtgcaaggactgtggccggggcttcagccagcaatccaacctcatcagacaccagaggacgcactcaggcgagaagcccatggtgtgtggggagtgcgggcgaggcttcagccagaagtcaaaccttgttgcacaccagaggacgcactcaggggagaggccgtatgtgtgccgagagtgcgggcgaggctttagccaccaggccggtctcatcaggcacaagcggaagcactcgagggagaagccctacatgtgcaggcagtgtggactgggctttggcaataagtcagctctaattacacacaagcgggctcactcggaagagaagccttgtgtgtgcagagagtgtggccaaggctttctccaaaagtcacacctcaccttacatcaaatgacacatacgggggagaagccatatgtgtgcaagacgtgtgggcggggcttcagcctcaagtctcacctcagcagacacaggaagaccacgtctgtccaccacagactgccagtgcagcccgaccctgagccgtgtgcagggcaaccttcggattccttatactctctctgaaggcaaagatggggacaaggactaagagtcagaatgttgacactttgatgaaatggagtagagaaatgcattctgtaagtggtcaaaggacatttgactgtttactttctccacactaagtcttctccatgttttgtggccttcggttgtaataaacttggcttctttatacatctgt

SEQ ID NO: 201485 - DNA, 2622 bp, Homo sapiens
  Payload ID: 19762
  Gene Name: zinc finger protein 133
  Uniprot ID: P52736
  ENST ID: ENST00000402618
  CDS Start-End: 669-2444
gctcagaaggagggtcacagtagggccaggcactcttctcgggagctcctacgtgttttatgcacgtggttaagaaaaaagagggagaattcaggtgccacagtggccattctccggtgaccggagcgtgttactcagaaacggatccgtcagaggccaatgggagctgccggccttcagggcgcgcctggtggcgccgagcatcctgggaggtgtggtccgggcgctgtgccgaggattcggggtagtgtagtcctggcgccccgctggaggagctccccagctggtggctggagcgaccccttgttctttggtggcgctgttttgtgttacaggcacacatggcattcagggatgtggctgtggatttcacccaggatgagtggaggctgctgagccctgctcaaaggactctgtacagagaggtgatgctggagaactacagcaacctggtctcactgggaatttcattttctaaaccagaactcatcacccagctggagcaagggaaagagacctggagagaggaaaaaaaatgttcaccggcaacctgtccagaaaaacagcagctcttacaatgatgttgagcacattaaaaagaatgctgtacaatccaaggagcaagtcattgtggttgcccaggaagctgtcttggaaacccaaaatatatgtgtaacgggaggaagactgttctagcagatccagagccagagctctacctcgatcctttctgccctccgggtttctccagtcagaaattccccatgcagcatgtgctgtgtaatcatcccccctggatcttcacatgcttgtgtgcagaaggtaacatccagcctggggatccgggcccaggggaccaggagaagcagcaacaagcctctgaggggagaccctggagtgatcaagcagaaggtcctgagggagaaggtgccatgcctttgtttggaagaaccaagaaaaggactctgggagcgttctccaggccaccccagaggcagccagtcagctctcggaacggcctcagaggggtggagttagaagccagcccagctcagtcagggaaccctgaggaaacagacaaattgttgaagaggatagaagtcttaggatttggaacagtcaactgtggagagtgtggactgagcttcagcaagatgacaaacctgctcagtcaccagcggatacactcaggggagaagccctacgtgtgtggggtatgtgagaagggcttcagcctaaagaagagcctcgccagacaccagaaggcacactcgggggagaagccaattgtgtgcagggagtgtggacgaggctttaaccggaagtcaacgctaatcatacacgaacggacacactccggtgagaaaccttacatgtgcagtgagtgtgggcgaggcttcagccagaagtcaaacctcatcatacaccagaggacacactcaggggaaaagccttacgtgtgccgggaatgtggcaaaggcttcagccagaagtcagctgtcgtgagacaccagaggacacacttggaggagaagaccatcgtgtgcagtgactgtggcctgggcttcagcgacaggtcaaacctcatctcccaccagaggacgcactctggggagaagccctacgcctgcaaggagtgtgggcgatgcttcaggcagaggaccacccttgtcaaccaccagaggacacactcaaaggagaagccctatgtgtgcggggtgtgtgggcacagcttcagccagaattcaaccctcatctctcacaggcggacacacactggggagaagccgtatgtttgtggggtgtgtgggcgaggctttagtctcaagtcacacctcaacagacaccagaacatacactcaggagagaagcccattgtgtgcaaggactgtggccggggcttcagccagcaatccaacctcatcagacaccagaggacgcactcaggcgagaagcccatggtgtgtggggagtgcgggcgaggcttcagccagaagtcaaaccttgttgcacaccagaggacgcactcaggggagaggccgtatgtgtgccgagagtgcgggcgaggctttagccaccaggccggtctcatcaggcacaagcggaagcactcgagggagaagccctacatgtgcaggcagtgtggactgggctttggcaataagtcagctctaattacacacaagcgggctcactcggaagagaagccttgtgtgtgcagagagtgtggccaaggctttctccaaaagtcacacctcaccttacatcaaatgacacatacgggggagaagccatatgtgtgcaagacgtgtgggcggggcttcagcctcaagtctcacctcagcagacacaggaagaccacgtctgtccaccacagactgccagtgcagcccgaccctgagccgtgtgcagggcaaccttcggattccttatactctctctgaaggcaaagatggggacaaggactaagagtcagaatgttgacactttgatgaaatggagtagagaaatgcattctgtaagtggtcaaaggacatttgactgtttactttctccacactaagtcttctccatgttttgtggccttcggttgtaataaacttggcttctttatacatctgt

SEQ ID NO: 201486 - DNA, 2717 bp, Homo sapiens
  Payload ID: 19762
  Gene Name: zinc finger protein 133
  Uniprot ID: P52736
  ENST ID: ENST00000396026
  CDS Start-End: 578-2539
gctcagaaggagggtcacagtagggccaggcactcttctcgggagctcctacgtgttttatgcacgtggttaagaaaaaagagggagaattcaggtgccacagtggccattctccggtgaccggagcgtgttactcagaaacggatccgtcagaggccaatgggagctgccggccttcagggcgcgcctggtggcgccgagcatcctgggaggtgtggtccgggcgctgtgccgaggattcggggtagtgtagtcctggcgccccgctggaggagctccccagctggtggctggagcgaccccttgttctttggtggcgctgatctaccttctgagatatcatccttcttcagggagataaggaaaaaaagccacagggtcccggagagccaggggaatgtgtgtcctccatttggaagtagtgctaagaaaattaaaagaataaaactgggcaggggcatgagaataggatgcaaagatgaatttttggactgagtggccaagaagctccatggtgagcactcacagtctaaggctggaagtttaatgaactgttttctacatttcacaggcacacatggcattcagggatgtggctgtggatttcacccaggatgagtggaggctgctgagccctgctcaaaggactctgtacagagaggtgatgctggagaactacagcaacctggtctcactgggaatttcattttctaaaccagaactcatcacccagctggagcaagggaaagagacctggagagaggaaaaaaaatgttcaccggcaacctgtccagatccagagccagagctctacctcgatcctttctgccctccgggtttctccagtcagaaattccccatgcagcatgtgctgtgtaatcatcccccctggatcttcacatgcttgtgtgcagaaggtaacatccagcctggggatccgggcccaggggaccaggagaagcagcaacaagcctctgaggggagaccctggagtgatcaagcagaaggtcctgagggagaaggtgccatgcctttgtttggaagaaccaagaaaaggactctgggagcgttctccaggccaccccagaggcagccagtcagctctcggaacggcctcagaggggtggagttagaagccagcccagctcagtcagggaaccctgaggaaacagacaaattgttgaagaggatagaagtcttaggatttggaacagtcaactgtggagagtgtggactgagcttcagcaagatgacaaacctgctcagtcaccagcggatacactcaggggagaagccctacgtgtgtggggtatgtgagaagggcttcagcctaaagaagagcctcgccagacaccagaaggcacactcgggggagaagccaattgtgtgcagggagtgtggacgaggctttaaccggaagtcaacgctaatcatacacgaacggacacactccggtgagaaaccttacatgtgcagtgagtgtgggcgaggcttcagccagaagtcaaacctcatcatacaccagaggacacactcaggggaaaagccttacgtgtgccgggaatgtggcaaaggcttcagccagaagtcagctgtcgtgagacaccagaggacacacttggaggagaagaccatcgtgtgcagtgactgtggcctgggcttcagcgacaggtcaaacctcatctcccaccagaggacgcactctggggagaagccctacgcctgcaaggagtgtgggcgatgcttcaggcagaggaccacccttgtcaaccaccagaggacacactcaaaggagaagccctatgtgtgcggggtgtgtgggcacagcttcagccagaattcaaccctcatctctcacaggcggacacacactggggagaagccgtatgtttgtggggtgtgtgggcgaggctttagtctcaagtcacacctcaacagacaccagaacatacactcaggagagaagcccattgtgtgcaaggactgtggccggggcttcagccagcaatccaacctcatcagacaccagaggacgcactcaggcgagaagcccatggtgtgtggggagtgcgggcgaggcttcagccagaagtcaaaccttgttgcacaccagaggacgcactcaggggagaggccgtatgtgtgccgagagtgcgggcgaggctttagccaccaggccggtctcatcaggcacaagcggaagcactcgagggagaagccctacatgtgcaggcagtgtggactgggctttggcaataagtcagctctaattacacacaagcgggctcactcggaagagaagccttgtgtgtgcagagagtgtggccaaggctttctccaaaagtcacacctcaccttacatcaaatgacacatacgggggagaagccatatgtgtgcaagacgtgtgggcggggcttcagcctcaagtctcacctcagcagacacaggaagaccacgtctgtccaccacagactgccagtgcagcccgaccctgagccgtgtgcagggcaaccttcggattccttatactctctctgaaggcaaagatggggacaaggactaagagtcagaatgttgacactttgatgaaatggagtagagaaatgcattctgtaagtggtcaaaggacatttgactgtttactttctccacactaagtcttctccatgttttgtggccttcggttgtaataaacttggcttctttatacatctgt

SEQ ID NO: 201487 - DNA, 523 bp, Homo sapiens
  Payload ID: 19762
  Gene Name: zinc finger protein 133
  ENST ID: ENST00000434018
  CDS Start-End: 96-523
agtgtagtcctggcgccccgctggaggagctccccagctggtggctggagcgaccccttgttctttggtggcgctgttttgtgttacaggcacacatggcattcagggatgtggctgtggatttcacccaggatgagtggaggctgctgagccctgctcaaaggactctgtacagagaggtgatgctggagaactacagcaacctggtctcactgggaatttcattttctaaaccagaactcatcacccagctggagcaagggaaagagacctggagagaggaaaaaaaatgttcaccggcaacctgtccagcagatccagagccagagctctacctcgatcctttctgccctccgggtttctccagtcagaaattccccatgcagcatgtgctgtgtaatcatcccccctggatcttcacatgcttgtgtgcagaaggtaacatccagcctggggatccgggcccaggggaccaggagaagcagcaacaagcctctgaggggagaccctggagtgatcaagc

SEQ ID NO: 201488 - DNA, 637 bp, Homo sapiens
  Payload ID: 19762
  Gene Name: zinc finger protein 133
  ENST ID: ENST00000425686
  CDS Start-End: 101-637
gatgaatttttggactgagtggccaagaagctccatggtgagcactcacagtctaaggctggaagtttaatgaactgttttctacatttcacaggcacacatggcattcagggatgtggctgtggatttcacccaggatgagtggaggctgctgagccctgctcaaaggactctgtacagagaggtgatgctggagaactacagcaacctggtctcactgggaatttcattttctaaaccagaactcatcacccagctggagcaagggaaagagacctggagagaggaaaaaaaatgttcaccggcaacctgtccagcagatccagagccagagctctacctcgatcctttctgccctccgggtttctccagtcagaaattccccatgcagcatgtgctgtgtaatcatcccccctggatcttcacatgcttgtgtgcagaaggtaacatccagcctggggatccgggcccaggggaccaggagaagcagcaacaagcctctgaggggagaccctggagtgatcaagcagaaggtcctgagggagaaggtgccatgcctttgtttggaagaaccaagaaaaggactctgggagcgttctccaggccaccccagaggcagccagtcagctctcggaac

SEQ ID NO: 201489 - DNA, 2341 bp, Homo sapiens
  Payload ID: 19762
  Gene Name: zinc finger protein 133
  ENST ID: ENST00000535822
  CDS Start-End: 160-2163
gctcagaaggagggtcacagtagggccaggcactcttctcgggagctcctacgtgttttatgcacgtggttaagaaaaaagagggagaattcaggtgccacagtggccattctccggtgaccggagcgtgttactcagaaacggatccgtcagaggccaatgggagctgccggccttcagggcgcgcctggtggcgccgagcatcctgggaggtgtggtccgggcgctgtgccgaggattcggggtagtgtagtcctggcgccccgctggaggagctccccagctggtggctggagcgaccccttgttctttggtggcgctggaatttcattttctaaaccagaactcatcacccagctggagcaagggaaagagacctggagagaggaaaaaaaatgttcaccggcaacctgtccagatccagagccagagctctacctcgatcctttctgccctccgggtttctccagtcagaaattccccatgcagcatgtgctgtgtaatcatcccccctggatcttcacatgcttgtgtgcagaaggtaacatccagcctggggatccgggcccaggggaccaggagaagcagcaacaagcctctgaggggagaccctggagtgatcaagcagaaggtcctgagggagaaggtgccatgcctttgtttggaagaaccaagaaaaggactctgggagcgttctccaggccaccccagaggcagccagtcagctctcggaacggcctcagaggggtggagttagaagccagcccagctcagtcagggaaccctgaggaaacagacaaattgttgaagaggatagaagtcttaggatttggaacagtcaactgtggagagtgtggactgagcttcagcaagatgacaaacctgctcagtcaccagcggatacactcaggggagaagccctacgtgtgtggggtatgtgagaagggcttcagcctaaagaagagcctcgccagacaccagaaggcacactcgggggagaagccaattgtgtgcagggagtgtggacgaggctttaaccggaagtcaacgctaatcatacacgaacggacacactccggtgagaaaccttacatgtgcagtgagtgtgggcgaggcttcagccagaagtcaaacctcatcatacaccagaggacacactcaggggaaaagccttacgtgtgccgggaatgtggcaaaggcttcagccagaagtcagctgtcgtgagacaccagaggacacacttggaggagaagaccatcgtgtgcagtgactgtggcctgggcttcagcgacaggtcaaacctcatctcccaccagaggacgcactctggggagaagccctacgcctgcaaggagtgtgggcgatgcttcaggcagaggaccacccttgtcaaccaccagaggacacactcaaaggagaagccctatgtgtgcggggtgtgtgggcacagcttcagccagaattcaaccctcatctctcacaggcggacacacactggggagaagccgtatgtttgtggggtgtgtgggcgaggctttagtctcaagtcacacctcaacagacaccagaacatacactcaggagagaagcccattgtgtgcaaggactgtggccggggcttcagccagcaatccaacctcatcagacaccagaggacgcactcaggcgagaagcccatggtgtgtggggagtgcgggcgaggcttcagccagaagtcaaaccttgttgcacaccagaggacgcactcaggggagaggccgtatgtgtgccgagagtgcgggcgaggctttagccaccaggccggtctcatcaggcacaagcggaagcactcgagggagaagccctacatgtgcaggcagtgtggactgggctttggcaataagtcagctctaattacacacaagcgggctcactcggaagagaagccttgtgtgtgcagagagtgtggccaaggctttctccaaaagtcacacctcaccttacatcaaatgacacatacgggggagaagccatatgtgtgcaagacgtgtgggcggggcttcagcctcaagtctcacctcagcagacacaggaagaccacgtctgtccaccacagactgccagtgcagcccgaccctgagccgtgtgcagggcaaccttcggattccttatactctctctgaaggcaaagatggggacaaggactaagagtcagaatgttgacactttgatgaaatggagtagagaaatgcattctgtaagtggtcaaaggacatttgactgtttactttctccacactaagtcttctccatgttttgtggccttcggttgtaataaacttggcttctttatacatctgt

SEQ ID NO: 201490 - DNA, 2245 bp, Homo sapiens
  Payload ID: 19762
  Gene Name: zinc finger protein 133
  ENST ID: ENST00000538547
  CDS Start-End: 160-2067
gctcagaaggagggtcacagtagggccaggcactcttctcgggagctcctacgtgttttatgcacgtggttaagaaaaaagagggagaattcaggtgccacagtggccattctccggtgaccggagcgtgttactcagaaacggatccgtcagaggccaatgggagctgccggccttcagggcgcgcctggtggcgccgagcatcctgggaggtgtggtccgggcgctgtgccgaggattcggggtagtgtagtcctggcgccccgctggaggagctccccagctggtggctggagcgaccccttgttctttggtggcgctgatccagagccagagctctacctcgatcctttctgccctccgggtttctccagtcagaaattccccatgcagcatgtgctgtgtaatcatcccccctggatcttcacatgcttgtgtgcagaaggtaacatccagcctggggatccgggcccaggggaccaggagaagcagcaacaagcctctgaggggagaccctggagtgatcaagcagaaggtcctgagggagaaggtgccatgcctttgtttggaagaaccaagaaaaggactctgggagcgttctccaggccaccccagaggcagccagtcagctctcggaacggcctcagaggggtggagttagaagccagcccagctcagtcagggaaccctgaggaaacagacaaattgttgaagaggatagaagtcttaggatttggaacagtcaactgtggagagtgtggactgagcttcagcaagatgacaaacctgctcagtcaccagcggatacactcaggggagaagccctacgtgtgtggggtatgtgagaagggcttcagcctaaagaagagcctcgccagacaccagaaggcacactcgggggagaagccaattgtgtgcagggagtgtggacgaggctttaaccggaagtcaacgctaatcatacacgaacggacacactccggtgagaaaccttacatgtgcagtgagtgtgggcgaggcttcagccagaagtcaaacctcatcatacaccagaggacacactcaggggaaaagccttacgtgtgccgggaatgtggcaaaggcttcagccagaagtcagctgtcgtgagacaccagaggacacacttggaggagaagaccatcgtgtgcagtgactgtggcctgggcttcagcgacaggtcaaacctcatctcccaccagaggacgcactctggggagaagccctacgcctgcaaggagtgtgggcgatgcttcaggcagaggaccacccttgtcaaccaccagaggacacactcaaaggagaagccctatgtgtgcggggtgtgtgggcacagcttcagccagaattcaaccctcatctctcacaggcggacacacactggggagaagccgtatgtttgtggggtgtgtgggcgaggctttagtctcaagtcacacctcaacagacaccagaacatacactcaggagagaagcccattgtgtgcaaggactgtggccggggcttcagccagcaatccaacctcatcagacaccagaggacgcactcaggcgagaagcccatggtgtgtggggagtgcgggcgaggcttcagccagaagtcaaaccttgttgcacaccagaggacgcactcaggggagaggccgtatgtgtgccgagagtgcgggcgaggctttagccaccaggccggtctcatcaggcacaagcggaagcactcgagggagaagccctacatgtgcaggcagtgtggactgggctttggcaataagtcagctctaattacacacaagcgggctcactcggaagagaagccttgtgtgtgcagagagtgtggccaaggctttctccaaaagtcacacctcaccttacatcaaatgacacatacgggggagaagccatatgtgtgcaagacgtgtgggcggggcttcagcctcaagtctcacctcagcagacacaggaagaccacgtctgtccaccacagactgccagtgcagcccgaccctgagccgtgtgcagggcaaccttcggattccttatactctctctgaaggcaaagatggggacaaggactaagagtcagaatgttgacactttgatgaaatggagtagagaaatgcattctgtaagtggtcaaaggacatttgactgtttactttctccacactaagtcttctccatgttttgtggccttcggttgtaataaacttggcttctttatacatctgt

SEQ ID NO: 201491 - DNA, 2660 bp, Homo sapiens
  Payload ID: 19762
  Gene Name: zinc finger protein 133
  Uniprot ID: P52736
  ENST ID: ENST00000622607
  CDS Start-End: 518-2482
gctcagaaggagggtcacagtagggccaggcactcttctcgggagctcctacgtgttttatgcacgtggttaagaaaaaagagggagaattcaggtgccacagtggccattctccggtgaccggagcgtgttactcagaaacggatccgtcagaggccaatgggagctgccggccttcagggcgcgcctggtggcgccgagcatcctgggaggtgtggtccgggcgctgtgccgaggattcggggtagtgtagtcctggcgccccgctggaggagctccccagctggtggctggagcgaccccttgttctttggtggcgctggttcattcctgatgctgttaaggaataggaggtactgccctgctggagaggatttcccttgattttcttgaacgctttttgttcttgttctgcctccctgtggctcctgtctgcccagagaggactgcctgctggggaaagggggtactcctgagctcctgacagcccagcttcagttttgtgttacaggcacacatggcattcagggatgtggctgtggatttcacccaggatgagtggaggctgctgagccctgctcaaaggactctgtacagagaggtgatgctggagaactacagcaacctggtctcactgggaatttcattttctaaaccagaactcatcacccagctggagcaagggaaagagacctggagagaggaaaaaaaatgttcaccggcaacctgtccagcagatccagagccagagctctacctcgatcctttctgccctccgggtttctccagtcagaaattccccatgcagcatgtgctgtgtaatcatcccccctggatcttcacatgcttgtgtgcagaaggtaacatccagcctggggatccgggcccaggggaccaggagaagcagcaacaagcctctgaggggagaccctggagtgatcaagcagaaggtcctgagggagaaggtgccatgcctttgtttggaagaaccaagaaaaggactctgggagcgttctccaggccaccccagaggcagccagtcagctctcggaacggcctcagaggggtggagttagaagccagcccagctcagtcagggaaccctgaggaaacagacaaattgttgaagaggatagaagtcttaggatttggaacagtcaactgtggagagtgtggactgagcttcagcaagatgacaaacctgctcagtcaccagcggatacactcaggggagaagccctacgtgtgtggggtatgtgagaagggcttcagcctaaagaagagcctcgccagacaccagaaggcacactcgggggagaagccaattgtgtgcagggagtgtggacgaggctttaaccggaagtcaacgctaatcatacacgaacggacacactccggtgagaaaccttacatgtgcagtgagtgtgggcgaggcttcagccagaagtcaaacctcatcatacaccagaggacacactcaggggaaaagccttacgtgtgccgggaatgtggcaaaggcttcagccagaagtcagctgtcgtgagacaccagaggacacacttggaggagaagaccatcgtgtgcagtgactgtggcctgggcttcagcgacaggtcaaacctcatctcccaccagaggacgcactctggggagaagccctacgcctgcaaggagtgtgggcgatgcttcaggcagaggaccacccttgtcaaccaccagaggacacactcaaaggagaagccctatgtgtgcggggtgtgtgggcacagcttcagccagaattcaaccctcatctctcacaggcggacacacactggggagaagccgtatgtttgtggggtgtgtgggcgaggctttagtctcaagtcacacctcaacagacaccagaacatacactcaggagagaagcccattgtgtgcaaggactgtggccggggcttcagccagcaatccaacctcatcagacaccagaggacgcactcaggcgagaagcccatggtgtgtggggagtgcgggcgaggcttcagccagaagtcaaaccttgttgcacaccagaggacgcactcaggggagaggccgtatgtgtgccgagagtgcgggcgaggctttagccaccaggccggtctcatcaggcacaagcggaagcactcgagggagaagccctacatgtgcaggcagtgtggactgggctttggcaataagtcagctctaattacacacaagcgggctcactcggaagagaagccttgtgtgtgcagagagtgtggccaaggctttctccaaaagtcacacctcaccttacatcaaatgacacatacgggggagaagccatatgtgtgcaagacgtgtgggcggggcttcagcctcaagtctcacctcagcagacacaggaagaccacgtctgtccaccacagactgccagtgcagcccgaccctgagccgtgtgcagggcaaccttcggattccttatactctctctgaaggcaaagatggggacaaggactaagagtcagaatgttgacactttgatgaaatggagtagagaaatgcattctgtaagtggtcaaaggacatttgactgtttactttctccacactaagtcttctccatgttttgtggccttcggttgtaataaacttggcttctttatacatctgt

SEQ ID NO: 201492 - DNA, 1999 bp, Homo sapiens
  Payload ID: 19762
  Gene Name: zinc finger protein 133
  Uniprot ID: P52736
  ENST ID: ENST00000630056
  CDS Start-End: 142-1821
agtgtagtcctggcgccccgctggaggagctccccagctggtggctggagcgaccccttgttctttggtggcgctgatccagagccagagctctacctcgatcctttctgccctccgggtttctccagtcagaaattccccatgcagcatgtgctgtgtaatcatcccccctggatcttcacatgcttgtgtgcagaaggtaacatccagcctggggatccgggcccaggggaccaggagaagcagcaacaagcctctgaggggagaccctggagtgatcaagcagaaggtcctgagggagaaggtgccatgcctttgtttggaagaaccaagaaaaggactctgggagcgttctccaggccaccccagaggcagccagtcagctctcggaacggcctcagaggggtggagttagaagccagcccagctcagtcagggaaccctgaggaaacagacaaattgttgaagaggatagaagtcttaggatttggaacagtcaactgtggagagtgtggactgagcttcagcaagatgacaaacctgctcagtcaccagcggatacactcaggggagaagccctacgtgtgtggggtatgtgagaagggcttcagcctaaagaagagcctcgccagacaccagaaggcacactcgggggagaagccaattgtgtgcagggagtgtggacgaggctttaaccggaagtcaacgctaatcatacacgaacggacacactccggtgagaaaccttacatgtgcagtgagtgtgggcgaggcttcagccagaagtcaaacctcatcatacaccagaggacacactcaggggaaaagccttacgtgtgccgggaatgtggcaaaggcttcagccagaagtcagctgtcgtgagacaccagaggacacacttggaggagaagaccatcgtgtgcagtgactgtggcctgggcttcagcgacaggtcaaacctcatctcccaccagaggacgcactctggggagaagccctacgcctgcaaggagtgtgggcgatgcttcaggcagaggaccacccttgtcaaccaccagaggacacactcaaaggagaagccctatgtgtgcggggtgtgtgggcacagcttcagccagaattcaaccctcatctctcacaggcggacacacactggggagaagccgtatgtttgtggggtgtgtgggcgaggctttagtctcaagtcacacctcaacagacaccagaacatacactcaggagagaagcccattgtgtgcaaggactgtggccggggcttcagccagcaatccaacctcatcagacaccagaggacgcactcaggcgagaagcccatggtgtgtggggagtgcgggcgaggcttcagccagaagtcaaaccttgttgcacaccagaggacgcactcaggggagaggccgtatgtgtgccgagagtgcgggcgaggctttagccaccaggccggtctcatcaggcacaagcggaagcactcgagggagaagccctacatgtgcaggcagtgtggactgggctttggcaataagtcagctctaattacacacaagcgggctcactcggaagagaagccttgtgtgtgcagagagtgtggccaaggctttctccaaaagtcacacctcaccttacatcaaatgacacatacgggggagaagccatatgtgtgcaagacgtgtgggcggggcttcagcctcaagtctcacctcagcagacacaggaagaccacgtctgtccaccacagactgccagtgcagcccgaccctgagccgtgtgcagggcaaccttcggattccttatactctctctgaaggcaaagatggggacaaggactaagagtcagaatgttgacactttgatgaaatggagtagagaaatgcattctgtaagtggtcaaaggacatttgactgtttactttctccacactaagtcttctccatgttttgtggccttcggttgtaataaacttggcttctttatacatctgt

SEQ ID NO: 201493 - DNA, 616 bp, Homo sapiens
  Payload ID: 19762
  Gene Name: zinc finger protein 133
  ENST ID: ENST00000626025
  CDS Start-End: 65-208
ccccagctggtggctggagcgaccccttgttctttggtggcgctgttttgtgttacaggcacacatggcattcagggatgtggctgtggatttcacccaggatgagtggaggctgctgagccctgctcaaaggactctgtacagagaggtgatgctggagaactacagcaacctggtctcactggttacttattttcttttcctgtgagcaggaatttcattttctaaaccagaactcatcacccagctggagcaagggaaagagacctggagagaggaaaaaaaatgttcaccggcaacctgtccagcagatccagagccagagctctacctcgatcctttctgccctccgggtttctccagtcagaaattccccatgcagcatgtgctgtgtaatcatcccccctggatcttcacatgcttgtgtgcagaaggtaacatccagcctggggatccgggcccaggggaccaggagaagcagcaacaagcctctgaggggagaccctggagtgatcaagcagaaggtcctgagggagaaggtgccatgcctttgtttggaagaaccaagaaaaggactctgggagcgttctccaggccaccccagaggcagccagtc

SEQ ID NO: 201494 - DNA, 2318 bp, Homo sapiens
  Payload ID: 19762
  Gene Name: zinc finger protein 133
  Uniprot ID: P52736
  ENST ID: ENST00000628216
  CDS Start-End: 170-2143
gtgccgaggattcggggtagtgtagtcctggcgccccgctggaggagctccccagctggtggctggagcgaccccttgttctttggtggcgctgatctaccttctgagatatcatccttcttcagggagataaggaaaaaaagccacagggtcccggagagccaggggaatggcacacatggcattcagggatgtggctgtggatttcacccaggatgagtggaggctgctgagccctgctcaaaggactctgtacagagaggtgatgctggagaactacagcaacctggtctcactgggaatttcattttctaaaccagaactcatcacccagctggagcaagggaaagagacctggagagaggaaaaaaaatgttcaccggcaacctgtccagcagatccagagccagagctctacctcgatcctttctgccctccgggtttctccagtcagaaattccccatgcagcatgtgctgtgtaatcatcccccctggatcttcacatgcttgtgtgcagaaggtaacatccagcctggggatccgggcccaggggaccaggagaagcagcaacaagcctctgaggggagaccctggagtgatcaagcagaaggtcctgagggagaaggtgccatgcctttgtttggaagaaccaagaaaaggactctgggagcgttctccaggccaccccagaggcagccagtcagctctcggaacggcctcagaggggtggagttagaagccagcccagctcagtcagggaaccctgaggaaacagacaaattgttgaagaggatagaagtcttaggatttggaacagtcaactgtggagagtgtggactgagcttcagcaagatgacaaacctgctcagtcaccagcggatacactcaggggagaagccctacgtgtgtggggtatgtgagaagggcttcagcctaaagaagagcctcgccagacaccagaaggcacactcgggggagaagccaattgtgtgcagggagtgtggacgaggctttaaccggaagtcaacgctaatcatacacgaacggacacactccggtgagaaaccttacatgtgcagtgagtgtgggcgaggcttcagccagaagtcaaacctcatcatacaccagaggacacactcaggggaaaagccttacgtgtgccgggaatgtggcaaaggcttcagccagaagtcagctgtcgtgagacaccagaggacacacttggaggagaagaccatcgtgtgcagtgactgtggcctgggcttcagcgacaggtcaaacctcatctcccaccagaggacgcactctggggagaagccctacgcctgcaaggagtgtgggcgatgcttcaggcagaggaccacccttgtcaaccaccagaggacacactcaaaggagaagccctatgtgtgcggggtgtgtgggcacagcttcagccagaattcaaccctcatctctcacaggcggacacacactggggagaagccgtatgtttgtggggtgtgtgggcgaggctttagtctcaagtcacacctcaacagacaccagaacatacactcaggagagaagcccattgtgtgcaaggactgtggccggggcttcagccagcaatccaacctcatcagacaccagaggacgcactcaggcgagaagcccatggtgtgtggggagtgcgggcgaggcttcagccagaagtcaaaccttgttgcacaccagaggacgcactcaggggagaggccgtatgtgtgccgagagtgcgggcgaggctttagccaccaggccggtctcatcaggcacaagcggaagcactcgagggagaagccctacatgtgcaggcagtgtggactgggctttggcaataagtcagctctaattacacacaagcgggctcactcggaagagaagccttgtgtgtgcagagagtgtggccaaggctttctccaaaagtcacacctcaccttacatcaaatgacacatacgggggagaagccatatgtgtgcaagacgtgtgggcggggcttcagcctcaagtctcacctcagcagacacaggaagaccacgtctgtccaccacagactgccagtgcagcccgaccctgagccgtgtgcagggcaaccttcggattccttatactctctctgaaggcaaagatggggacaaggactaagagtcagaatgttgacactttgatgaaatggagtagagaaatgcattctgtaagtggtcaaaggacatttgactgtttactttctccacactaagtcttctccatgttttgtggccttcggttgtaataaacttggcttctttatacatc

SEQ ID NO: 201495 - DNA, 4914 bp, Homo sapiens
  Payload ID: 19763
  Gene Name: zinc finger protein 134
  Uniprot ID: P52741
  ENST ID: ENST00000396161
  CDS Start-End: 311-1594
atcttgtcggctcttaggtggaaccatcggagcagaagctcggggttgctgggcggttccgaggtgacggaagcgggagggtgcgggagaagtcgctgttcgctctgcggagtggctcgccagcgaagaccccgcctgcgcccccggggacggacgaccgcggtgccagggtcccgcgacctgggaccccctcgcggctccgggtggtctacgaactgtgatggcggcggccgcggtgatgggcccggcgcagatcctctgtggttgttgaattgtaacaagagagagaactctggctgcctgagagggcatgactctagtcacagcaggaggggcttggacaggccctggttgttggcatgaagtgaaggatgaagagtcatcttctgaacagagcatttctatagcagtgtcacatgttaatacttccaaggcaggtttgcccgcacagacggctctcccttgtgacatatgtggccccatcttgaaagatattttgcacctggatgaacaccagggtacacaccatggactgaaacttcacacatgtggggcatgtgggagacaattctggttcagtgcaaaccttcatcagtaccagaagtgttacagtatagagcaacccttaagaagggataaaagtgaggcctcaattgtgaagaactgcacagttagcaaagaacctcatccgtcagagaagccctttacgtgtaaggaggagcagaaaaacttccaggctactttgggtggctgccaacaaaaggccatccacagtaagaggaagacacacaggagcactgagagtggggatgcatttcatggtgaacaaatgcattacaagtgcagtgaatgtgggaaagctttcagccgcaaagacacacttgtccagcaccagagaattcatagtggagagaagccttatgagtgcagcgaatgtgggaaagccttcagccgcaaagctacacttgtccagcatcagagaatccatactggagaaaggccttatgaatgcagcgaatgtggaaaaaccttcagtcgaaaagacaaccttactcagcacaagagaatccacactggagaaatgccttataagtgcaatgaatgtgggaaatattttagccatcactccaatctaattgtacaccagagagttcacaatggagcaaggccttataagtgcagtgattgtgggaaagtcttcagacacaaatctacacttgttcagcatgagagtattcacactggagaaaatccttatgattgcagtgattgtgggaaatcctttggccacaaatacaccctcattaaacatcagcgaattcacactgagtcaaagccgtttgagtgcattgaatgcgggaaattctttagtcgaagttctgactatattgcacaccagagggttcacactggtgaaaggccttttgtgtgcagtaaatgtgggaaagactttatcagaacctcccaccttgttcgacaccaaagagttcacactggagaaaggccatatgagtgcagtgaatgtgggaaggcctacagcttaagctcccacctcaatcggcaccagaaagttcacactgcaggcaggctttaggagtgctttgaatacaacaggactcatcaatcagatgttgaatttcatgtatctgaacattgacacaaaggagataccttatggtgccaggtacgtgggaaccttctagggatatgttgcactttctgacttgctcaggttttttgccagagttatgtcactgtcaatccatgtggccgaaaccatcttaactctaccagctaagataccccagcattggggaaggcagggttttgtattgtccagtccctggagaaaatcatgaaatgcctgagttcattgggggtcctcattcccttctgtatgacaggtataggtatggatatgacccatttttagccaagagggtctgagctgtatctgctggtggcttatacaaaaagtttactttcttcatggatattcttggtctcacatacttgtaatcaagtttttccagcctccaagtcacctggcctgggaaagtacttgcctcatgttgctctggtttgtgataataaaggctttacagtttaagccacatttaatcttggggcttcttcttatggtctggggtggattgaaaacaggctctgccaaactgaagacagcctttgtgcggtgcctccaactttgcctcaaatgggacagtgggttgagggagaacagttcttagtccagttttgatgttaacttccatagctgacaaagcttgttaagtaagaattaagatcttgtgtagacctgatttgtctggattttagagttatttgagagcccatatttcaccttgaggagggtgctgctgctgtgacagcctgcagtgttttgaaacagcatggattgggtgtcttgtttgcagcatgtgtcccatgttccccaacactgttgagggaaagctgttcctcaggacctgctgagtggccatattccctgaaggcctgaatctgtttcacaggccactgttggtaagatctaaagcatccagtagggaaacaaaattgataaatattgagtgtgagtaattgggattggggagattgtggcaaactagaggggaagtgcccattgtaaaaacacatccacagacagtccaggcactaaggctgaatgggatcagggtatccagaaatctcaggatctccagggccatgttactgttaggtcaaggtcactggtgcagcaacgaatgtagtttttctagattcctctccctccctgggctctttacctaatgtctttgcggcacaggcggtaaccctgggagtaaagaggtgtggtccaaggaagtagcttttgtgaccagctggagtttctggtgactcttttggcaatggtcctcattgtttgccagtttttcttactactgaggaagagattgtcttcccaagatatttggagtgataagagtcaccatagtgaggtagagtcactcttagtgatgtccagttgtccagtttccaatagaagtgggagatccagatttttaaatgggataactttttataggttcactgaggtgtaatcaacatgcaatatattgcacatatttaaagtgtacgagttaagtcttgatacacacacacacacacacacacacacacacacacacacttgaaactatcaccctatcagtggtattggacatatctgttacccccaaagttaacctgaggcccttaacctttctctcagtgctcgccttcccccagaatccctaggcaaccactgagtagttttcactgtaggtaaatttgtcttttctagaattttatgtaagtctgcctataaagtgttaattttgcatgctgtctttcatgcaacataatttgaaatttgtccatggtatgtatgaacagtccattttaaaattactgagtcatattctgtatggatataccacagtttatccatttatcttaattgatgtctgtactccacccccatttttaaatattaaaaagctgctgcaaatattgatgcatgagtctttatgtggacacttagctgagaacatttttaagcagaggttttgaaggtgtgaccatatatcttactaattatagtaaaatatattggaaaagagatacatacagggaagaactgtgaaacagaaaagacctaagatttgatgatttgggaaattctcagcccatcttaattggaaaaaaaaaacaaaccattgaaattaagagattcattgttaggaaagatagatgttttagagagagagatgttttagagagatagccaaggatgtttgctgataccgggatcaaaacatacatcagaacactgtcacacaaaaagctctttgaagagattaaatgtgacttgtagatcccctcaatacaaacaatttataagaagtttaaactatcactcatctcagcaaaagccaaaaatatagataggggattccctaggaggaataatctgcataaacctcttttctaatgttgtgaatttcagtgatgtacaggagactcacaaaattcttgaaaattttataccagtggaaatgctcaccttgggtctaaagggaccttgaaagtatgaagttaaagggtgtaggcatgtaaagtgtgaagttaaaggttgtaatattctatacatgggactggctgcggaaacaggtgcaagcccttgctacctttcatgagaaaggaaggatgactcagagcagaggagagtccagtgggcagagtcctgaaccatgtgatattcccatgtcttgactcccagtggcatttgccaaactagatttcagattttcttgggattggtggttccattttttttgttttccccccttccatttcctccccttttgaaacaatgcatatacatataactattatcctaggtctttcccaaccttttgtttgggagcagataactagttttctagttttacagatccaaatgagacaggaatagcactgggtggtcacaggaggatggaaaatctcaacaccctggttttggtgcagctgaaaaaaaaaaagaaaaacccaaacaacagctaaaacgggaactaggcaaagaaaccgtgggataacagaaaacccaaaacaaaagagaaaactgccagaaccccagtcagggtgacatgtctgtaactcttccaggcaaacccaaataagggaggaggggtggtaatcaggggtccctgaaatcccctcttttcccagaatacctaatgattacccctattaaaggaacacccatacaattagaaacccaaactttgttttgcatgacttgctctcaggggcactcccacacttctctcttgtgtgtacttttgcttcacaataaaagctgcttgcctttgcttc

SEQ ID NO: 201496 - DNA, 590 bp, Homo sapiens
  Payload ID: 19763
  Gene Name: zinc finger protein 134
  ENST ID: ENST00000600883
  CDS Start-End: 392-590
gtcggctcttaggtggaaccatcggagcagaagctcggggttgctgggcggttccgaggtgacggaagcgggagggtgcgggagaagtcgctgttcgctctgcggagtggctcgccagcgaagaccccgcctgcgcccccggggacggacgaccgcggtgccagggtcccgcgacctgggaccccctcgcggctccgggtggtctacgaactgtgatggcggcggccgcggtgatgggcccggcgcaggaggaatgggagctgctggatgaggctcagagactcttctattatgaaataatggcttctgtgcttcgcatttatagtctccctggatcctctgtggttgttgaattgtaacaagagagagaactctggctgcctgagagggcatgactctagtcacagcaggaggggcttggacaggccctggttgttggcatgaagtgaaggatgaagagtcatcttctgaacagagcatttctatagcagtgtcacatgttaatacttccaaggcaggtttgcccgcacagacggctctcccttgtgacatatgtggccccatcttgaaagatattttgcacctggatg

SEQ ID NO: 201497 - DNA, 483 bp, Homo sapiens
  Payload ID: 19763
  Gene Name: zinc finger protein 134
  ENST ID: ENST00000600344
  CDS Start-End: 324-464
cctcgcggtggacatcttgtcggctcttaggtggaaccatcggagcagaagctcggggttgctgggcggttccgaggtgacggaagcgggagggtgcgggagaagtcgctgttcgctctgcggagtggctcgccagcgaagaccccgcctgcgcccccggggacggacgaccgcggtgccagggtcccgcgacctgggaccccctcgcggctccgggtggtctacgaactgtgatggcggcggccgcggtgatgggcccggcgcagatcctctgtggttgttgaattgtaacaagagagagaactctggctgcctgagagggcatgactctagtcacagcaggaggggcttggacaggccctggtgagtgggagctgagggacgccataacctcagggctgggttcctgtagttccggaaacctatgttgtgcccatcacaagtgccaaggccagaggccctaacttatttctacctttttat

SEQ ID NO: 201498 - DNA, 2091 bp, Homo sapiens
  Payload ID: 19763
  Gene Name: zinc finger protein 134
  Uniprot ID: P52741
  ENST ID: ENST00000622676
  CDS Start-End: 523-1569
catcggagcagaagctcggggttgctgggcggttccgaggtgacggaagcgggagggtgcgggagaagtcgctgttcgctctgcggagtggctcgccagcgaagaccccgcctgcgcccccggggacggacgaccgcggtgccagggtcccgcgacctgggaccccctcgcggctccgggtggtctacgaactgtgatggcggcggccgcggtgatgggcccggcgcagatcctctgtggttgttgaattgtaacaagagagagaactctggctgcctgagagggcatgactctagtcacagcaggaggggcttggacaggccctggttgttggcatgaagtgaaggatgaagagtcatcttctgaacagagcatttctatagcagtgtcacatgttaatacttccaaggcaggtttgcccgcacagacggctctcccttgtgacatatgtggccccatcttgaaagatattttgcacctggatgaacaccagggtacacaccatggactgaaacttcacacatgtggggcatgtgggagacaattctggttcagtgcaaccttcatcagtaccagaagtgttacagtatagagcaacccttaagaagggataaaagtgaggcctcaattgtgaagaactgcacagttagcaaagaacctcatccgtcagagaagccctttacgtgtaaggaggagcagaaaaacttccaggctactttgggtggctgccaacaaaaggccatccacagtaagaggaagacacacaggagcactgagagtggggatgcatttcatggtgaacaaatgcattacaagtgcagtgaatgtgggaaagctttcagccgcaaagacacacttgtccagcaccagagaattcatagtggagagaagccttatgagtgcagcgaatgtgggaaagccttcagccgcaaagctacacttgtccagcatcagagaatccatactggagaaaggccttatgaatgcagcgaatgtggaaaaaccttcagtcgaaaagacaaccttactcagcacaagagaatccacactggagaaatgccttataagtgcaatgaatgtgggaaatattttagccatcactccaatctaattgtacaccagagagttcacaatggagcaaggccttataagtgcagtgattgtgggaaagtcttcagacacaaatctacacttgttcagcatgagagtattcacactggagaaaatccttatgattgcagtgattgtgggaaatcctttggccacaaatacaccctcattaaacatcagcgaattcacactgagtcaaagccgtttgagtgcattgaatgcgggaaattctttagtcgaagttctgactatattgcacaccagagggttcacactggtgaaaggccttttgtgtgcagtaaatgtgggaaagactttatcagaacctcccaccttgttcgacaccaaagagttcacactggagaaaggccatatgagtgcagtgaatgtgggaaggcctacagcttaagctcccacctcaatcggcaccagaaagttcacactgcaggcaggctttaggagtgctttgaatacaacaggactcatcaatcagatgttgaatttcatgtatctgaacattgacacaaaggagataccttatggtgccaggtacgtgggaaccttctagggatatgttgcactttctgacttgctcaggttttttgccagagttatgtcactgtcaatccatgtggccgaaaccatcttaactctaccagctaagataccccagcattggggaaggcagggttttgtattgtccagtccctggagaaaatcatgaaatgcctgagttcattgggggtcctcattcccttctgtatgacaggtataggtatggatatgacccatttttagccaagagggtctgagctgtatctgctggtggcttatacaaaaagtttactttcttcatggatattcttggtctcacatacttgtaatcaagtttttccagcctccaagtcacctggcctgggaaagtacttgcctcatgttgctctggtttgtgataataaaggctttacagtttaagccaca

SEQ ID NO: 201499 - DNA, 3025 bp, Homo sapiens
  Payload ID: 19764
  Gene Name: zinc finger protein 135
  Uniprot ID: P52742
  ENST ID: ENST00000313434
  CDS Start-End: 102-2078
ggagttaggctcgcgccggcgcagtgtcggctgccggtgccgcggcctttgtctcgcagtcaggaggagcagggccagccgttcctgccagaagccagggcatgacccctggggtgcgcgtctccacagacccggagcaagtgacgtttgaggacgtggtagtgggcttcagccaggaggagtgggggcagctgaagcctgcccagaggaccctgtaccgtgatgtaatgctggacaccttcaggcttctggtctctgtgggacattggttaccgaagccgaatgtcatctccctgctggagcaagaggcagagctgtgggcggtggagtctagacttccccaaggcgtgtacccagacttggaaactagacccaaagtcaaactgtcagttctaaagcaaggcatctctgaagaaatatccaacagtgtcatcttggtagaaagattcctgtgggatggtctgtggtactgcaggggtgaggacactgagggccactgggaatggagttgtgagagtctagagagcctggcagtgccggtggccttcacgcctgtgaagacgcctgttctggagcagtggcagaggaatgggtttggggaaaacataagtctgaaccctgatctcccacatcaaccaatgactcctgaaagacaaagcccccacacatggggaacacgtggaaaaagggagaagccagacctaaatgttttacagaaaacctgtgtaaaagagaaaccctacaaatgtcaggaatgcggaaaggcctttagtcacagctcagcacttatcgaacaccaccggacgcacacaggagagagaccttacgaatgtcacgaatgcttaaaaggcttccggaacagctcggcacttaccaaacaccagagaatccatactggggagaaaccctataaatgcactcagtgtgggaggaccttcaaccaaattgccccactgatccagcaccagagaactcacacaggtgagaagccctatgaatgcagcgaatgtgggaaatccttcagttttaggtcctccttcagccagcacgagcgaactcacacaggcgagaagccctacgagtgcagtgagtgtgggaaagccttccggcaaagcatccacctcacccagcatctgcgaatccacactggggagaaaccctatcagtgtggtgagtgtggcaaggccttcagccacagctcatccttgaccaaacaccagcgaatccacacaggggagaagccctacgagtgccatgagtgtggaaaagccttcacccagatcacaccactgattcagcaccagaggacccacacaggagaaaagccctatgagtgtggtgagtgtgggaaagccttcagtcagagcacactcctgaccgagcatcggaggattcacacaggagagaagccctatggatgcaacgagtgtgggaaaaccttcagccacagctcctcactcagccagcatgagcggacacacacaggagagaagccctatgagtgcagtcagtgtgggaaggccttccggcagagcacacacctcacccaacaccagcgaatccacacaggggagaagccctatgaatgcaatgactgcggcaaggcattcagtcacagctcgtccctcaccaaacatcagcgaatccacactggggagaagccctacgaatgcaaccagtgtggcagagccttcagccagcttgctcccctcattcagcatcagaggatccacacaggagagaaaccctatgaatgtaaccagtgtggcagagccttcagccagagctcccttctcatcgaacaccagaggattcacaccaaggaaaagccgtatgggtgcaatgagtgtgggaaatccttcagccacagctcctcgctcagccagcacgaaaggacgcacactggggaaaagccctatgagtgtcacgattgcggaaagtcctttaggcagagcacccacctcactcagcaccggaggatccacacaggagagaagccatatgcatgcagggactgtggaaaggcctttacccacagctcctcccttaccaagcaccagagaactcacactggataaacccactccacatgtgctggggacataggaagaccttaagccatagctcatccctttctagatttgacccaatcatacacatgagaaacgtacattcatacacaagccttttcacacagcactcccctcagacaccctcagagagttcacactgatgggaaatgaccatgggaccaccaagctctaggtcatccatctctgcatccaaatagtagggaaacgtggagataatcaacactcaggaccttcagccttgaacgcccattagtgctatgttatagaacctacaaaaaagaaatggaacaaatgtagtggatccagggaacgcttttgtccaaggattcaccgtattccaaaccagagatgttcaaattggtgagaaacccaacaaatgcctttcatatatacgagaaccaaatgaagtcagaatttgccattattgcacatcacatttttgggggggaaagtgcttatgaatggtgcaggttgactctgatattcattcccaaatgacagtatggcagagtgttccagaaatgagagtggcatctttatggaatcactgtggatactgactgtctcagtaaacagctgtcttgtctgtgtgtatattgtttgatcagggtacatggcagccagtcacagattggaattacatatgacaaagtatcagtgtactataaacaggtttttagttatccctgcattatttttgcaattaatctttatatgcaatgagattgaaaagctttgtatgggaagactcaaaatgtaaagctgcttccgtagagtctcactgattctgagatggcttttgctgctctgttctccctctacatttctctgcagaactcgcgttagaaacacagatatttgttttacaaaaagggagatttttcctttgttaaaccatcgtcttataagcaatagcaaattcatgttagaaa

SEQ ID NO: 201500 - DNA, 2120 bp, Homo sapiens
  Payload ID: 19764
  Gene Name: zinc finger protein 135
  Uniprot ID: P52742
  ENST ID: ENST00000359978
  CDS Start-End: 4-1176
gaaatggagttaggctcgcgccggcgcagtgtcggctgccggtgccgcggcctttgtctcgcagtcaggagggagcaagtgacgtttgaggacgtggtagtgggcttcagccaggaggagtgggggcagctgaagcctgcccagaggaccctgtaccgtgatgtaatgctggacaccttcaggcttctggtctctgtgggacattggttaccgaagccgaatgtcatctccctgctggagcaagaggcagagctgtgggcggtggagtctagacttccccaaggcgtgtacccagacttggaaactagacccaaagtcaaactgtcagttctaaagcaaggcatctctgaagaaatatccaacagtgtcatcttggtagaaagattcctgtgggatggtctgtggtactgcaggggtgaggacactgagggccactgggaatggagttgtgagagtctagagagcctggcagtgccggtggccttcacgcctgtgaagacgcctgttctggagcagtggcagaggaatgggtttggggaaaacataagtctgaaccctgatctcccacatcaaccaatgactcctgaaagacaaagcccccacacatggggaacacgtggaaaaagggagaagccagacctaaatgttttacagaaaacctgtgtaaaagagaaaccctacaaatgtcaggaatgcggaaaggcctttagtcacagctcagcacttatcgaacaccaccggacgcacacaggagagagaccttacgaatgtcacgaatgcttaaaaggcttccggaacagctcggcacttaccaaacaccagagaatccatactggggagaaaccctataaatgcactcagtgtgggaggaccttcaaccaaattgccccactgatccagcaccagagaactcacacaggtgagaagccctatgaatgcagcgaatgtgggaaatccttcagttttaggtcctccttcagccagcacgagcgaactcacacaggcgagaagccctacgagtgcagtgagtgtgggaaagccttccggcaaagcatccacctcacccagcatctgcgaatccacactggggagaaaccctatcagtgtggtgagtgtggcaaggcctttacccacagctcctcccttaccaagcaccagagaactcacactggataaacccactccacatgtgctggggacataggaagaccttaagccatagctcatccctttctagatttgacccaatcatacacatgagaaacgtacattcatacacaagccttttcacacagcactcccctcagacaccctcagagagttcacactgatgggaaatgaccatgggaccaccaagctctaggtcatccatctctgcatccaaatagtagggaaacgtggagataatcaacactcaggaccttcagccttgaacgcccattagtgctatgttatagaacctacaaaaaagaaatggaacaaatgtagtggatccagggaacgcttttgtccaaggattcaccgtattccaaaccagagatgttcaaattggtgagaaacccaacaaatgcctttcatatatacgagaaccaaatgaagtcagaatttgccattattgcacatcacatttttgggggggaaagtgcttatgaatggtgcaggttgactctgatattcattcccaaatgacagtatggcagagtgttccagaaatgagagtggcatctttatggaatcactgtggatactgactgtctcagtaaacagctgtcttgtctgtgtgtatattgtttgatcagggtacatggcagccagtcacagattggaattacatatgacaaagtatcagtgtactataaacaggtttttagttatccctgcattatttttgcaattaatctttatatgcaatgagattgaaaagctttgtatgggaagactcaaaatgtaaagctgcttccgtagagtctcactgattctgagatggcttttgctgctctgttctccctctacatttctctgcagaactcgcgttagaaacacagatatttgttttacaaaaagggagatttttcctttgttaaaccatcgtcttataagcaatagcaaattcatgttag

SEQ ID NO: 201501 - DNA, 2253 bp, Homo sapiens
  Payload ID: 19764
  Gene Name: zinc finger protein 135
  Uniprot ID: P52742
  ENST ID: ENST00000511556
  CDS Start-End: 72-2084
gtcggctgccggtgccgcggcctttgtctcgcagtcaggaggggccagccgttcctgccagaagccagggcatgacccctggggtgcgcgtctccacagacccggagcaagtgacgtttgaggacgtggtagtgggcttcagccaggaggagtgggggcagctgaagcctgcccagaggaccctgtaccgtgatgtaatgctggacaccttcaggcttctggtctctgtgggacattggttaccgaagccgaatgtcatctccctgctggagcaagaggcagagctgtgggcggtggagtctagacttccccaaggcgtgtacccagagattaagggacatttccagtttttgcttctttcagacttggaaactagacccaaagtcaaactgtcagttctaaagcaaggcatctctgaagaaatatccaacagtgtcatcttggtagaaagattcctgtgggatggtctgtggtactgcaggggtgaggacactgagggccactgggaatggagttgtgagagtctagagagcctggcagtgccggtggccttcacgcctgtgaagacgcctgttctggagcagtggcagaggaatgggtttggggaaaacataagtctgaaccctgatctcccacatcaaccaatgactcctgaaagacaaagcccccacacatggggaacacgtggaaaaagggagaagccagacctaaatgttttacagaaaacctgtgtaaaagagaaaccctacaaatgtcaggaatgcggaaaggcctttagtcacagctcagcacttatcgaacaccaccggacgcacacaggagagagaccttacgaatgtcacgaatgcttaaaaggcttccggaacagctcggcacttaccaaacaccagagaatccatactggggagaaaccctataaatgcactcagtgtgggaggaccttcaaccaaattgccccactgatccagcaccagagaactcacacaggtgagaagccctatgaatgcagcgaatgtgggaaatccttcagttttaggtcctccttcagccagcacgagcgaactcacacaggcgagaagccctacgagtgcagtgagtgtgggaaagccttccggcaaagcatccacctcacccagcatctgcgaatccacactggggagaaaccctatcagtgtggtgagtgtggcaaggccttcagccacagctcatccttgaccaaacaccagcgaatccacacaggggagaagccctacgagtgccatgagtgtggaaaagccttcacccagatcacaccactgattcagcaccagaggacccacacaggagaaaagccctatgagtgtggtgagtgtgggaaagccttcagtcagagcacactcctgaccgagcatcggaggattcacacaggagagaagccctatggatgcaacgagtgtgggaaaaccttcagccacagctcctcactcagccagcatgagcggacacacacaggagagaagccctatgagtgcagtcagtgtgggaaggccttccggcagagcacacacctcacccaacaccagcgaatccacacaggggagaagccctatgaatgcaatgactgcggcaaggcattcagtcacagctcgtccctcaccaaacatcagcgaatccacactggggagaagccctacgaatgcaaccagtgtggcagagccttcagccagcttgctcccctcattcagcatcagaggatccacacaggagagaaaccctatgaatgtaaccagtgtggcagagccttcagccagagctcccttctcatcgaacaccagaggattcacaccaaggaaaagccgtatgggtgcaatgagtgtgggaaatccttcagccacagctcctcgctcagccagcacgaaaggacgcacactggggaaaagccctatgagtgtcacgattgcggaaagtcctttaggcagagcacccacctcactcagcaccggaggatccacacaggagagaagccatatgcatgcagggactgtggaaaggcctttacccacagctcctcccttaccaagcaccagagaactcacactggataaacccactccacatgtgctggggacataggaagaccttaagccatagctcatccctttctagatttgacccaatcatacacatgagaaacgtacattcatacacaagccttttcacacagcactcccctcagacaccctcagagagttcacactgatgggaaatgaccat

SEQ ID NO: 201502 - DNA, 3349 bp, Homo sapiens
  Payload ID: 19764
  Gene Name: zinc finger protein 135
  ENST ID: ENST00000506786
  CDS Start-End: 555-2405
gtgccgcggcctttgtctcgcagtcaggaggagcagggccagccgttcctgccagaagccagggcatgacccctggggtgcgcgtctccacagacccggtgagaatctcggcctccttgcgcgtgtcctccacctcgtgcccggcctcctcgcgcgcggccttctcacgcccggcctcctctttgcaccccgtccctactcgcgctcagcctcctccttgtgcccggcccctacttgcgtgcccggcccctactcgtgcccggcctctactcgcacaactggcctctactcgcgcacctggcctctactggtgcccggcctctactcgtgcccggcctctatttgcacatctagcctctactcgtgtccggcctctacctgcacacccggcctcctaaagtccgcgccaagctccccaaccacagcctgcctctgaaaggaccgcccacgccgcgctggaggagcaagtgacgtttgaggacgtggtagtgggcttcagccaggaggagtgggggcagctgaagcctgcccagaggaccctgtaccgtgatgtaatgctggacaccttcaggcttctggtctctgtgggacattggttaccgaagccgaatgtcatctccctgctggagcaagaggcagagctgtgggcggtggagtctagacttccccaaggcgtgtacccagacttggaaactagacccaaagtcaaactgtcagttctaaagcaaggcatctctgaagaaatatccaacagtgtcatcttggtagaaagattcctgtgggatggtctgtggtactgcaggggtgaggacactgagggccactgggaatggagttgtgagagtctagagagcctggcagtgccggtggccttcacgcctgtgaagacgcctgttctggagcagtggcagaggaatgggtttggggaaaacataagtctgaaccctgatctcccacatcaaccaatgactcctgaaagacaaagcccccacacatggggaacacgtggaaaaagggagaagccagacctaaatgttttacagaaaacctgtgtaaaagagaaaccctacaaatgtcaggaatgcggaaaggcctttagtcacagctcagcacttatcgaacaccaccggacgcacacaggagagagaccttacgaatgtcacgaatgcttaaaaggcttccggaacagctcggcacttaccaaacaccagagaatccatactggggagaaaccctataaatgcactcagtgtgggaggaccttcaaccaaattgccccactgatccagcaccagagaactcacacaggtgagaagccctatgaatgcagcgaatgtgggaaatccttcagttttaggtcctccttcagccagcacgagcgaactcacacaggcgagaagccctacgagtgcagtgagtgtgggaaagccttccggcaaagcatccacctcacccagcatctgcgaatccacactggggagaaaccctatcagtgtggtgagtgtggcaaggccttcagccacagctcatccttgaccaaacaccagcgaatccacacaggggagaagccctacgagtgccatgagtgtggaaaagccttcacccagatcacaccactgattcagcaccagaggacccacacaggagaaaagccctatgagtgtggtgagtgtgggaaagccttcagtcagagcacactcctgaccgagcatcggaggattcacacaggagagaagccctatggatgcaacgagtgtgggaaaaccttcagccacagctcctcactcagccagcatgagcggacacacacaggagagaagccctatgagtgcagtcagtgtgggaaggccttccggcagagcacacacctcacccaacaccagcgaatccacacaggggagaagccctatgaatgcaatgactgcggcaaggcattcagtcacagctcgtccctcaccaaacatcagcgaatccacactggggagaagccctacgaatgcaaccagtgtggcagagccttcagccagcttgctcccctcattcagcatcagaggatccacacaggagagaaaccctatgaatgtaaccagtgtggcagagccttcagccagagctcccttctcatcgaacaccagaggattcacaccaaggaaaagccgtatgggtgcaatgagtgtgggaaatccttcagccacagctcctcgctcagccagcacgaaaggacgcacactggggaaaagccctatgagtgtcacgattgcggaaagtcctttaggcagagcacccacctcactcagcaccggaggatccacacaggagagaagccatatgcatgcagggactgtggaaaggcctttacccacagctcctcccttaccaagcaccagagaactcacactggataaacccactccacatgtgctggggacataggaagaccttaagccatagctcatccctttctagatttgacccaatcatacacatgagaaacgtacattcatacacaagccttttcacacagcactcccctcagacaccctcagagagttcacactgatgggaaatgaccatgggaccaccaagctctaggtcatccatctctgcatccaaatagtagggaaacgtggagataatcaacactcaggaccttcagccttgaacgcccattagtgctatgttatagaacctacaaaaaagaaatggaacaaatgtagtggatccagggaacgcttttgtccaaggattcaccgtattccaaaccagagatgttcaaattggtgagaaacccaacaaatgcctttcatatatacgagaaccaaatgaagtcagaatttgccattattgcacatcacatttttgggggggaaagtgcttatgaatggtgcaggttgactctgatattcattcccaaatgacagtatggcagagtgttccagaaatgagagtggcatctttatggaatcactgtggatactgactgtctcagtaaacagctgtcttgtctgtgtgtatattgtttgatcagggtacatggcagccagtcacagattggaattacatatgacaaagtatcagtgtactataaacaggtttttagttatccctgcattatttttgcaattaatctttatatgcaatgagattgaaaagctttgtatgggaagactcaaaatgtaaagctgcttccgtagagtctcactgattctgagatggcttttgctgctctgttctccctctacatttctctgcagaactcgcgttagaaacacagatatttgttttacaaaaagggagatttttcctttgttaaaccatcgtcttataagcaatagcaaattcatgttag

SEQ ID NO: 201503 - DNA, 3346 bp, Homo sapiens
  Payload ID: 19764
  Gene Name: zinc finger protein 135
  Uniprot ID: P52742
  ENST ID: ENST00000401053
  CDS Start-End: 4-2052
gaaatggagttaggctcgcgccggcgcagtgtcggctgccggtgccgcggcctttgtctcgcagtcaggagggagcaagtgacgtttgaggacgtggtagtgggcttcagccaggaggagtgggggcagctgaagcctgcccagaggaccctgtaccgtgatgtaatgctggacaccttcaggcttctggtctctgtgggacattggttaccgaagccgaatgtcatctccctgctggagcaagaggcagagctgtgggcggtggagtctagacttccccaaggcgtgtacccagagattaagggacatttccagtttttgcttctttcagacttggaaactagacccaaagtcaaactgtcagttctaaagcaaggcatctctgaagaaatatccaacagtgtcatcttggtagaaagattcctgtgggatggtctgtggtactgcaggggtgaggacactgagggccactgggaatggagttgtgagagtctagagagcctggcagtgccggtggccttcacgcctgtgaagacgcctgttctggagcagtggcagaggaatgggtttggggaaaacataagtctgaaccctgatctcccacatcaaccaatgactcctgaaagacaaagcccccacacatggggaacacgtggaaaaagggagaagccagacctaaatgttttacagaaaacctgtgtaaaagagaaaccctacaaatgtcaggaatgcggaaaggcctttagtcacagctcagcacttatcgaacaccaccggacgcacacaggagagagaccttacgaatgtcacgaatgcttaaaaggcttccggaacagctcggcacttaccaaacaccagagaatccatactggggagaaaccctataaatgcactcagtgtgggaggaccttcaaccaaattgccccactgatccagcaccagagaactcacacaggtgagaagccctatgaatgcagcgaatgtgggaaatccttcagttttaggtcctccttcagccagcacgagcgaactcacacaggcgagaagccctacgagtgcagtgagtgtgggaaagccttccggcaaagcatccacctcacccagcatctgcgaatccacactggggagaaaccctatcagtgtggtgagtgtggcaaggccttcagccacagctcatccttgaccaaacaccagcgaatccacacaggggagaagccctacgagtgccatgagtgtggaaaagccttcacccagatcacaccactgattcagcaccagaggacccacacaggagaaaagccctatgagtgtggtgagtgtgggaaagccttcagtcagagcacactcctgaccgagcatcggaggattcacacaggagagaagccctatggatgcaacgagtgtgggaaaaccttcagccacagctcctcactcagccagcatgagcggacacacacaggagagaagccctatgagtgcagtcagtgtgggaaggccttccggcagagcacacacctcacccaacaccagcgaatccacacaggggagaagccctatgaatgcaatgactgcggcaaggcattcagtcacagctcgtccctcaccaaacatcagcgaatccacactggggagaagccctacgaatgcaaccagtgtggcagagccttcagccagcttgctcccctcattcagcatcagaggatccacacaggagagaaaccctatgaatgtaaccagtgtggcagagccttcagccagagctcccttctcatcgaacaccagaggattcacaccaaggaaaagccgtatgggtgcaatgagtgtgggaaatccttcagccacagctcctcgctcagccagcacgaaaggacgcacactggggaaaagccctatgagtgtcacgattgcggaaagtcctttaggcagagcacccacctcactcagcaccggaggatccacacaggagagaagccatatgcatgcagggactgtggaaaggcctttacccacagctcctcccttaccaagcaccagagaactcacactggataaacccactccacatgtgctggggacataggaagaccttaagccatagctcatccctttctagatttgacccaatcatacacatgagaaacgtacattcatacacaagccttttcacacagcactcccctcagacaccctcagagagttcacactgatgggaaatgaccatgggaccaccaagctctaggtcatccatctctgcatccaaatagtagggaaacgtggagataatcaacactcaggaccttcagccttgaacgcccattagtgctatgttatagaacctacaaaaaagaaatggaacaaatgtagtggatccagggaacgcttttgtccaaggattcaccgtattccaaaccagagatgttcaaattggtgagaaacccaacaaatgcctttcatatatacgagaaccaaatgaagtcagaatttgccattattgcacatcacatttttgggggggaaagtgcttatgaatggtgcaggttgactctgatattcattcccaaatgacagtatggcagagtgttccagaaatgagagtggcatctttatggaatcactgtggatactgactgtctcagtaaacagctgtcttgtctgtgtgtatattgtttgatcagggtacatggcagccagtcacagattggaattacatatgacaaagtatcagtgtactataaacaggtttttagttatccctgcattatttttgcaattaatctttatatgcaatgagattgaaaagctttgtatgggaagactcaaaatgtaaagctgcttccgtagagtctcactgattctgagatggcttttgctgctctgttctccctctacatttctctgcagaactcgcgttagaaacacagatatttgttttacaaaaagggagatttttcctttgttaaaccatcgtcttataagcaatagcaaattcatgttagaaacttctgttttgcaagattcatcttttttgggatatgttcaagttaatcctctcaaactgctttttcattgttttcatacaatttaacattttgttaaaccctaagtccacaaatagcagtctttctgacaactataacctttaaatggtgacttgctgccctcattagaaattgcattggctggccaggcgcggtgacttatgcctgtaatcccagcactttgggaggccaaggtgggaggatcacctgaggtcgggagatggaggttgcagtgagctgagatcgtaccattgcactccagcctgggcaacaagagtgaaactctgtctcagaaaaaaaaaaaaaaa

SEQ ID NO: 201504 - DNA, 2836 bp, Homo sapiens
  Payload ID: 19764
  Gene Name: zinc finger protein 135
  ENST ID: ENST00000515535
  CDS Start-End: 270-491
agcagatatgtgtccgcacccgccaggccttcagcttccctcagacaggcgggaaaaccctaggctgcccttctccgagcggagggccgccccacacacagcaggcgcttaaacgggtacgcggggccctggacggctctccgcggagctccccaggctctggcgcagttccccggcttggggacctgagcaccgcctctgcctgccccagctgctcacctcccctttcccacagagcagggccagccgttcctgccagaagccagggcatgacccctggggtgcgcgtctccacagacccggagcaagtgacgtttgaggacgtggtagtgggcttcagccaggaggagtgggggcagctgaagcctgcccagaggaccctgtaccgtgatgtaatgctggacaccttcaggcttctggtctctgtggggtcttgctctgtcacccaggctggagtgcagtggctcaatctcagctcactgcaaccttgacctcccagtttcaagccatcctcccacctcagcctcccaagtagctgggactacgggtgtgcaccaccgtgcccagcttcagcctcacaagtgctgagattacaggtgtaagcctctgcatctggcccagttagccatacagtggaaaaactgcactctaaccaggtgagcaaagagaacatcactgacaggaggaatgtggacaccgtgcaccctggatgggatgggggaaggcgcacacatgcaggccacagattagaagtgaagttgacatcacgccaagtacgaaaaggctaaacagctgacaaaatttccacttgagcaaccctggggagcgcaaacaggaggaatcggggcaagggtgacttgaagaaagcactggcagatcacgcactttaaggcaactctacactgcacaatgtcaaataacctagcatggggcggcactaaatggctgcaggaaagccgagtcttcttccacatccggcggctcccctcggatgcgagcgctggcccagggtgtgtttacagaggtgagggcttcccgtggacccttctcgttgggagcgcttagcctcaggagcggattcagggcacaggcagaggacgtccacaaacaccacaggaagccgccacccaggggcgtggaaaggcccaatgcctcgtctgggattcacggccggcaaagcggcccctccggaacgggacagcacagcggctcacctctgcgcctctgggggtgcggggggagcctcgccctccacgctctctgggggaccgcccgccctagcccccgcctgggcttcgcgggtggacggttgggggccccgggcgccccccagcgcgtagcttttctccttctcgtgggtcttctggtgctcggctagggccaggctgaagtggaaggtcttccagcagccctgacaggcgtagcgcttccggccgccatggctgctgtggtgctccatcaggtgcgagagccacgcgaaggcctccccgcactcgccgcaggcatagggcttcccgcgggacaagcccggctcgtcagccccagggccctgcccggcctccagccctgcgctgtcgccggagctagagacgccctcgaggctctgcccgtccccatcctcggggtgcggcctcttggttcccagtttcgccgtgcccctgtccggggcaggctgctggatgacggactgcctctgcgatccggtggcagagtcggactccgcgtcctgggggtcctgcgggtccggggccttcccaggctgctcttcctcctcctcagtggtgcccgacgggggatcggcaagggcgtccccagggggcgcctccgtaggcagctcaggcagcacccccgcgggggcggcctcctcgcaggcgcacccagcgctctcctgccgcctcccgccttctggaacaaggtcagagccctagcgtgagcgccccgcccagggccagggagaggaggacccagccgagcctcagctgccggaacagcgcacagggctccgggctctggatccccgcggggctcacggctgtttggaagcagcgctgtccctcccaggcagccctgcagcgcatgccccgcgcctgctgctgcagatgtgggacctggaggcctccaacaacggaggccaccgacaggacaggaaggacagccccactgagcccgggttctggaaaccgcgcctttggaggtctccacctggccactagcttggccacaagatgcacgatgcaaggagagcctgctcagagcgcaccctcctggagggaggggcccggctgccagcgaagagagtggggtcaatagctaaggccaaaccccccagcgacaagccccctggcgacaggcacccagggccctccagcccaagtccgcctctaggtgttcttgttggtgtgctggcacagagcctccaatggggcagaacggccacccccgggaccagtcatacacagatcctggcaactaacaccactgccgtttccaccgaccaagtcttggggtggtctgtcatgcagcaagagaccatggacgtaactggattcctgcctcactcagacacggtggtgggagaatggtgaagcagtcaatgctgaggtctttgctggggctgatggcgctgggaggggccccctcagcctctgaagaaaaagcaaaccccacccggccctaacaccaattcaacccaacctcacctgggaggctgcttccttgtggatctctttccaccaaccggagttcctcagtgtccagcctggaggcagcgtcaggctgggaaagctgataccctgagtggggttaaaaaccaaagaaataaaaggcatcaacacag

SEQ ID NO: 201505 - DNA, 3643 bp, Homo sapiens
  Payload ID: 19765
  Gene Name: zinc finger protein 136
  Uniprot ID: P52737
  ENST ID: ENST00000343979
  CDS Start-End: 141-1763
tttctcgcgtctgccgtacttggtttcgcttcgctagtcccagaggcccagagtggctcgcctggagtctctgtggcgcggtttcctgtacctgccttgggatccggagggaggaagctgggacacccgggagtcaggaaatggactcggtggcttttgaggatgtagatgtgaacttcacccaggaggagtgggctttgctagatccttcccagaagaatctctacagagatgtgatgtgggaaaccatgaggaatctggcctctatagggaaaaaatggaaggaccagaacattaaagatcactacaaacaccgagggagaaatctaagaagtcatatgttagaaagactctatcaaactaaggatggtagtcagcgtggaggaatttttagccagtttgcaaatcagaatctgagcaagaaaatccctggagtgaaactctgtgaaagcattgtatatggagaagtcagcatgggtcagtcatcccttaatagacacatcaaagatcacagtggacatgaaccaaaggaatatcaggaatatggagagaagccagatacacgtaaccagtgttggaaacccttcagttctcaccactcctttcgaacacatgagataattcacactggagagaaactctatgattgtaaggaatgtggaaaaaccttcttttctctcaaaagaattagaagacacatcatcacacacagtggatatacaccatataaatgtaaggtgtgtgggaaagcttttgattatcccagtagatttcgaacacatgaaagaagtcacactggagagaaaccctatgaatgtcaggaatgtggaaaagccttcacttgtatcacaagtgttcgaagacacatgataaagcacactggagatggaccttataaatgtaaggtatgtgggaaaccctttcattctctgagttcatttcaagtgcatgaaagaattcacactggagaaaaaccctttaaatgtaagcaatgtggtaaagccttcagttgttccccaaccttacgaatacatgaaagaacccatactggagagaaaccttatgaatgcaagcagtgtgggaaggccttcagttatctcccctcccttcgactacatgaaagaattcacactggtgagaaacccttcgtatgtaaacaatgtggtaaagcctttagatctgccagtacctttcaaatacatgaaaggactcacactggagaaaaaccttatgaatgtaaggaatgtggggaagcattcagttgtatcccaagtatgcgaagacacatgataaaacatactggagaaggaccttataaatgtaaggtatgtgggaaaccctttcattctctgagtccatttcgaatacatgaaagaactcacactggagagaaaccttatgtatgtaaacattgtggtaaagctttcgtttcttcaacatcaattcgaatacatgaaagaactcatactggagagaaaccctatgagtgtaagcaatgtgggaaagccttcagttatctcaactcctttcgaacacatgaaatgattcacactggtgagaaaccctttgaatgtaagcgatgtggtaaagcctttagatcttctagttcctttcgactacatgaaaggactcacactggacagaaaccctatcattgcaaggaatgtgggaaagcctattcttgccgtgccagctttcagagacacatgttaacacatgctgaagatggaccaccttataaatgcatgtgggaaagcctttaatgctctgggttcatgtcagatacattaaaatactcactgaagagaagccctatgaatgtaagtaacgtgggaaagcatgaaattctgtcagtgccttttttaatacatgaaagaattctagagagaagccatatacatgtaagtaacatgggaaagctttcaatcattttagttcctttcaaatacatgaaagaactcatcatggagaaaaccaaacaaatgctttttggaaaggaacccatatttgagagaaaccctgggtaaagggtgtaggaaaggttttgtcatcacacaaccctgtcacacatgaatgtgtagtggagagaaccttggtaaatgtaaagagtgtgggagagcctttagtcattttagttccacttgaagccatgaaagaacacacaaaagagaaagctcttgaatataagcaatgtccacacgtttttagccagcccacatgctttcaacaacatgtaagaatgtaccctggatcaaaacactataaatgtgaaaactacaaggaaggttttccattatacttttaaagtcatttgagggctctggctctgtggctttgtgggttaaagtacttgtctggcaaacaggagatgctggatttcaatcccagcagggcctcactagttgaggtattgaatttgaacagatgttttggctctggctgggtgtggtggctcacacctgtaatcccagcactttgggaggctgaggcaggaggatcacttgaggtcaggagtttgagaccagtgtgcaaaacatagcaagacctcatctcagaaaaaaaaaaaaagtcatttgaaaacttctaatacagcaaaatcctataaatgtaagtacttcaaaaagcctcatgcatagcgggtcatgtagtctctagaaaatacataacctgatggaaatgtagaagctatatgtatattttgttaattagtggctcatatttaaaatagttctctgactatggatttcaaatgcttaatctcacaaagaaatgttaaattgatataatcctgtaagtaatctgaaagcaatagtgcatgaatttcataggtagtgttgttttaggtcagtaaataaaatatttgtctttccattttgaaatgtgtttaatccaacaatgaatttaaatgtgtttctcatattcaggtatgttaaattgtatatggttgcttaattgttctgtgattgaggaccactgaaaaataagtcttaataaatgttggtatgaacctacttgcttcatttagcaggttcttgattccctttccacattatatacattccatcatatttattggaacagctccttttttttccttttttcttttttctttcttcttttttctttttgagacagggtctcgctctgtgctctgttgcccaagctggagtacagtggcatgatctcggctcattgcaacctctgccttctgggttcaagtgattctcccaccttagcctcctaggaagctgggactacaggcatgtgccaccacacctggctaattttttgtatttctagtagagatggggtttcaccatgttggccaggctggtagaactcctgacctcaagtgatccacccacctcagcctcctaaagtctgggattacacgtgtgagccatcacacctagcccattttttttttcttggctcaaataattttattttgcttcctattaaagagttgttgttaattctaagtatgtaaagtttatcacagactgtagtctcgtgaattattattttaacctgttgttctttactccttgttatttattctggctgctctttgtataattgattttgggataaggagacagctatgatagaataataaaatctaaaatgggagatgcctttc

SEQ ID NO: 201506 - DNA, 478 bp, Homo sapiens
  Payload ID: 19765
  Gene Name: zinc finger protein 136
  ENST ID: ENST00000439995
  CDS Start-End: 212-478
tttctcgcgtctgccgtacttggtttcgcttcgctagtcccagaggcccagagtggctcgcctggagtctctgtggcgcggtttcctgtacctgccttgggatccggagggaggaagctgggacacccgggagtcaggaaatgggaaaaaatggaaggaccagaacattaaagatcactacaaacaccgagggagaaatctaagaagtcatatgttagaaagactctatcaaactaaggatggtagtcagcgtggaggaatttttagccagtttgcaaatcagaatctgagcaagaaaatccctggagtgaaactctgtgaaagcattgtatatggagaagtcagcatgggtcagtcatcccttaatagacacatcaaagatcacagtggacatgaaccaaaggaatatcaggaatatggagagaagccagatacacgtaaccagtgttggaaacccttcagttctcaccactccttt

SEQ ID NO: 201507 - DNA, 565 bp, Homo sapiens
  Payload ID: 19765
  Gene Name: zinc finger protein 136
  ENST ID: ENST00000418338
  CDS Start-End: 488-565
gtggctcgcctggagtctctgtggcgcggtttcctgtacctgccttgggatccggagggaggaagctgggacacccgggagtcaggaaatgatattgtgctttcattgtttatttttcaacaaagcaatggattactctttcatcaagagacggagtttcaccttgttagccaggatggtcttgatctcctgacctcgcgatccgcctgccttggcctcccagagtgctgggattacaggcgtaactgtacccggcctcaaaaaaataattttcgtctgataaatgtgggtccttttaaatgaacgggcacatagagacattcaagtgatacagcaatcaccttctaactccctgaagctatgaattcatcttttgaaactgctattgccacaagactcggtggcttttgaggatgtagatgtgaacttcacccaggaggagtgggctttgctagatccttcccagaagaatctctacagagatgtgatgtgggaaaccatgaggaatctggcctctatagggaaaaaatggaaggaccagaacattaaagatcactacaaacac

SEQ ID NO: 201508 - DNA, 474 bp, Homo sapiens
  Payload ID: 19765
  Gene Name: zinc finger protein 136
  ENST ID: ENST00000425827
  CDS Start-End: 347-474
tttctcgcgtctgccgtacttggtttcgcttcgctagtcccagaggcccagagtggctcgcctggagtctctgtggcgcggtttcctgtacctgccttgggatccggagggaggaagctgggacacccgggagtcaggaaatgaaaaaatgacatcacaggtcagaaccttacatcgacttggtgagtggttgctggtgagaattaagaccctggaggagggagcatttccacactgagaaggggacagtagggactcggtggcttttgaggatgtagatgtgaacttcacccaggaggagtgggctttgctagatccttcccagaagaatctctacagagatgtgatgtgggaaaccatgaggaatctggcctctatagggaaaaaatggaaggaccagaacattaaagatcactacaaacaccgagggagaaatctaagaagtcatatgttagaaagactctatcaaactaa

SEQ ID NO: 201509 - DNA, 1141 bp, Homo sapiens
  Payload ID: 19766
  Gene Name: zinc finger protein 138
  ENST ID: ENST00000307355
  CDS Start-End: 182-1141
ggagcggacatgacgtcttccgggaggcggcggggtctttgtctcgctgcagcgggtgctgcaggtctggccttcacttttctgcgtcctcttactcctagaggcccagcctctgtggcgctgtgatctggttattgggagattcacagctaagacgccaggatcccccggaagcctagaaatgggaccactgacatttatggatgtggccatagagttctctttggaggagtggcagtgcctggacactgcacagcggaatgtatataggcatgtgatgttagagaactacagaaacctggttttcttggacctgattacctgtctggaacaaggaaaagagccctggaatatgaagagacatgagatggtggtagccaaacattcagctctgtgttctcgttttgcccaagacctttggctagagcagaacataaaagattctttccaaaaagtgacactgagcagatatggaaaatatggacataagaatttacagttaagaaaaggctgtaaaagtgtggatgagtgtaagggacaccaaggaggttttaatggacttaaccaatgtttgaaaattaccacaagcaaaatatttcaatgtaataaatatgtaaaagtcatgcataaattttcaaattcaaatagacacaagataagacatactgaaaataaacatttcagatgtaaagaatgtgacaaatcactttgcatgctttcacgcctaactcaacataaaaaaattcatactagagagaatttctacaaatgtgaagagtgtggaaaaacctttaactggtccacaaacctttctaaacctaagaaaattcatactggagaaaaaccctacaaatgtgaagtatgtggaaaagcctttcaccaatcctcaatccttactaaacataagataattcgtactggagaaaaaccctataaatgtgcacactgtggcaaagcctttaaacagtcctcacaccttactagacataagataattcatactgaagagaaaccctacaaatgtgaacaatgtggcaaggtctttaagcagtccccaacccttactaaacatcagataatttatactggagaggaaccatacaaatgtgaggaatgtggcaaagcttttaacctatcttaa

SEQ ID NO: 201510 - DNA, 2679 bp, Homo sapiens
  Payload ID: 19766
  Gene Name: zinc finger protein 138
  ENST ID: ENST00000359735
  CDS Start-End: 182-484
ggagcggacatgacgtcttccgggaggcggcggggtctttgtctcgctgcagcgggtgctgcaggtctggccttcacttttctgcgtcctcttactcctagaggcccagcctctgtggcgctgtgatctggttattgggagattcacagctaagacgccaggatcccccggaagcctagaaatgggaccactgacatttatggatgtggccatagagttctctttggaggagtggcagtgcctggacactgcacagcggaatgtatataggcatgtgatgttagagaactacagaaacctggttttcttggctgtagcatttacctttgatctcagtggactcaacattttgtcattccaaagtatcctgccatttgtttcagcactttatgtcatgggaaacagaaaccagtgtctgcaaaagcacctagaagccagaaataaagatctctgtgttctcgttttgcccaagacctttggctagagcagaacataaaagattctttccaaaaagtgacactgagcagatatggaaaatatggacataagaatttacagttaagaaaaggctgtaaaagtgtggatgagtgtaagggacaccaaggaggttttaatggacttaaccaatgtttgaaaattaccacaagcaaaatatttcaatgtaataaatatgtaaaagtcatgcataaattttcaaattcaaatagacacaagataagacatactgaaaataaacatttcagatgtaaagaatgtgacaaatcactttgcatgctttcacgcctaactcaacataaaaaaattcatactagagagaatttctacaaatgtgaagagtgtggaaaaacctttaactggtccacaaacctttctaaacctaagaaaattcatactggagaaaaaccctacaaatgtgaagtatgtggaaaagcctttcaccaatcctcaatccttactaaacataagataattcgtactggagaaaaaccctataaatgtgcacactgtggcaaagcctttaaacagtcctcacaccttactagacataagataattcatactgaagagaaaccctacaaatgtgaacaatgtggcaaggtctttaagcagtccccaacccttactaaacatcagataatttatactggagaggaaccatacaaatgtgaggaatgtggcaaagcttttaacctatcttaacaacttactgaacataagaaaatttacactagagagaaagcctacaaatgtgaagaatgtggcaaagcctttaaccagttttcaacccttattacacataagataattcatagcggagagaaaccccacaaatgtgaagaatgtggcagagcttttaaccagtccgcaaagctcactgaacataagttaattcatactggagaaaaaccctacaaatgtaaagaatgtggaaaagcttttcaccgatactcaatccttagtacacataagaaaattcatactggggagaaaccccacaaatgtggagaatgcggaaaagcctttaactggtcctcaactcttattacacataagataattcacagtggagaaaaaccctacaaatgtgaagaatgtggcaaagcttttaaccagtcctcacaccttatgagacataagaaaattcatagtaaagagaaaccctacaaatgtgaacagtgtggcaaggtctttaagaagtcctcaactcttactgcacataagatcattcatactggagagaaaccttacaaatgtgaggaatgtggcaaaggttttagccaactctcaaaccttactaaacacaagaagattcatactagagagaaaccctacaaatgtgaagaatgtggcatatcttttaaccagttctcacaacttgctatacataagatgattcacacttgaatgaaaccctacaaatgtgaacgatgtggcagttgttttaactagttctcgaactttactatgcataagaaaattcaaactggagagaaactctacaaatgtgaagaatgtggcaaagcttttaaccaagtctcaacacttactatacataagataatttatactggagcaaaaccttggaaattcaaagaatgtggtaaaacttacaatcctcaaaacttcttacacctaaaattcatgcaggagagaaacaccacaaatgtgaaaaatttggtaaattctttaacaagtcttcaaccctttctgcacataatataattcatactggagagaaaccccacaaatatgaagaatgtggtaatgcttttaaccaattctcaaatcttactaaacaaaattaatactgaaaatgttacaaaccagaaaaatgtgaaaatgattttaacaaaaccttcaaatttttctaaacataaaggaaatcatactggtaagaaattataaaaatgtgaagaatgtgacaaagcctttaaatggttgtcacacttgattgtaggtaagataattcatactggcagaaactcccagaagtgtgaagaatatggcaaaactttaattcctataccttattgcacaggaaagcatttatacttcagaaaatgttgtactgatataaagaatgtagaaaagccattaatatgtgcttacatcttattcaacattagagagttagtacttaataaaagcattataaatgcaattactgtcaaaactcag

SEQ ID NO: 201511 - DNA, 2574 bp, Homo sapiens
  Payload ID: 19766
  Gene Name: zinc finger protein 138
  ENST ID: ENST00000437743
  CDS Start-End: 249-1112
gtctcgctgcagcgggtgctgcaggtctggccttcacttttctgcgtcctcttactcctagaggcccagcctctgtggcgctgtgatctggttattgggagattcacagctaagacgccaggatcccccggaagcctagaaatggccagaaaaactgggaaaatcacaggctcttccacttactggatatttaacaagatattcttcttgagccaaaaacattgacattagcgggaccactgacatttatggatgtggccatagagttctctttggaggagtggcagtgcctggacactgcacagcggaatgtatataggcatgtgatgttagagaactacagaaacctggttttcttggctctgtgttctcgttttgcccaagacctttggctagagcagaacataaaagattctttccaaaaagtgacactgagcagatatggaaaatatggacataagaatttacagttaagaaaaggctgtaaaagtgtggatgagtgtaagggacaccaaggaggttttaatggacttaaccaatgtttgaaaattaccacaagcaaaatatttcaatgtaataaatatgtaaaagtcatgcataaattttcaaattcaaatagacacaagataagacatactgaaaataaacatttcagatgtaaagaatgtgacaaatcactttgcatgctttcacgcctaactcaacataaaaaaattcatactagagagaatttctacaaatgtgaagagtgtggaaaaacctttaactggtccacaaacctttctaaacctaagaaaattcatactggagaaaaaccctacaaatgtgaagtatgtggaaaagcctttcaccaatcctcaatccttactaaacataagataattcgtactggagaaaaaccctataaatgtgcacactgtggcaaagcctttaaacagtcctcacaccttactagacataagataattcatactgaagagaaaccctacaaatgtgaacaatgtggcaaggtctttaagcagtccccaacccttactaaacatcagataatttatactggagaggaaccatacaaatgtgaggaatgtggcaaagcttttaacctatcttaacaacttactgaacataagaaaatttacactagagagaaagcctacaaatgtgaagaatgtggcaaagcctttaaccagttttcaacccttattacacataagataattcatagcggagagaaaccccacaaatgtgaagaatgtggcagagcttttaaccagtccgcaaagctcactgaacataagttaattcatactggagaaaaaccctacaaatgtaaagaatgtggaaaagcttttcaccgatactcaatccttagtacacataagaaaattcatactggggagaaaccccacaaatgtggagaatgcggaaaagcctttaactggtcctcaactcttattacacataagataattcacagtggagaaaaaccctacaaatgtgaagaatgtggcaaagcttttaaccagtcctcacaccttatgagacataagaaaattcatagtaaagagaaaccctacaaatgtgaacagtgtggcaaggtctttaagaagtcctcaactcttactgcacataagatcattcatactggagagaaaccttacaaatgtgaggaatgtggcaaaggttttagccaactctcaaaccttactaaacacaagaagattcatactagagagaaaccctacaaatgtgaagaatgtggcatatcttttaaccagttctcacaacttgctatacataagatgattcacacttgaatgaaaccctacaaatgtgaacgatgtggcagttgttttaactagttctcgaactttactatgcataagaaaattcaaactggagagaaactctacaaatgtgaagaatgtggcaaagcttttaaccaagtctcaacacttactatacataagataatttatactggagcaaaaccttggaaattcaaagaatgtggtaaaacttacaatcctcaaaacttcttacacctaaaattcatgcaggagagaaacaccacaaatgtgaaaaatttggtaaattctttaacaagtcttcaaccctttctgcacataatataattcatactggagagaaaccccacaaatatgaagaatgtggtaatgcttttaaccaattctcaaatcttactaaacaaaattaatactgaaaatgttacaaaccagaaaaatgtgaaaatgattttaacaaaaccttcaaatttttctaaacataaaggaaatcatactggtaagaaattataaaaatgtgaagaatgtgacaaagcctttaaatggttgtcacacttgattgtaggtaagataattcatactggcagaaactcccagaagtgtgaagaatatggcaaaactttaattcctataccttattgcacaggaaagcatttatacttcagaaaatgttgtactgatataaagaatgtagaaaagccattaatatgtgcttacatcttattcaacattagagagttagtacttaataaaagcattataaatgcaa

SEQ ID NO: 201512 - DNA, 1066 bp, Homo sapiens
  Payload ID: 19766
  Gene Name: zinc finger protein 138
  Uniprot ID: P52744
  ENST ID: ENST00000440155
  CDS Start-End: 145-1026
tttgtctcgctgcagcgggtgctgcaggtctggccttcacttttctgcgtcctcttactcctagaggcccagcctctgtggcgctgtgatctggttattgggagattcacagctaagacgccaggatcccccggaagcctagaaatgggaccactgacatttatggatgtggccatagagttctctttggaggagtggcagtgcctggacactgcacagcggaatgtatataggcatgtgatgttagagaactacagaaacctggttttcttggctctgtgttctcgttttgcccaagacctttggctagagcagaacataaaagattctttccaaaaagtgacactgagcagatatggaaaatatggacataagaatttacagttaagaaaaggctgtaaaagtgtggatgagtgtaagggacaccaaggaggttttaatggacttaaccaatgtttgaaaattaccacaagcaaaatatttcaatgtaataaatatgtaaaagtcatgcataaattttcaaattcaaatagacacaagataagacatactgaaaataaacatttcagatgtaaagaatgtgacaaatcactttgcatgctttcacgcctaactcaacataaaaaaattcatactagagagaatttctacaaatgtgaagagtgtggaaaaacctttaactggtccacaaacctttctaaacctaagaaaattcatactggagaaaaaccctacaaatgtgaagtatgtggaaaagcctttcaccaatcctcaatccttactaaacataagataattcgtactggagaaaaaccctataaatgtgcacactgtggcaaagcctttaaacagtcctcacaccttactagacataagataattcatactgaagagaaaccctacaaatgtgaacaatgtggcaaggtctttaagcagtccccaacccttactaaacatcagataatttatactggagaggaaccatacaaatgtgaggaatgtggcaaagcttttaacctatcttaacaacttactgaacataagaaaatttacactagagagaaag

SEQ ID NO: 201513 - DNA, 2230 bp, Homo sapiens
  Payload ID: 19766
  Gene Name: zinc finger protein 138
  ENST ID: ENST00000440598
  CDS Start-End: 142-330
gtctcgctgcagcgggtgctgcaggtctggccttcacttttctgcgtcctcttactcctagaggcccagcctctgtggcgctgtgatctggttattgggagattcacagctaagacgccaggatcccccggaagcctagaaatgggaccactgacatttatggatgtggccatagagttctctttggaggagtggcagtgcctggacactgcacagcggaatgtatataggcatgtgatgttagagaactacagaaacctggttttcttggccagacctgattacctgtctggaacaaggaaaagagccctggaatatgaagagacatgagatggtggtagccaaacattcagctctgtgttctcgttttgcccaagacctttggctagagcagaacataaaagattctttccaaaaagtgacactgagcagatatggaaaatatggacataagaatttacagttaagaaaaggctgtaaaagtgtggatgagtgtaagggacaccaaggaggttttaatggacttaaccaatgtttgaaaattaccacaagcaaaatatttcaatgtaataaatatgtaaaagtcatgcataaattttcaaattcaaatagacacaagataagacatactgaaaataaacatttcagatgtaaagaatgtgacaaatcactttgcatgctttcacgcctaactcaacataaaaaaattcatactagagagaatttctacaaatgtgaagagtgtggaaaaacctttaactggtccacaaacctttctaaacctaagaaaattcatactggagaaaaaccctacaaatgtgaagtatgtggaaaagcctttcaccaatcctcaatccttactaaacataagataattcgtactggagaaaaaccctataaatgtgcacactgtggcaaagcctttaaacagtcctcacaccttactagacataagataattcatactgaagagaaaccctacaaatgtgaacaatgtggcaaggtctttaagcagtccccaacccttactaaacatcagataatttatactggagaggaaccatacaaatgtgaggaatgtggcaaagcttttaacctatcttaacaacttactgaacataagaaaatttacactagagagaaagcctacaaatgtgaagaatgtggcaaagcctttaaccagttttcaacccttattacacataagataattcatagcggagagaaaccccacaaatgtgaagaatgtggcagagcttttaaccagtccgcaaagctcactgaacataagttaattcatactggagaaaaaccctacaaatgtaaagaatgtggaaaagcttttcaccgatactcaatccttagtacacataagaaaattcatactggggagaaaccccacaaatgtggagaatgcggaaaagcctttaactggtcctcaactcttattacacataagataattcacagtggagaaaaaccctacaaatgtgaagaatgtggcaaagcttttaaccagtcctcacaccttatgagacataagaaaattcatagtaaagagaaaccctacaaatgtgaacagtgtggcaaggtctttaagaagtcctcaactcttactgcacataagatcattcatactggagagaaaccttacaaatgtgaggaatgtggcaaaggttttagccaactctcaaaccttactaaacacaagaagattcatactagagagaaaccctacaaatgtgaagaatgtggcatatcttttaaccagttctcacaacttgctatacataagatgattcacacttgaatgaaaccctacaaatgtgaacgatgtggcagttgttttaactagttctcgaactttactatgcataagaaaattcaaactggagagaaactctacaaatgtgaagaatgtggcaaagcttttaaccaagtctcaacacttactatacataagataatttatactggagcaaaaccttggaaattcaaagaatgtggtaaaacttacaatcctcaaaacttcttacacctaaaattcatgcaggagagaaacaccacaaatgtgaaaaatttggtaaattctttaacaagtcttcaaccctttctgcacataatataattcatactggagagaaaccccacaaatatgaagaatgtggtaatgcttttaaccaattctcaaatcttactaaacaaaattaatactgaaaatgttacaaac

SEQ ID NO: 201514 - DNA, 842 bp, Homo sapiens
  Payload ID: 19766
  Gene Name: zinc finger protein 138
  ENST ID: ENST00000494380
  CDS Start-End: 145-525
tttgtctcgctgcagcgggtgctgcaggtctggccttcacttttctgcgtcctcttactcctagaggcccagcctctgtggcgctgtgatctggttattgggagattcacagctaagacgccaggatcccccggaagcctagaaatgggaccactgacatttatggatgtggccatagagttctctttggaggagtggcagtgcctggacactgcacagcggaatgtatataggcatgtgatgttagagaactacagaaacctggttttcttggacctgattacctgtctggaacaaggaaaagagccctggaatatgaagagacatgagatggtggtagccaaacattcagctgtagcatttacctttgatctcagtggactcaacattttgtcattccaaagtatcctgccatttgtttcagcactttatgtcatgggaaacagaaaccagtgtctgcaaaagcacctagaagccagaaataaagatctctgtgttctcgttttgcccaagacctttggctagagcagaacataaaagattctttccaaaaagtgacactgagcagatatggaaaatatggacataagaatttacagttaagaaaaggctgtaaaagtgtggatgagtgtaagggacaccaaggaggttttaatggacttaaccaatgtttgaaaattaccacaagcaaaatatttcaatgtaataaatatgtaaaagtcatgcataaattttcaaattcaaatagacacaagataagacatactgaaaataaacatttcagatgtaaagaatgtgacaaatcactttgcatgctttcacgcctaactcaacataaaaaa

SEQ ID NO: 201515 - DNA, 2949 bp, Homo sapiens
  Payload ID: 19767
  Gene Name: zinc finger protein 14
  Uniprot ID: P17017
  ENST ID: ENST00000344099
  CDS Start-End: 140-2068
attcctggcccatgggaagattgcgtttcacctgctcctgaaggccgaaggtggctctagcgcatcctttgtcgcgccgtgacctgcaggtactgacagatccgtagggaggacaccgtgacttcccggacgctgggaaatggactcagtctcctttgaggatgtggccgtgaacttcaccctggaggagtgggctttgctggattcttcacagaaaaagctctatgaagatgtgatgcaggagaccttcaaaaacctggtttgtctaggaaaaaagtgggaagaccaggacattgaagatgaccacagaaaccaggggaaaaatcgaagatgtcatatggttgagagactctgtgaaagtagaagaggtagcaaatgtggagaaaccactagccagatgccaaatgttaatatcaacaaggaaacttttactggagcaaaaccacatgaatgcagcttttgtggaagagacttcattcatcattcgtcccttaataggcacatgagatctcacactggacagaaaccaaatgagtatcaggaatatgaaaagcaaccatgtaaatgtaaagcagttgggaaaaccttcagttatcaccactgctttcgcaaacatgaaagaactcacactggagtgaagccctatgaatgtaaacagtgtgggaaagcctttatatattaccagccatttcaaagacatgaaaggactcatgctggacagaaaccctatgaatgtaagcaatgtggaaaaacctttatatattaccagtcttttcaaaaacatgctcatactggaaagaaaccctatgaatgtaaacagtgtgggaaagcctttatatgttaccaatcttttcaaagacacaaaaggactcacactggagagaaaccctatgaatgtaagcaatgtggtaaggctttcagttgtcccacatactttcgaactcatgaaagaactcacactggagaaaaaccctacaaatgtaaagaatgtggtaaagccttcagttttctcagttcttttcgaaggcataaaaggactcatagtggagagaaaccctatgaatgtaaagaatgtggaaaagccttcttttattctgcaagctttcgagcacatgtaataatacacactggggctcgaccttataaatgtaaagaatgtgggaaagccttcaactcttctaattcctgtcgagtgcatgaaagaactcatattggagaaaaaccatatgaatgtaaacgatgtggcaaatcattcagttggtccatttctcttcgattgcatgaaagaactcatactggagagaaaccttatgagtgtaaacagtgtcataaaaccttcagtttttcaagttcccttcgagaacacgaaacaactcacactggagagaaaccctatgaatgtaaacaatgtggtaaaaccttcagtttttcaagttcccttcaaagacatgaaaggactcacaatgcagagaaaccctatgaatgtaaacagtgtgggaaagccttcaggtgttcaagttattttcgaattcatgaaaggtcacacactggagagaaaccctatgaatgtaaacagtgtggaaaagttttcattcgttccagttcctttcgactgcatgaaagaacacacactggagagaaaccctatgaatgtaaactatgcggtaaaaccttcagtttttcaagttcccttcgagaacatgaaaaaattcacactggaaataagccttttgagtgtaagcaatgtggtaaggccttccttcgttccagtcaaattcgattgcatgaaaggactcacactggagagaaaccgtatcaatgtaaacaatgtggaaaagccttcatttcttccagtaaatttcgaatgcatgagagaactcacacgggagagaaaccctatcgatgtaaacaatgtgggaaagccttcagattttcaagttctgttcgaattcatgaaaggtctcacactggagagaaaccttatgaatgcaaacaatgtggaaaagccttcatttcttccagtcactttcgactgcatgaaaggactcatatgggagagaaagtctaagaatataagcaacattctgaagccttcggttgttccagctccttctgaatacacaaaagagttcatactggacagaagctgtgtgaatacaaacattgttctaaagcccttaattgttccagtttcttttgagcacgaaagaattcccactggtgagaaacagtatgaatgtaaacattgtgattaagccttcagttgacctaattcatttcaaagacaggactcgtgctgcagtgaaatctgttttgttttttgttttttgtttttttaaaaaaggccaagcttgttggctcatgcctatagtcccagcactttgggaggccaaggtgcaaggcaggcagatcatttgaggtcagaaattcgagaccagcgtggtcaacatggtgtaaccccatctctactaaaaattaccaaaaaatgaaccaggcatggtagtgcatgcctctaatcccagctactcaggaggctaaggcaggagaatcacttgaacctggagacagaggttgcagtgagctgagatcacgccactgcattccagcctgtgcgacagaatgagacactgtctcaagaaaaaataaaagtgggaaaatcttccaactgtcctctagagtgtgaatatatgaaaggagtcagagtggggtgaaagtctataaatgtaagacatttgggaaagccttcacacagccttttgagcacacatgagaatgtatactggagagaaaccctataaatattaagaatgtgggaaattcttcatcctagttcttttgttgttgttgatgatacaaaaatattttcatttaataaagattgtcaggttatatttaataagaaagaaagtatcatgtaaacagcccagtaataaaattttacaatcttat

SEQ ID NO: 201516 - DNA, 3550 bp, Homo sapiens
  Payload ID: 19768
  Gene Name: zinc finger protein 140
  Uniprot ID: P52738
  ENST ID: ENST00000355557
  CDS Start-End: 1284-2657
tatggattagccattctttattcctttactttcctaataaacttgctttcaccttatggattcgcctcaaattctttcttgtgcaagatccaagaaccctctcttagagtctgagatccggacccctttccagtagcaaaaggtcttagactgaagtactgactccacagtcgttgttaagaatcctagttgtttaatagaggcggtcttgggctcttgctgggccgcggtgtgttctgggaagtgtagtcacctgagtctccagttccttgtctctgggccgtgtgtgcacgccagcgaagcactgtgggagtcgtagtaggggaggaaaaccctataccctctggcgtgcggcgcaggagtttgggggaatgtagtcgccagagctctgcgttgtcttccggctttgggcgtggccacgatgcactctgggagtcgtagtaggggaagaacgtcctccgctcttttgcgcacggtcgctagaggttctgggaagtgtagttgcctgaagctcgtgttctttgtctttcgatgatgtgcgcttggcctcaaagcaccctgggagttgcagtggggcggggaaagccatatgctctctcgcgcggggtcgcggttgtttctgggaagtgtggtggcctgagttccacgttcttcgtttctccgctagttgtgcgcttggccgcgagacactctggcagttataggaacacaaaggtctgtgtactcttccgcggggggccgcggttatttctgggaaatgtagttgcctaggacccgggttctttgtttctcggctctgggcgtgggaggatagcccctatgctctggcgcaccgggccgcgatggctctgggaattgtagttgtcgcaggccctcgttctttgtctcctggcgttctgggcacggcagcgaggcgctctgggagttccagtaggaacgaaaagcccttgcgcgcagggccgcattggtttctgggaattgtagtttcttgaggccggcggcctggttggggtgacgtcggcgaggcttctgaagacgcaattcctgcgacgcccgcggaggggccctggggggcggcgccgagcgtctggcctgtgttggctgtaggcaacgaaaggagccctcccggtctgcgccggatggccccgggcggtgactcggtccggagccctggaacgctacgcccacctggcggaaagcaccacggaaacgcatccttctgtggccactgttaggtctgccattttacacttttctgatctcctccttcccttctgtgagctatgtctcaggggtcagtgacattcagagatgtggccatagacttctcccaggaggagtggaaatggcttcagcctgctcaaagagatttgtacagatgtgtaatgttggagaactatggccatctggtctcactgggtctttccatttctaagccagatgtggtttccttattggagcaagggaaagaaccctggctggggaaaagggaagtgaaaagagatctgttttcagtttcagagtcaagtggtgagatcaaagacttttcaccaaaaaatgtcatttatgatgactcatcccagtatttgatcatggaaagaattctaagtcaaggccctgtgtattccagttttaaaggaggctggaaatgcaaggatcatactgagatgctgcaagaaaatcagggatgtattaggaaagtaacagtctctcatcaagaagccctggctcaacatatgaatatcagtactgtggagaggccctatggatgccatgaatgtggaaaaacttttggtcgacgcttttccctggtgttacaccagaggactcatactggagagaaaccatatgcatgtaaggaatgtggcaaaacctttagccagatttcaaaccttgtgaaacaccaaatgatacatactggaaagaaaccccatgagtgtaaggactgtaataaaacattcagttacctttcatttcttattgaacaccagagaacgcacactggggagaaaccttatgaatgtactgagtgtggaaaggcctttagccgtgcctccaacctcactcgacatcaaagaattcacataggaaagaaacaatatatatgtaggaaatgtggtaaagcatttagcagtggctcagaactcattcgccaccagattacacatactggagagaaaccttatgaatgcattgaatgtgggaaggcatttcgccgtttctcacaccttactcgacatcagagcatccatacaaccaaaaccccgtatgaatgtaatgaatgtaggaaagctttccgttgtcactcattccttattaaacatcagagaattcatgctggagaaaagctctatgaatgtgatgaatgtggtaaagttttcacttggcatgcatcccttattcaacatacgaagagtcacactggagagaaaccctatgcgtgtgctgaatgtgataaagccttcagccggagcttttccctcattctacatcagagaactcatactggagagaaaccctatgtatgtaaggtatgcaacaaatccttcagctggagctcaaaccttgctaaacatcagaggacacacactcttgacaacccctatgaatatgaaaattcatttaattaccactcattccttactgaacaccagtgaatttacactgcaaagaaaaactatgaatgtatggaattttttaaaaagaagtataatgccttacttcagagaactcttggaaagaagccttatgtgaaagtgatgactgtgaagtaatatggcccacactttattcaccaccctggagaaaaaaaaacccaggaatatgtggaaaagccattaataaccactcttttatttttttgcaataacaaggtgaaatcaatattgttgagaagattcttccatctggtaatgttgagaagacttcatttggtaggagtcccttactttacgtgtgtaaattcctaccaggaaagaatacatatccaatagattggagaaagccagagattagccctcattccgcatctgtcaaccaggacagaaagcatggacaagggatgagctttacaaagatgatgcactttggagatcagaaaattcatatttaagcaaagtgatacaaacacagtgatttgggaatgccttcatttacaatgcaatacttacattttaatactcttgtaggagaaaaagcaactgtataaatgaatgtagagtgactttctgcaatatttcaaacctatatcagagaattacactgtgggaaaactaccattgtaataagtgtagcaaaatctccttagatatctgaaaagtcatactggatggaatctgtaggaaacggttctattttgagggaagggggattcctttttgttttttaagtgaattcagaaaatgttataaataaatcttttggtttattataaaccttctgcttgctgattttttcccacagcatgtgattctgaaaatgtaactacaatattgacataaaaaataaacagtagtttttcttgttgaaacatacaaacataacaaagtgt

SEQ ID NO: 201517 - DNA, 529 bp, Homo sapiens
  Payload ID: 19768
  Gene Name: zinc finger protein 140
  ENST ID: ENST00000392041
  CDS Start-End: 157-390
ggtctgcgccggatggccccgggcggtgactcggtccggagccctggaacgctacgcccacctggcggaaagcaccacggaaacgcatccttctgtggccactgttaggtctgccattttacacttttctgatctcctccttcccttctgtgagctatgtctcaggacttgggacgtggctttctttctcctacaaccacctgcctggcagaaccccaggaccctgtcccttgttcctccttttcaggggtcagtgacattcagagatgtggccatagacttctcccaggaggagtggaaatggcttcagcctgctcaaagagatttgtacagatgtgtaatgttggagaactatggccatctggtctcactgggtctttccatttctaagccagatgtggtttccttattggagcaagggaaagaaccctggctggggaaaagggaagtgaaaagagatctgttttcagtttcagagtcaagtggtgagatcaaagacttttcaccaaaaaatgtcatttatgatgac

SEQ ID NO: 201518 - DNA, 553 bp, Homo sapiens
  Payload ID: 19768
  Gene Name: zinc finger protein 140
  ENST ID: ENST00000412146
  CDS Start-End: 292-553
gcaattcctgcgacgcccgcggaggggccctggggggcggcgccgagcgtctggcctgtgttggctgtaggcaacgaaaggagccctcccggtctgcgccggatggccccgggcggtgactcggtccggagccctggaacgctacgcccacctggcggaaagcaccacggaaacgcatccttctgtggccactgttaggggtcagtgacattcagagatgtggccatagacttctcccaggaggagtggaaatggcttcagcctgctcaaagagatttgtacagatgtgtaatgttggagaactatggccatctggtctcactgggtctttccatttctaagccagatgtggtttccttattggagcaagggaaagaaccctggctggggaaaagggaagtgaaaagagatctgttttcagtttcagagtcaagtggtgagatcaaagacttttcaccaaaaaatgtcatttatgatgactcatcccagtatttgatcatggaaagaattctaagtcaaggccctgtgtattccagttttaaaggaggctgga

SEQ ID NO: 201519 - DNA, 1663 bp, Homo sapiens
  Payload ID: 19768
  Gene Name: zinc finger protein 140
  ENST ID: ENST00000440550
  CDS Start-End: 190-495
gtgttggctgtaggcaacgaaaggagccctcccggtctgcgccggatggccccgggcggtgactcggtccggagccctggaacgctacgcccacctggcggaaagcaccacggaaacgcatccttctgtggccactgttaggtctgccattttacacttttctgatctcctccttcccttctgtgagctatgtctcaggggtcagtgacattcagagatgtggccatagacttctcccaggaggagtggaaatggcttcagcctgctcaaagagatttgtacagatgtgtaatgttggagaactatggccatctggtctcactgggtctttccatttctaagccagatgtggtttccttattggagcaagggaaagaaccctggctggggaaaagggaagtgaaaagagatctgttttcagttttaaaggaggctggaaatgcaaggatcatactgagatgctgcaagaaaatcagggatgtattaggaaagtaacagtctctcatcaagaagccctggctcaacatatgaatatcagtactgtggagaggccctatggatgccatgaatgtggaaaaacttttggtcgacgcttttccctggtgttacaccagaggactcatactggagagaaaccatatgcatgtaaggaatgtggcaaaacctttagccagatttcaaaccttgtgaaacaccaaatgatacatactggaaagaaaccccatgagtgtaaggactgtaataaaacattcagttacctttcatttcttattgaacaccagagaacgcacactggggagaaaccttatgaatgtactgagtgtggaaaggcctttagccgtgcctccaacctcactcgacatcaaagaattcacataggaaagaaacaatatatatgtaggaaatgtggtaaagcatttagcagtggctcagaactcattcgccaccagattacacatactggagagaaaccttatgaatgcattgaatgtgggaaggcatttcgccgtttctcacaccttactcgacatcagagcatccatacaaccaaaaccccgtatgaatgtaatgaatgtaggaaagctttccgttgtcactcattccttattaaacatcagagaattcatgctggagaaaagctctatgaatgtgatgaatgtggtaaagttttcacttggcatgcatcccttattcaacatacgaagagtcacactggagagaaaccctatgcgtgtgctgaatgtgataaagccttcagccggagcttttccctcattctacatcagagaactcatactggagagaaaccctatgtatgtaaggtatgcaacaaatccttcagctggagctcaaaccttgctaaacatcagaggacacacactcttgacaacccctatgaatatgaaaattcatttaattaccactcattccttactgaacaccagtgaatttacactgcaaagaaaaactatgaatgtatggaattttttaaaaagaagtataatgccttacttcagagaactcttggaaagaagccttatgtgaaagtgatgactgtgaagtaatatggcccacactttattcaccaccctggagaaaaaaaaacccaggaatatgtggaaaagccattaataaccactcttttatttttttgcaataacaa

SEQ ID NO: 201520 - DNA, 1945 bp, Homo sapiens
  Payload ID: 19768
  Gene Name: zinc finger protein 140
  ENST ID: ENST00000429434
  CDS Start-End: 1462-1945
ggaccctgtcccttgttcctccttttcaggtgcttatacttaagtatacatgaagagagtgacaggaagctatccagatgtgggcggggtttctgacctggctggcatgttttagggtgagagggtagggtgccagctgttacatcgcctcctctttcccacagtgttagaatgaggagtgctttacgttactccagcgcccctttattcatttattcaatatgtttttactgaacctctactttcagtggttcccacagtgtgatccttggaccagcagtatcagcatcatctgagaacgtattagaaatgaatattcttgagtcctaccccagaccttctgaatcagaaactgagaatttggcccagcagtctaacagtccttccaagtgattctaatgtgcaactcattctaagtcttgaggatgcagaagtgaccaaaacaaaatctccgaatcctcagagctcatttttcagacatgacataaggaacacatttttattttgatttggcctaagggcttggctggtaattgtgcttcacagcagtggggataacagggtcaactattcaaaatgagtccctcatttcagttccacttctttatcctactttttgtcatacttctctccaaattcagaggttctctgagttttgctggggaatccaatttccacctctgctgcagatcttgctgtgtaggaaacagctgctttattagtcaacagtctttaatcacttttttattaaacttcaaaactgtaaattataactgccatccatctgggactgctactagtttgagacattttaaattcccattcatgccttatagatcaatgtggatcactcaagtggtgcaaaaccaggctgcaaagcaagggcttatatattattccccctaactctgagggaaagtgctttaggttctgtcctgggaggtattacattctcttcttgcggaatcaagattctttattgcttatcctccttgttctgtgacattgctaaaattaccactaagtttcacaggtatttctttaggattagggataactgtgacaaacttgagactgtatgccccatttgaagggtggtgctgttatctgctgtagcgaattattaccctgaagaaattctggctgaattatattaaaataggctggtattaaggaaaatatacattgtttattaacataaaggaatactgtaaaatcttaagaatttttacaaccaatgccaaaaatccatattgttcatgtgtataatcctttattttgaataaaattgtaaattatctcaggacagataatttatgtttttctccttttctccagttatacaacaaaacacaagagctaggctcttcattatataattactcagaattctgaaaactctcactgttactacttagacacattgcctaacctccacagtgagactcattttattccttgatgagggagtttgggggcatgcgtgctggtcatgcaaatatctgtccgtcatttcaggggtcagtgacattcagagatgtggccatagacttctcccaggaggagtggaaatggcttcagcctgctcaaagagatttgtacagatgtgtaatgttggagaactatggccatctggtctcactgggtctttccatttctaagccagatgtggtttccttattggagcaagggaaagaaccctggctggggaaaagggaagtgaaaagagatctgttttcagtttcagagtcaagtggtgagatcaaagacttttcaccaaaaaatgtcatttatgatgactcatcccagtatttgatcatggaaagaattctaagtcaaggccctgtgtattccagttttaaaggaggctggaaatgcaaggatcatactgagatgctgcaagaaaatcagggatgtattaggaaagtaacagtctctcatcaag

SEQ ID NO: 201521 - DNA, 596 bp, Homo sapiens
  Payload ID: 19768
  Gene Name: zinc finger protein 140
  ENST ID: ENST00000319849
  CDS Start-End: 190-534
gtgttggctgtaggcaacgaaaggagccctcccggtctgcgccggatggccccgggcggtgactcggtccggagccctggaacgctacgcccacctggcggaaagcaccacggaaacgcatccttctgtggccactgttaggtctgccattttacacttttctgatctcctccttcccttctgtgagctatgtctcaggggtcagtgacattcagagatgtggccatagacttctcccaggaggagtggaaatggcttcagcctgctcaaagagatttgtacagatgtgtaatgttggagaactatggccatctggtctcactggcaggtctttccatttctaagccagatgtggtttccttattggagcaagggaaagaaccctggctggggaaaagggaagtgaaaagagatctgttttcaggctttttttcagctaactgtgtcagcttctttagctgggcccatgtcgacggctccgctttcttggtagatggaaacttcttttgtaagtttttcagagtcaagtggtgagatcaaagacttttcaccaaaaaatgtcatttatgatgactcatcccagtatttgatcatgg

SEQ ID NO: 201522 - DNA, 2328 bp, Homo sapiens
  Payload ID: 19768
  Gene Name: zinc finger protein 140
  ENST ID: ENST00000536790
  CDS Start-End: 111-350
gaacgctacgcccacctggcggaaagcaccacggaaacgcatccttctgtggccactgttaggtctgccattttacacttttctgatctcctccttcccttctgtgagctatgtctcaggggtcagtgacattcagagatgtggccatagacttctcccaggaggagtggaaatggcttcagcctgctcaaagagatttgtacagatgtgtaatgttggagaactatggccatctggtctcactgggtctttccatttctaagccagatgtggtttccttattggagcaagggaaagaaccctggctggggaaaagggaagtgaaaagagatctgttttcaggtaactgaagtggtgaaaaactacagaggagaggactactgtaattcccagccttgttcctttatagtttcagagtcaagtggtgagatcaaagacttttcaccaaaaaatgtcatttatgatgactcatcccagtatttgatcatggaaagaattctaagtcaaggccctgtgtattccagttttaaaggaggctggaaatgcaaggatcatactgagatgctgcaagaaaatcagggatgtattaggaaagtaacagtctctcatcaagaagccctggctcaacatatgaatatcagtactgtggagaggccctatggatgccatgaatgtggaaaaacttttggtcgacgcttttccctggtgttacaccagaggactcatactggagagaaaccatatgcatgtaaggaatgtggcaaaacctttagccagatttcaaaccttgtgaaacaccaaatgatacatactggaaagaaaccccatgagtgtaaggactgtaataaaacattcagttacctttcatttcttattgaacaccagagaacgcacactggggagaaaccttatgaatgtactgagtgtggaaaggcctttagccgtgcctccaacctcactcgacatcaaagaattcacataggaaagaaacaatatatatgtaggaaatgtggtaaagcatttagcagtggctcagaactcattcgccaccagattacacatactggagagaaaccttatgaatgcattgaatgtgggaaggcatttcgccgtttctcacaccttactcgacatcagagcatccatacaaccaaaaccccgtatgaatgtaatgaatgtaggaaagctttccgttgtcactcattccttattaaacatcagagaattcatgctggagaaaagctctatgaatgtgatgaatgtggtaaagttttcacttggcatgcatcccttattcaacatacgaagagtcacactggagagaaaccctatgcgtgtgctgaatgtgataaagccttcagccggagcttttccctcattctacatcagagaactcatactggagagaaaccctatgtatgtaaggtatgcaacaaatccttcagctggagctcaaaccttgctaaacatcagaggacacacactcttgacaacccctatgaatatgaaaattcatttaattaccactcattccttactgaacaccagtgaatttacactgcaaagaaaaactatgaatgtatggaattttttaaaaagaagtataatgccttacttcagagaactcttggaaagaagccttatgtgaaagtgatgactgtgaagtaatatggcccacactttattcaccaccctggagaaaaaaaaacccaggaatatgtggaaaagccattaataaccactcttttatttttttgcaataacaaggtgaaatcaatattgttgagaagattcttccatctggtaatgttgagaagacttcatttggtaggagtcccttactttacgtgtgtaaattcctaccaggaaagaatacatatccaatagattggagaaagccagagattagccctcattccgcatctgtcaaccaggacagaaagcatggacaagggatgagctttacaaagatgatgcactttggagatcagaaaattcatatttaagcaaagtgatacaaacacagtgatttgggaatgccttcatttacaatgcaatacttacattttaatactcttgtaggagaaaaagcaactgtataaatgaatgtagagtgactttctgcaatatttcaaacctatatcagagaattacactgtgggaaaactaccattgtaataagtgtagcaaaatctccttagatatctgaaaagtcatactggatggaatctgtaggaaacggttctattttgagggaagggggattcctttttgttttttaagtgaattcagaaaatgttataaataaatcttttggtttattataaa

SEQ ID NO: 201523 - DNA, 726 bp, Homo sapiens
  Payload ID: 19768
  Gene Name: zinc finger protein 140
  ENST ID: ENST00000356456
  CDS Start-End: 378-726
ctgagttccacgttcttcgtttctccgctagttgtgcgcttggccgcgagacactctggcagttataggaacacaaagtttcttgaggccggcggcctggttggggtgacgtcggcgaggcttctgaagacgcaattcctgcgacgcccgcggaggggccctggggggcggcgccgagcgtctggcctgtgttggctgtaggcaacgaaaggagccctcccggtctgcgccggatggccccgggcggtgactcggtccggagccctggaacgctacgcccacctggcggaaagcaccacggaaacgcatccttctgtggccactgttaggtctgccattttacacttttctgatctcctccttcccttctgtgagctatgtctcaggggtcagtgacattcagagatgtggccatagacttctcccaggaggagtggaaatggcttcagcctgctcaaagagatttgtacagatgtgtaatgttggagaactatggccatctggtctcactgggtctttccatttctaagccagatgtggtttccttattggagcaagggaaagaaccctggctggggaaaagggaagtgaaaagagatctgttttcagtttcagagtcaagtggtgagatcaaagacttttcaccaaaaaatgtcatttatgatgactcatcccagtatttgatcatggaaagaattctaagtcaaggccctgtgtattccagtt

SEQ ID NO: 201524 - DNA, 2340 bp, Homo sapiens
  Payload ID: 19768
  Gene Name: zinc finger protein 140
  Uniprot ID: P52738
  ENST ID: ENST00000544426
  CDS Start-End: 401-1465
ctgcgacgcccgcggaggggccctggggggcggcgccgagcgtctggcctgtgttggctgtaggcaacgaaaggagccctcccggtctgcgccggatggccccgggcggtgactcggtccggagccctggaacgctacgcccacctggcggaaagcaccacggaaacgcatccttctgtggccactgttaggtctgccattttacacttttctgatctcctccttcccttctgtgagctatgtctcagatgtggtttccttattggagcaagggaaagaaccctggctggggaaaagggaagtgaaaagagatctgttttcagtttcagagtcaagtggtgagatcaaagacttttcaccaaaaaatgtcatttatgatgactcatcccagtatttgatcatggaaagaattctaagtcaaggccctgtgtattccagttttaaaggaggctggaaatgcaaggatcatactgagatgctgcaagaaaatcagggatgtattaggaaagtaacagtctctcatcaagaagccctggctcaacatatgaatatcagtactgtggagaggccctatggatgccatgaatgtggaaaaacttttggtcgacgcttttccctggtgttacaccagaggactcatactggagagaaaccatatgcatgtaaggaatgtggcaaaacctttagccagatttcaaaccttgtgaaacaccaaatgatacatactggaaagaaaccccatgagtgtaaggactgtaataaaacattcagttacctttcatttcttattgaacaccagagaacgcacactggggagaaaccttatgaatgtactgagtgtggaaaggcctttagccgtgcctccaacctcactcgacatcaaagaattcacataggaaagaaacaatatatatgtaggaaatgtggtaaagcatttagcagtggctcagaactcattcgccaccagattacacatactggagagaaaccttatgaatgcattgaatgtgggaaggcatttcgccgtttctcacaccttactcgacatcagagcatccatacaaccaaaaccccgtatgaatgtaatgaatgtaggaaagctttccgttgtcactcattccttattaaacatcagagaattcatgctggagaaaagctctatgaatgtgatgaatgtggtaaagttttcacttggcatgcatcccttattcaacatacgaagagtcacactggagagaaaccctatgcgtgtgctgaatgtgataaagccttcagccggagcttttccctcattctacatcagagaactcatactggagagaaaccctatgtatgtaaggtatgcaacaaatccttcagctggagctcaaaccttgctaaacatcagaggacacacactcttgacaacccctatgaatatgaaaattcatttaattaccactcattccttactgaacaccagtgaatttacactgcaaagaaaaactatgaatgtatggaattttttaaaaagaagtataatgccttacttcagagaactcttggaaagaagccttatgtgaaagtgatgactgtgaagtaatatggcccacactttattcaccaccctggagaaaaaaaaacccaggaatatgtggaaaagccattaataaccactcttttatttttttgcaataacaaggtgaaatcaatattgttgagaagattcttccatctggtaatgttgagaagacttcatttggtaggagtcccttactttacgtgtgtaaattcctaccaggaaagaatacatatccaatagattggagaaagccagagattagccctcattccgcatctgtcaaccaggacagaaagcatggacaagggatgagctttacaaagatgatgcactttggagatcagaaaattcatatttaagcaaagtgatacaaacacagtgatttgggaatgccttcatttacaatgcaatacttacattttaatactcttgtaggagaaaaagcaactgtataaatgaatgtagagtgactttctgcaatatttcaaacctatatcagagaattacactgtgggaaaactaccattgtaataagtgtagcaaaatctccttagatatctgaaaagtcatactggatggaatctgtaggaaacggttctattttgagggaagggggattcctttttgttttttaagtgaattcagaaaatgttataaataaatcttttggtttattataaaccttctgcttgctgattttttcccacagcatgtgattctgaaaatgtaactacaatattgacataaaaaataaacagtagtttttcttgttgaaacat

SEQ ID NO: 201525 - DNA, 2970 bp, Homo sapiens
  Payload ID: 19769
  Gene Name: zinc finger protein 141
  Uniprot ID: Q15928
  ENST ID: ENST00000240499
  CDS Start-End: 150-1574
cagaccgcgggttaggggcttcatctctctgcgttctcagttgtgggaggccttggtgattcggccacagctcagcctccgtcgctctgtgacctgcgggtattggatgattggtagctaagactcccgaatacttcagaagtggggaaatggaactcttaacattcagggatgtggccatagaattctctccagaagagtggaaatgcctggaccctgaccagcagaatttgtatagagatgtgatgttggagaactacaggaacctggtctccctgggtgttgctatctctaacccagacctggtcacctgtctggagcaaagaaaagagccctacaatgtgaagatacataagatcgtagccagacccccagctatgtgttctcatttcacccaagaccattggccagtgcagggcatagaagattcattccacaaacttatactgagaagatatgagaaatgtggacatgataatttacaattaagaaaaggctgtaaaagtttgaatgagtgtaagttgcagaaaggaggttataatgaatttaatgaatgcttgtcaactacccagagcaaaatacttcagtgtaaagcaagtgtcaaagttgttagtaaattttcaaattcaaacaaacgtaagacaagacatactggagagaaacactttaaagaatgtggcaaatcatttcagaagttttcacacctaactcaacataaggtaattcatgctggagagaaaccctacacttgtgaagaatgtggcaaagcctttaaatggtctttaatatttaatgaacataagagaattcatactggagagaaaccttttacttgtgaagaatgtggcagcatctttaccacatcctcacactttgctaagcataaaataattcatactggagaaaaaccctataaatgtgaagaatgtggcaaagcctttaataggttcacaacccttactaaacataagagaattcatgctggagagaaacccatcacatgtgaagaatgtaggaaaatctttacctcatcctcaaactttgccaaacataagcgaattcatactggagagaaaccctacaaatgtgaagaatgtggcaaagcctttaataggtccacaacccttactaaacataagagaattcatactggagagaaaccctacacatgtgaagaatgtggcaaagcttttagacagtcctcaaaactgaatgaacataagaaagttcatactggagagcggccctacaaatgtgatgaatgtggcaaagcctttggacggtccagggtcctgaatgaacataaaaaaattcatactggagagaaaccctacaaatgtgaagaatgtggcaaagcctttagacggtccacagatcggagtcaacataagaaaattcatagtgcagataaaccctacaaatgtaaagaatgtgacaaagcctttaaacaattttcgctcctgagtcaacataagaaaattcatactgtagataaaccctacaaatgtaaagattgtgacaaagcctttaaacggttctcacacctgaataaacataagaaaattcatacttgagagaaatcctacaaatgtaaagaatgtggcaaacctttggatgatccacaaaccttaatgaacatgagaaaatttatactgtagagaaaccctggaaatgtgaagaacgtggcaaagttctttacctcattctcaaaccttgataaacataagagaattcataccggagagaaactgtacaaatgtgaagaatatggcaaagcctgtgaatggtccacaaacctgaatgagcagaagaaaattattactggagataaaccctgcaaatgtaaagagtgtaacaaaacctttaaacagccctcaccggtgaataaacataagaaaaatcatgctggagggaagccctacacatgtggcagaatgtggcaaagcatttaattggtcctcaatgcttaataaatataattcatgctggagagaaacttcacatgtgaaccgtgtggcaaagcctttaaatggtcctcaacccttaatgaacgtaagtgaattcatgctggagcaaaatgcttcacatgcgaagaatgtggcacagtctttaccacatcctcaaactttgttaaacataagagaatttataccagagagaaaccctacacatgtaaagaatgtggcaaagccttcaataggttctcaacccttactgtgcacaagataattcattctggggaaaaaaatgctacaaatgtgaaaaacgtggcagagccttcagaccatccacaaacctttatgaaaattcatatttgagagtagaagattcattccacaaacttacattgagaagatatgaaagatgaatataagaattcatcctagatataaaaccatagaaatgtaaaagatgtgacaaaacctttaagccatactccaggcttcttaaacataatgagaactcatactggaggaaagtcttacaaatgtgaagaatgtggcagtctttaaatcttcctcagtcttttctaatcataagataattcacactgaagagaaactgcaaacgtggaaagtgtgacaaagcttgcaaccacactcaatctattctaaatataagagaaatgatattggtgagaagccacaaaaatatgaaaaatgtggcaaagccttcaaatgcttgtcacatcttactgtatatatataattcctactgaagaaatcccctggaaatgcaaaaaatgtggcaggatttttaccaatgctcatctttttgcacatgatatcctttatattcgagaaaagttatagaaatataaaaaatatagaaaagtcatatctcctcacattttactaactagcaatgttcatacttaataaaaacattataaatgtaatttctgttgaaagacttcagaaaatataggcctttaaagtgaagaagagtattcttaagacaaacaataca

SEQ ID NO: 201526 - DNA, 2146 bp, Homo sapiens
  Payload ID: 19769
  Gene Name: zinc finger protein 141
  ENST ID: ENST00000505939
  CDS Start-End: 151-492
ccagaccgcgggttaggggcttcatctctctgcgttctcagttgtgggaggccttggtgattcggccacagctcagcctccgtcgctctgtgacctgcgggtattggatgattggtagctaagactcccgaatacttcagaagtggggaaatggaactcttaacattcagggatgtggccatagaattctctccagaagagtggaaatgcctggaccctgaccagcagaatttgtatagagatgtgatgttggagaactacaggaacctggtctccctgggtgttgctatctctaacccagacctggtcacctgtctggagcaaagaaaagagccctacaatgtgaagatacataagatcgtagccagacccccagaattcttccatctctatgacaacaagcccattttagctttctggagaatagcatctgagaaaagccaaagtgcctcagtttacagacagctcactcacagaagcagagccacctaattcaccagcatctaaccactcacacctgaaggagccaaactgagcccagaagaatggcccggctgagcccagcctaaatttctaaccagctcaatcctgagctagtatgtttcgggattgttatgcagttataagttagtaatatatacacccattaaagacaggatctcaggacagattgatcacaaataacctgcaaatgcttgccaccctgtaagtattgattttcttttttcctttatttaaagttagatttgttgtaagatgatattgagttacacagaagttaggcaggagaatagggtttggaggcagggaacttaaggccaattcgtgctgacttcctacaagaaaaaacaccaaggtctgggagcagggaacctaaagccagttaacgtgaacttcctacatctaaaccaaaaggaaagacctcatctacacccgagtagcaaaggatcgaaggcgactgtcgctacaaccctcccccttgtaccagttctctgatagaaaaggacagtgccttggagtggccgtgggccaagcacaggccatgccttcatctgcatagggtaccaattcgcctcaacctttgattagccaaggaccaaatccttcattcagataaggggtagctgataggaacctcaaaaggagtacttaaaacccagaaaacattgtaaccgggtccttgggcggcttgctggggctcacacccaccctgtagagtgctttctcactttaataaaatcttgcttttgctattcccttcctgtttttcattcctttgtgtgctttgttcaatttttttgttcgaaatgtcaaggacctggacagttcacactcacggccttccttctggtaacagaagtgcaggtatatgtggatgcatgtgattggtacttaaactcacacagtgccccataccacaggagaaaaacacacagttccagcctggcaattaggtccaaagataaatagcaaaacaagaagtttgcctttaatctattccctccacatctaaactctggagggcaaggctgtgaggagatctgaagacatggtgctctctcttcctgtggacccatcattccttgtttaccatctgatatttgaaaagaagaggaacccctgagaaaggaggcagaggctggttaggaagatagggagggaaggtcttgggagatgaaaaacacccacgggaccacacctgcaccacccatgtagctagcaggaagaaatgtggttaagaacttcctcttatgccagggtgttgatcagaagagactgtcccacttaggcccaggtgtaatgaatcaacctaaatgtcattaacttgacccagctccttataatgttactaacatgacataaatattttggttttagcttcactctttccacctgctgtcggttttgcttgggcactcatgggtaataaccaagatggagtcactgtggtcaactccaggcatgcacagatacaacacccttagcggggaaatttacccctcccatttgggcagaacccacagaagacttcctcgttcttgccacataaaagacccagaactcagccccatttctggcaacctgctttcatgtcccctttctgctgagagctttccttttgcttaataaatcctattctgcttta

SEQ ID NO: 201527 - DNA, 1611 bp, Homo sapiens
  Payload ID: 19769
  Gene Name: zinc finger protein 141
  ENST ID: ENST00000512994
  CDS Start-End: 165-770
gcgtctggctactaccagaccgcgggttaggggcttcatctctctgcgttctcagttgtgggaggccttggtgattcggccacagctcagcctccgtcgctctgtgacctgcgggtattggatgattggtagctaagactcccgaatacttcagaagtggggaaatggaactcttaacattcagggatgtggccatagaattctctccagaagagtggaaatgcctggaccctgaccagcagaatttgtatagagatgtgatgttggagaactacaggaacctggtctccctgggtgttgctatctctaacccagacctggtcacctgtctggagcaaagaaaagagccctacaatgtgaagatacataagatcgtagccagacccccagctatgtgttctcatttcacccaagaccattggccagtgcagggcatagaagattcattccacaaacttatactgagaagatatgagaaatgtggacatgataatttacaattaagaaaaggctgtaaaagtttgaatgagtgtaagttgcagaaaggaggttataatgaatttaatgaatgcttgtcaactacccagagcaaaatacttcagtgtaaagcaagtgtcaaagttgttagtaaattttcaaattcaaacaaacgtaagacaagacatactggagagaaacactttaaagaatgtggcaaatcatttcagaagttttcacacctaactcaacataagaattcttccatctctatgacaacaagcccattttagctttctggagaatagcatctgagaaaagccaaagtgcctcagtttacagacagctcactcacagaagcagagccacctaattcaccagcatctaaccactcacacctgaaggagccaaactgagcccagaagaatggcccggctgagcccagcctaaatttctaaccagctcaatcctgagctagtatgtttcgggattgttatgcagttataagttagtaatatatacacccattaaagacaggatctcaggacagattgatcacaaataacctgcaaatgcttgccaccctgtaagtattgattttcttttttcctttatttaaagttagatttgttgtaagatgatattgagttacacagaagttaggcaggagaatagggtttggaggcagggaacttaaggccaattcgtgctgacttcctacaagaaaaaacaccaaggtctgggagcagggaacctaaagccagttaacgtgaacttcctacatctaaaccaaaaggaaagacctcatctacacccgagtagcaaaggatcgaaggcgactgtcgctacaaccctcccccttgtaccagttctctgatagaaaaggacagtgccttggagtggccgtgggccaagcacaggccatgccttcatctgcatagggtaccaattcgcctcaacctttgattagccaaggaccaaatccttcattcagataaggggtagctgataggaacctcaaaaggagtacttaaaacccagaaaacattgtaaccgggtccttgggcggcttgctggggctcacacccaccctgtagagtgctttctcactttaataaaatcttgcttttgcta

SEQ ID NO: 201528 - DNA, 813 bp, Homo sapiens
  Payload ID: 19770
  Gene Name: zinc finger protein 142
  ENST ID: ENST00000432460
  CDS Start-End: 771-813
acaaaacatagagtaccccggcagccggcaagaggaagagagagtggcttccacatccccaatatcctagaggcggctgagccggaggcggtcgcacaaagcgggccccgggggccgttccagccgcggccgaccatagagatgcggctcccgccggctctgggtctggaggtgagtgagcggctgcggggcggaactgggaagggaatgcgggtggagcgagctggaggcaaagtttttcgagccccgggatcagggtgggcctgggcgctgggaactctcggaaggaggtactgaagggagcacccagacgagctgggccccggcgctgcagtcgcgtcacggttctggaccccgcccgggtacctgctgctctcaggacaaaatcatgacgatgctccatcccaagccttccaggttacaaaccgcctttccagttcgctggctcttatgatccagctcctgcccgacgatgtggacactgtcatcacctccattttacagataggaaagctgaggcccagagaagcgaagcgactgtgtctgtccaagaccacgcgccctcctgcccggaagataagcgtatttcttctctggtgcccacctgtctcctacctcaccctgccctcccgcaggtgaaggttcttaatcttgacggctcagcgtcctccttggctccccccggaggccatgtatggtcaagcttgaagattccccagaacagcgataatattcacatttaagaagccaaaacacacaagtcggtggtgatgacagacccccttttggactcacagccagccagtagcaccg

SEQ ID NO: 201529 - DNA, 6028 bp, Homo sapiens
  Payload ID: 19770
  Gene Name: zinc finger protein 142
  ENST ID: ENST00000450765
  CDS Start-End: 649-945
atctacttcccgccacacccacagagaagcccacgccactctaccccagagctctcgatggtgcttctccggcttcagggctggagtgggggtggagggcgggaaaaaccacagagacaaaacatagagtaccccggcagccggcaagaggaagagagagtggcttccacatccccaatatcctagaggcggctgagccggaggcggtcgcacaaagcgggccccgggggccgttccagccgcggccgaccatagagatgcggctcccgccggctctgggtctggagccttccaggttacaaaccgcctttccagttcgctggctcttatgatccagctcctgcccgacgatgtggacactgtcatcacctccattttacagataggaaagctgaggcccagagaagcgaagcgactgtgtctgtccaagaccacgcgccctcctgcccggaagataagcgtatttcttctctggtgcccacctgtctcctacctcaccctgccctcccgcaggtgaaggttcttaatcttgacggctcagcgtcctccttggctccccccggaggccatgtatggtcaagcttgaagattccccagaacagcgataatattcacatttaagaagccaaaacacacaagtcggtggtgatgacagacccccttttggactcacagccagccagtagcaccggggagatggatggactgtgccctgagctattgctgatccccccgcctctctctaaccgtggaatcctggggcctgtccagagcccctgtccttcccgggaccctgcacctatacctactgagccaggctgcctgctggtagaggccacagcaactgaagagggaccagggaacatggagatcattgtggagacagtagctggaaccctgaccccaggtgctcctggagagaccccagccactgcagcttcataggctccaacgtcaaactcttccggcagcatcagcggagccatggtgctgggacacagggagaactttctgccgttcagggccttccatcccaggagctgctgccagctcccaaactgcctccaggagagagagaaccttcacaggaagcaggtacacccttgcctgggcaggagacagctgaagaggagaatgtagagaaagaagagaagagtgacacccagaaggactcccaaaaggctgtggataaaggccaaggggctcagcggctggaaggggatgtggtctctggcaccgagtccctcttcaagacccatatgtgtccagagtgtaagcgctgctttaagaagcggactcatctggtggagcacctgcatctccacttcccagaccccagcctccagtgccctaactgccagaagttcttcaccagtaagagcaagctcaagacccatctgctgcgggagctgggtgaaaaggcccaccactgcccactgtgccactacagtgcggtggagaggaatgcactcaaccgccacatggccagcatgcatgaagatatttccaacttctactcagacacctatgcctgtcctgtctgccgtgaggaattccgcctcagccaggccctaaaggagcacctcaagagccacacggcagcagccgcagcagagccattaccccttcgctgctttcaggagggctgcagctatgcagcacccgaccgcaaggccttcattaagcacctgaaggagacccatggggtgcgggctgtggagtgccgccatcactcatgtcccatgctctttgccacagccgaagccatggaggcccaccacaagagtcactacgccttccactgcccccactgtgattttgcttgttccaataagcacctattccgtaaacacaagaagcagggccaccctggcagtgaagagctgcgctgcaccttctgcccctttgccaccttcaacccagtggcttaccaggatcatgtaggcaagatgcatgctcatgaaaagatccaccagtgtcctgagtgcaactttgccactgcccacaagagggtgctcatccgacacatgcttctacatacgggtgagaagccccacaagtgtgagctgtgtgacttcacatgccgagacgtgagctacctatccaagcacatgctgacccactccaacaccaaggattacatgtgcactgaatgtggctatgtcaccaagtggaagcactacctccgtgtgcacatgcgaaaacatgcaggggacctcaggtatcagtgcaaccagtgctcctatcgctgtcaccgggctgatcagctgagcagccacaagctgcggcatcagggcaagtctctgatgtgtgaggtgtgtgccttcgcctgcaagcggaagtatgagctgcagaagcacatggcttcccagcaccaccctggcacaccggccccactctacccttgccactactgcagttaccagagccgccacaagcaggctgtgctgagccatgagaactgcaagcatacccgcctccgtgagttccactgtgccctctgtgactaccgcaccttcagcaacaccacactcttgttccataaacgcaaggcccatggctatgtacctggagaccaggcctggcagctccgctatgcaagccaggagccagaaggggccatgcagggcccaacacccccaccagattcagagccctcaaaccagctgtcagcccgacctgaggggccaggtcacgaacctgggactgtggtggaccccagcttggaccaggccctgccagagatgagtgaggaggtcaacactggaagacaggagggcagtgaggctccccatgggggtgacctgggtggcagtcccagcccagcagaggtggaggagggcagctgcacactacacctagaggccctgggagtagagctggagtctgtgactgagccaccccttgaggaggtcactgaaacagcccctatggagttcaggcccctgggactggaagggccagatggactggaaggaccagagctatctagctttgaaggtattgggacttctgacttgagtgctgaagaaaatccccttctggaaaagccagtgtctgagccctccacaaatcctccatccttagaggaggctcctaacaactgggtaggaaccttcaagacaactccacctgctgagacagcacccttgcccccattacctgagtcagagtcattactcaaggccctaaggagacaggacaaagaacaagcagaggcattggtgctagaggggcgggtgcagatggtagtgatccagggagaggggcgagccttccgctgcccacactgcccttttatcactcgccgggagaaggccctgaatctgcactccaggactgggtgccaaggccgccgagagcccctgctgtgccccgagtgtggggctagcttcaagcaacaacgcggcctcagcacccacctgctgaagaagtgccctgttctactcagaaagaacaagggcttgcccagaccagattcacccatccctctgcaacctgtgctcccaggtacccaggcctcagaggacacagaaagtgggaagcccccacctgcatcacaagaagcagagctactgcttccaaaagatgctcctttggagcttcccagggagccagaagaaacagaagagcctcttgccacagtctctggttccccagtccctcctgcaggaaactccttgcccacagaggcccctaagaagcactgctttgacccagtccctcctgcaggaaactcctcacccacggaggcccctaagaagcaccaccttgacccagtccctcctgcaggaaactcctcacccacagaggccctgaagaagcaccgctttgagcagggcaagtttcactgcaactcctgcccattcctttgttcccggctctcctctattacctctcacgtggctgaaggctgcagggggggacgtggcgggggaggaaaacgagggaccccccagacccagcctgatgtgtccccgttgagcaatggggactctgctcccccgaagaatgggagtacagagtccagctctggtgatggggatacagttctggttcaaaagcagaagggggctcgcttctcctgccctacatgtccctttagctgccagcaggaacgggctctgaggactcaccagatccggggctgccccctcgaggagtctggagagctgcactgcagcctctgcccattcactgctcctgctgccactgccttaaggctccaccagaagcggaggcaccccactgcagccccagcccgtgggccccggccccatctacagtgtggggactgtggcttcacctgtaaacagagccgttgcatgcagcagcaccggcggctcaagcacgagggggtgaagccccatcagtgccccttctgtgacttttcgaccaccagacggtaccggttagaggctcaccagtcccgacacacaggcattggccgcatcccctgcagctcttgcccccagacgtttggtaccaactcgaaactgcgcttgcaccggttaagggtacatgacaaaacacctacccacttctgtccactttgtgactatagtggctaccttcgccatgacatcactcgtcatgtcaacagctgccaccaaggcaccccagcctttgcctgctcccagtgtgaagcccagttcagctcagagacagcacttaagcagcatgctctgcgccgacaccccgagcctgcacagcctgcccctggctctcctgcagagaccactgagggccccctgcactgttcccgctgtgggttgctgtgccccagccctgccagcttacgaggacacacccgtaaacagcacccacggcttgagtgtggggcctgccaggaggccttccctagccgactggctctggatgagcaccggaggcagcagcatttcagccaccgctgtcagctctgtgactttgctgcccgggagcgggtgggcctggtaaagcactacctggaacagcatgaggagacttcagcagccgtggcagcctcagatggggatggggatgctggccagcccccgctacactgccccttttgtgacttcacatgccgccatcagctggtactagatcaccatgtgaaagggcatgggggcactcgtctctacaagtgcaccgattgtgcttacagcaccaagaaccgacagaagatcacctggcacagccgcatccacactggggaaaagccttaccactgtcacctctgcccctatgcctgtgctgatccctctcgtctcaagtaccacatgcggatccacaaggaggaacggaagtacctgtgccctgagtgtggctacaagtgcaagtgggtcaaccagctgaaataccacatgaccaagcatacaggactgaagccataccagtgtcccgagtgtgagtactgcaccaaccgggctgatgcactgcgtgtgcaccaggagacccggcatcgagaagcacgggctttcatgtgtgagcagtgtggcaaggccttcaagacgcgcttcctgctgcgcacccaccttcgcaagcacagtgaggccaaaccctatgtgtgcaatgtgtgccaccgtgctttccgctgggctgctggcctgcgccatcatgccctcacccacaccgaccgccaccccttcttttgccgcctctgcaactacaaggccaagcaaaagttccaggtggtcaagcacgtacgcaggcaccaccctgaccaagccgacccaaaccagggtgtgggcaaagaccccaccacccccacagtgcacctgcatgatgtgcagctggaggatcccagccctcctgctcctgccgctccccacactggacctgagggctgaaagcctgccccacctcctgtataggaagagggtatggtctgagatgtgcagactgggaccagcgctagcctgaggagctcagagcctaaggaaagactggcttttggggtacaagggtgactagaaccttcctgggactctggctatagtactttgaaattatcacccatataaaagagggacatggactataa

SEQ ID NO: 201530 - DNA, 5926 bp, Homo sapiens
  Payload ID: 19770
  Gene Name: zinc finger protein 142
  Uniprot ID: P52746
  ENST ID: ENST00000411696
  CDS Start-End: 445-5508
gacaaaacatagagtaccccggcagccggcaagaggaagagagagtggcttccacatccccaatatcctagaggcggctgagccggaggcggtcgcacaaagcgggccccgggggccgttccagccgcggccgaccatagagatgcggctcccgccggctctgggtctggaggtgagtgagcggctgcggggcggaactgggaagggaatgcgtctgtcctttctcttcctcagccctcctgcccggaagataagcgtatttcttctctggtgcccacctgtctcctacctcaccctgccctcccgcaggtgaaggttcttaatcttgacggctcagcgtcctccttggctccccccggaggccatgtatggtcaagcttgaagattccccagaacagcgataatattcacatttaagaagccaaaacacacaagtcggtggtgatgacagacccccttttggactcacagccagccagtagcaccggggagatggatggactgtgccctgagctattgctgatccccccgcctctctctaaccgtggaatcctggggcctgtccagagcccctgtccttcccgggaccctgcacctatacctactgagccaggctgcctgctggtagaggccacagcaactgaagagggaccagggaacatggagatcattgtggagacagtagctggaaccctgaccccaggtgctcctggagagaccccagctcccaaactgcctccaggagagagagaaccttcacaggaagcaggtacacccttgcctgggcaggagacagctgaagaggagaatgtagagaaagaagagaagagtgacacccagaaggactcccaaaaggctgtggataaaggccaaggggctcagcggctggaaggggatgtggtctctggcaccgagtccctcttcaagacccatatgtgtccagagtgtaagcgctgctttaagaagcggactcatctggtggagcacctgcatctccacttcccagaccccagcctccagtgccctaactgccagaagttcttcaccagtaagagcaagctcaagacccatctgctgcgggagctgggtgaaaaggcccaccactgcccactgtgccactacagtgcggtggagaggaatgcactcaaccgccacatggccagcatgcatgaagatatttccaacttctactcagacacctatgcctgtcctgtctgccgtgaggaattccgcctcagccaggccctaaaggagcacctcaagagccacacggcagcagccgcagcagagccattaccccttcgctgctttcaggagggctgcagctatgcagcacccgaccgcaaggccttcattaagcacctgaaggagacccatggggtgcgggctgtggagtgccgccatcactcatgtcccatgctctttgccacagccgaagccatggaggcccaccacaagagtcactacgccttccactgcccccactgtgattttgcttgttccaataagcacctattccgtaaacacaagaagcagggccaccctggcagtgaagagctgcgctgcaccttctgcccctttgccaccttcaacccagtggcttaccaggatcatgtaggcaagatgcatgctcatgaaaagatccaccagtgtcctgagtgcaactttgccactgcccacaagagggtgctcatccgacacatgcttctacatacgggtgagaagccccacaagtgtgagctgtgtgacttcacatgccgagacgtgagctacctatccaagcacatgctgacccactccaacaccaaggattacatgtgcactgaatgtggctatgtcaccaagtggaagcactacctccgtgtgcacatgcgaaaacatgcaggggacctcaggtatcagtgcaaccagtgctcctatcgctgtcaccgggctgatcagctgagcagccacaagctgcggcatcagggcaagtctctgatgtgtgaggtgtgtgccttcgcctgcaagcggaagtatgagctgcagaagcacatggcttcccagcaccaccctggcacaccggccccactctacccttgccactactgcagttaccagagccgccacaagcaggctgtgctgagccatgagaactgcaagcatacccgcctccgtgagttccactgtgccctctgtgactaccgcaccttcagcaacaccacactcttgttccataaacgcaaggcccatggctatgtacctggagaccaggcctggcagctccgctatgcaagccaggagccagaaggggccatgcagggcccaacacccccaccagattcagagccctcaaaccagctgtcagcccgacctgaggggccaggtcacgaacctgggactgtggtggaccccagcttggaccaggccctgccagagatgagtgaggaggtcaacactggaagacaggagggcagtgaggctccccatgggggtgacctgggtggcagtcccagcccagcagaggtggaggagggcagctgcacactacacctagaggccctgggagtagagctggagtctgtgactgagccaccccttgaggaggtcactgaaacagcccctatggagttcaggcccctgggactggaagggccagatggactggaaggaccagagctatctagctttgaaggtattgggacttctgacttgagtgctgaagaaaatccccttctggaaaagccagtgtctgagccctccacaaatcctccatccttagaggaggctcctaacaactgggtaggaaccttcaagacaactccacctgctgagacagcacccttgcccccattacctgagtcagagtcattactcaaggccctaaggagacaggacaaagaacaagcagaggcattggtgctagaggggcgggtgcagatggtagtgatccagggagaggggcgagccttccgctgcccacactgcccttttatcactcgccgggagaaggccctgaatctgcactccaggactgggtgccaaggccgccgagagcccctgctgtgccccgagtgtggggctagcttcaagcaacaacgcggcctcagcacccacctgctgaagaagtgccctgttctactcagaaagaacaagggcttgcccagaccagattcacccatccctctgcaacctgtgctcccaggtacccaggcctcagaggacacagaaagtgggaagcccccacctgcatcacaagaagcagagctactgcttccaaaagatgctcctttggagcttcccagggagccagaagaaacagaagagcctcttgccacagtctctggttccccagtccctcctgcaggaaactccttgcccacagaggcccctaagaagcactgctttgacccagtccctcctgcaggaaactcctcacccacggaggcccctaagaagcaccaccttgacccagtccctcctgcaggaaactcctcacccacagaggccctgaagaagcaccgctttgagcagggcaagtttcactgcaactcctgcccattcctttgttcccggctctcctctattacctctcacgtggctgaaggctgcagggggggacgtggcgggggaggaaaacgagggaccccccagacccagcctgatgtgtccccgttgagcaatggggactctgctcccccgaagaatgggagtacagagtccagctctggtgatggggatacagttctggttcaaaagcagaagggggctcgcttctcctgccctacatgtccctttagctgccagcaggaacgggctctgaggactcaccagatccggggctgccccctcgaggagtctggagagctgcactgcagcctctgcccattcactgctcctgctgccactgccttaaggctccaccagaagcggaggcaccccactgcagccccagcccgtgggccccggccccatctacagtgtggggactgtggcttcacctgtaaacagagccgttgcatgcagcagcaccggcggctcaagcacgagggggtgaagccccatcagtgccccttctgtgacttttcgaccaccagacggtaccggttagaggctcaccagtcccgacacacaggcattggccgcatcccctgcagctcttgcccccagacgtttggtaccaactcgaaactgcgcttgcaccggttaagggtacatgacaaaacacctacccacttctgtccactttgtgactatagtggctaccttcgccatgacatcactcgtcatgtcaacagctgccaccaaggcaccccagcctttgcctgctcccagtgtgaagcccagttcagctcagagacagcacttaagcagcatgctctgcgccgacaccccgagcctgcacagcctgcccctggctctcctgcagagaccactgagggccccctgcactgttcccgctgtgggttgctgtgccccagccctgccagcttacgaggacacacccgtaaacagcacccacggcttgagtgtggggcctgccaggaggccttccctagccgactggctctggatgagcaccggaggcagcagcatttcagccaccgctgtcagctctgtgactttgctgcccgggagcgggtgggcctggtaaagcactacctggaacagcatgaggagacttcagcagccgtggcagcctcagatggggatggggatgctggccagcccccgctacactgccccttttgtgacttcacatgccgccatcagctggtactagatcaccatgtgaaagggcatgggggcactcgtctctacaagtgcaccgattgtgcttacagcaccaagaaccgacagaagatcacctggcacagccgcatccacactggggaaaagccttaccactgtcacctctgcccctatgcctgtgctgatccctctcgtctcaagtaccacatgcggatccacaaggaggaacggaagtacctgtgccctgagtgtggctacaagtgcaagtgggtcaaccagctgaaataccacatgaccaagcatacaggactgaagccataccagtgtcccgagtgtgagtactgcaccaaccgggctgatgcactgcgtgtgcaccaggagacccggcatcgagaagcacgggctttcatgtgtgagcagtgtggcaaggccttcaagacgcgcttcctgctgcgcacccaccttcgcaagcacagtgaggccaaaccctatgtgtgcaatgtgtgccaccgtgctttccgctgggctgctggcctgcgccatcatgccctcacccacaccgaccgccaccccttcttttgccgcctctgcaactacaaggccaagcaaaagttccaggtggtcaagcacgtacgcaggcaccaccctgaccaagccgacccaaaccagggtgtgggcaaagaccccaccacccccacagtgcacctgcatgatgtgcagctggaggatcccagccctcctgctcctgccgctccccacactggacctgagggctgaaagcctgccccacctcctgtataggaagagggtatggtctgagatgtgcagactgggaccagcgctagcctgaggagctcagagcctaaggaaagactggcttttggggtacaagggtgactagaaccttcctgggactctggctatagtactttgaaattatcacccatataaaagagggacatggactataacgttgatttcttattgctgtacattgcgtttttaacctgcaagttctcagtttcttcaccatcactccatcaaagtccctggctataagatctggattttacccactccatcttctctttccttcttactgtgtcaattcctattttctttcagaatcttctaaaaacagttgtatctaaccgcatgtgctgttgtgcctaatgctctataaagcatgttaaac

SEQ ID NO: 201531 - DNA, 373 bp, Homo sapiens
  Payload ID: 19770
  Gene Name: zinc finger protein 142
  ENST ID: ENST00000450560
  CDS Start-End: 294-373
atcctagaggcggctgagccggaggcggtcgcacaaagcgggccccgggggccgttccagccgcggccgaccatagagatgcggctcccgccggctctgggtctggagccttccaggttacaaaccgcctttccagttcgctggctcttatgatccagctcctgcccgacgatgtggacactgtcatcacctccattttacagataggaaagctgaggcccagagaagcgaagcgactgtgtctgtccaagaccacgcgcatttaagaagccaaaacacacaagtcggtggtgatgacagacccccttttggactcacagccagccagtagcaccggggagatggatggactgtgccctgagctattgctgat

SEQ ID NO: 201532 - DNA, 5800 bp, Homo sapiens
  Payload ID: 19770
  Gene Name: zinc finger protein 142
  ENST ID: ENST00000433921
  CDS Start-End: 421-717
gagagagtggcttccacatccccaatatcctagaggcggctgagccggaggcggtcgcacaaagcgggccccgggggccgttccagccgcggccgaccatagagatgcggctcccgccggctctgggtctggagccttccaggttacaaaccgcctttccagttcgctggctcttatgatccagctcctgcccgacgatgtggacactgtcatcacctccattttacagataggaaagctgaggcccagagaagcgaagcgactgtgtctgtccaagaccacgcggtgaaggttcttaatcttgacggctcagcgtcctccttggctccccccggaggccatgtatggtcaagcttgaagattccccagaacagcgataatattcacatttaagaagccaaaacacacaagtcggtggtgatgacagacccccttttggactcacagccagccagtagcaccggggagatggatggactgtgccctgagctattgctgatccccccgcctctctctaaccgtggaatcctggggcctgtccagagcccctgtccttcccgggaccctgcacctatacctactgagccaggctgcctgctggtagaggccacagcaactgaagagggaccagggaacatggagatcattgtggagacagtagctggaaccctgaccccaggtgctcctggagagaccccagccactgcagcttcataggctccaacgtcaaactcttccggcagcatcagcggagccatggtgctgggacacagggagaactttctgccgttcagggccttccatcccaggagctgctgccagctcccaaactgcctccaggagagagagaaccttcacaggaagcaggtacacccttgcctgggcaggagacagctgaagaggagaatgtagagaaagaagagaagagtgacacccagaaggactcccaaaaggctgtggataaaggccaaggggctcagcggctggaaggggatgtggtctctggcaccgagtccctcttcaagacccatatgtgtccagagtgtaagcgctgctttaagaagcggactcatctggtggagcacctgcatctccacttcccagaccccagcctccagtgccctaactgccagaagttcttcaccagtaagagcaagctcaagacccatctgctgcgggagctgggtgaaaaggcccaccactgcccactgtgccactacagtgcggtggagaggaatgcactcaaccgccacatggccagcatgcatgaagatatttccaacttctactcagacacctatgcctgtcctgtctgccgtgaggaattccgcctcagccaggccctaaaggagcacctcaagagccacacggcagcagccgcagcagagccattaccccttcgctgctttcaggagggctgcagctatgcagcacccgaccgcaaggccttcattaagcacctgaaggagacccatggggtgcgggctgtggagtgccgccatcactcatgtcccatgctctttgccacagccgaagccatggaggcccaccacaagagtcactacgccttccactgcccccactgtgattttgcttgttccaataagcacctattccgtaaacacaagaagcagggccaccctggcagtgaagagctgcgctgcaccttctgcccctttgccaccttcaacccagtggcttaccaggatcatgtaggcaagatgcatgctcatgaaaagatccaccagtgtcctgagtgcaactttgccactgcccacaagagggtgctcatccgacacatgcttctacatacgggtgagaagccccacaagtgtgagctgtgtgacttcacatgccgagacgtgagctacctatccaagcacatgctgacccactccaacaccaaggattacatgtgcactgaatgtggctatgtcaccaagtggaagcactacctccgtgtgcacatgcgaaaacatgcaggggacctcaggtatcagtgcaaccagtgctcctatcgctgtcaccgggctgatcagctgagcagccacaagctgcggcatcagggcaagtctctgatgtgtgaggtgtgtgccttcgcctgcaagcggaagtatgagctgcagaagcacatggcttcccagcaccaccctggcacaccggccccactctacccttgccactactgcagttaccagagccgccacaagcaggctgtgctgagccatgagaactgcaagcatacccgcctccgtgagttccactgtgccctctgtgactaccgcaccttcagcaacaccacactcttgttccataaacgcaaggcccatggctatgtacctggagaccaggcctggcagctccgctatgcaagccaggagccagaaggggccatgcagggcccaacacccccaccagattcagagccctcaaaccagctgtcagcccgacctgaggggccaggtcacgaacctgggactgtggtggaccccagcttggaccaggccctgccagagatgagtgaggaggtcaacactggaagacaggagggcagtgaggctccccatgggggtgacctgggtggcagtcccagcccagcagaggtggaggagggcagctgcacactacacctagaggccctgggagtagagctggagtctgtgactgagccaccccttgaggaggtcactgaaacagcccctatggagttcaggcccctgggactggaagggccagatggactggaaggaccagagctatctagctttgaaggtattgggacttctgacttgagtgctgaagaaaatccccttctggaaaagccagtgtctgagccctccacaaatcctccatccttagaggaggctcctaacaactgggtaggaaccttcaagacaactccacctgctgagacagcacccttgcccccattacctgagtcagagtcattactcaaggccctaaggagacaggacaaagaacaagcagaggcattggtgctagaggggcgggtgcagatggtagtgatccagggagaggggcgagccttccgctgcccacactgcccttttatcactcgccgggagaaggccctgaatctgcactccaggactgggtgccaaggccgccgagagcccctgctgtgccccgagtgtggggctagcttcaagcaacaacgcggcctcagcacccacctgctgaagaagtgccctgttctactcagaaagaacaagggcttgcccagaccagattcacccatccctctgcaacctgtgctcccaggtacccaggcctcagaggacacagaaagtgggaagcccccacctgcatcacaagaagcagagctactgcttccaaaagatgctcctttggagcttcccagggagccagaagaaacagaagagcctcttgccacagtctctggttccccagtccctcctgcaggaaactccttgcccacagaggcccctaagaagcactgctttgacccagtccctcctgcaggaaactcctcacccacggaggcccctaagaagcaccaccttgacccagtccctcctgcaggaaactcctcacccacagaggccctgaagaagcaccgctttgagcagggcaagtttcactgcaactcctgcccattcctttgttcccggctctcctctattacctctcacgtggctgaaggctgcagggggggacgtggcgggggaggaaaacgagggaccccccagacccagcctgatgtgtccccgttgagcaatggggactctgctcccccgaagaatgggagtacagagtccagctctggtgatggggatacagttctggttcaaaagcagaagggggctcgcttctcctgccctacatgtccctttagctgccagcaggaacgggctctgaggactcaccagatccggggctgccccctcgaggagtctggagagctgcactgcagcctctgcccattcactgctcctgctgccactgccttaaggctccaccagaagcggaggcaccccactgcagccccagcccgtgggccccggccccatctacagtgtggggactgtggcttcacctgtaaacagagccgttgcatgcagcagcaccggcggctcaagcacgagggggtgaagccccatcagtgccccttctgtgacttttcgaccaccagacggtaccggttagaggctcaccagtcccgacacacaggcattggccgcatcccctgcagctcttgcccccagacgtttggtaccaactcgaaactgcgcttgcaccggttaagggtacatgacaaaacacctacccacttctgtccactttgtgactatagtggctaccttcgccatgacatcactcgtcatgtcaacagctgccaccaaggcaccccagcctttgcctgctcccagtgtgaagcccagttcagctcagagacagcacttaagcagcatgctctgcgccgacaccccgagcctgcacagcctgcccctggctctcctgcagagaccactgagggccccctgcactgttcccgctgtgggttgctgtgccccagccctgccagcttacgaggacacacccgtaaacagcacccacggcttgagtgtggggcctgccaggaggccttccctagccgactggctctggatgagcaccggaggcagcagcatttcagccaccgctgtcagctctgtgactttgctgcccgggagcgggtgggcctggtaaagcactacctggaacagcatgaggagacttcagcagccgtggcagcctcagatggggatggggatgctggccagcccccgctacactgccccttttgtgacttcacatgccgccatcagctggtactagatcaccatgtgaaagggcatgggggcactcgtctctacaagtgcaccgattgtgcttacagcaccaagaaccgacagaagatcacctggcacagccgcatccacactggggaaaagccttaccactgtcacctctgcccctatgcctgtgctgatccctctcgtctcaagtaccacatgcggatccacaaggaggaacggaagtacctgtgccctgagtgtggctacaagtgcaagtgggtcaaccagctgaaataccacatgaccaagcatacaggactgaagccataccagtgtcccgagtgtgagtactgcaccaaccgggctgatgcactgcgtgtgcaccaggagacccggcatcgagaagcacgggctttcatgtgtgagcagtgtggcaaggccttcaagacgcgcttcctgctgcgcacccaccttcgcaagcacagtgaggccaaaccctatgtgtgcaatgtgtgccaccgtgctttccgctgggctgctggcctgcgccatcatgccctcacccacaccgaccgccaccccttcttttgccgcctctgcaactacaaggccaagcaaaagttccaggtggtcaagcacgtacgcaggcaccaccctgaccaagccgacccaaaccagggtgtgggcaaagaccccaccacccccacagtgcacctgcatgatgtgcagctggaggatcccagccctcctgctcctgccgctccccacactggacctgagggctgaaagcctgccccacctcctgtataggaagagggtatggtctgagatgtgcagactgggaccagcgctagcctgaggagctcagagcctaaggaaagactggcttttggggtacaagggtgactagaaccttcctgggactctggctatagtactttgaaattatcacccatataaaagagggacatggactataa

SEQ ID NO: 201533 - DNA, 5909 bp, Homo sapiens
  Payload ID: 19770
  Gene Name: zinc finger protein 142
  Uniprot ID: P52746
  ENST ID: ENST00000449707
  CDS Start-End: 423-5486
ccccggcagccggcaagaggaagagagagtggcttccacatccccaatatcctagaggcggctgagccggaggcggtcgcacaaagcgggccccgggggccgttccagccgcggccgaccatagagatgcggctcccgccggctctgggtctggagataggaaagctgaggcccagagaagcgaagcgactgtgtctgtccaagaccacgcgccctcctgcccggaagataagcgtatttcttctctggtgcccacctgtctcctacctcaccctgccctcccgcaggtgaaggttcttaatcttgacggctcagcgtcctccttggctccccccggaggccatgtatggtcaagcttgaagattccccagaacagcgataatattcacatttaagaagccaaaacacacaagtcggtggtgatgacagacccccttttggactcacagccagccagtagcaccggggagatggatggactgtgccctgagctattgctgatccccccgcctctctctaaccgtggaatcctggggcctgtccagagcccctgtccttcccgggaccctgcacctatacctactgagccaggctgcctgctggtagaggccacagcaactgaagagggaccagggaacatggagatcattgtggagacagtagctggaaccctgaccccaggtgctcctggagagaccccagctcccaaactgcctccaggagagagagaaccttcacaggaagcaggtacacccttgcctgggcaggagacagctgaagaggagaatgtagagaaagaagagaagagtgacacccagaaggactcccaaaaggctgtggataaaggccaaggggctcagcggctggaaggggatgtggtctctggcaccgagtccctcttcaagacccatatgtgtccagagtgtaagcgctgctttaagaagcggactcatctggtggagcacctgcatctccacttcccagaccccagcctccagtgccctaactgccagaagttcttcaccagtaagagcaagctcaagacccatctgctgcgggagctgggtgaaaaggcccaccactgcccactgtgccactacagtgcggtggagaggaatgcactcaaccgccacatggccagcatgcatgaagatatttccaacttctactcagacacctatgcctgtcctgtctgccgtgaggaattccgcctcagccaggccctaaaggagcacctcaagagccacacggcagcagccgcagcagagccattaccccttcgctgctttcaggagggctgcagctatgcagcacccgaccgcaaggccttcattaagcacctgaaggagacccatggggtgcgggctgtggagtgccgccatcactcatgtcccatgctctttgccacagccgaagccatggaggcccaccacaagagtcactacgccttccactgcccccactgtgattttgcttgttccaataagcacctattccgtaaacacaagaagcagggccaccctggcagtgaagagctgcgctgcaccttctgcccctttgccaccttcaacccagtggcttaccaggatcatgtaggcaagatgcatgctcatgaaaagatccaccagtgtcctgagtgcaactttgccactgcccacaagagggtgctcatccgacacatgcttctacatacgggtgagaagccccacaagtgtgagctgtgtgacttcacatgccgagacgtgagctacctatccaagcacatgctgacccactccaacaccaaggattacatgtgcactgaatgtggctatgtcaccaagtggaagcactacctccgtgtgcacatgcgaaaacatgcaggggacctcaggtatcagtgcaaccagtgctcctatcgctgtcaccgggctgatcagctgagcagccacaagctgcggcatcagggcaagtctctgatgtgtgaggtgtgtgccttcgcctgcaagcggaagtatgagctgcagaagcacatggcttcccagcaccaccctggcacaccggccccactctacccttgccactactgcagttaccagagccgccacaagcaggctgtgctgagccatgagaactgcaagcatacccgcctccgtgagttccactgtgccctctgtgactaccgcaccttcagcaacaccacactcttgttccataaacgcaaggcccatggctatgtacctggagaccaggcctggcagctccgctatgcaagccaggagccagaaggggccatgcagggcccaacacccccaccagattcagagccctcaaaccagctgtcagcccgacctgaggggccaggtcacgaacctgggactgtggtggaccccagcttggaccaggccctgccagagatgagtgaggaggtcaacactggaagacaggagggcagtgaggctccccatgggggtgacctgggtggcagtcccagcccagcagaggtggaggagggcagctgcacactacacctagaggccctgggagtagagctggagtctgtgactgagccaccccttgaggaggtcactgaaacagcccctatggagttcaggcccctgggactggaagggccagatggactggaaggaccagagctatctagctttgaaggtattgggacttctgacttgagtgctgaagaaaatccccttctggaaaagccagtgtctgagccctccacaaatcctccatccttagaggaggctcctaacaactgggtaggaaccttcaagacaactccacctgctgagacagcacccttgcccccattacctgagtcagagtcattactcaaggccctaaggagacaggacaaagaacaagcagaggcattggtgctagaggggcgggtgcagatggtagtgatccagggagaggggcgagccttccgctgcccacactgcccttttatcactcgccgggagaaggccctgaatctgcactccaggactgggtgccaaggccgccgagagcccctgctgtgccccgagtgtggggctagcttcaagcaacaacgcggcctcagcacccacctgctgaagaagtgccctgttctactcagaaagaacaagggcttgcccagaccagattcacccatccctctgcaacctgtgctcccaggtacccaggcctcagaggacacagaaagtgggaagcccccacctgcatcacaagaagcagagctactgcttccaaaagatgctcctttggagcttcccagggagccagaagaaacagaagagcctcttgccacagtctctggttccccagtccctcctgcaggaaactccttgcccacagaggcccctaagaagcactgctttgacccagtccctcctgcaggaaactcctcacccacggaggcccctaagaagcaccaccttgacccagtccctcctgcaggaaactcctcacccacagaggccctgaagaagcaccgctttgagcagggcaagtttcactgcaactcctgcccattcctttgttcccggctctcctctattacctctcacgtggctgaaggctgcagggggggacgtggcgggggaggaaaacgagggaccccccagacccagcctgatgtgtccccgttgagcaatggggactctgctcccccgaagaatgggagtacagagtccagctctggtgatggggatacagttctggttcaaaagcagaagggggctcgcttctcctgccctacatgtccctttagctgccagcaggaacgggctctgaggactcaccagatccggggctgccccctcgaggagtctggagagctgcactgcagcctctgcccattcactgctcctgctgccactgccttaaggctccaccagaagcggaggcaccccactgcagccccagcccgtgggccccggccccatctacagtgtggggactgtggcttcacctgtaaacagagccgttgcatgcagcagcaccggcggctcaagcacgagggggtgaagccccatcagtgccccttctgtgacttttcgaccaccagacggtaccggttagaggctcaccagtcccgacacacaggcattggccgcatcccctgcagctcttgcccccagacgtttggtaccaactcgaaactgcgcttgcaccggttaagggtacatgacaaaacacctacccacttctgtccactttgtgactatagtggctaccttcgccatgacatcactcgtcatgtcaacagctgccaccaaggcaccccagcctttgcctgctcccagtgtgaagcccagttcagctcagagacagcacttaagcagcatgctctgcgccgacaccccgagcctgcacagcctgcccctggctctcctgcagagaccactgagggccccctgcactgttcccgctgtgggttgctgtgccccagccctgccagcttacgaggacacacccgtaaacagcacccacggcttgagtgtggggcctgccaggaggccttccctagccgactggctctggatgagcaccggaggcagcagcatttcagccaccgctgtcagctctgtgactttgctgcccgggagcgggtgggcctggtaaagcactacctggaacagcatgaggagacttcagcagccgtggcagcctcagatggggatggggatgctggccagcccccgctacactgccccttttgtgacttcacatgccgccatcagctggtactagatcaccatgtgaaagggcatgggggcactcgtctctacaagtgcaccgattgtgcttacagcaccaagaaccgacagaagatcacctggcacagccgcatccacactggggaaaagccttaccactgtcacctctgcccctatgcctgtgctgatccctctcgtctcaagtaccacatgcggatccacaaggaggaacggaagtacctgtgccctgagtgtggctacaagtgcaagtgggtcaaccagctgaaataccacatgaccaagcatacaggactgaagccataccagtgtcccgagtgtgagtactgcaccaaccgggctgatgcactgcgtgtgcaccaggagacccggcatcgagaagcacgggctttcatgtgtgagcagtgtggcaaggccttcaagacgcgcttcctgctgcgcacccaccttcgcaagcacagtgaggccaaaccctatgtgtgcaatgtgtgccaccgtgctttccgctgggctgctggcctgcgccatcatgccctcacccacaccgaccgccaccccttcttttgccgcctctgcaactacaaggccaagcaaaagttccaggtggtcaagcacgtacgcaggcaccaccctgaccaagccgacccaaaccagggtgtgggcaaagaccccaccacccccacagtgcacctgcatgatgtgcagctggaggatcccagccctcctgctcctgccgctccccacactggacctgagggctgaaagcctgccccacctcctgtataggaagagggtatggtctgagatgtgcagactgggaccagcgctagcctgaggagctcagagcctaaggaaagactggcttttggggtacaagggtgactagaaccttcctgggactctggctatagtactttgaaattatcacccatataaaagagggacatggactataacgttgatttcttattgctgtacattgcgtttttaacctgcaagttctcagtttcttcaccatcactccatcaaagtccctggctataagatctggattttacccactccatcttctctttccttcttactgtgtcaattcctattttctttcagaatcttctaaaaacagttgtatctaaccgcatgtgctgttgtgcctaatgctctataaagcatgttaaacagaaa

SEQ ID NO: 201534 - DNA, 880 bp, Homo sapiens
  Payload ID: 19770
  Gene Name: zinc finger protein 142
  ENST ID: ENST00000440934
  CDS Start-End: 1-880
gccagccagtagcaccggggagatggatggactgtgccctgagctattgctgatccccccgcctctctctaaccgtggaatcctggggcctgtccagagcccctgtccttcccgggaccctgcacctatacctactgagccaggctgcctgctggtagaggccacagcaactgaagagggaccagggaacatggagatcattgtggagacagtagctggaaccctgaccccaggtgctcctggagagaccccaggtgtcctggtaaaggtggtggaggtgtacttctgtgagcgctgtgaacagagcttcgcagagcccactctgctggccctgcaccagtgcagtgagacccatatacagcctgtgcagggcctctctagccccccatgctctgtagagctgcctcccagcaacccaaccctccctggccctctgcagggccagagcccgccagttagccccctatcatgccctgtgtgtagacaggagtttgcccaaccccaggccctgaagagccacttcaagattcaccggggcactcctgacaccttctcctgcccagaatctggctgtgtgttctctgctgaagatcgcaagggtctgcagcaccacctgaggcagactcacagagcagttcctgtgccctgttctttccggggctgccccctgcttttcgggagccagcagggcatggagctgcaccggcaggcgcattaccctttccactgcagccactgcagcttcataggctccaacgtcaaactcttccggcagcatcagcggagccatggtgctgggacacagggagaactttctgccgttcagggccttccatcccaggagctgctgccagctcccaaactgcctccaggagagaga

SEQ ID NO: 201535 - DNA, 2562 bp, Homo sapiens
  Payload ID: 19771
  Gene Name: zinc finger protein 143
  ENST ID: ENST00000299606
  CDS Start-End: 62-1894
ctgtcctggtgcatggtggtcggacgaaggaattgttggaaaattttctcggaggtagaagatgttgttagcccaaataaatcgagattctcagggaatgacagagtttcctggaggagggatggaggcgcaacatgttacgctgtgcttgacagaggcagtcaccgtggcagatggtgacaacttagaaaatatggaaggcgtaagcttgcaagcagtaacacttgcagatggttctactgcttacatacaacacaattctaaagatgcaaaactcatagatggccaggtcattcagttggaagatggttctgcggcctatgttcaacatgtacccatacctaaaagtaatagttatgaccagagtgcattacaggcggttcagctggaagatggtaccacagcttatatccaccatgcagtgcaagtcccgcagtctgacaccatcttggcaattcaggctgatgggacagtggcaggtctgcacactggggatgctacaattgaccctgacaccatcagtgctttggaacagtatgcagcaaaggtgtccattgatggaagtgaaagtgtagcaggtactggaatgattggagaaaatgagcaagagaaaaaaatgcagattgttttacaaggacatgctacaagagtaactgctaaatctcaacagagtggagagaaggcatttcgatgtgaatatgatggatgtggaaaattatatacaacagctcatcatctcaaggtccatgagaggtcacacacaggagatcggccttatcagtgtgagcatgcaggctgtgggaaggcatttgcaacaggttatggattaaaaagtcacgtcagaactcatacaggagaaaagccatatcggtgttcggaagataattgtactaaatctttcaaaacttcaggagatctacagaaacacatcagaactcatacaggagaaaggccctttaagtgtcccttcgaaggctgcggtcggtcctttacaacatcaaatatcagaaaagtgcacgttaggacacacacaggagaaagaccttattactgcacagagccaggatgtgggagggcatttgccagtgcaacaaattataaaaaccatgtgaggatacacacaggagaaaagccatatgtttgtacagttcctgggtgtgacaaaaggtttacagaatattccagtttgtacaaacatcatgttgtccacactcattccaaaccttacaactgtaaccactgtgggaagacatacaagcagatctccacgctggccatgcacaaacggacagcccacaacgacactgagcccatcgaggaggagcaggaagccttctttgagccgcccccaggtcaaggtgaagatgttcttaaagggtcccagattacgtatgttacaggtgtagaaggggacgacgttgtttctacacaagtagccacagtaacccaatctggactgagtcaacaagttacactcatatcccaggatgggactcagcatgtcaacatatctcaagctgacatgcaggccattggcaacaccatcacaatggtaacgcaggatggcacgcccatcacagtccccgcccatgatgcagtcatctcctcagcaggaacgcactctgttgctatggttactgctgagggtacagaaggggaacaggttgcaattgtagctcaagacttggcagcattccatactgcctcatcagaaatggggcaccagcagcatagccatcacttagtaaccacagaaaccagacctctgaccttagtagcaacatccaatggcacccagattgcagttcagcttggagaacagccatctctggaagaagccatcagaatagcgtctagaatccaacaaggagaaacgccagggttggatgattaatcctcagaacaatggagcaataaagcagaaggagtctttcatcttctggcagcagaaatccatgaagcccgggcccaggaaaattagaagttttccattcctgatacactgtacacatttttatgcgagagtggagaacattttattcttgacacttttgtgtatataacccttggaatagattctcagagtgattcattgtgtacaaggaagtatgaaattagggcaatacagtaaattttcatgttactcttttatcagatcacaaactcctagagtctacatgcaagactagtaaagtcttatggagtcttatgatggatttttaacttcccgtggaaaaaaaaataaaggctgtatctaaaatatcaaaggttctatatgtcacacaatcgtaattccaaaagccattatggataataaagggtgtaaagccttcagatatttccccagttagtagagtgtctgcggtttttgttctactatatgcttgtccatttttatttgtatctcatggtttgcagactgtttgaataatttatagtttcccatccctgttaaaaaccagctcttcaagctgaaatgctaattatattggcattacattgaattatgtacaaaattataaaatttggttatttaaaattaaaaagttaaatccagtggtt

SEQ ID NO: 201536 - DNA, 1954 bp, Homo sapiens
  Payload ID: 19771
  Gene Name: zinc finger protein 143
  Uniprot ID: P52747
  ENST ID: ENST00000396597
  CDS Start-End: 98-1921
gcgggttgcggggcctgggggccggacggctgtttcctgtcctggtgcatggtggtcggacgaaggaattgttggaaaattttctcggaggtagaagatgttgttagcccaaataaatcgagattctcagggaatgacagagtttcctggaggagggatggaggcgcaacatgttacgctgtgcttgacagaggcagtcaccgtggcagatgcaaaactcatagatggccaggtcattcagttggaagatggttctgcggcctatgttcaacatgtacccatacctaaaagtacaggggacagtttgcgtctagaggatggtcaagcagtacagttagaagatggtaccacagcatttattcaccacacctccaaagatagttatgaccagagtgcattacaggcggttcagctggaagatggtaccacagcttatatccaccatgcagtgcaagtcccgcagtctgacaccatcttggcaattcaggctgatgggacagtggcaggtctgcacactggggatgctacaattgaccctgacaccatcagtgctttggaacagtatgcagcaaaggtgtccattgatggaagtgaaagtgtagcaggtactggaatgattggagaaaatgagcaagagaaaaaaatgcagattgttttacaaggacatgctacaagagtaactgctaaatctcaacagagtggagagaaggcatttcgatgtgaatatgatggatgtggaaaattatatacaacagctcatcatctcaaggtccatgagaggtcacacacaggagatcggccttatcagtgtgagcatgcaggctgtgggaaggcatttgcaacaggttatggattaaaaagtcacgtcagaactcatacaggagaaaagccatatcggtgttcggaagataattgtactaaatctttcaaaacttcaggagatctacagaaacacatcagaactcatacaggagaaaggccctttaagtgtcccttcgaaggctgcggtcggtcctttacaacatcaaatatcagaaaagtgcacgttaggacacacacaggagaaagaccttattactgcacagagccaggatgtgggagggcatttgccagtgcaacaaattataaaaaccatgtgaggatacacacaggagaaaagccatatgtttgtacagttcctgggtgtgacaaaaggtttacagaatattccagtttgtacaaacatcatgttgtccacactcattccaaaccttacaactgtaaccactgtgggaagacatacaagcagatctccacgctggccatgcacaaacggacagcccacaacgacactgagcccatcgaggaggagcaggaagccttctttgagccgcccccaggtcaaggtgaagatgttcttaaagggtcccagattacgtatgttacaggtgtagaaggggacgacgttgtttctacacaagtagccacagtaacccaatctggactgagtcaacaagttacactcatatcccaggatgggactcagcatgtcaacatatctcaagctgacatgcaggccattggcaacaccatcacaatggtaacgcaggatggcacgcccatcacagtccccgcccatgatgcagtcatctcctcagcaggaacgcactctgttgctatggttactgctgagggtacagaaggggaacaggttgcaattgtagctcaagacttggcagcattccatactgcctcatcagaaatggggcaccagcagcatagccatcacttagtaaccacagaaaccagacctctgaccttagtagcaacatccaatggcacccagattgcagttcagcttggagaacagccatctctggaagaagccatcagaatagcgtctagaatccaacaaggagaaacgccagggttggatgattaatcctcagaacaatggagcaataaagcagaagga

SEQ ID NO: 201537 - DNA, 2947 bp, Homo sapiens
  Payload ID: 19771
  Gene Name: zinc finger protein 143
  Uniprot ID: P52747
  ENST ID: ENST00000396602
  CDS Start-End: 120-2036
gggcgggcctcagacacactatgcgggttgcggggcctgggggccggacggctgtttcctgtcctggtgcatggtggtcggacgaaggaattgttggaaaattttctcggaggtagaagatgttgttagcccaaataaatcgagattctcagggaatgacagagtttcctggaggagggatggaggcgcaacatgttacgctgtgcttgacagaggcagtcaccgtggcagatggtgacaacttagaaaatatggaaggcgtaagcttgcaagcagtaacacttgcagatggttctactgcttacatacaacacaattctaaagatgcaaaactcatagatggccaggtcattcagttggaagatggttctgcggcctatgttcaacatgtacccatacctaaaagtacaggggacagtttgcgtctagaggatggtcaagcagtacagttagaagatggtaccacagcatttattcaccacacctccaaagatagttatgaccagagtgcattacaggcggttcagctggaagatggtaccacagcttatatccaccatgcagtgcaagtcccgcagtctgacaccatcttggcaattcaggctgatgggacagtggcaggtctgcacactggggatgctacaattgaccctgacaccatcagtgctttggaacagtatgcagcaaaggtgtccattgatggaagtgaaagtgtagcaggtactggaatgattggagaaaatgagcaagagaaaaaaatgcagattgttttacaaggacatgctacaagagtaactgctaaatctcaacagagtggagagaaggcatttcgatgtgaatatgatggatgtggaaaattatatacaacagctcatcatctcaaggtccatgagaggtcacacacaggagatcggccttatcagtgtgagcatgcaggctgtgggaaggcatttgcaacaggttatggattaaaaagtcacgtcagaactcatacaggagaaaagccatatcggtgttcggaagataattgtactaaatctttcaaaacttcaggagatctacagaaacacatcagaactcatacaggagaaaggccctttaagtgtcccttcgaaggctgcggtcggtcctttacaacatcaaatatcagaaaagtgcacgttaggacacacacaggagaaagaccttattactgcacagagccaggatgtgggagggcatttgccagtgcaacaaattataaaaaccatgtgaggatacacacaggagaaaagccatatgtttgtacagttcctgggtgtgacaaaaggtttacagaatattccagtttgtacaaacatcatgttgtccacactcattccaaaccttacaactgtaaccactgtgggaagacatacaagcagatctccacgctggccatgcacaaacggacagcccacaacgacactgagcccatcgaggaggagcaggaagccttctttgagccgcccccaggtcaaggtgaagatgttcttaaagggtcccagattacgtatgttacaggtgtagaaggggacgacgttgtttctacacaagtagccacagtaacccaatctggactgagtcaacaagttacactcatatcccaggatgggactcagcatgtcaacatatctcaagctgacatgcaggccattggcaacaccatcacaatggtaacgcaggatggcacgcccatcacagtccccgcccatgatgcagtcatctcctcagcaggaacgcactctgttgctatggttactgctgagggtacagaaggggaacaggttgcaattgtagctcaagacttggcagcattccatactgcctcatcagaaatggggcaccagcagcatagccatcacttagtaaccacagaaaccagacctctgaccttagtagcaacatccaatggcacccagattgcagttcagcttggagaacagccatctctggaagaagccatcagaatagcgtctagaatccaacaaggagaaacgccagggttggatgattaatcctcagaacaatggagcaataaagcagaaggagtctttcatcttctggcagcagaaatccatgaagcccgggcccaggaaaattagaagttttccattcctgatacactgtacacatttttatgcgagagtggagaacattttattcttgacacttttgtgtatataacccttggaatagattctcagagtgattcattgtgtacaaggaagtatgaaattagggcaatacagtaaattttcatgttactcttttatcagatcacaaactcctagagtctacatgcaagactagtaaagtcttatggagtcttatgatggatttttaacttcccgtggaaaaaaaaataaaggctgtatctaaaatatcaaaggttctatatgtcacacaatcgtaattccaaaagccattatggataataaagggtgtaaagccttcagatatttccccagttagtagagtgtctgcggtttttgttctactatatgcttgtccatttttatttgtatctcatggtttgcagactgtttgaataatttatagtttcccatccctgttaaaaaccagctcttcaagctgaaatgctaattatattggcattacattgaattatgtacaaaattataaaatttggttatttaaaattaaaaagttaaatccagtggttttgttaaagattttgcttagtattcaatttttattactgttttttaaaaataatgaatcatcaaagtttaaccacaggctggtgcccgggataacagtactgtaattggaaatggctttactctgaaaattaggttagtgggttggtgtaaattatttatttttgcttatgtacttttgttttaaagcttatttaccccaaagtttattattaattttgaatacagcaatttttaaaatgtta

SEQ ID NO: 201538 - DNA, 2696 bp, Homo sapiens
  Payload ID: 19771
  Gene Name: zinc finger protein 143
  Uniprot ID: P52747
  ENST ID: ENST00000396604
  CDS Start-End: 342-2255
cattcagcaatcgccagacaaagcccttctggtctgcagaacgcactccggcaagcccaccgggagaaccaaagccgcctcctcgcccctgtggggaaaatggcgctcgtcaccccggctccctcccgggtaatcacaaggaccagcctccctccctcgctacaaaatggcgcctcccgctggggccccagaatcggtatgactcgctagtcagtgaggcggggtccgtctgggataagcggttatgtcaaccagtcagacacaggagctttgattctgcactttgcgcgagccactcaggggcgggctgtaaagtcaggcttggctgacgtcagtagaagatgttgttagcccaaataaatcgagattctcagggaatgacagagtttcctggaggagggatggaggcgcaacatgttacgctgtgcttgacagaggcagtcaccgtggcagatggtgacaacttagaaaatatggaaggcgtaagcttgcaagcagtaacacttgcagatggttctactgcttacatacaacacaattctaaagatgcaaaactcatagatggccaggtcattcagttggaagatggttctgcggcctatgttcaacatgtacccatacctaaaagtagggacagtttgcgtctagaggatggtcaagcagtacagttagaagatggtaccacagcatttattcaccacacctccaaagatagttatgaccagagtgcattacaggcggttcagctggaagatggtaccacagcttatatccaccatgcagtgcaagtcccgcagtctgacaccatcttggcaattcaggctgatgggacagtggcaggtctgcacactggggatgctacaattgaccctgacaccatcagtgctttggaacagtatgcagcaaaggtgtccattgatggaagtgaaagtgtagcaggtactggaatgattggagaaaatgagcaagagaaaaaaatgcagattgttttacaaggacatgctacaagagtaactgctaaatctcaacagagtggagagaaggcatttcgatgtgaatatgatggatgtggaaaattatatacaacagctcatcatctcaaggtccatgagaggtcacacacaggagatcggccttatcagtgtgagcatgcaggctgtgggaaggcatttgcaacaggttatggattaaaaagtcacgtcagaactcatacaggagaaaagccatatcggtgttcggaagataattgtactaaatctttcaaaacttcaggagatctacagaaacacatcagaactcatacaggagaaaggccctttaagtgtcccttcgaaggctgcggtcggtcctttacaacatcaaatatcagaaaagtgcacgttaggacacacacaggagaaagaccttattactgcacagagccaggatgtgggagggcatttgccagtgcaacaaattataaaaaccatgtgaggatacacacaggagaaaagccatatgtttgtacagttcctgggtgtgacaaaaggtttacagaatattccagtttgtacaaacatcatgttgtccacactcattccaaaccttacaactgtaaccactgtgggaagacatacaagcagatctccacgctggccatgcacaaacggacagcccacaacgacactgagcccatcgaggaggagcaggaagccttctttgagccgcccccaggtcaaggtgaagatgttcttaaagggtcccagattacgtatgttacaggtgtagaaggggacgacgttgtttctacacaagtagccacagtaacccaatctggactgagtcaacaagttacactcatatcccaggatgggactcagcatgtcaacatatctcaagctgacatgcaggccattggcaacaccatcacaatggtaacgcaggatggcacgcccatcacagtccccgcccatgatgcagtcatctcctcagcaggaacgcactctgttgctatggttactgctgagggtacagaaggggaacaggttgcaattgtagctcaagacttggcagcattccatactgcctcatcagaaatggggcaccagcagcatagccatcacttagtaaccacagaaaccagacctctgaccttagtagcaacatccaatggcacccagattgcagttcagcttggagaacagccatctctggaagaagccatcagaatagcgtctagaatccaacaaggagaaacgccagggttggatgattaatcctcagaacaatggagcaataaagcagaaggagtctttcatcttctggcagcagaaatccatgaagcccgggcccaggaaaattagaagttttccattcctgatacactgtacacatttttatgcgagagtggagaacattttattcttgacacttttgtgtatataacccttggaatagattctcagagtgattcattgtgtacaaggaagtatgaaattagggcaatacagtaaattttcatgttactcttttatcagatcacaaactcctagagtctacatgcaagactagtaaagtcttatggagtcttatgatggatttttaacttcccgtggaaaaaaaaataaaggctgtatctaaaatatcaaaggttctatatgtcacacaatcgtaattccaaaagccattatggataataaagggtgtaaagccttcag

SEQ ID NO: 201539 - DNA, 554 bp, Homo sapiens
  Payload ID: 19771
  Gene Name: zinc finger protein 143
  ENST ID: ENST00000412390
  CDS Start-End: 128-554
gttggaaaattttctcggagaaacgtggcatggctgcattgaactgtgcctctactacatggttttatttttaaaataaaaaaccactccaccctcatagcatagttccatttctggaaggtagaagatgttgttagcccaaataaatcgagattctcagggaatgacagagtttcctggaggagggatggaggcgcaacatgttacgctgtgcttgacagaggcagtcaccgtggcagatggtgacaacttagaaaatatggaaggcgtaagcttgcaagcagtaacacttgcagatggttctactgcttacatacaacacaattctaaagatgcaaaactcatagatggccaggtcattcagttggaagatggttctgcggcctatgttcaacatgtacccatacctaaaagtagggacagtttgcgtctagaggatggtcaagcagtacagttagaagatggtaccacagcatttattcaccacacctccaaagatagttatgaccagagtgcattacaggcggttcagctggaagatggtaccacagctt

SEQ ID NO: 201540 - DNA, 265 bp, Homo sapiens
  Payload ID: 19771
  Gene Name: zinc finger protein 143
  ENST ID: ENST00000417726
  CDS Start-End: 47-265
cagaagatacttgtgttttcctgtagttgacaaaaaacggtagaagatgttgttagcccaaataaatcgagattctcagggaatgacagagtttcctggaggagggatggaggcgcaacatgttacgctgtgcttgacagaggcagtcaccgtggcagatggtgacaacttagaaaatatggaaggcgtaagcttgcaagcagtaacacttgcagatggttctactgcttacatacaacacaattctaaagatgcaaaactcata

SEQ ID NO: 201541 - DNA, 551 bp, Homo sapiens
  Payload ID: 19771
  Gene Name: zinc finger protein 143
  ENST ID: ENST00000414370
  CDS Start-End: 301-551
aaaaaaaggttactgaggtctaacatcggatattagaaatttacaattttatcctcccttttctccagttttggccaaaagagtgaacaaattcttataagtctctttgaaacgtattattgtggaacgcgaactagtttttattccttccccttttgctttggacatttgttttttccacataataacgaagttaaaaagaggaaagaagaataccattgccagcccattatttgtttaaaatcagcgtcagcctttgctttggaagtgtctaaatcagctgatataatcaagtagaagatgttgttagcccaaataaatcgagattctcagggaatgacagagtttcctggaggagggatggaggcgcaacatgttacgctgtgcttgacagaggcagtcaccgtggcagatggtgacaacttagaaaatatggaaggcgtaagcttgcaagcagtaacacttgcagatggttctactgcttacatacaacacaattctaaagatgcaaaactcatagatggccaggtcattcagttggaagatggttc

SEQ ID NO: 201542 - DNA, 502 bp, Homo sapiens
  Payload ID: 19771
  Gene Name: zinc finger protein 143
  ENST ID: ENST00000447186
  CDS Start-End: 1-502
tgtagaaggggacgacgttgtttctacacaagtagccacagtaacccaatctggactgagtcaacaagttacactcatatcccaggatgggactcagcatgtcaacatatctcaagctgacatgcaggccattggcaacaccatcacaatggtaacgcaggatggcacgcccatcacagtccccgcccatgatgcagtcatctcctcagcaggaacgcactctgttgctatggttactgctgagggtacagaaggggaacaggttgcaattgtagctcaagacttggcagcattccatactgcctcatcagaaatggggcaccagcagcatagccatcacttagtaaccacagaaaccagacctctgaccttagtagcaacatccaatggcacccagattgcagttcaggtgagtaccaaggcatactgtcctcagtcgacagcagtgctgctcatagctttcaactttgtacactgtgcttcgtgtataacctttacagga

SEQ ID NO: 201543 - DNA, 644 bp, Homo sapiens
  Payload ID: 19771
  Gene Name: zinc finger protein 143
  ENST ID: ENST00000438144
  CDS Start-End: 75-644
ggccggacggctgtttcctgtcctggtgcatggtggtcggacgaaggaattgttggaaaattttctcggagaagatgttgttagcccaaataaatcgagattctcagggaatgacagagtttcctggaggagggatggaggcgcaacatgttacgctgtgcttgacagaggcagtcaccgtggcagatggtgacaacttagaaaatatggaaggcgtaagcttgcaagcagtaacacttgcagatggttctactgcttacatacaacacaattctaaagatgcaaaactcatagatggccaggtcattcagttggaagatggttctgcggcctatgttcaacatgtacccatacctaaaagtacaggggacagtttgcgtctagaggatggtcaagcagtacagttagaagatggtaccacagcatttattcaccacacctccaaagatagttatgaccagagtgcattacaggcggttcagctggaagatggtaccacagcttatatccaccatgcagtgcaagtcccgcagtctgacaccatcttggcaattcaggctgatgggacagtggcaggtctgcacactggggatgctacaattgaccctgacaccatcagtgctttggaacagtatgcagcaaag

SEQ ID NO: 201544 - DNA, 563 bp, Homo sapiens
  Payload ID: 19771
  Gene Name: zinc finger protein 143
  ENST ID: ENST00000496276
  CDS Start-End: 73-333
acggctgtttcctgtcctggtgcatggtggtcggacgaaggaattgttggaaaattttctcggaggtagaagatgttgttagcccaaataaatcgagattctcagggaatgacagagtttcctggaggagggatggaggcgcaacatgttacgctgtgcttgacagaggcagtcaccgtggcagatggtgacaacttagaaaatatggaaggcgtaagcttgcaagcagtaacacttgcagatggttctactgcttacatacaacacaattctaaaggatcactggatgtgttattgaattgcctcagaacattgagggaagaatcaagatgaacacgagcttaagttgtatgcaaaactcatagatggccaggtcattcagttggaagatggttctgcggcctatgttcaacatgtacccatacctaaaagtacaggggacagtttgcgtctagaggatggtcaagcagtacagttagaagatggtaccacagcatttattcaccacacctccaaagatagttatgaccagagtgcattacaggcggttcagctggaagatg

SEQ ID NO: 201545 - DNA, 2022 bp, Homo sapiens
  Payload ID: 19771
  Gene Name: zinc finger protein 143
  Uniprot ID: P52747
  ENST ID: ENST00000530463
  CDS Start-End: 109-2022
agacacactatgcgggttgcggggcctgggggccggacggctgtttcctgtcctggtgcatggtggtcggacgaaggaattgttggaaaattttctcggaggtagaagatgttgttagcccaaataaatcgagattctcagggaatgacagagtttcctggaggagggatggaggcgcaacatgttacgctgtgcttgacagaggcagtcaccgtggcagatggtgacaacttagaaaatatggaaggcgtaagcttgcaagcagtaacacttgcagatggttctactgcttacatacaacacaattctaaagatgcaaaactcatagatggccaggtcattcagttggaagatggttctgcggcctatgttcaacatgtacccatacctaaaagtagggacagtttgcgtctagaggatggtcaagcagtacagttagaagatggtaccacagcatttattcaccacacctccaaagatagttatgaccagagtgcattacaggcggttcagctggaagatggtaccacagcttatatccaccatgcagtgcaagtcccgcagtctgacaccatcttggcaattcaggctgatgggacagtggcaggtctgcacactggggatgctacaattgaccctgacaccatcagtgctttggaacagtatgcagcaaaggtgtccattgatggaagtgaaagtgtagcaggtactggaatgattggagaaaatgagcaagagaaaaaaatgcagattgttttacaaggacatgctacaagagtaactgctaaatctcaacagagtggagagaaggcatttcgatgtgaatatgatggatgtggaaaattatatacaacagctcatcatctcaaggtccatgagaggtcacacacaggagatcggccttatcagtgtgagcatgcaggctgtgggaaggcatttgcaacaggttatggattaaaaagtcacgtcagaactcatacaggagaaaagccatatcggtgttcggaagataattgtactaaatctttcaaaacttcaggagatctacagaaacacatcagaactcatacaggagaaaggccctttaagtgtcccttcgaaggctgcggtcggtcctttacaacatcaaatatcagaaaagtgcacgttaggacacacacaggagaaagaccttattactgcacagagccaggatgtgggagggcatttgccagtgcaacaaattataaaaaccatgtgaggatacacacaggagaaaagccatatgtttgtacagttcctgggtgtgacaaaaggtttacagaatattccagtttgtacaaacatcatgttgtccacactcattccaaaccttacaactgtaaccactgtgggaagacatacaagcagatctccacgctggccatgcacaaacggacagcccacaacgacactgagcccatcgaggaggagcaggaagccttctttgagccgcccccaggtcaaggtgaagatgttcttaaagggtcccagattacgtatgttacaggtgtagaaggggacgacgttgtttctacacaagtagccacagtaacccaatctggactgagtcaacaagttacactcatatcccaggatgggactcagcatgtcaacatatctcaagctgacatgcaggccattggcaacaccatcacaatggtaacgcaggatggcacgcccatcacagtccccgcccatgatgcagtcatctcctcagcaggaacgcactctgttgctatggttactgctgagggtacagaaggggaacaggttgcaattgtagctcaagacttggcagcattccatactgcctcatcagaaatggggcaccagcagcatagccatcacttagtaaccacagaaaccagacctctgaccttagtagcaacatccaatggcacccagattgcagttcagcttggagaacagccatctctggaagaagccatcagaatagcgtctagaatccaacaaggagaaacgccagggttggatgattaa

SEQ ID NO: 201546 - DNA, 548 bp, Homo sapiens
  Payload ID: 19771
  Gene Name: zinc finger protein 143
  ENST ID: ENST00000532577
  CDS Start-End: 96-548
atgcgggttgcggggcctgggggccggacggctgtttcctgtcctggtgcatggtggtcggacgaaggaattgttggaaaattttctcggagaagatgttgttagcccaaataaatcgagattctcagggaatgacagagtttcctggaggagggatggaggcgcaacatgttacgctgtgcttgacagaggcagtcaccgtggcagatggtgacaacttagaaaatatggaaggcgtaagcttgcaagcagtaacacttgcagatggttctactgcttacatacaacacaattctaaagatgcaaaactcatagatggccaggtcattcagttggaagatggttctgcggcctatgttcaacatgtacccatacctaaaagtagggacagtttgcgtctagaggatggtcaagcagtacagttagaagatggtaccacagcatttattcaccacacctccaaagatagttatgaccagagtgcattacaggcggttcagctggaagatggtaccacagcttatatccaccatgcagtgcaagtcccg

SEQ ID NO: 201547 - DNA, 575 bp, Homo sapiens
  Payload ID: 19771
  Gene Name: zinc finger protein 143
  ENST ID: ENST00000534265
  CDS Start-End: 51-575
cctggtgcatggtggtcggacgaaggaattgttggaaaattttctcggagatgttgttagcccaaataaatcgagattctcagggaatgacagagtttcctggaggagggatggaggcgcaacatgttacgctgtgcttgacagaggcagtcaccgtggcagatggtgacaacttagaaaatatggaaggcgtaagcttgcaagcagtaacacttgcagatggttctactgcttacatacaacacaattctaaagatgcaaaactcatagatggccaggtcattcagttggaagatggttctgcggcctatgttcaacatgtacccatacctaaaagtacaggggacagtttgcgtctagaggatggtcaagcagtacagttagaagatggtaccacagcatttattcaccacacctccaaagatagttatgaccagagtgcattacaggcggttcagctggaagatggtaccacagcttatatccaccatgcagtgcaagtcccgcagtctgacaccatcttggcaattcaggctgatgggacagtggcaggtctgcacactggggatgctaca

SEQ ID NO: 201548 - DNA, 555 bp, Homo sapiens
  Payload ID: 19771
  Gene Name: zinc finger protein 143
  ENST ID: ENST00000531943
  CDS Start-End: 148-555
accgcatggcgatgcccgggagactggagaagctcaggcaggcttggaagccaatccccggcatacagcagctctcgggaatgcagagccctagagcaagaccaagggcctcggccgacactgagagcctccagggagaggtagaagatgttgttagcccaaataaatcgagattctcagggaatgacagagtttcctggaggagggatggaggcgcaacatgttacgctgtgcttgacagaggcagtcaccgtggcagatggtgacaacttagaaaatatggaaggcgtaagcttgcaagcagtaacacttgcagatggttctactgcttacatacaacacaattctaaagatgcaaaactcatagatggccaggtcattcagttggaagatggttctgcggcctatgttcaacatgtacccatacctaaaagtacaggggacagtttgcgtctagaggatggtcaagcagtacagttagaagatggtaccacagcatttattcaccacacctccaaagatagttatgaccagagtgcattacaggcggttcag

SEQ ID NO: 201549 - DNA, 627 bp, Homo sapiens
  Payload ID: 19771
  Gene Name: zinc finger protein 143
  ENST ID: ENST00000533542
  CDS Start-End: 103-627
actatgcgggttgcggggcctgggggccggacggctgtttcctgtcctggtgcatggtggtcggacgaaggaattgttggaaaattttctcggaggtagaagatgttgttagcccaaataaatcgagattctcagggaatgacagagtttcctggaggagggatggaggcgcaacatgttacgctgtgcttgacagaggcagtcaccgtggcagatgcaaaactcatagatggccaggtcattcagttggaagatggttctgcggcctatgttcaacatgtacccatacctaaaagtagggacagtttgcgtctagaggatggtcaagcagtacagttagaagatggtaccacagcatttattcaccacacctccaaagatagttatgaccagagtgcattacaggcggttcagctggaagatggtaccacagcttatatccaccatgcagtgcaagtcccgcagtctgacaccatcttggcaattcaggctgatgggacagtggcaggtctgcacactggggatgctacaattgaccctgacaccatcagtgctttggaacagtatgcagcaaaggtgtccattgatggaagtgaaagtgtagcaggtactggaatgattggagaa

SEQ ID NO: 201550 - DNA, 565 bp, Homo sapiens
  Payload ID: 19771
  Gene Name: zinc finger protein 143
  ENST ID: ENST00000526657
  CDS Start-End: 68-565
cggctgtttcctgtcctggtgcatggtggtcggacgaaggaattgttggaaaattttctcggagaagatgttgttagcccaaataaatcgagattctcagggaatgacagagtttcctggaggagggatggaggcgcaacatgttacgctgtgcttgacagaggcagtcaccgtggcagatggtgacaacttagaaaatatggaaggcgtaagcttgcaagcagtaacacttgcagatggttctactgcttacatacaacacaattctaaagatgcaaaactcatagatggccaggtcattcagttggaagatggttctgcggcctatgttcaacatgtacccatacctaaaagtacaggggacagtttgcgtctagaggatggtcaagcagtacagttagaagatggtaccacagcatttattcaccacacctccaaagttatgaccagagtgcattacaggcggttcagctggaagatggtaccacagcttatatccaccatgcagtgcaagtcccgcagtctgacaccatcttggcaattcaggctgatgggacagtggcag

SEQ ID NO: 201551 - DNA, 3326 bp, Homo sapiens
  Payload ID: 19772
  Gene Name: zinc finger protein 146
  Uniprot ID: Q15072
  ENST ID: ENST00000443387
  CDS Start-End: 993-1871
gacattttggtctttgtccgcgggtcagtacggcccctgggtccacgtggcgcgaaagtaggaggaagacataggccaaggagccagacttcctgtgttaactccttcctctgccactttttaccttggggacctcagttaatatgatcctctgttgaagcaagaagacaaactgtatggtggagaaagaagtgggaaggatctgcgcggaagaagcctgagaagatgatgcacagatagagaggcaccaggacttgagaggcaccaggacttgggaggcatgttgatccatctccaggaaagactgagaaaaagagcgttgaatataagaaaaaatacttcctctgttctcagatcgtatttgttttaaggccacacctttttgaagttttcagtttgaaacacaacctggactgaaatcatgagggaggttgtgtaggaaagaatcatcaagggacttagttgggagcttctctaccacagcttactccttatggtattaaccccctttaagtgtaaatgtctttggtttaaaacgtttgtacctcatctgttaccagagtgttcatactggagagaaaccctatgaatttactgaatgtgggggaactgttactcatatgttgcatttcgtcgaacgtgcaagtcatgctgaagagaaaccctgtgcttctaaggagtattgacaagcccttagctagatgacaatctcattgagaagcagaaaattcatgctggagagaaactagtgaaggtagcaatacttcattgaatattagaaaatttttctagagagaaagcattgaatatactgagtatgataacatttcctctcaaaccttatcccttactctgcatttgggagatcatacacagagaagccttataaatgtaagagatgtggaaatatcttcagccaaaagtaaatcctcactcatcaagaaatttttactggagagaaaccttgtgaatgtgggaaagcttccattcagatgtcacacctcagccagcagagaatttacagtggggaaaacccctttgcctgtaaggtatgtggaaaagtcttcagccacaaatcaaacctcactgagcatgagcattttcacacgagagagaaaccttttgaatgtaacgagtgtggaaaagcctttagccaaaagcagtatgtcattaaacatcagaacacccatactggcgagaagcttttcgaatgtaatgaatgtggaaaatcatttagccagaaggaaaacctccttacgcaccagaaaattcacactggagaaaaaccttttgagtgtaaagattgcgggaaagctttcattcagaagtcaaacctcatcagacaccagagaactcacacaggagagaagccctttgtatgtaaggagtgtggaaaaaccttcagtggcaaatccaaccttactgagcatgagaaaatccatattggagagaagccttttaaatgtagtgaatgtggaacagcctttggccagaagaagtacctcataaaacatcagaacattcacactggagagaaaccctatgaatgtaacgaatgtggaaaagccttctctcagcgaacatcacttattgtacatgtgaggattcattcaggtgataaaccttacgaatgcaatgtttgtggaaaagccttctctcagagctcatctctcactgtgcatgtgagaagccatacaggggagaagccctatggttgtaatgaatgtgggaaagctttctctcagttctcaacccttgctctgcatttgagaatacacacaggtaagaagccttatcagtgcagtgaatgtgggaaagctttcagccagaagtcacaccacattagacaccagaaaattcatactcactaaaaaccccatgaaagccttgaaagtgggaaagctttcattagaaatttgcacctcatcatgccccagaaataatccttctgaagcaaagcaccacgaatgaggttaactttaacaagtactaaaaacttaagggacaccagaaaatttgtactgaagagaaagacatgcatatgattaaaaccctgtgtccaacagagaaacctgcagcagagataatggtgaaagtttaggcacattttcactaaaagtgggaacagaaaatggaggcctgttttttattgctaccaccatagatctggagatcttcgccagtaacaagaaaaattaagttgtaaatattggaaaggaacagacaaaaatagatgacatggtcatctacaactaatattaagactcctgtggtattgattgagcagagcagaagagatttcaaaaaaagacctatgcatttattagaatttggaatatgatacaagtggcatcaggaaatgaggaaataatggaactattttttttaagtggaggtagtttgttctccaagggggaaaaatagaccatgaactatacacaaaagtgaatccagagattaaaaacagaaatatggaaaagctatgtactaaaatgcatatgaccttgggaatagggaaacattccttggaacaatttgagaaatacttagcggttctacttatgagtatgaatgctcaggaaatacgcactaggatatttactgtggcttgatttgtagtagccaaaaattagaaacaactgagaaagcccatcacgaacaatatgggaaattcttatgtaatactatatatctgtaaaatgcaacaaatgaaatccacatgtattaacagaaagatcccagaattgttgaggggggatcaagttgcagaatgatacagatagtacaatgacttttttgtaaatttgaattaaaagtttcctcataaaactcagtactatctattggtaatggatgcatatatgtatgtacatgtttttgaaacggattggaaggatacagaccaaactcttgatagtggtcacctgtgaagagtggagaagggaaaataatgagtgtgggaggtgggatgggtattggttaaaggggacttcagctttttatataaacatccacttctctttcaaaagacttcaagtaaatataagaagatactgattgattctggattgtggtatagggatatcttgtcttattttttgtacttttctgtatttttaaaatttctcaaaataggaatgggagtgaggatgggaatgctgtatctgtggaagtcatgttatactggattcatttccaattaaatactaaacattttatagaaaatatttctaaaattttatcacggatgaatggatggacttgctctctatgtaatatgaaattaatctattttattaaaatttaaaaggacagcacaatccaaa

SEQ ID NO: 201552 - DNA, 3780 bp, Homo sapiens
  Payload ID: 19772
  Gene Name: zinc finger protein 146
  Uniprot ID: Q15072
  ENST ID: ENST00000456324
  CDS Start-End: 1450-2328
aggactcccagacccctcaccttctgcctcccctggtcgcgtccgggtccttgcggagctaactagctcgccacgacgtcaagaacgacgtaacgtcaggccgctgtgggctctgggaattgtagtccagagctagatcggccacggacagaatggcgttctcttatctctgagtcggggcctggctcgttttgacatttttgcgcccacgagtcttcggagagggcgtcgccactccagaccttccagcaagcttgaagtcatctgacgctaaaggactacttacctcaagagctccatcgtcacagaaggaggcggccaagttcgcggggggaggggaggagacagagagtcgaccagtaaagcctcaagggaaatgtagtccaaggcctgagaagcgacgttgctggtaatagaaggtaattcagtaccagcctgggcctggccgcggtgaccgaggcgggccgcgtcgcggagacttctgggagtgcttcctcgctctccgagtgcgcaagcgcagcgcaccgagtggacattttggtctttgtccgcgggtcagtacggcccctgggtccacgtggcgcgaaagtaggagttaatatgatcctctgttgaagcaagaagacaaactgtatggtggagaaagaagtgggaaggatctgcgcggaagaagcctgagaagatgatgcacagatagagaggcaccaggacttgagaggcaccaggacttgggaggcatgttgatccatctccaggaaagactgagaaaaagagcgttgaatataagaaaaaatacttcctctgttctcagatcgtatttgttttaaggccacacctttttgaagttttcagtttgaaacacaacctggactgaaatcatgagggaggttgtgtaggaaagaatcatcaagggacttagttgggagcttctctaccacagcttactccttatggtattaaccccctttaagtgtaaatgtctttggtttaaaacgtttgtacctcatctgttaccagagtgttcatactggagagaaaccctatgaatttactgaatgtgggggaactgttactcatatgttgcatttcgtcgaacgtgcaagtcatgctgaagagaaaccctgtgcttctaaggagtattgacaagcccttagctagatgacaatctcattgagaagcagaaaattcatgctggagagaaactagtgaaggtagcaatacttcattgaatattagaaaatttttctagagagaaagcattgaatatactgagtatgataacatttcctctcaaaccttatcccttactctgcatttgggagatcatacacagagaagccttataaatgtaagagatgtggaaatatcttcagccaaaagtaaatcctcactcatcaagaaatttttactggagagaaaccttgtgaatgtgggaaagcttccattcagatgtcacacctcagccagcagagaatttacagtggggaaaacccctttgcctgtaaggtatgtggaaaagtcttcagccacaaatcaaacctcactgagcatgagcattttcacacgagagagaaaccttttgaatgtaacgagtgtggaaaagcctttagccaaaagcagtatgtcattaaacatcagaacacccatactggcgagaagcttttcgaatgtaatgaatgtggaaaatcatttagccagaaggaaaacctccttacgcaccagaaaattcacactggagaaaaaccttttgagtgtaaagattgcgggaaagctttcattcagaagtcaaacctcatcagacaccagagaactcacacaggagagaagccctttgtatgtaaggagtgtggaaaaaccttcagtggcaaatccaaccttactgagcatgagaaaatccatattggagagaagccttttaaatgtagtgaatgtggaacagcctttggccagaagaagtacctcataaaacatcagaacattcacactggagagaaaccctatgaatgtaacgaatgtggaaaagccttctctcagcgaacatcacttattgtacatgtgaggattcattcaggtgataaaccttacgaatgcaatgtttgtggaaaagccttctctcagagctcatctctcactgtgcatgtgagaagccatacaggggagaagccctatggttgtaatgaatgtgggaaagctttctctcagttctcaacccttgctctgcatttgagaatacacacaggtaagaagccttatcagtgcagtgaatgtgggaaagctttcagccagaagtcacaccacattagacaccagaaaattcatactcactaaaaaccccatgaaagccttgaaagtgggaaagctttcattagaaatttgcacctcatcatgccccagaaataatccttctgaagcaaagcaccacgaatgaggttaactttaacaagtactaaaaacttaagggacaccagaaaatttgtactgaagagaaagacatgcatatgattaaaaccctgtgtccaacagagaaacctgcagcagagataatggtgaaagtttaggcacattttcactaaaagtgggaacagaaaatggaggcctgttttttattgctaccaccatagatctggagatcttcgccagtaacaagaaaaattaagttgtaaatattggaaaggaacagacaaaaatagatgacatggtcatctacaactaatattaagactcctgtggtattgattgagcagagcagaagagatttcaaaaaaagacctatgcatttattagaatttggaatatgatacaagtggcatcaggaaatgaggaaataatggaactattttttttaagtggaggtagtttgttctccaagggggaaaaatagaccatgaactatacacaaaagtgaatccagagattaaaaacagaaatatggaaaagctatgtactaaaatgcatatgaccttgggaatagggaaacattccttggaacaatttgagaaatacttagcggttctacttatgagtatgaatgctcaggaaatacgcactaggatatttactgtggcttgatttgtagtagccaaaaattagaaacaactgagaaagcccatcacgaacaatatgggaaattcttatgtaatactatatatctgtaaaatgcaacaaatgaaatccacatgtattaacagaaagatcccagaattgttgaggggggatcaagttgcagaatgatacagatagtacaatgacttttttgtaaatttgaattaaaagtttcctcataaaactcagtactatctattggtaatggatgcatatatgtatgtacatgtttttgaaacggattggaaggatacagaccaaactcttgatagtggtcacctgtgaagagtggagaagggaaaataatgagtgtgggaggtgggatgggtattggttaaaggggacttcagctttttatataaacatccacttctctttcaaaagacttcaagtaaatataagaagatactgattgattctggattgtggtatagggatatcttgtcttattttttgtacttttctgtatttttaaaatttctcaaaataggaatgggagtgaggatgggaatgctgtatctgtggaagtcatgttatactggattcatttccaattaaatactaaacattttatagaaaatatttctaaaattttatcacggatgaatggatggacttgctctctatgtaatatgaaattaatctattttattaaaatttaaaaggacagcacaatcc

SEQ ID NO: 201553 - DNA, 9651 bp, Homo sapiens
  Payload ID: 19773
  Gene Name: zinc finger protein 148
  Uniprot ID: Q9UQR1
  ENST ID: ENST00000360647
  CDS Start-End: 487-2871
ggcgaccgcggcggcgctctagctgcggcatgtctgcgtctctactgctctgggaggaggaagagaaggaggaagaggaggaggaggaggagggggaggaagaggagaaaggcgcaggggtgggagctgttgccgaagctgccacagcaaaagttctcccccctccccccttcccctcctctcaaggcccctagaaaggttggagctgccgccgcctgcagtcggtgaccgcgcgactcggcgcccgcccgcggatagagggaggaatcagcagcttggaaattcaagcacgtgatctggcgggatgggcgtttgcctaacgtatttaatggaggaatcggatggcataagtgattaaggtggtattgaggatttctgaagcctatgaaaggtagaaactcaaccatgatttctttttcaactctacagcattcctttccttgaagtcttcgtttttaccttagtctcgggcagttatacttaagcatgaacattgacgacaaactggaaggattgtttcttaaatgtggcggcatagacgaaatgcagtcttccaggacaatggttgtaatgggtggagtgtctggccagtctactgtgtctggagagctacaggattcagtacttcaagatcgaagtatgcctcaccaggagatccttgctgcagatgaagtgttacaagaaagtgaaatgagacaacaggatatgatatcacatgatgaactcatggtccatgaggagacagtgaaaaatgatgaagagcagatggaaacacatgaaagacttcctcaaggactacagtatgcacttaatgtccctataagcgtaaagcaggaaattacttttactgatgtatctgagcaactgatgagagacaaaaaacaaatcagagagccagtagacttacagaaaaagaagaagcggaaacaacgttctcccgcaaaaatccttacaataaatgaggatggatcacttggtttgaaaacccctaaatctcacgtttgtgagcactgcaatgctgcctttagaacgaactatcacttacagagacatgtcttcattcatacaggtgaaaaaccatttcaatgtagtcaatgtgacatgcgtttcatacagaagtacctgcttcagagacatgagaagattcatactggtgaaaaaccatttcgctgtgatgaatgtggtatgagattcatacaaaaatatcatatggaaaggcataagagaactcatagtggagaaaaaccttaccagtgtgaatactgtttacagtatttttccagaacagatcgtgtattgaaacataaacgtatgtgccatgaaaatcatgacaaaaaactaaatagatgtgccatcaaaggtggccttctgacatctgaggaagattctggcttttctacatcaccaaaagacaactcactgccaaaaaagaaaaggcagaaaacggagaaaaaatcatctggaatggacaaagagagtgctttggacaaatctgacctgaaaaaagacaaaaatgattacttgcctctttattcttcaagtactaaagtaaaagatgagtatatggttgcagaatatgctgttgaaatgccacattcgtcagttgggggctcgcatttagaagatgcgtcaggagaaatacacccacctaagttagttctcaaaaaaattaatagtaagagaagtctgaaacagccactggagcaaaatcaaacaatttcacctttatccacatatgaagagagcaaagtttcaaagtatgcttttgaacttgtggataaacaggctttactggactcagaaggcaatgctgacattgatcaggttgataatttgcaggaggggcccagtaaacctgtgcatagtagtactaattatgatgatgccatgcagtttttgaagaagaagcggtatcttcaagcagcaagtaacaacagcagggaatatgcgctgaatgtgggtaccatagcttctcagccttctgtaacacaagcagctgtggcaagtgtcattgatgaaagtaccacggcatccatattagagtcacaggcactgaatgtggagattaagagtaatcatgacaaaaatgttattccagatgaggtactgcagactctgttggatcattattcccacaaagctaatggacagcatgagatatccttcagtgttgcagatactgaagtgacttctagcatatcaataaattcttcagaagtaccagaggtcaccccgtcagagaatgttggatcaagctcccaagcatcctcatcagataaagccaacatgttgcaggaatactccaagtttctgcagcaggctttggacagaactagccaaaatgatgcctatttgaatagcccgagccttaactttgtgactgataaccagaccctcccaaatcagccagcattctcttccatagacaagcaggtctatgccaccatgcccatcaatagctttcgatcaggaatgaattctccactaagaacaactccagataagtcccactttggactaatagttggtgattcacagcactcatttcccttttcaggtgatgagacaaaccatgcttctgccacatcaacacaggactttctggatcaagtgacttctcagaagaaagctgaggcccagcctgtccaccaagcttaccaaatgagctcctttgaacagcccttccgtgctccctatcatggatcaagagctggaatagctactcaatttagcactgccaatggacaggtgaaccttcggggaccagggacaagtgctgaattttcagaatttcccttggtgaatgtaaatgataatagagctgggatgacatcttcacctgatgccacaactggccagacttttggctaaaaaaaaaaaaaaagtgtaaataatactggcactttagaacagattaatcaagagtggggttactctgtgtaaatggagtgctgtacagatttaagagcaatgcgtaataacaagttaagctgatatgaatagcaagataatccaataactgcatttcgtttggttagtcagcattctttgaactgccttacatgttgtcacctttatagaagcaatgcattacttgttttagatcagaaacttgctattccacccacaccaagttaaaaaggaaaaaaaaaagactttcgcacaattgtttcctaactgataacattgtacattcttaggagattagtaattgtgtgaaatttactcatactgtttctaagtttttcagcatagtcattgcacttcagcagggaatctgagtatactttacagacagagtgaacttaaaagtttaatgtcaagagattatggcttaaataaattagtgtgtcctatagggggaaaaaaaccaagaaaccaccttttaaaaagaatgatatgccatatacccttgattttcattttgcattatattgacgtgtttttttgaaggaaaaaaagtaataaaaatctgatagtctaagactccactatttaaaagcctaattactttaaaaatatgcatactttcagaacttttaccaaaacacacaactgttgaagcagtcacttctctatggaagtatgcatattggtgtcagtttctttgtacagttgtacttagatattttttatgatttttcatgtgcaggtatcaaggttttgaagttttagtaaaagaaattctgtagattacattcccaagaacataatgcttacacaaaatgtatattccacgttttaaagcttaattgtattttactttacatatacacttcagttaacatagagcacttagaatctatttggtatttttgatttctcaaagtaaaaaaaaaattagatttttaggtttgatatggttgtgtcataatcatctcgtaattgacaattttaacttttggcaataaaaggaaattgggatatctttggaactgtaaaacctggtttaatctttttctttctagactcttgatagattggataattaaacagtatccagagaaactaaagaaatgggcattttaattgcatattttatcttgagttactttttaatgaacactgctcattacaactttacaaaccaaaagtgtttactaattccagtaactaccatttctttttcagctagatgagtgatcggaaaatttttgttgcatttcaaaatctaaataaactacagactttatccttataccatgaatgtttttttttaatactctgtcttaaaataatacagcatggtacaataaatagtgcttttatgtatatatacacacacacacttttctgaagaatgatggtttgagttatgcgttgggcagttttgatttttggaagttatattagttattgactctttgttacaactttttcatttttacattttaaattttctgccatcgttgtcacaatgcacatcctgatatagcaccagtgaaaatctaaaattaatacccttggaaaatgaaaatattcttaatttccattttgactcttatactggccctatagctctgcagtctttgtttcaatatagaatatgttatccatttaaattattttttcttttatttaatgttatcccaagactgttctcataaagaaagggaagaaataactatccacccttaacatccttcatttattttgaatatattggtgtttttatgataaggaatataaattatatttaatgtggtttcctgtatactttggttattaagttttgcttgaaatagtagttttcccgtttgacagctttctttgctgccaaagttttcaagaatttaagacttctttgaagtaaatatttaagttctgccattattgactcttaagattgtgtgtgttgtgttgtgcattacataattacaaaaaggcttcattcaggtgatacgttaaaaatggaactgtgctcaccctaaataggcattggtatttttctcttttggtgagagtaggcatttatttcttgagttgttttggagcctgatcaaaaattttgttcatggagaacttgatgcaattttgatacagtggagaggtttttttcggttgttttaacatcaccagcatagtttttagaatgtgactcttgctgagcatttagggtgagcttgggaaggaaggcctttgaaaatggtagttatgcaagcagactttcaggtgttgcattcctgttttcaacacatttctttaaatctacataatggcagacttttctaccaggttataagcagtttttagataagtgatactcagccagcataacttattgacttaccatttacgtatagtcatcactctcttactgtgaaattccaaatgcctaccagagttaccttgttctatcataatatgacaaacatctcaacagttttggatttccccactttggttcagaaggttatttaatttctatctgggcattaatggagaaaataagtagccttgtgtgctgcttcagattgaaacatggaggatatgagatattcttctgcaattcatgtttctcatttctcaaagtgagcacattgttctataaaaacatgctggtacacccttaaacttttgatcaatctgagtgaggtgtgcttttcctcttgggacctactcacgtttgaagattggaaacatcacgttaggcgaggcagtatctcttgaacatcttctaaagggttttttaaaaccttattctcacatatttcatttgtcttgaatatttaagtggctcttaaacgttttgggtctacatgcaaatgtggtacttaacaaggtaggaatccatcttcttagctctggctgagggtgccagccatcggtcaggtcatttttatctcaagaggcagaaggcagttatgtcaagaattgtgctcagggcaggatttcgtttccacagaggagagacacttgcagagtgccagctaggttagatcttttgccgcttctttcatttgattaatttgggtttttaaagggctgtttaaaaaaaaaaaaaaaaggccgggaaactttaaaagtaggcattactgtagtactgcatttcttagaacattttaaactagaactcatttttttttcacagtatatttacttgaagaagcactataataatcattgagaagtattttgagtctgaaatttaatttaattttccgtttcaaattgctttatttcagggaaataattttccagttgttttgctatattctgcaaataaaaaccgtgtttccttttttcacttaaactttggtaggaaacaaactaaagcagacaaacatttcttgttatgtttgttgctttctttaatccaatggataaaaaagtaaaaccctgtaaacattattttatttttttatgcaataccatgctgtaaatatggttcatcaaataaggatgtacctatgattgaatctttaattctgcacagttagagtttatatataaacgtgtcttgacaatcaaggacttttatgtgagtcttcctttatgatgtttattaatgttatgcattccatttgttttgaagtgagtaccaatgtgctaatttgtattgtctgaaagtatgtaatgtttttacagcttgtttttaagaatctgtaaatatgtacaaacaaatcacagtactgctttatgttagaaggcatatgatgttgtactgtatgtaagcaataatacatagcagtgctaactttacaagtagcatcaggaaagttctaaaaacatttcagagttattaattatccttatttcatttaataatgattatctttaatcagtttttataagcaaattccattgttcctcctattggaacgtaacactgtttacacagcataattgaagttgcaggggagacaggctaaatctgacttcatctgtactcactttcactaagcattgaatggccttaccactcttctgcaagatggaggaagaccgcaaaacttagtgcccatcacactgaaggaagggatgtggttttttttcctgcttctgtactgctacctaactttgtgatttgctttggattttaatatttgtttctgttttagattcaagcccgtaagttttgaggtgacttcagctccattgtgaaatagatagttctcttcatatttcataactacatttcaataattctaaactttctacattgatttttagatacttatttttcaagcttggtttctcagctgatcagatgaatttattcaacttcaatacaaagaaagacaaacctattatagtttcaagtgagtagatattatactgtacaggacagctatttgaacacacacatcactgctttagaaataaaaccgccaatttataaatgtatatgacctacattttataggaaaaaatgtttttaaatgctagtcatttatataatgtgctttgaaggatttgctagtccacttctgtcactttttagtacactggtatcttttatatgtaatgtatgctttttattattgtagcaaagcatttcagtagaaagaattttgcaacaatatgggggaaatttttcattgttggatttgaattatactggattttatctgtgtagtcttacttgtctttattttaatgctgtctgaagggaacttggtatccaaataaagcaggtaacctcattttacttcaagggcatactgtgtagtgctgaatttaatctgaaaatctgatgattttgaaaagaaaaacaagtttataaacattgtacagaagaaattaaatgtgtgtgatggaaatcctgatggtggagcacgttgaattttctgatatatagtgttattttcctgggatcccctatgccttctttgtatttcaactaataaaggaaaaaccctgtcattaaaactggtaagataataggatattctgattatacagtattactattcctatcccattttctgaccttttctcaatcactgtaaatttttattttctatttcctattgataattaaatatgtacataatatagacactgttgtatagaactaaatgaattgggttgctatgcttgagtgggtagtgaaatggaaatatttgatgaatactgagagttcctaaaatgctagagcaaatttccgagggaaaggggggcatcgtgtgtcttgggaaggttgcagcaggttgtttcttcaactccctaagaaatcattgggaaggactcaactgcaaactcgggatcagatacaaaatgggtctttccttcccctctcccccaaaaaataggagcactaaattttaaaatctactcaggtgacagttgctttgcaatgaaacttatcacattgaaattttcagtgttaaataaaaagagatttgtgatatttttaaatataaacttttacatcagtagtcagcagcctgacaattgaaatttggtaagtcgatatattttaaaatattttgctctccaaatagaattgtttttaaacaattgggaggttttttgtttctttaaatatgttttaattgtcattgtaaaaacaaaatcttgcttgaccctatattatgccatgaatgaattgctgagcctttataatacagtgacagcttgtttcatgcatagtcatggaacatagagatgttctttaaactgacctattgataagaggtttaatgagtttcacggctttcaacactattgtcatatagttatctttgccatttggagtttataaaaccattttatgtattgtgatactaaaggaagttgttttgctttactttaaattgaattattagactaatatttgcaaattctgcattttaaatgtggacactggctgtttgaaaaataaaatatagaatacagttttatggataattttcgagctgaatttttcacaatattctgaaccaaataacgaatggtaaatatgcaaaaatcatggtgcatagatataaccgtaaagagaaaagaatttctgtgtggaattaacagttacacaaattgggtaacaattatcagggcctttattatagctttatgtggaatgttattctaaaatgcaagagtcaaatgttactgtcattgaatattttagacttgaaacgtgtttatcatagagcgaagaaaatatgtgttcttttctttacagataagactctgttaacccactgtcagcatacgtgggatttcttttcttttttctttcattagtggagatttgttttcatccatctaccaccttgccagtaccctagcttgtgaccagcgggatgcattgtaagaaagttgtctgtggttaggagtgcagtctgggtccatggaacaaatttaaactaattggccctcgcaatgatcagtcctaggaccctggccttattattagcatggtgctttaaccaattgtacataataataccactgatagtctactaatgcatttcctagatcccagtttttcttgaatgattaggaatggtggggagaggggaggggagatattctacatgatacttctccaatcttctaaagattataagaaaaaataaaaaattgaagtcacttgaattaatgtgttgtcattgagtcttactcgacaatttatcatgcacaaagtgattatgaagattttcctgattatatgtttggattgaatttaaaaattttttttttcag

SEQ ID NO: 201554 - DNA, 566 bp, Homo sapiens
  Payload ID: 19773
  Gene Name: zinc finger protein 148
  ENST ID: ENST00000465763
  CDS Start-End: 317-566
ctgtgttctgcagcgttttgttggatactattgataactggttctttaaggaaaggggcttaaacaggccttggtttgtagaggatagagggaggaatcagcagcttggaaattcaagcacgtgatctggcgggatgggcgtttgcctaacgtatttaatggaggaatcggatggcataagtgattaaggtggtattgaggatttctgaagcctatgaaaggtagaaactcaaccatgatttctttttcaactctacagcattcctttccttgaagtcttcgtttttaccttagtctcgggcagttatacttaagcatgaacattgacgacaaactggaaggattgtttcttaaatgtggcggcatagacgaaatgcagtcttccaggacaatggttgtaatgggtggagtgtctggccagtctactgtgtctggagagctacaggattcagtacttcaagatcgaagtatgcctcaccaggagatccttgctgcagatgaagtgttacaagaaagtgaaatgagacaacaggatatgatatcacatgatgaactcatggtccatg

SEQ ID NO: 201555 - DNA, 2949 bp, Homo sapiens
  Payload ID: 19773
  Gene Name: zinc finger protein 148
  Uniprot ID: Q9UQR1
  ENST ID: ENST00000492394
  CDS Start-End: 303-2687
ggagaaaggcgcaggggtgggagctgttgccgaagctgccacagcaaaagttctcccccctccccccttcccctcctctcaaggcccctagaaaggttggagctgccgccgcctgcagtcggtgaccgcgcgactcggcgcccgcccgcggaatcggatggcataagtgattaaggtggtattgaggatttctgaagcctatgaaaggtagaaactcaaccatgatttctttttcaactctacagcattcctttccttgaagtcttcgtttttaccttagtctcgggcagttatacttaagcatgaacattgacgacaaactggaaggattgtttcttaaatgtggcggcatagacgaaatgcagtcttccaggacaatggttgtaatgggtggagtgtctggccagtctactgtgtctggagagctacaggattcagtacttcaagatcgaagtatgcctcaccaggagatccttgctgcagatgaagtgttacaagaaagtgaaatgagacaacaggatatgatatcacatgatgaactcatggtccatgaggagacagtgaaaaatgatgaagagcagatggaaacacatgaaagacttcctcaaggactacagtatgcacttaatgtccctataagcgtaaagcaggaaattacttttactgatgtatctgagcaactgatgagagacaaaaaacaaatcagagagccagtagacttacagaaaaagaagaagcggaaacaacgttctcccgcaaaaatccttacaataaatgaggatggatcacttggtttgaaaacccctaaatctcacgtttgtgagcactgcaatgctgcctttagaacgaactatcacttacagagacatgtcttcattcatacaggtgaaaaaccatttcaatgtagtcaatgtgacatgcgtttcatacagaagtacctgcttcagagacatgagaagattcatactggtgaaaaaccatttcgctgtgatgaatgtggtatgagattcatacaaaaatatcatatggaaaggcataagagaactcatagtggagaaaaaccttaccagtgtgaatactgtttacagtatttttccagaacagatcgtgtattgaaacataaacgtatgtgccatgaaaatcatgacaaaaaactaaatagatgtgccatcaaaggtggccttctgacatctgaggaagattctggcttttctacatcaccaaaagacaactcactgccaaaaaagaaaaggcagaaaacggagaaaaaatcatctggaatggacaaagagagtgctttggacaaatctgacctgaaaaaagacaaaaatgattacttgcctctttattcttcaagtactaaagtaaaagatgagtatatggttgcagaatatgctgttgaaatgccacattcgtcagttgggggctcgcatttagaagatgcgtcaggagaaatacacccacctaagttagttctcaaaaaaattaatagtaagagaagtctgaaacagccactggagcaaaatcaaacaatttcacctttatccacatatgaagagagcaaagtttcaaagtatgcttttgaacttgtggataaacaggctttactggactcagaaggcaatgctgacattgatcaggttgataatttgcaggaggggcccagtaaacctgtgcatagtagtactaattatgatgatgccatgcagtttttgaagaagaagcggtatcttcaagcagcaagtaacaacagcagggaatatgcgctgaatgtgggtaccatagcttctcagccttctgtaacacaagcagctgtggcaagtgtcattgatgaaagtaccacggcatccatattagagtcacaggcactgaatgtggagattaagagtaatcatgacaaaaatgttattccagatgaggtactgcagactctgttggatcattattcccacaaagctaatggacagcatgagatatccttcagtgttgcagatactgaagtgacttctagcatatcaataaattcttcagaagtaccagaggtcaccccgtcagagaatgttggatcaagctcccaagcatcctcatcagataaagccaacatgttgcaggaatactccaagtttctgcagcaggctttggacagaactagccaaaatgatgcctatttgaatagcccgagccttaactttgtgactgataaccagaccctcccaaatcagccagcattctcttccatagacaagcaggtctatgccaccatgcccatcaatagctttcgatcaggaatgaattctccactaagaacaactccagataagtcccactttggactaatagttggtgattcacagcactcatttcccttttcaggtgatgagacaaaccatgcttctgccacatcaacacaggactttctggatcaagtgacttctcagaagaaagctgaggcccagcctgtccaccaagcttaccaaatgagctcctttgaacagcccttccgtgctccctatcatggatcaagagctggaatagctactcaatttagcactgccaatggacaggtgaaccttcggggaccagggacaagtgctgaattttcagaatttcccttggtgaatgtaaatgataatagagctgggatgacatcttcacctgatgccacaactggccagacttttggctaaaaaaaaaaaaaaagtgtaaataatactggcactttagaacagattaatcaagagtggggttactctgtgtaaatggagtgctgtacagatttaagagcaatgcgtaataacaagttaagctgatatgaatagcaagataatccaataactgcatttcgtttggttagtcagcattctttgaactgccttacatgttgtcacctttatagaagcaatgcattacttgttttagatcagaaacttgctattccacccacaccaa

SEQ ID NO: 201556 - DNA, 763 bp, Homo sapiens
  Payload ID: 19773
  Gene Name: zinc finger protein 148
  ENST ID: ENST00000495019
  CDS Start-End: 538-763
ggaggaggaggcggaggggcgcggagaagctggcgcactttgggcctcggcggggtcgtctgcggcggccggacctcccagataccgcgccttctgggcctgccccgctggcgcagtcaggaccccttccctcaacgggatgggaaactttgtgagtggcttctccgcagccactaacaagtgtccgccagacagcgggggggccgccgaaggctgatgatggacacccgtttttcttcttattcctcttttacaaatcttctgttgaactgcattgtgtttacagtttcacgtctgtgaaaaggatagagggaggaatcagcagcttggaaattcaagcacgtgatctggcgggatgggcgtttgcctaacgtatttaatggaggaatcggatggcataagtgattaaggtggtattgaggatttctgaagcctatgaaaggtagaaactcaaccatgatttctttttcaactctacagcattcctttccttgaagtcttcgtttttaccttagtctcgggcagttatacttaagcatgaacattgacgacaaactggaaggattgtttcttaaatgtggcggcatagacgaaatgcagtcttccaggacaatggttgtaatgggtggagtgtctggccagtctactgtgtctggagagctacaggattcagtacttcaagatcgaagtatgcctcaccaggagatccttgctgcagatgaagtgttacaagaaagtgaaatgagacaacaggatatgatat

SEQ ID NO: 201557 - DNA, 566 bp, Homo sapiens
  Payload ID: 19773
  Gene Name: zinc finger protein 148
  ENST ID: ENST00000471196
  CDS Start-End: 490-566
aggagggggaggaagaggagaaaggcgcaggggtgggagctgttgccgaagctgccacagcaaaagttctcccccctccccccttcccctcctctcaaggcccctagaaaggttggagctgccgccgcctgcagtcggtgaccgcgcgactcggcgcccgcccgcggcacacctctacattgtgttcagtgcctagtgtaattctgggcatgtattctagacagagtagatcggattggttctggcattgaataaggatagagggaggaatcagcagcttggaaattcaagcacgtgatctggcgggatgggcgtttgcctaacgtatttaatggaggaatcggatggcataagtgattaaggtggtattgaggatttctgaagcctatgaaaggtagaaactcaaccatgatttctttttcaactctacagcattcctttccttgaagtcttcgtttttaccttagtctcgggcagttatacttaagcatgaacattgacgacaaactggaaggattgtttcttaaatgtggcggcatagacgaaatgcagtcttccaggacaat

SEQ ID NO: 201558 - DNA, 1025 bp, Homo sapiens
  Payload ID: 19773
  Gene Name: zinc finger protein 148
  ENST ID: ENST00000468369
  CDS Start-End: 309-743
ggaggaggaggaggagggggaggaagaggagaaaggcgcaggggtgggagctgttgccgaagctgccacagcaaaagttctcccccctccccccttcccctcctctcaaggcccctagaaaggttggagctgccgccgcctgcagtcggtgaccgcgcgactcggcgcccgcccgcggatagagggaggaatcagcagcttggaaattcaagcacgtgatctggcgggatgggcgtttgcctaacgtatttaatggaggaatcggatggcataagtgattaaggtggtattgaggatttctgaagcctatgaaaggtgaaaaaccatttcaatgtagtcaatgtgacatgcgtttcatacagaagtacctgcttcagagacatgagaagattcatactggtgaaaaaccatttcgctgtgatgaatgtggtgatgagacaaaccatgcttctgccacatcaacacaggactttctggatcaagtgacttctcagaagaaagctgaggcccagcctgtccaccaagcttaccaaatgagctcctttgaacagcccttccgtgctccctatcatggatcaagagctggaatagctactcaatttagcactgccaatggacaggtgaaccttcggggaccagggacaagtgctgaattttcagaatttcccttggtgaatgtaaatgataatagagctgggatgacatcttcacctgatgccacaactggccagacttttggctaaaaaaaaaaaaaaagtgtaaataatactggcactttagaacagattaatcaagagtggggttactctgtgtaaatggagtgctgtacagatttaagagcaatgcgtaataacaagttaagctgatatgaatagcaagataatccaataactgcatttcgtttggttagtcagcattctttgaactgccttacatgttgtcacctttatagaagcaatgcattacttgttttagatcagaaacttgctattccacccacaccaagttaaaaaggaaaaaaaaaa

SEQ ID NO: 201559 - DNA, 2952 bp, Homo sapiens
  Payload ID: 19773
  Gene Name: zinc finger protein 148
  Uniprot ID: Q9UQR1
  ENST ID: ENST00000484491
  CDS Start-End: 303-2687
agaaaggcgcaggggtgggagctgttgccgaagctgccacagcaaaagttctcccccctccccccttcccctcctctcaaggcccctagaaaggttggagctgccgccgcctgcagtcggtgaccgcgcgactcggcgcccgcccgcggatagagggaggaatcagcagcttggaaattcaagcacgtgatctggcgggatgggcgtttgcctaacgtatttaatggaggaatcggatggcataagtgattaaggtggtattgaggatttctgaagcctatgaaaggcagttatacttaagcatgaacattgacgacaaactggaaggattgtttcttaaatgtggcggcatagacgaaatgcagtcttccaggacaatggttgtaatgggtggagtgtctggccagtctactgtgtctggagagctacaggattcagtacttcaagatcgaagtatgcctcaccaggagatccttgctgcagatgaagtgttacaagaaagtgaaatgagacaacaggatatgatatcacatgatgaactcatggtccatgaggagacagtgaaaaatgatgaagagcagatggaaacacatgaaagacttcctcaaggactacagtatgcacttaatgtccctataagcgtaaagcaggaaattacttttactgatgtatctgagcaactgatgagagacaaaaaacaaatcagagagccagtagacttacagaaaaagaagaagcggaaacaacgttctcccgcaaaaatccttacaataaatgaggatggatcacttggtttgaaaacccctaaatctcacgtttgtgagcactgcaatgctgcctttagaacgaactatcacttacagagacatgtcttcattcatacaggtgaaaaaccatttcaatgtagtcaatgtgacatgcgtttcatacagaagtacctgcttcagagacatgagaagattcatactggtgaaaaaccatttcgctgtgatgaatgtggtatgagattcatacaaaaatatcatatggaaaggcataagagaactcatagtggagaaaaaccttaccagtgtgaatactgtttacagtatttttccagaacagatcgtgtattgaaacataaacgtatgtgccatgaaaatcatgacaaaaaactaaatagatgtgccatcaaaggtggccttctgacatctgaggaagattctggcttttctacatcaccaaaagacaactcactgccaaaaaagaaaaggcagaaaacggagaaaaaatcatctggaatggacaaagagagtgctttggacaaatctgacctgaaaaaagacaaaaatgattacttgcctctttattcttcaagtactaaagtaaaagatgagtatatggttgcagaatatgctgttgaaatgccacattcgtcagttgggggctcgcatttagaagatgcgtcaggagaaatacacccacctaagttagttctcaaaaaaattaatagtaagagaagtctgaaacagccactggagcaaaatcaaacaatttcacctttatccacatatgaagagagcaaagtttcaaagtatgcttttgaacttgtggataaacaggctttactggactcagaaggcaatgctgacattgatcaggttgataatttgcaggaggggcccagtaaacctgtgcatagtagtactaattatgatgatgccatgcagtttttgaagaagaagcggtatcttcaagcagcaagtaacaacagcagggaatatgcgctgaatgtgggtaccatagcttctcagccttctgtaacacaagcagctgtggcaagtgtcattgatgaaagtaccacggcatccatattagagtcacaggcactgaatgtggagattaagagtaatcatgacaaaaatgttattccagatgaggtactgcagactctgttggatcattattcccacaaagctaatggacagcatgagatatccttcagtgttgcagatactgaagtgacttctagcatatcaataaattcttcagaagtaccagaggtcaccccgtcagagaatgttggatcaagctcccaagcatcctcatcagataaagccaacatgttgcaggaatactccaagtttctgcagcaggctttggacagaactagccaaaatgatgcctatttgaatagcccgagccttaactttgtgactgataaccagaccctcccaaatcagccagcattctcttccatagacaagcaggtctatgccaccatgcccatcaatagctttcgatcaggaatgaattctccactaagaacaactccagataagtcccactttggactaatagttggtgattcacagcactcatttcccttttcaggtgatgagacaaaccatgcttctgccacatcaacacaggactttctggatcaagtgacttctcagaagaaagctgaggcccagcctgtccaccaagcttaccaaatgagctcctttgaacagcccttccgtgctccctatcatggatcaagagctggaatagctactcaatttagcactgccaatggacaggtgaaccttcggggaccagggacaagtgctgaattttcagaatttcccttggtgaatgtaaatgataatagagctgggatgacatcttcacctgatgccacaactggccagacttttggctaaaaaaaaaaaaaaagtgtaaataatactggcactttagaacagattaatcaagagtggggttactctgtgtaaatggagtgctgtacagatttaagagcaatgcgtaataacaagttaagctgatatgaatagcaagataatccaataactgcatttcgtttggttagtcagcattctttgaactgccttacatgttgtcacctttatagaagcaatgcattacttgttttagatcagaaacttgctattccacccacaccaagtt

SEQ ID NO: 201560 - DNA, 2960 bp, Homo sapiens
  Payload ID: 19773
  Gene Name: zinc finger protein 148
  Uniprot ID: Q9UQR1
  ENST ID: ENST00000485866
  CDS Start-End: 563-2947
ctactgctctgggaggaggaagagaaggaggaagaggaggaggaggaggagggggaggaagaggagaaaggcgcaggggtgggagctgttgccgaagctgccacagcaaaagttctcccccctccccccttcccctcctctcaaggcccctagaaaggttggagctgccgccgcctgcagtcggtgaccgcgcgactcggcgcccgcccgcggatagagggaggaatcagcagcttggaaattcaagcacgtgatctggcgggatgggcgtttgcctaacgtatttaatggaggaatcggatggcataagtgattaaggtggtattgaggatttctgaagcctatgaaaggtagaaactcaaccatgatttctttttcaactctacagcattcctttccttgaagtcttcgtttttaccttagtctcggggtcttattctgtcacctaggtggagtgcagtagtacagtcacagctcactgcagccccaacatcctgggctcaagccatcctcctgcctcagcctcccaagtagctgggaccacaggcagttatacttaagcatgaacattgacgacaaactggaaggattgtttcttaaatgtggcggcatagacgaaatgcagtcttccaggacaatggttgtaatgggtggagtgtctggccagtctactgtgtctggagagctacaggattcagtacttcaagatcgaagtatgcctcaccaggagatccttgctgcagatgaagtgttacaagaaagtgaaatgagacaacaggatatgatatcacatgatgaactcatggtccatgaggagacagtgaaaaatgatgaagagcagatggaaacacatgaaagacttcctcaaggactacagtatgcacttaatgtccctataagcgtaaagcaggaaattacttttactgatgtatctgagcaactgatgagagacaaaaaacaaatcagagagccagtagacttacagaaaaagaagaagcggaaacaacgttctcccgcaaaaatccttacaataaatgaggatggatcacttggtttgaaaacccctaaatctcacgtttgtgagcactgcaatgctgcctttagaacgaactatcacttacagagacatgtcttcattcatacaggtgaaaaaccatttcaatgtagtcaatgtgacatgcgtttcatacagaagtacctgcttcagagacatgagaagattcatactggtgaaaaaccatttcgctgtgatgaatgtggtatgagattcatacaaaaatatcatatggaaaggcataagagaactcatagtggagaaaaaccttaccagtgtgaatactgtttacagtatttttccagaacagatcgtgtattgaaacataaacgtatgtgccatgaaaatcatgacaaaaaactaaatagatgtgccatcaaaggtggccttctgacatctgaggaagattctggcttttctacatcaccaaaagacaactcactgccaaaaaagaaaaggcagaaaacggagaaaaaatcatctggaatggacaaagagagtgctttggacaaatctgacctgaaaaaagacaaaaatgattacttgcctctttattcttcaagtactaaagtaaaagatgagtatatggttgcagaatatgctgttgaaatgccacattcgtcagttgggggctcgcatttagaagatgcgtcaggagaaatacacccacctaagttagttctcaaaaaaattaatagtaagagaagtctgaaacagccactggagcaaaatcaaacaatttcacctttatccacatatgaagagagcaaagtttcaaagtatgcttttgaacttgtggataaacaggctttactggactcagaaggcaatgctgacattgatcaggttgataatttgcaggaggggcccagtaaacctgtgcatagtagtactaattatgatgatgccatgcagtttttgaagaagaagcggtatcttcaagcagcaagtaacaacagcagggaatatgcgctgaatgtgggtaccatagcttctcagccttctgtaacacaagcagctgtggcaagtgtcattgatgaaagtaccacggcatccatattagagtcacaggcactgaatgtggagattaagagtaatcatgacaaaaatgttattccagatgaggtactgcagactctgttggatcattattcccacaaagctaatggacagcatgagatatccttcagtgttgcagatactgaagtgacttctagcatatcaataaattcttcagaagtaccagaggtcaccccgtcagagaatgttggatcaagctcccaagcatcctcatcagataaagccaacatgttgcaggaatactccaagtttctgcagcaggctttggacagaactagccaaaatgatgcctatttgaatagcccgagccttaactttgtgactgataaccagaccctcccaaatcagccagcattctcttccatagacaagcaggtctatgccaccatgcccatcaatagctttcgatcaggaatgaattctccactaagaacaactccagataagtcccactttggactaatagttggtgattcacagcactcatttcccttttcaggtgatgagacaaaccatgcttctgccacatcaacacaggactttctggatcaagtgacttctcagaagaaagctgaggcccagcctgtccaccaagcttaccaaatgagctcctttgaacagcccttccgtgctccctatcatggatcaagagctggaatagctactcaatttagcactgccaatggacaggtgaaccttcggggaccagggacaagtgctgaattttcagaatttcccttggtgaatgtaaatgataatagagctgggatgacatcttcacctgatgccacaactggccagacttttggctaaaaaaaaaaaaaaa

SEQ ID NO: 201561 - DNA, 2375 bp, Homo sapiens
  Payload ID: 19773
  Gene Name: zinc finger protein 148
  ENST ID: ENST00000544464
  CDS Start-End: 384-1748
ggagaaaggcgcaggggtgggagctgttgccgaagctgccacagcaaaagttctcccccctccccccttcccctcctctcaaggcccctagaaaggttggagctgccgccgcctgcagtcggtgaccgcgcgactcggcgcccgcccgcggatagagggaggaatcagcagcttggaaattcaagcacgtgatctggcgggatgggcgtttgcctaacgtatttaatggaggaatcggatggcataagtgattaaggtggtattgaggatttctgaagcctatgaaaggtagaaactcaaccatgatttctttttcaactctacagcattcctttccttgaagtcttcgtttttaccttagtctcgggcagttatacttaagcatgaacattgacgacaaactggaaggattgtttcttaaatgtggcggcatagacgaaatgcagtcttccaggacaatggttgtaatgggtggagtgtctggccagtctactgtgtctggagagctacaggattcagtacttcaagatcgaagtatgcctcaccaggagatccttgctgcagatgaagtgttacaagaaagtgaaatgagacaacaggatatgatatcacatgatgaactcatggtccatgaggagacagtgaaaaatgatgaagagcagatggaaacacatgaaagacttcctcaaggactacagtatgcacttaatgtccctataagcgtaaagcaggaaattacttttactgatgtatctgagcaactgatgagagacaaaaaacaaatcagagagccagtagacttacagaaaaagaagaagcggaaacaacgttctcccgcaaaaatccttacaataaatgaggatggatcacttggtttgaaaacccctaaatctcacgtttgtgagcactgcaatgctgcctttagaacgaactatcacttacagagacatgtcttcattcatacaggtgaaaaaccatttcaatgtagtcaatgtgacatgcgtttcatacagaagtacctgcttcagagacatgagaagattcatactggtgaaaaaccatttcgctgtgatgaatgtggtatgagattcatacaaaaatatcatatggaaaggcataagagaactcatagtggagaaaaaccttaccagtgtgaatactgtttacagtatttttccagaacagatcgtgtattgaaacataaacgtatgtgccatgaaaatcatgacaaaaaactaaatagatgtgccatcaaaggtggccttctgacatctgaggaagattctggcttttctacatcaccaaaagacaactcactgccaaaaaagaaaaggcagaaaacggagaaaaaatcatctggaatggacaaagagagtgctttggacaaatctgacctgaaaaaagacaaaaatgattacttgcctctttattcttcaagtactaaagtaaaagatgagtatatggttgcagaatatgctgttgaaatgccacattcgtcagttgggggctcgcatttagaagatgcgtcaggagaaatacacccacctaagttagttctcaaaaaaattaatagtaagagaagtctgaaacagccactggagcaaaatcaaacaatttcacctttatccacatatgaagagagcaagtttcaaagtatgcttttgaacttgtggataaacaggctttactggactcagaaggcaatgctgacattgatcaggttgataatttgcaggagggcccagtaaacctgtgcatagtagtactaattatgatgatgccatgcagtttttgaagaagaagcggtatcttcaagcagcaagtaacaacagcagggaatatgcgctgaatgtgggtaccatagcttctcagccttctgtaacacaagcagctgtggcaagtgtcattgatgaaagtaccacggcatccatattagagtcacaggcactgaatgtggagattaagagtaatcatgacaaaaatgttattccagatgaggtactgcagactctgttggatcattattcccacaaagctaatggacagcatgagatatccttcagtgttgcagatactgaagtgacttctagcatatcaataaattcttcagaagtaccagaggtcaccccgtcagagaatgttggatcaagctcccaagcatcctcatcagataaagccaacatgttgcaggaatactccaagtttctgcagcaggctttggacagaactagccaaaatgatgcctatttgaatagcccgagccttaactttgtgactgataaccagaccctcccaaatcagccagcattctcttccatagacaagcaggtctatgccaccatgcccatcaatagctttcgatcaggaatgaattc

SEQ ID NO: 201562 - DNA, 5687 bp, Homo sapiens
  Payload ID: 19774
  Gene Name: zinc finger protein 154
  Uniprot ID: Q13106
  ENST ID: ENST00000512439
  CDS Start-End: 198-1511
cggatcagagatagcagagcgccgagttggggccacgaaggcgtgaggggagtcgtcgtccctcctgcacgaaagcgtctaagccttggcgacgccgccctgggggacccacgtcaggcctgggatagggaccgctgtccccgggtccctaccaatgtcgcccgtcgctcccggcccagctctacccgcagagtctgatggcagcggccactctgaggacgccaactcagggcactgtgacctttgaagatgtggccgtacacttctcctgggaggaatggggtctccttgatgaggctcaaagatgcctgtaccgtgatgtgatgctggagaacttggctcttttaacctctctagatgttcatcatcagaagcagcaccttggagaaaaacatttcagaagcaatgtgggcagagccttgtttgtgaagacctgcacattccatgtgtcaggggagccttccacctgcagagaagttgggaaggacttcctggccaagttgggatttctccatcaacaggctgctcacactggggagcaatcaaatagcaaaagcgacggtggggccatcagtcacagaggaaaaactcattacaactgtggagaacacacaaaagcattcagcggtaaacacacacttgttcagcagcagagaaccctcactacagaaagatgttacatatgcagtgaatgtgggaaatcctttagcaaaagctacagtctcaatgaccattggagacttcacactggagaaaagccttatgaatgtcgagagtgtgggaagtcctttaggcaaagctctagtctcattcagcaccggagagttcacactgcagtacgacctcatgaatgtgatgaatgtggaaaattatttagcaacaagtctaacctcattaaacatcggagagttcacactggggaaaggccatatgagtgcagtgaatgtgggaaatcctttagccaaaggtctgcactccttcaacatcggggagttcacactggggagaggccttatgagtgcagtgaatgtgggaagttttttacatatcattccagtctcataaaacaccagaaagttcacagtggatccaggccttatgagtgcagcgaatgtgggaagtcatttagccaaaactctagcctcattgaacaccatagggttcacactggagaaaggccttataagtgcagcgaatgtgggaaatcctttagccaaaggtctgcactccttcaacatcggggagttcacactggggagaggccttatgagtgcagtgaatgtgggaagttctttccctacagctccagtctccgaaaacaccagagagttcacactggatcaagaccctatgagtgcagtgaatgtgggaaatcctttactcaaaattccggcctcattaagcacaggagggttcacactggggagaagccttatgagtgcacggaatgtgggaaatcctttagccataactccagccttattaaacatcagagaattcatagtcgataaaagccttatgagtggcaaatgtggaaaatctgttagcaccctggagaaagtccttgagtacacagtgaatgtcagaaagcttcagctgaaggccatatctcattgagtgccacacagttcacaagggaaagacacttttgatatgtagggatgtccagttgatataacagctctgaaggagatcccttatgagggtggcatcagcctgaattgaacatcctatatctgaacatctgcataaattccaggtatgtgtgaactgcattgcaccttttgccctgcccagggcccatgtcagatttatgtctctgctgatactatagtggaagccattttacctctactgcctggcaggtgaccaccagtgtgcaccactcacccatcccagtgtattcaggccatggacctgacccagtttggcccagaggactctgctggtgacctgaaaagagggactacatatttcaggatattgttggtctcacatgactcttgatagagtttgccagccttcaaatcaccaactgtgggaaccaactgcctcttattgccttggtttgtacaataacaaaggccttattaatcttgggggttctatatgtatgggttggtttgaaaacagttgggttctgctaacatgaaggggtgaataactttttttggagatcccaaacattgtgtagctcaacagggacagggacagggacagtaggatggcagaatatagctctctctctagtttgagcctagttttcattgctattcaaggcctctgagaaaaaactacagggtattgtcctaatttatatcctggatgccatagaggtcagcctgaggaggcagcagttacttgacatcctttgatgtttctgaaagcaacatgaaattgttctcttgttcacaaggaatactgcatcgtgttcagtgccagtgggggaaatctgttccccaggtcctgtatgccttgatatcctgaattccacagggtagcaccacaggtggtaagattatagtaggaattataattgttatagaagtactggattgatagagagtggaaaactgcaataacactgcaataaatagaatgtgccccttttacagaggtttccatgatgttcgttattatggctcttaaggatgagcaggtacagaaatcctcaggacctacagaattgtgtatcttgtgtagctgaggtcattgtcagaaattttatggaatcctgtagcctctgggattttcacctcaaggtcattgctatgcaggcaggaaaacaaggatagagaagggaggtctaggccattgatacagcctttgtgatccagccaacatttctgttgagtcaggtggaaatggccttcactgttcacttgtatttgtgatcactgaggcaaaatcctctcccaggacatgaggagagagatggtggaatcaacatagggttgtcaaacctgattttccaaaaacaataggaaattcagacttttattttgaaccatattttgttaggttggtgcaaaagtaactgtggttttgaaccatgatttatttttatttttatttttttttgagtcagagtcttgctctgttgcccagtctggagggcaatggcactatctcagctcattgcaacctccgcctcccaggttcaagcgattcttctgcctcagcctcccaggtagctgggattacaggcacccgccaccacgcccatctgagttttgcatttttagtagacatggggtttcaccatgttggccaggctggtcttgaactcctgacttcatgtgatccacccaccttggcctcccaaagtgctgggatttacaggcatgagccactgcgcccagccaagctttttcaccattccaatttccttcaaatgctgaacagccgtggaatggttgacattgagttcttaggcaacttctcatgtagttgtaagaggatcagcttctaatattgctctcaattggtcattgtcaacttccagtggctggccactacttctcttcaaggctcttgtctcctttgcaaaacttcttgaaccaccactgcactgtacattcgttagcagttcctgggccaaatgtgtttatatcgtgagttgtctctgctgctttacgacccattgggaactcaagtaagaaaatctcagccgggtgcggtggctcacgcctgtaatcccagcactttgggaggctgaagtaggtggatcacaaggtcaggagttagagaccagcctgaccaacatattgaaacctcatctctactaaaaatacaaaaattagccgggcgtggtggcatgtgcctgtagtcccagctacttgggaggctgaggcaggagaatcacttgaacccgggaggcagaagtcacagtgagccaagatcacgccactgcactccagcctggacgacagacaaaacaagactccgtctcaaaaaaaagaggccagatgcggtggcttacacctgtaatcccagcactttgggaggccgaggtgggtggatcacaggtcacgagttcgagaccagcctggccaacatggtgaaaccccgtctctactaaaaatacaaaaattagctgggcatagtggcatgcacctgtaatcccagctactggggagcctgaggcacgagaattgtttgaaccccgggaggtggaggttgcagtgagccaagatcatgtcactgcactccagcctgggcaacagagcaagactctatctcaaaaaaatcgctgaaatttgagttttgtctaacatttccatagtctaaaataaacataaacagcaagtagtaagtcagcaaaaaaacataaagcgagaaatgcctattaaaatgatgtataaccacatttatttaagaatgttttccaatataaaatggcaaaatccaacatgcaaaaacggcaattacttttgcactaacctgataataattttaataagaataaatggtacatatttaaactatataatttgatcagctttgatattcatattaacctgtaattgctcccaccatgccaattttgaaactgccaacatgttactgaatgtagaattgggaagagttgctgatagcatcctaatatattctgtttctaccatactgatacagtggccacgaataacctcaagaatgtagaaaataaaatgtagtgaaatgattaggaagaagttgtttcttcacaatcatgacaatgaacgtgtcattccacaagttacctcattgtcctttaataattatctgcctataggcaactattgatttactttccattataatacattagttttcatttgctagaattttatatgattgaaaccataatgtatttactcttttttaatccctgggtatagtcacgtatttattttgagattcatcattatacctctatgagtagtttcttttttttgtattgctgagaagtatgatgttctgtggatataccagtattcgtttattcattcattcatttgttatggatattttgagtagttttttaaagtagtttgaggtataatggaacttaaagtgcttatatttaaaatgcatattttgatattttcatacatgcttacaccctggaacgcagtttccttctgtctttttagttcattctcaacatataaaattaattttcattgtgtaaaattactggtacaatgacatattttgtctcctgttacagctgtgttcaattacaaaaaaagatggaaaagactgttatgaagccagatgaacctttctccagtcttccttcactatttttttttccttcaccatttatcatttcatagtcatttatgtttcatcggtcctcatgtgtactagtgcgttattttacttatactcccggatatcatattatttaatgcatagcctcttcagaatgcaattttaaaatgtaaaggctcttttataaccccccaaaaaatcacacaaatatattttaaaatgtaaatattttatcgcttctgttttctcagttgtctaaaacaatgtgtttcttaaggaagatcatttttattcaggatccaaatgtatatttaatagctttcagtagttgtatctcataagtctgtaacctacaggttccatttacctttgttttcttatttcttgaagttgctgagtcattttttaattagaatttgctgtattct

SEQ ID NO: 201563 - DNA, 2567 bp, Homo sapiens
  Payload ID: 19774
  Gene Name: zinc finger protein 154
  Uniprot ID: Q13106
  ENST ID: ENST00000451275
  CDS Start-End: 224-1537
ttttagcttctctgaggtgtgttcaccggatcagagatagcagagcgccgagttggggccacgaaggcgtgaggggagtcgtcgtccctcctgcacgaaagcgtctaagccttggcgacgccgccctgggggacccacgtcaggcctgggatagggaccgctgtccccgggtccctaccaatgtcgcccgtcgctcccggcccagctctacccgcagagtctgatggcagcggccactctgaggacgccaactcagggcactgtgacctttgaagatgtggccgtacacttctcctgggaggaatggggtctccttgatgaggctcaaagatgcctgtaccgtgatgtgatgctggagaacttggctcttttaacctctctagatgttcatcatcagaagcagcaccttggagaaaaacatttcagaagcaatgtgggcagagccttgtttgtgaagacctgcacattccatgtgtcaggggagccttccacctgcagagaagttgggaaggacttcctggccaagttgggatttctccatcaacaggctgctcacactggggagcaatcaaatagcaaaagcgacggtggggccatcagtcacagaggaaaaactcattacaactgtggagaacacacaaaagcattcagcggtaaacacacacttgttcagcagcagagaaccctcactacagaaagatgttacatatgcagtgaatgtgggaaatcctttagcaaaagctacagtctcaatgaccattggagacttcacactggagaaaagccttatgaatgtcgagagtgtgggaagtcctttaggcaaagctctagtctcattcagcaccggagagttcacactgcagtacgacctcatgaatgtgatgaatgtggaaaattatttagcaacaagtctaacctcattaaacatcggagagttcacactggggaaaggccatatgagtgcagtgaatgtgggaaatcctttagccaaaggtctgcactccttcaacatcggggagttcacactggggagaggccttatgagtgcagtgaatgtgggaagttttttacatatcattccagtctcataaaacaccagaaagttcacagtggatccaggccttatgagtgcagcgaatgtgggaagtcatttagccaaaactctagcctcattgaacaccatagggttcacactggagaaaggccttataagtgcagcgaatgtgggaaatcctttagccaaaggtctgcactccttcaacatcggggagttcacactggggagaggccttatgagtgcagtgaatgtgggaagttctttccctacagctccagtctccgaaaacaccagagagttcacactggatcaagaccctatgagtgcagtgaatgtgggaaatcctttactcaaaattccggcctcattaagcacaggagggttcacactggggagaagccttatgagtgcacggaatgtgggaaatcctttagccataactccagccttattaaacatcagagaattcatagtcgataaaagccttatgagtggcaaatgtggaaaatctgttagcaccctggagaaagtccttgagtacacagtgaatgtcagaaagcttcagctgaaggccatatctcattgagtgccacacagttcacaagggaaagacacttttgatatgtagggatgtccagttgatataacagctctgaaggagatcccttatgagggtggcatcagcctgaattgaacatcctatatctgaacatctgcataaattccaggtatgtgtgaactgcattgcaccttttgccctgcccagggcccatgtcagatttatgtctctgctgatactatagtggaagccattttacctctactgcctggcaggtgaccaccagtgtgcaccactcacccatcccagtgtattcaggccatggacctgacccagtttggcccagaggactctgctggtgacctgaaaagagggactacatatttcaggatattgttggtctcacatgactcttgatagagtttgccagccttcaaatcaccaactgtgggaaccaactgcctcttattgccttgctgtgttcaattacaaaaaaagatggaaaagactgttatgaagccagatgaacctttctccagtcttccttcactatttttttttccttcaccatttatcatttcatagtcatttatgtttcatcggtcctcatgtgtactagtgcgttattttacttatactcccggatatcatattatttaatgcatagcctcttcagaatgcaattttaaaatgtaaaggctcttttataaccccccaaaaaatcacacaaatatattttaaaatgtaaatattttatcgcttctgttttctcagttgtctaaaacaatgtgtttcttaaggaagatcatttttattcaggatccaaatgtatatttaatagctttcagtagttgtatctcataagtctgtaacctacaggttccatttacctttgttttcttatttcttgaagttgctgagtcattttttaattagaatttgctgtattct

SEQ ID NO: 201564 - DNA, 2596 bp, Homo sapiens
  Payload ID: 19775
  Gene Name: zinc finger protein 155
  Uniprot ID: Q12901
  ENST ID: ENST00000270014
  CDS Start-End: 129-1745
ctccgagcaggacactgctacttaacaaggtggtttgagccaaactgtggcacgtttcaggcaggattcctccttcattcaaactgcatcacccaggagtctgcaaattccccaaagtaggaggaaaaatgaccacattcaaggaggcagtgaccttcaaggatgtggctgtggtcttcactgaggaggagctggggctgctggaccctgcccagaggaagctgtaccgagatgtgatgctggagaacttcaggaacctgctctcagtggggcatcaaccgttccaccaagatacttgccacttcctaagggaagaaaagttttggatgatggggacagcaacccaaagagaagggaattcaggaggcaagatccaaactgagttggagtctgttccagaagcaggagcacatgaagagtggtcctgccagcaaatctgggaacaaattgcaaaagacttaaccaggtctcaggactctatcataaataactctcagttctttgaaaatggtgatgtcccctcccaggttgaagcaggactacccacaattcatacaggacagaaaccttcccagggtgggaagtgtaaacagtccatcagtgatgttcccatctttgatcttcctcagcagttatactcagaagagaagtcttatacatgtgatgagtgtggaaaaagcatctgttacatctcagctcttcatgttcatcagagagtccacgtgggagagaaactctttatgtgtgatgtgtgtggcaaggaatttagtcaaagctcacatctgcaaactcatcagagagtccacactggagagaaaccattcaaatgtgagcaatgtgggaaaggtttcagtcgtagatcagcacttaatgttcatcgtaaattacacacaggagagaaaccttacatttgtgaggcatgtgggaaggccttcattcatgattcccagcttaaggaacataagagaatccatactggggagaaaccattcaaatgtgatatatgtggtaagaccttctattttaggtcaagacttaagagccattccatggttcacacaggagaaaaaccatttaggtgtgatacatgtgataagagctttcatcagagatcagcacttaataggcattgcatggtccacacaggagagaaaccgtacagatgtgagcagtgtggaaaaggctttattggtaggctagatttttataagcatcaggtggtccacacaggagaaaaaccatataattgtaaagaatgtgggaagagcttcagatggtcctcatgccttttgaaccatcagcgagtccacagtggagaaaaaagcttcaaatgtgaagaatgtggaaagggattttatacaaattcacaactgtcttcccatcagagatcccacagtggtgaaaagccatataaatgtgaggagtgtgggaagggctatgttactaagtttaatcttgacttgcaccagagggtccacacgggagagagaccttataattgtaaggaatgtgggaagaactttagccgggcctcaagtattttgaatcataagagactccactgccagaaaaaaccattcaaatgtgaggactgtggaaagaggcttgtacacaggacataccgtaaagaccagccgagagactatagtggggaaaacccatccaaatgtgaggattgtgggagacgctacaagaggcgcttgaatctggatatacttttatcattatttctaaatgacacataattgttcatatttatggggtacaacgtgctattttaatgtgtgcatacaatttatagtgatccaatcagtgtaattggtgtatctgttacctcaaacatttaccatttctttgtgttggaaaattcaaaatccatttgagaggagttggtagacagcaagggaagggtccctggagacccccagccaaacgggtcagtgtctcatccccacataacacaaaaagcagcctggggaagacaatcaagctacaggcactgataagggaactagcacaggggattgtgcctggagacatgcccatggctgcacagatagaagaacctccagcccattcaggtaaaaactcgcacaaacctccggctcactcagttaagggaacaagaccagacacagaaatgcctttgtcctttgtataatcagcaggctccgaggaaaaagtttcttcttttgtgggcatgaacacagtgggcttcagtaggttcaggttggcactttcttttgtggaaaaggaaaagcccagcctctgtaaatcatcacttcagctcctgattggtcccaggccaagctgaatagcccttaggaataatcacttcaactcctgattggtcccgggccaagctgaatagcccttatgaatcatcacttcggttcctgattggtcccgggccaaggtcccagaccaagctgaatcacgctttctccaagacagcccgcaggctaagtgcattccttccccttcccagtccataaaaaccccggaccccagcctcatactgggcaacttatttggatccccatctccactgtggagagcttttttctttcacttattaaacttttactccaatttc

SEQ ID NO: 201565 - DNA, 2222 bp, Homo sapiens
  Payload ID: 19775
  Gene Name: zinc finger protein 155
  Uniprot ID: Q12901
  ENST ID: ENST00000407951
  CDS Start-End: 194-1843
acttccggtctccgagcaggacactgctacttaacaaggtggtttgagccaaactgtggcacgtttcaggcaggattcctccttcattcaaactgcatcacccaggagtctgcaaattccccaaagtaggaggaaaaatgaccacattcaagattaccaagactgtgggaatacttataacctgctcttggtcatgataaagagaagcaaagtacttgtattctgttcaaagattatggaggaggcagtgaccttcaaggatgtggctgtggtcttcactgaggaggagctggggctgctggaccctgcccagaggaagctgtaccgagatgtgatgctggagaacttcaggaacctgctctcagtggggcatcaaccgttccaccaagatacttgccacttcctaagggaagaaaagttttggatgatggggacagcaacccaaagagaagggaattcaggaggcaagatccaaactgagttggagtctgttccagaagcaggagcacatgaagagtggtcctgccagcaaatctgggaacaaattgcaaaagacttaaccaggtctcaggactctatcataaataactctcagttctttgaaaatggtgatgtcccctcccaggttgaagcaggactacccacaattcatacaggacagaaaccttcccagggtgggaagtgtaaacagtccatcagtgatgttcccatctttgatcttcctcagcagttatactcagaagagaagtcttatacatgtgatgagtgtggaaaaagcatctgttacatctcagctcttcatgttcatcagagagtccacgtgggagagaaactctttatgtgtgatgtgtgtggcaaggaatttagtcaaagctcacatctgcaaactcatcagagagtccacactggagagaaaccattcaaatgtgagcaatgtgggaaaggtttcagtcgtagatcagcacttaatgttcatcgtaaattacacacaggagagaaaccttacatttgtgaggcatgtgggaaggccttcattcatgattcccagcttaaggaacataagagaatccatactggggagaaaccattcaaatgtgatatatgtggtaagaccttctattttaggtcaagacttaagagccattccatggttcacacaggagaaaaaccatttaggtgtgatacatgtgataagagctttcatcagagatcagcacttaataggcattgcatggtccacacaggagagaaaccgtacagatgtgagcagtgtggaaaaggctttattggtaggctagatttttataagcatcaggtggtccacacaggagaaaaaccatataattgtaaagaatgtgggaagagcttcagatggtcctcatgccttttgaaccatcagcgagtccacagtggagaaaaaagcttcaaatgtgaagaatgtggaaagggattttatacaaattcacaactgtcttcccatcagagatcccacagtggtgaaaagccatataaatgtgaggagtgtgggaagggctatgttactaagtttaatcttgacttgcaccagagggtccacacgggagagagaccttataattgtaaggaatgtgggaagaactttagccgggcctcaagtattttgaatcataagagactccactgccagaaaaaaccattcaaatgtgaggactgtggaaagaggcttgtacacaggacataccgtaaagaccagccgagagactatagtggggaaaacccatccaaatgtgaggattgtgggagacgctacaagaggcgcttgaatctggatatacttttatcattatttctaaatgacacataattgttcatatttatggggtacaacgtgctattttaatgtgtgcatacaatttatagtgatccaatcagtgtaattggtgtatctgttacctcaaacatttaccatttctttgtgttggaaaattcaaaatccatttgagaggagttggtagacagcaagggaagggtccctggagacccccagccaaacgggtcagtgtctcatccccacataacacaaaaagcagcctggggaagacaatcaagctacaggcactgataagggaactagcacaggggattgtgcctggagacatgcccatggctgcacagatagaagaacctccagcccattcaggtaaaaactcgcacaaacctccggctcactcagttaagggaac

SEQ ID NO: 201566 - DNA, 580 bp, Homo sapiens
  Payload ID: 19775
  Gene Name: zinc finger protein 155
  ENST ID: ENST00000590411
  CDS Start-End: 309-580
aggcacttgacttgatatgcatcagagggtccatatggcagagaaaccgtggaagtttggggagattgccatgtgcttcagttatgcctcaaagtcttcaacttcattggactgttcactttcaagggaaaccttagtaaggtgatatctgtgatagtcttctcaactacaagctcatctgagagttcacaatgggagaagcattaaaaatttgatacatgtgactgtggcacgtttcaggcaggattcctccttcattcaaactgcatcacccaggagtctgcaaattccccaaagtaggaggaaaaatgaccacattcaaggaggcagtgaccttcaaggatgtggctgtggtcttcactgaggaggagctggggctgctggaccctgcccagaggaagctgtaccgagatgtgatgctggagaacttcaggaacctgctctcagtggggcatcaaccgttccaccaagatacttgccacttcctaagggaagaaaagttttggatgatggggacagcaacccaaagagaagggaattcaggaggcaagatccaaactgagttggagtctgttccaga

SEQ ID NO: 201567 - DNA, 1888 bp, Homo sapiens
  Payload ID: 19775
  Gene Name: zinc finger protein 155
  Uniprot ID: Q12901
  ENST ID: ENST00000590615
  CDS Start-End: 192-1808
ctgctacttaacaaggtggtttgagccaagtatgtgtcttgcgggtctttgcgaaagtgaaccagttattaggggcgcctaacgacctggggggtcaactaaggggactgtggcacgtttcaggcaggattcctccttcattcaaactgcatcacccaggagtctgcaaattccccaaagtaggaggaaaaatgaccacattcaaggaggcagtgaccttcaaggatgtggctgtggtcttcactgaggaggagctggggctgctggaccctgcccagaggaagctgtaccgagatgtgatgctggagaacttcaggaacctgctctcagtggggcatcaaccgttccaccaagatacttgccacttcctaagggaagaaaagttttggatgatggggacagcaacccaaagagaagggaattcaggaggcaagatccaaactgagttggagtctgttccagaagcaggagcacatgaagagtggtcctgccagcaaatctgggaacaaattgcaaaagacttaaccaggtctcaggactctatcataaataactctcagttctttgaaaatggtgatgtcccctcccaggttgaagcaggactacccacaattcatacaggacagaaaccttcccagggtgggaagtgtaaacagtccatcagtgatgttcccatctttgatcttcctcagcagttatactcagaagagaagtcttatacatgtgatgagtgtggaaaaagcatctgttacatctcagctcttcatgttcatcagagagtccacgtgggagagaaactctttatgtgtgatgtgtgtggcaaggaatttagtcaaagctcacatctgcaaactcatcagagagtccacactggagagaaaccattcaaatgtgagcaatgtgggaaaggtttcagtcgtagatcagcacttaatgttcatcgtaaattacacacaggagagaaaccttacatttgtgaggcatgtgggaaggccttcattcatgattcccagcttaaggaacataagagaatccatactggggagaaaccattcaaatgtgatatatgtggtaagaccttctattttaggtcaagacttaagagccattccatggttcacacaggagaaaaaccatttaggtgtgatacatgtgataagagctttcatcagagatcagcacttaataggcattgcatggtccacacaggagagaaaccgtacagatgtgagcagtgtggaaaaggctttattggtaggctagatttttataagcatcaggtggtccacacaggagaaaaaccatataattgtaaagaatgtgggaagagcttcagatggtcctcatgccttttgaaccatcagcgagtccacagtggagaaaaaagcttcaaatgtgaagaatgtggaaagggattttatacaaattcacaactgtcttcccatcagagatcccacagtggtgaaaagccatataaatgtgaggagtgtgggaagggctatgttactaagtttaatcttgacttgcaccagagggtccacacgggagagagaccttataattgtaaggaatgtgggaagaactttagccgggcctcaagtattttgaatcataagagactccactgccagaaaaaaccattcaaatgtgaggactgtggaaagaggcttgtacacaggacataccgtaaagaccagccgagagactatagtggggaaaacccatccaaatgtgaggattgtgggagacgctacaagaggcgcttgaatctggatatacttttatcattatttctaaatgacacataattgttcatatttatggggtacaacgtgctattttaatgtgtgcatacaatttatagtgatccaatcagtgtaattggtgt

SEQ ID NO: 201568 - DNA, 559 bp, Homo sapiens
  Payload ID: 19775
  Gene Name: zinc finger protein 155
  ENST ID: ENST00000586454
  CDS Start-End: 214-559
tacttaacaaggtggtttgagccaagtatgtgtcttgcgggtctttgcgaaagtgaaccagttattaggggcgcctaacgacctggggggtcaactaagggggtaagaagccctggagaagacctgagactgtggcacgtttcaggcaggattcctccttcattcaaactgcatcacccaggagtctgcaaattccccaaagtaggaggaaaaatgaccacattcaaggaggcagtgaccttcaaggatgtggctgtggtcttcactgaggaggagctggggctgctggaccctgcccagaggaagctgtaccgagatgtgatgctggagaacttcaggaacctgctctcagtggggcatcaaccgttccaccaagatacttgccacttcctaagggaagaaaagttttggatgatggggacagcaacccaaagagaagggaattcaggaggcaagatccaaactgagttggagtctgttccagaagcaggagcacatgaagagtggtcctgccagcaaatctgggaacaaattgcaaaagacttaaccaggtctcagg

SEQ ID NO: 201569 - DNA, 576 bp, Homo sapiens
  Payload ID: 19775
  Gene Name: zinc finger protein 155
  ENST ID: ENST00000591532
  CDS Start-End: 127-576
gacacttccggtctccgagcaggacactgctacttaacaagactgtggcacgtttcaggcaggattcctccttcattcaaactgcatcacccaggagtctgcaaattccccaaagtaggaggaaaaatgaccacattcaaggaggcagtgaccttcaaggatgtggctgtggtcttcactgaggaggagctggggctgctggaccctgcccagaggaagctgtaccgagatgtgatgctggagaacttcaggaacctgctctcagtggggcatcaaccgttccaccaagatacttgccacttcctaagggaagaaaagttttggatgatggggacagcaacccaaagagaagggaattcaggaggcaagatccaaactgagttggagtctgttccagaagcaggagcacatgaagagtggtcctgccagcaaatctgggaacaaattgcaaaagacttaaccaggtctcaggactctatcataaataactctcagttctttgaaaatggtgatgtcccctcccaggttgaagcaggactacccacaattcatacaggacagaaaccttcccagggt

SEQ ID NO: 201570 - DNA, 2732 bp, Homo sapiens
  Payload ID: 19775
  Gene Name: zinc finger protein 155
  Uniprot ID: Q12901
  ENST ID: ENST00000611002
  CDS Start-End: 265-1881
ccagacgcctgtggcatcatcgacacttccggtctccgagcaggacactgctacttaacaaggtggtttgagccaagtatgtgtcttgcgggtctttgcgaaagtgaaccagttattaggggcgcctaacgacctggggggtcaactaagggggtaagaagccctggagaagacctgagactgtggcacgtttcaggcaggattcctccttcattcaaactgcatcacccaggagtctgcaaattccccaaagtaggaggaaaaatgaccacattcaaggaggcagtgaccttcaaggatgtggctgtggtcttcactgaggaggagctggggctgctggaccctgcccagaggaagctgtaccgagatgtgatgctggagaacttcaggaacctgctctcagtggggcatcaaccgttccaccaagatacttgccacttcctaagggaagaaaagttttggatgatggggacagcaacccaaagagaagggaattcaggaggcaagatccaaactgagttggagtctgttccagaagcaggagcacatgaagagtggtcctgccagcaaatctgggaacaaattgcaaaagacttaaccaggtctcaggactctatcataaataactctcagttctttgaaaatggtgatgtcccctcccaggttgaagcaggactacccacaattcatacaggacagaaaccttcccagggtgggaagtgtaaacagtccatcagtgatgttcccatctttgatcttcctcagcagttatactcagaagagaagtcttatacatgtgatgagtgtggaaaaagcatctgttacatctcagctcttcatgttcatcagagagtccacgtgggagagaaactctttatgtgtgatgtgtgtggcaaggaatttagtcaaagctcacatctgcaaactcatcagagagtccacactggagagaaaccattcaaatgtgagcaatgtgggaaaggtttcagtcgtagatcagcacttaatgttcatcgtaaattacacacaggagagaaaccttacatttgtgaggcatgtgggaaggccttcattcatgattcccagcttaaggaacataagagaatccatactggggagaaaccattcaaatgtgatatatgtggtaagaccttctattttaggtcaagacttaagagccattccatggttcacacaggagaaaaaccatttaggtgtgatacatgtgataagagctttcatcagagatcagcacttaataggcattgcatggtccacacaggagagaaaccgtacagatgtgagcagtgtggaaaaggctttattggtaggctagatttttataagcatcaggtggtccacacaggagaaaaaccatataattgtaaagaatgtgggaagagcttcagatggtcctcatgccttttgaaccatcagcgagtccacagtggagaaaaaagcttcaaatgtgaagaatgtggaaagggattttatacaaattcacaactgtcttcccatcagagatcccacagtggtgaaaagccatataaatgtgaggagtgtgggaagggctatgttactaagtttaatcttgacttgcaccagagggtccacacgggagagagaccttataattgtaaggaatgtgggaagaactttagccgggcctcaagtattttgaatcataagagactccactgccagaaaaaaccattcaaatgtgaggactgtggaaagaggcttgtacacaggacataccgtaaagaccagccgagagactatagtggggaaaacccatccaaatgtgaggattgtgggagacgctacaagaggcgcttgaatctggatatacttttatcattatttctaaatgacacataattgttcatatttatggggtacaacgtgctattttaatgtgtgcatacaatttatagtgatccaatcagtgtaattggtgtatctgttacctcaaacatttaccatttctttgtgttggaaaattcaaaatccatttgagaggagttggtagacagcaagggaagggtccctggagacccccagccaaacgggtcagtgtctcatccccacataacacaaaaagcagcctggggaagacaatcaagctacaggcactgataagggaactagcacaggggattgtgcctggagacatgcccatggctgcacagatagaagaacctccagcccattcaggtaaaaactcgcacaaacctccggctcactcagttaagggaacaagaccagacacagaaatgcctttgtcctttgtataatcagcaggctccgaggaaaaagtttcttcttttgtgggcatgaacacagtgggcttcagtaggttcaggttggcactttcttttgtggaaaaggaaaagcccagcctctgtaaatcatcacttcagctcctgattggtcccaggccaagctgaatagcccttaggaataatcacttcaactcctgattggtcccgggccaagctgaatagcccttatgaatcatcacttcggttcctgattggtcccgggccaaggtcccagaccaagctgaatcacgctttctccaagacagcccgcaggctaagtgcattccttccccttcccagtccataaaaaccccggaccccagcctcatactgggcaacttatttggatccccatctccactgtggagagcttttttctttcacttattaaacttttactccaatttc

SEQ ID NO: 201571 - DNA, 2318 bp, Homo sapiens
  Payload ID: 19776
  Gene Name: zinc finger protein 157
  Uniprot ID: P51786
  ENST ID: ENST00000377073
  CDS Start-End: 87-1607
agccttaccccttactggaggctgcaggaccctctacacacagacagctgtccagcacggaaggtgggctgaggcccagggtgaacatgccagctaatgggacatcaccccagagattccctgccctgattccaggagaacctggcagatcttttgaggggtccgtgtcattcgaggatgtggctgtggatttcacccgacaggagtggcacagactggaccctgctcagaggaccatgcacaaggatgtgatgctggagacctacagcaacctggcatctgtgggcctctgcgtggccaaaccagagatgatcttcaagttggagcgaggagaagagctgtggatattagaggaggaatcctcaggccatggttactcaggatctctctcactgctgtgtggcaatggttctgttggggataatgccctcaggcatgataatgaccttcttcaccatcagaagattcaaacattggatcaaaatgttgaatataatggatgcaggaaagccttccatgagaaaacaggctttgttagacgtaaaagaacacccagaggagataaaaactttgaatgtcatgaatgtgggaaagcttactgtaggaagtcaaaccttgttgaacatctgagaatacacacaggagagagaccctatgaatgcggtgaatgtgcaaaaaccttcagtgcaagatcatacctcattgctcatcagaaaactcacacaggggagaggccctttgaatgtaatgaatgtgggaaatcttttggcaggaagtcacaactcatcctacatacaagaacacacactggagagagaccctatgaatgtactgaatgtgggaaaaccttttctgagaaggcaaccctcacgattcatcagagaactcacacaggggagaaaccctatgaatgtagtgaatgtgggaaaacatttcgtgtaaagatatcccttacccaacaccacagaactcatacaggggagaaaccttatgaatgtggggagtgtgggaaaaacttccgtgcaaagaaatccctaaatcagcatcaaagaattcacacaggtgagaaaccctatgagtgtggtgaatgtgggaaattcttccgaatgaagatgactctcaataatcatcaaagaactcacacaggtgaaaagccctatcagtgtaatgaatgtgggaaatctttcagggtgcactcatctcttgggatccatcagagaattcacacaggagagaaaccttacgaatgtaatgagtgtggtaatgctttctatgtgaaagcacgcctaattgaacatcagaggatgcattcaggagagaaaccctacgaatgtagtgaatgtgggaaaatcttcagtatgaagaaatccctttgtcaacaccggagaactcacacaggagagaaaccttatgaatgtagtgaatgtggaaatgccttctatgtgaaagtacgcctcattgaacatcagcgaattcacacaggagagagaccctttgagtgtcaagaatgtgggaaagctttctgccggaaagcacacctcacagaacatcagagaactcacataggctggtcctggcgttgtacaatgaagaaagcctctcactgaagacttccctcaccattggatcaagctccttgggggcatatgatcaccagggcacacagtgtgcctgtgaaaatttggcacctacatttgtatcaaagtatgtcctgatccccttaggggatagctcattgtttttattcagatttccctaattagtggtgtgtgaacatcttatctgttgattggctatttgggttttttcttctgtgcattgactgttcatgtcctctgctcattgttttcaaatgggctgttcatctcttgctttttggtttaaatgttgttttttaacatatgagaatataaaaatcctttttttttcagtcatatgtgttgcaaatatcttctcccagactgtcgttggttttttaaattttgccatctgttttcttctgctgaagttttatattttatttatttattttttatttttttgagatggagtctcactctgtcacccaggctggagtgcaatggcatgacctcagctcatttcaaccttcgcctcccgggttcaagcgattctcctgcctcagtctcccaagtagctgggattacaggtgtgcaccaccatgcctggctaatttttgtatttttagtaaagacggggtttcaccatgttggccaggctggtctctaactcctgacctcaggtgatccacctgcctcggcctccaaaagtgttgggattacaggtgtgagccaccgtgc

SEQ ID NO: 201572 - DNA, 2616 bp, Homo sapiens
  Payload ID: 19777
  Gene Name: zinc finger protein 16
  Uniprot ID: P17020
  ENST ID: ENST00000276816
  CDS Start-End: 188-2236
aattcggggcgggacttccgggggtcagccggcgttggctgagacgtcttcgtgccacggtgctgcctcctttccaagcgcgacccgttgagatccccttgaccacaccctcattctcagctggtgctcatgaaggacagaagagtcaatgtcagtacaatgtgagtgaagggctgaggtccttgtcatgcccagcctcagaactcgccgtgaggaggcagagatggagctctcagttccaggaccatccccctggacccctgcagcccaggcccgtgtgagagatgctcctgctgtgacccaccctggatctgcagcctgtggtaccccctgctgtagtgatactgagctggaagccatctgccctcactatcagcagccagattgtgacaccaggactgaagacaaggagtttcttcacaaggaagacattcatgaagatttggaatcacaggcagaaatatcagaaaactatgctggtgatgtttcccaggtacccgagcttggagatctgtgtgatgatgtatcagaaagagactggggagtccccgaaggcaggaggctgccacagtccctctcccaggagggggacttcacaccagctgccatggggctccttaggggccccttaggggagaaagatctggactgtaatggttttgacagtcgcttcagtctgagcccaaacctgatggcatgtcaggaaatccctacagaagagaggccacatccatatgacatgggtggccagagtttccagcacagtgtggacctaactggtcatgagggggttcccacagctgaaagtccactcatatgtaatgagtgtgggaaaaccttccaaggaaatcctgaccttattcagcgtcaaatagtccacactggggaggcttcctttatgtgtgatgattgtgggaaaaccttcagccagaactcagttcttaaaaaccgtcatcgatctcatatgagtgagaaagcttaccagtgcagcgaatgtgggaaagccttccgagggcactcagacttttctaggcatcagagtcaccacagcagtgagaggccttatatgtgtaatgaatgtggaaaagccttcagccagaactcgagccttaaaaagcaccaaaagtctcacatgagtgagaagccctatgaatgcaatgaatgtgggaaggcttttaggcggagctcaaacctcatccaacatcaaagaatccattctggggagaaaccgtatgtgtgcagtgagtgtgggaaggccttcaggcgaagctcaaacctcatcaaacaccacaggactcacacaggagagaagccttttgagtgtggcgagtgtgggaaagccttcagccagagtgcacacctgaggaagcaccagagggtccacactggagagaagccttatgagtgtaatgattgtggcaagcccttcagtcgggtctccaacctcattaagcaccacagggttcacactggagagaagccctataagtgcagtgactgtgggaaagcatttagtcagagctccagccttattcagcatcggagaattcacactggagaaaagcctcacgtgtgtaatgtatgtggaaaagcctttagttatagctcagtgctccgaaagcaccagatcatccacacgggagagaagccgtacagatgcagtgtctgtgggaaggccttcagccacagctcagccctcattcagcaccagggcgtgcacacaggcgacaagccctacgcctgccacgagtgtgggaagacctttggtcgcagctccaacctcatccttcaccagcgagtccacactggagagaagccctatgaatgtactgaatgtggaaaaaccttcagccagagctcaaccctcattcagcatcagaggattcataatgggctgaagccccatgaatgtaaccagtgtggtaaagccttcaaccgaagctcaaatctcattcaccaccagaaagttcatactggggaaaaaccctacacctgtgttgaatgtggtaagggcttcagccagagctcacacctcattcagcatcagataatccacacgggcgagcgcccctacaaatgcagtgagtgtgggaaagccttcagtcagcgttcggtcctcatccagcaccagaggattcacactggggtgaagccctatgactgtgctgcttgtgggaaagccttcagccagcgatcaaagttgatcaaacaccagttgattcacaccagggaataggctgttgggctggcaggagtgaaaccgagcatagtttcctctccaactcctctttggccattgtctcagcctctgccacttcccagaccgaaagcctggactcagctcactgcctacatccagtggccacatagcctgggaccctcctttgaaacatcctttacaggctcccttctcactgccactgctcttgcctcttgtgatgtcttgggtttgggcttgtttttacagcttgtgaacggactgcacgtttgttacaagggagaagattatggaggctgcatattcatgaatagagtttattattataatgaaaagttaccaaaaaagtaaagtgacgtttggtttgagataaccatagtagtttgtttgattggtaa

SEQ ID NO: 201573 - DNA, 2503 bp, Homo sapiens
  Payload ID: 19777
  Gene Name: zinc finger protein 16
  Uniprot ID: P17020
  ENST ID: ENST00000394909
  CDS Start-End: 102-2150
aattcggggcgggacttccgggggtcagccggcgttggctgagacgtcttcgtgccacggtgctgcctcctttccaagcgcgacccgttgaggtccttgtcatgcccagcctcagaactcgccgtgaggaggcagagatggagctctcagttccaggaccatccccctggacccctgcagcccaggcccgtgtgagagatgctcctgctgtgacccaccctggatctgcagcctgtggtaccccctgctgtagtgatactgagctggaagccatctgccctcactatcagcagccagattgtgacaccaggactgaagacaaggagtttcttcacaaggaagacattcatgaagatttggaatcacaggcagaaatatcagaaaactatgctggtgatgtttcccaggtacccgagcttggagatctgtgtgatgatgtatcagaaagagactggggagtccccgaaggcaggaggctgccacagtccctctcccaggagggggacttcacaccagctgccatggggctccttaggggccccttaggggagaaagatctggactgtaatggttttgacagtcgcttcagtctgagcccaaacctgatggcatgtcaggaaatccctacagaagagaggccacatccatatgacatgggtggccagagtttccagcacagtgtggacctaactggtcatgagggggttcccacagctgaaagtccactcatatgtaatgagtgtgggaaaaccttccaaggaaatcctgaccttattcagcgtcaaatagtccacactggggaggcttcctttatgtgtgatgattgtgggaaaaccttcagccagaactcagttcttaaaaaccgtcatcgatctcatatgagtgagaaagcttaccagtgcagcgaatgtgggaaagccttccgagggcactcagacttttctaggcatcagagtcaccacagcagtgagaggccttatatgtgtaatgaatgtggaaaagccttcagccagaactcgagccttaaaaagcaccaaaagtctcacatgagtgagaagccctatgaatgcaatgaatgtgggaaggcttttaggcggagctcaaacctcatccaacatcaaagaatccattctggggagaaaccgtatgtgtgcagtgagtgtgggaaggccttcaggcgaagctcaaacctcatcaaacaccacaggactcacacaggagagaagccttttgagtgtggcgagtgtgggaaagccttcagccagagtgcacacctgaggaagcaccagagggtccacactggagagaagccttatgagtgtaatgattgtggcaagcccttcagtcgggtctccaacctcattaagcaccacagggttcacactggagagaagccctataagtgcagtgactgtgggaaagcatttagtcagagctccagccttattcagcatcggagaattcacactggagaaaagcctcacgtgtgtaatgtatgtggaaaagcctttagttatagctcagtgctccgaaagcaccagatcatccacacgggagagaagccgtacagatgcagtgtctgtgggaaggccttcagccacagctcagccctcattcagcaccagggcgtgcacacaggcgacaagccctacgcctgccacgagtgtgggaagacctttggtcgcagctccaacctcatccttcaccagcgagtccacactggagagaagccctatgaatgtactgaatgtggaaaaaccttcagccagagctcaaccctcattcagcatcagaggattcataatgggctgaagccccatgaatgtaaccagtgtggtaaagccttcaaccgaagctcaaatctcattcaccaccagaaagttcatactggggaaaaaccctacacctgtgttgaatgtggtaagggcttcagccagagctcacacctcattcagcatcagataatccacacgggcgagcgcccctacaaatgcagtgagtgtgggaaagccttcagtcagcgttcggtcctcatccagcaccagaggattcacactggggtgaagccctatgactgtgctgcttgtgggaaagccttcagccagcgatcaaagttgatcaaacaccagttgattcacaccagggaataggctgttgggctggcaggagtgaaaccgagcatagtttcctctccaactcctctttggccattgtctcagcctctgccacttcccagaccgaaagcctggactcagctcactgcctacatccagtggccacatagcctgggaccctcctttgaaacatcctttacaggctcccttctcactgccactgctcttgcctcttgtgatgtcttgggtttgggcttgtttttacagcttgtgaacggactgcacgtttgttacaagggagaagattatggaggctgcatattcatgaatagagtttattattataatgaaaagttaccaaaaaagtaaagtgacgtttggtttgagat

SEQ ID NO: 201574 - DNA, 575 bp, Homo sapiens
  Payload ID: 19777
  Gene Name: zinc finger protein 16
  ENST ID: ENST00000527811
  CDS Start-End: 204-575
agagcctctgggggctgcctccggtagggggtctccggggagaccccggggtaaggtcgccgcgaggggccgagccaggactccgcccacaggctggtggcgttcccgcctgtcggtgccaccattcgagctcgggcggagcgacggggtgaaggggtggcctgcccttccacacctgtgggatatctcatcaggtccttgtcatgcccagcctcagaactcgccgtgaggaggcagagatggagctctcagttccaggaccatccccctggacccctgcagcccaggcccgtgtgagagatgctcctgctgtgacccaccctggatctgcagcctgtggtaccccctgctgtagtgatactgagctggaagccatctgccctcactatcagcagccagattgtgacaccaggactgaagacaaggagtttcttcacaaggaagacattcatgaagatttggaatcacaggcagaaatatcagaaaactatgctggtgatgtttcccaggtacccgagcttggagatctgtgtgatgatgtatcagaaagagactggggagtccccgaaggcagg

SEQ ID NO: 201575 - DNA, 696 bp, Homo sapiens
  Payload ID: 19777
  Gene Name: zinc finger protein 16
  ENST ID: ENST00000532351
  CDS Start-End: 33-696
ctttccaagcgcgacccgttgaggtccttgtcatgcccagcctcagaactcgccgtgaggaggcagagatggagctctcagttccaggaccatccccctggacccctgcagcccaggcccgtgtgagagatgctcctgctgtgacccaccctggatctgcagcctgtggtaccccctgctgtagtgatactgagctggaagccatctgccctcactatcagcagccagattgtgacaccaggactgaagacaaggagtttcttcacaaggaagacattcatgaagatttggaatcacaggcagaaatatcagaaaactatgctggtgatgtttcccaggtacccgagcttggagatctgtgtgatgatgtatcagaaagagactggggagtccccgaaggcaggaggctgccacagtccctctcccaggagggggacttcacaccagctgccatggggctccttaggggccccttaggggagaaagatctggactgtaatggttttgacagtcgcttcagtctgagcccaaacctgatggcatgtcaggaaatccctacagaagagaggccacatccatatgacatgggtggccagagtttccagcacagtgtggacctaactggtcatgagggggttcccacagctgaaagtccactcatatgtaatgagtgtgggaaaaccttccaaggaaatc

SEQ ID NO: 201576 - DNA, 2528 bp, Homo sapiens
  Payload ID: 19777
  Gene Name: zinc finger protein 16
  Uniprot ID: P17020
  ENST ID: ENST00000611477
  CDS Start-End: 102-2150
aattcggggcgggacttccgggggtcagccggcgttggctgagacgtcttcgtgccacggtgctgcctcctttccaagcgcgacccgttgaggtccttgtcatgcccagcctcagaactcgccgtgaggaggcagagatggagctctcagttccaggaccatccccctggacccctgcagcccaggcccgtgtgagagatgctcctgctgtgacccaccctggatctgcagcctgtggtaccccctgctgtagtgatactgagctggaagccatctgccctcactatcagcagccagattgtgacaccaggactgaagacaaggagtttcttcacaaggaagacattcatgaagatttggaatcacaggcagaaatatcagaaaactatgctggtgatgtttcccaggtacccgagcttggagatctgtgtgatgatgtatcagaaagagactggggagtccccgaaggcaggaggctgccacagtccctctcccaggagggggacttcacaccagctgccatggggctccttaggggccccttaggggagaaagatctggactgtaatggttttgacagtcgcttcagtctgagcccaaacctgatggcatgtcaggaaatccctacagaagagaggccacatccatatgacatgggtggccagagtttccagcacagtgtggacctaactggtcatgagggggttcccacagctgaaagtccactcatatgtaatgagtgtgggaaaaccttccaaggaaatcctgaccttattcagcgtcaaatagtccacactggggaggcttcctttatgtgtgatgattgtgggaaaaccttcagccagaactcagttcttaaaaaccgtcatcgatctcatatgagtgagaaagcttaccagtgcagcgaatgtgggaaagccttccgagggcactcagacttttctaggcatcagagtcaccacagcagtgagaggccttatatgtgtaatgaatgtggaaaagccttcagccagaactcgagccttaaaaagcaccaaaagtctcacatgagtgagaagccctatgaatgcaatgaatgtgggaaggcttttaggcggagctcaaacctcatccaacatcaaagaatccattctggggagaaaccgtatgtgtgcagtgagtgtgggaaggccttcaggcgaagctcaaacctcatcaaacaccacaggactcacacaggagagaagccttttgagtgtggcgagtgtgggaaagccttcagccagagtgcacacctgaggaagcaccagagggtccacactggagagaagccttatgagtgtaatgattgtggcaagcccttcagtcgggtctccaacctcattaagcaccacagggttcacactggagagaagccctataagtgcagtgactgtgggaaagcatttagtcagagctccagccttattcagcatcggagaattcacactggagaaaagcctcacgtgtgtaatgtatgtggaaaagcctttagttatagctcagtgctccgaaagcaccagatcatccacacgggagagaagccgtacagatgcagtgtctgtgggaaggccttcagccacagctcagccctcattcagcaccagggcgtgcacacaggcgacaagccctacgcctgccacgagtgtgggaagacctttggtcgcagctccaacctcatccttcaccagcgagtccacactggagagaagccctatgaatgtactgaatgtggaaaaaccttcagccagagctcaaccctcattcagcatcagaggattcataatgggctgaagccccatgaatgtaaccagtgtggtaaagccttcaaccgaagctcaaatctcattcaccaccagaaagttcatactggggaaaaaccctacacctgtgttgaatgtggtaagggcttcagccagagctcacacctcattcagcatcagataatccacacgggcgagcgcccctacaaatgcagtgagtgtgggaaagccttcagtcagcgttcggtcctcatccagcaccagaggattcacactggggtgaagccctatgactgtgctgcttgtgggaaagccttcagccagcgatcaaagttgatcaaacaccagttgattcacaccagggaataggctgttgggctggcaggagtgaaaccgagcatagtttcctctccaactcctctttggccattgtctcagcctctgccacttcccagaccgaaagcctggactcagctcactgcctacatccagtggccacatagcctgggaccctcctttgaaacatcctttacaggctcccttctcactgccactgctcttgcctcttgtgatgtcttgggtttgggcttgtttttacagcttgtgaacggactgcacgtttgttacaagggagaagattatggaggctgcatattcatgaatagagtttattattataatgaaaagttaccaaaaaagtaaagtgacgtttggtttgagataaccatagtagtttgtttgattggt

SEQ ID NO: 201577 - DNA, 1304 bp, Homo sapiens
  Payload ID: 19778
  Gene Name: zinc finger protein 160
  Uniprot ID: Q9HCG1
  ENST ID: ENST00000355147
  CDS Start-End: 410-853
gcggagcaagcatcacaccatggcgtatgagtgttcctctgtgtagactcaacctgcgcctcgccgtcccccattcgcacacccgatgcccgggggtcgctacggacttaaaatctccgcaccgcaccctccacctcagaaacgttcctggatccgaacactgccccctgacgacctagagagatcccggctcccagcccactgagtggcttcagcctcgctgtcccccgcccacttcatccctcaggcacctcccaactcctggcctctctgcacgaggcgcctgccccgggccccgcctacaggggacccagctcttcttgcagccactggaagctgatcacctggagtgaagacctcacacgaagaagtctggaagaagaggaagaggaaagaaaaggagtcagggatggcccttactcaggtacggttgacatttagggatgtggccatagaattctctcaggaggagtggaaatgcctggaccctgctcagaggatcttatacagggacgtgatgttggagaactactggaaccttgtttctctgggactgtgtcattttgatatgaatattatctccatgttggaggaagggaaagagccctggactgtgaagagctgtgtgaaaatagcaagaaaaccaagaacgccggaatgtgtcaaaggcgtggtcacagacctgctcaggagatggaaacattggctgctgctccttggcatctgctgccccaaacctcatggaagagtctccagccgtctccgcctgtcgaggtccctcggccatttcttccattctgcttttgccactttcatgggggtgtgtgataagcgagtgggttctatcttctaagattgttctcagcataaccgtaaagacacctaacaaaatccttctgtcattgatcctcagtcttacatggggtgcgtattctgtttttccaggcttcagcacagaaatacaagtactgcatgttgtcacttacatttggaatctaaaccaataaaactaatagcagcaaagagtagaatgtgggttaccacaggttggggactggagggaatagggagatgttggtcactgggtgaaaacattaggagtaaatgataggtttttgagatgacttatatggtaataggcttgtttccatcagtccatattgtatacctataacagaatatcagtttgtttcctgtaaatatatataactataatttgtcaatatagaatttttttaaaaatcatattccagttcttattgtgttggttctaaataaaaatgcttctttctcttaagacaaaa

SEQ ID NO: 201578 - DNA, 4336 bp, Homo sapiens
  Payload ID: 19778
  Gene Name: zinc finger protein 160
  Uniprot ID: Q9HCG1
  ENST ID: ENST00000429604
  CDS Start-End: 417-2873
gcagttgcccacagacccggaagtggatcgtgcggagcaagcatcacaccatggcgtatgagtgttcctctgtgtagactcaacctgcgcctcgccgtcccccattcgcacacccgatgcccgggggtcgctacggacttaaaatctccgcaccgcaccctccacctcagaaacgttcctggatccgaacactgccccctgacgacctagagagatcccggctcccagcccactgagtggcttcagcctcgctggcacctcccaactcctggcctctctgcacgaggcgcctgccccgggccccgcctacaggggacccagctcttcttgcagccactggaagctgatcacctggagtgaagacctcacacgaagaagtctggaagaagaggaagaggaaagaaaaggagtcagggatggcccttactcaggtacggttgacatttagggatgtggccatagaattctctcaggaggagtggaaatgcctggaccctgctcagaggatcttatacagggacgtgatgttggagaactactggaaccttgtttctctgggactgtgtcattttgatatgaatattatctccatgttggaggaagggaaagagccctggactgtgaagagctgtgtgaaaatagcaagaaaaccaagaacgccggaatgtgtcaaaggcgtggtcacagatatccctcctaaatgtacaatcaaggatttgctaccaaaagagaagagcagtacagaagcagtattccacacagtggtgttggaaagacacgaaagccctgacattgaagacttttccttcaaggaaccccagaaaaatgtgcatgattttgagtgtcaatggagagatgacacaggaaattacaagggagtgcttatggcccagaaagaaggtaaaagagatcaacgcgacagaagagacatagaaaacaagcttatgaacaatcagcttggagtaagctttcattctcatctgcctgaactgcagctatttcaaggtgaggggaaaatgtatgaatgtaatcaagttgagaagtctaccaacaatggttcctcagtgtcaccacttcaacaaattccttctagtgtccaaacccacaggtctaaaaaatatcatgaacttaaccatttttcattactcacacaaagacgaaaagcaaacagttgtggaaaaccttataaatgtaatgaatgtggcaaggcgttcactcagaattcgaaccttacaagtcataggagaattcatagtggagagaagccttacaaatgcagtgagtgcggcaaaacctttactgttcgttcaaatctaactattcatcaggtcatccatactggagaaaaaccttacaaatgtcatgagtgtggcaaggtcttcaggcacaattcataccttgcaactcatcggcgaattcatactggagagaaaccttacaagtgtaatgagtgtggaaaagcctttagaggacattcaaacctaactacccatcagttaattcatactggagaaaaaccgttcaaatgtaatgaatgtggcaagctcttcactcaaaattcacaccttataagtcattggagaattcacactggagagaaaccttacaagtgcaatgagtgcggcaaagcctttagtgttcgttcaagcctagcaatccatcagacaatccacactggagaaaaaccttacaaatgtaatgaatgtggcaaagtctttaggtacaattcatacctcggaaggcatcggagagttcatactggtgagaaaccttacaagtgtaatgaatgtggcaaagccttcagtatgcattcaaacctagctacccatcaggtcatccatactggaacaaaacctttcaaatgcaatgaatgcagcaaggttttcactcaaaattcacaacttgcaaatcatcgaagaattcatactggagagaaaccttacaagtgtaatgagtgtgggaaagccttcagtgttcgttcaagtctgactacccatcaggcaatccattctggagagaaaccttacaaatgtattgaatgtggcaagagcttcactcaaaaatcacaccttagaagtcatcggggaattcattctggagagaaaccttacaagtgtaatgaatgtggtaaagtcttcgctcaaacatcacaacttgcaaggcattggagagttcatactggagaaaaaccttacaagtgtaatgactgtggcagagcctttagtgatcgttcaagcctaacttttcatcaggcaatacatactggagagaaaccttacaaatgtcatgaatgcggcaaggtttttaggcacaattcataccttgcaactcatcggcgaattcatactggagagaaaccttacaagtgtaatgagtgtgggaaagcctttagtatgcattcaaacctaactacccataaggtcatccatactggagagaagccttacaaatgtaatcaatgtggcaaggtcttcactcagaactcacaccttgcaaatcatcaaaggactcacaccggagagaaaccttaccgatgcaatgagtgtgggaaagccttcagtgttcgttcaagcctaaccacccatcaggcaatccatactgggaaaaaaccttacaaatgtaatgaatgtggcaaggtctttactcaaaatgctcacctggcaaatcaccgaagaattcatactggggagaaaccttacaggtgtacagagtgtgggaaagcctttagggtaagatcaagtctaactacccatatggcaatccacactggagaaaagcgttacaaatgtaatgagtgtggcaaggtcttcaggcagagttcaaatcttgcaagtcatcacagaatgcataccggagagaaaccttacaaatgagtgtggtgaggtcattaggtacaattcactcctttcacatcagttaatttcattcttgacagaatccttacaaatgtagtgacagtggccaatccctcatgagttgaagcattaatagatatgagaggccataagcaagagacatcatgtaaacatatgtggcagagggtctatccaggcctcgcaggttactaggcatcaagatttatatctttgatgaaacgaaacaaatgtaatatgcatcctgaggccattacccagtgaccgatggtaagtgaggattcctaggaggaataacagtctctggtttccctgtttgcctttgatattatacactgtagaatactcacaagtccaaatatgctaaaaattatatatttttaactcacatacgaaaaggttgcaggatatttgtaggcagtcagttaccttcaccttatgaaatgtttcactgagttatttgaggttttttggaaagcctactattgcgtttcaatgtgaactttgaaatcttattgtgcatccttacacaccttccatggtgctttcttggaaagatcattgggatggaaggatcattgattgggtgaagatcattgattaggtgaaggattatttctatccaatttgtgaagaaggaggactttgcttttaaaattaagtatcatctgaattagcatttgggagtggcgaaaaacaatgtaaaactatgatgtcactcaccattctgataatgttcagggtgcctttctcctaccaggagagtactgtggcttagaggaaagaaatggtctatcaactgaacatgaaatggagcaggccaagaccttaggacattgggatttttgtgggaggagagtaataggtaattagacactgattgtgtggtagaaatactgcaggggaaaaggtcgccctcttatgcatcaaagagcaatacctgttgtttagcaaagagtgatgaaaaattgatcttgttttgaaattgaagagagaggccaggcgcggtggctcacacctgtaatcccagcactttgggaggctgaggcaggtggatcacctgaggtcgggagttcgagaccagcctgaccaacatggagaaaccccaattgtactaaaaatacaaaattagccgggcgtggtggcaggtgcctgtaatcccagctacttgggaggctgaggcaggagagtgcttgaacccaggaggcggaggttgtggtgagccaagatcatgccactgcactccagcctgggcaacaagaacaaaactccatctaaagaagaaaaagaaaaactgaagagagagtagttgtcagagtgaagagtttaatcaacagaagtagagtaacatattctttagtagaactcacattatctgcttgaagcacattttgctaatgttttattcagaatgtatcatagatataatgttttaactaataaaatagaatggtttttctcta

SEQ ID NO: 201579 - DNA, 4219 bp, Homo sapiens
  Payload ID: 19778
  Gene Name: zinc finger protein 160
  Uniprot ID: Q9HCG1
  ENST ID: ENST00000418871
  CDS Start-End: 300-2756
gcagttgcccacagacccggaagtggatcgtgcggagcaagcatcacaccatggcgtatgagtgttcctctgtgtagactcaacctgcgcctcgccgtcccccattcgcacacccgatgcccgggggtcgctacggacttaaaatctccgcaccgcaccctccacctcagaaacgttcctggatccgaacactgccccctgacgacctagagagatcccggctcccagcccactgagtggcttcagcctcgctggaagaagtctggaagaagaggaagaggaaagaaaaggagtcagggatggcccttactcaggtacggttgacatttagggatgtggccatagaattctctcaggaggagtggaaatgcctggaccctgctcagaggatcttatacagggacgtgatgttggagaactactggaaccttgtttctctgggactgtgtcattttgatatgaatattatctccatgttggaggaagggaaagagccctggactgtgaagagctgtgtgaaaatagcaagaaaaccaagaacgccggaatgtgtcaaaggcgtggtcacagatatccctcctaaatgtacaatcaaggatttgctaccaaaagagaagagcagtacagaagcagtattccacacagtggtgttggaaagacacgaaagccctgacattgaagacttttccttcaaggaaccccagaaaaatgtgcatgattttgagtgtcaatggagagatgacacaggaaattacaagggagtgcttatggcccagaaagaaggtaaaagagatcaacgcgacagaagagacatagaaaacaagcttatgaacaatcagcttggagtaagctttcattctcatctgcctgaactgcagctatttcaaggtgaggggaaaatgtatgaatgtaatcaagttgagaagtctaccaacaatggttcctcagtgtcaccacttcaacaaattccttctagtgtccaaacccacaggtctaaaaaatatcatgaacttaaccatttttcattactcacacaaagacgaaaagcaaacagttgtggaaaaccttataaatgtaatgaatgtggcaaggcgttcactcagaattcgaaccttacaagtcataggagaattcatagtggagagaagccttacaaatgcagtgagtgcggcaaaacctttactgttcgttcaaatctaactattcatcaggtcatccatactggagaaaaaccttacaaatgtcatgagtgtggcaaggtcttcaggcacaattcataccttgcaactcatcggcgaattcatactggagagaaaccttacaagtgtaatgagtgtggaaaagcctttagaggacattcaaacctaactacccatcagttaattcatactggagaaaaaccgttcaaatgtaatgaatgtggcaagctcttcactcaaaattcacaccttataagtcattggagaattcacactggagagaaaccttacaagtgcaatgagtgcggcaaagcctttagtgttcgttcaagcctagcaatccatcagacaatccacactggagaaaaaccttacaaatgtaatgaatgtggcaaagtctttaggtacaattcatacctcggaaggcatcggagagttcatactggtgagaaaccttacaagtgtaatgaatgtggcaaagccttcagtatgcattcaaacctagctacccatcaggtcatccatactggaacaaaacctttcaaatgcaatgaatgcagcaaggttttcactcaaaattcacaacttgcaaatcatcgaagaattcatactggagagaaaccttacaagtgtaatgagtgtgggaaagccttcagtgttcgttcaagtctgactacccatcaggcaatccattctggagagaaaccttacaaatgtattgaatgtggcaagagcttcactcaaaaatcacaccttagaagtcatcggggaattcattctggagagaaaccttacaagtgtaatgaatgtggtaaagtcttcgctcaaacatcacaacttgcaaggcattggagagttcatactggagaaaaaccttacaagtgtaatgactgtggcagagcctttagtgatcgttcaagcctaacttttcatcaggcaatacatactggagagaaaccttacaaatgtcatgaatgcggcaaggtttttaggcacaattcataccttgcaactcatcggcgaattcatactggagagaaaccttacaagtgtaatgagtgtgggaaagcctttagtatgcattcaaacctaactacccataaggtcatccatactggagagaagccttacaaatgtaatcaatgtggcaaggtcttcactcagaactcacaccttgcaaatcatcaaaggactcacaccggagagaaaccttaccgatgcaatgagtgtgggaaagccttcagtgttcgttcaagcctaaccacccatcaggcaatccatactgggaaaaaaccttacaaatgtaatgaatgtggcaaggtctttactcaaaatgctcacctggcaaatcaccgaagaattcatactggggagaaaccttacaggtgtacagagtgtgggaaagcctttagggtaagatcaagtctaactacccatatggcaatccacactggagaaaagcgttacaaatgtaatgagtgtggcaaggtcttcaggcagagttcaaatcttgcaagtcatcacagaatgcataccggagagaaaccttacaaatgagtgtggtgaggtcattaggtacaattcactcctttcacatcagttaatttcattcttgacagaatccttacaaatgtagtgacagtggccaatccctcatgagttgaagcattaatagatatgagaggccataagcaagagacatcatgtaaacatatgtggcagagggtctatccaggcctcgcaggttactaggcatcaagatttatatctttgatgaaacgaaacaaatgtaatatgcatcctgaggccattacccagtgaccgatggtaagtgaggattcctaggaggaataacagtctctggtttccctgtttgcctttgatattatacactgtagaatactcacaagtccaaatatgctaaaaattatatatttttaactcacatacgaaaaggttgcaggatatttgtaggcagtcagttaccttcaccttatgaaatgtttcactgagttatttgaggttttttggaaagcctactattgcgtttcaatgtgaactttgaaatcttattgtgcatccttacacaccttccatggtgctttcttggaaagatcattgggatggaaggatcattgattgggtgaagatcattgattaggtgaaggattatttctatccaatttgtgaagaaggaggactttgcttttaaaattaagtatcatctgaattagcatttgggagtggcgaaaaacaatgtaaaactatgatgtcactcaccattctgataatgttcagggtgcctttctcctaccaggagagtactgtggcttagaggaaagaaatggtctatcaactgaacatgaaatggagcaggccaagaccttaggacattgggatttttgtgggaggagagtaataggtaattagacactgattgtgtggtagaaatactgcaggggaaaaggtcgccctcttatgcatcaaagagcaatacctgttgtttagcaaagagtgatgaaaaattgatcttgttttgaaattgaagagagaggccaggcgcggtggctcacacctgtaatcccagcactttgggaggctgaggcaggtggatcacctgaggtcgggagttcgagaccagcctgaccaacatggagaaaccccaattgtactaaaaatacaaaattagccgggcgtggtggcaggtgcctgtaatcccagctacttgggaggctgaggcaggagagtgcttgaacccaggaggcggaggttgtggtgagccaagatcatgccactgcactccagcctgggcaacaagaacaaaactccatctaaagaagaaaaagaaaaactgaagagagagtagttgtcagagtgaagagtttaatcaacagaagtagagtaacatattctttagtagaactcacattatctgcttgaagcacattttgctaatgttttattcagaatgtatcatagatataatgttttaactaataaaatagaatggtttttctcta

SEQ ID NO: 201580 - DNA, 1926 bp, Homo sapiens
  Payload ID: 19778
  Gene Name: zinc finger protein 160
  ENST ID: ENST00000599247
  CDS Start-End: 259-1926
catcacaccatggcgtatgagtgttcctctgtgtagactcaacctgcgcctcgccgtcccccattcgcacacccgatgcccgggggtcgctacggacttaaaatctccgcaccgcaccctccacctcagaaacgttcctggatccgaacactgccccctgacgacctagagagatcccggctcccagcccactgagtggcttcagcctcgctggaagaagtctggaagaagaggaagaggaaagaaaaggagtcagggatggcccttactcaggtacggttgacatttagggatgtggccatagaattctctcaggaggagtggaaatgcctggaccctgctcagaggatcttatacagggacgtgatgttggagaactactggaaccttgtttctctgggactgtgtcattttgatatgaatattatctccatgttggaggaagggaaagagccctggactgtgaagagctgtgtgaaaatagcaagaaaaccaagaacgccggaatgtgtcaaaggcgtggtcacagatatccctcctaaatgtacaatcaaggatttgctaccaaaagagaagagcagtacagaagcagtattccacacagtggtgttggaaagacacgaaagccctgacattgaagacttttccttcaaggaaccccagaaaaatgtgcatgattttgagtgtcaatggagagatgacacaggaaattacaagggagtgcttatggcccagaaagaaggtaaaagagatcaacgcgacagaagagacatagaaaacaagcttatgaacaatcagcttggagtaagctttcattctcatctgcctgaactgcagctatttcaaggtgaggggaaaatgtatgaatgtaatcaagttgagaagtctaccaacaatggttcctcagtgtcaccacttcaacaaattccttctagtgtccaaacccacaggtctaaaaaatatcatgaacttaaccatttttcattactcacacaaagacgaaaagcaaacagttgtggaaaaccttataaatgtaatgaatgtggcaaggcgttcactcagaattcgaaccttacaagtcataggagaattcatagtggagagaagccttacaaatgcagtgagtgcggcaaaacctttactgttcgttcaaatctaactattcatcaggtcatccatactggagaaaaaccttacaaatgtcatgagtgtggcaaggtcttcaggcacaattcataccttgcaactcatcggcgaattcatactggagagaaaccttacaagtgtaatgagtgtggaaaagcctttagaggacattcaaacctaactacccatcagttaattcatactggagaaaaaccgttcaaatgtaatgaatgtggcaagctcttcactcaaaattcacaccttataagtcattggagaattcacactggagagaaaccttacaagtgcaatgagtgcggcaaagcctttagtgttcgttcaagcctagcaatccatcagacaatccacactggagaaaaaccttacaaatgtaatgaatgtggcaaagtctttaggtacaattcatacctcggaaggcatcggagagttcatactggtgagaaaccttacaagtgtaatgaatgtggcaaagccttcagtatgcattcaaacctagctacccatcaggtcatccatactggaacaaaacctttcaaatgcaatgaatgcagcaaggttttcactcaaaattcacaacttgcaaatcatcgaagaattcatactggagagaaaccttacaagtgtaatgagtgtgggaaagccttcagtgttcgttcaagtctgactacccatcaggcaatccattctggagagaaaccttacaaatgtattgaatgtggcaagagcttcactcaaaaatcacaccttagaagtcatcgg

SEQ ID NO: 201581 - DNA, 668 bp, Homo sapiens
  Payload ID: 19778
  Gene Name: zinc finger protein 160
  ENST ID: ENST00000601982
  CDS Start-End: 316-668
catcttagtggggagccactgttctcaattctgtgggaagggtcagtgcaagtcctgtagaaatgtattttgacatcattatgagatttaaacaaattcctcagtgaatgtttggttgtgatatgttaacctgcaagttttgaacattgacatgttttcgtgttaggaaacaggagctcacttttctacatccttgttggagcatgctgggaatgaagacaggtacggttgacatttagggatgtggccatagaattctctcaggaggagtggaaatgcctggaccctgctcagaggatcttatacagggacgtgatgttggagaactactggaaccttgtttctctgggactgtgtcattttgatatgaatattatctccatgttggaggaagggaaagagccctggactgtgaagagctgtgtgaaaatagcaagaaaaccaagaacgccggaatgtgtcaaaggcgtggtcacagatatccctcctaaatgtacaatcaaggatttgctaccaaaagagaagagcagtacagaagcagtattccacacagtggtgttggaaagacacgaaagccctgacattgaagacttttccttcaaggaaccccagaaaaatgtgcatgattttgagtgtcaatggagagatgacacaggaaattacaaggg

SEQ ID NO: 201582 - DNA, 4688 bp, Homo sapiens
  Payload ID: 19778
  Gene Name: zinc finger protein 160
  ENST ID: ENST00000601421
  CDS Start-End: 878-3226
atttgattccattctgacactgtctatctggatatagggtcagctcccataggctgagggctcaatcccacaacagcgcacacacattaatgccagtcacaaacacaagttgtggcctgtgcttctcaatgaccagctgtgaattgtgaattctgatgaccccctccttgaaattgattagtttgcttgagtggctcacataacacagggaaacacttatatttacccatttattatagaagatgctacaaagcacacagatgaacatctagatggaagtgatctattagttgagatatgggaaaggagtgaggagctgggatgtattctctcatgtattctgtcttttttgagttttcatggaggccccattatggaggccttgcttccattattggcattggtgatcaactgaactttcattccctctgtcctcccgagaggacagaggcttagtctaaccgagcctcagcctttccagtgaccacccaccgagccttagttccggtgaccgccctccatcctgaagctacctaggtgctccagacaccaattatcccattaatgtacaaaaagatacttatcactccactgatttcaagtgagctcttatgtcaggagagggggatgaagaccaaatctgtatgtcacattgtcacaatctggatctgtcagctcacccacttcaatttaacctattctcacatttttctcctcttctccttttatgtgaaattttgaactctccccttagccacttggtgaaatgtgtttttcattttaggtacggttgacatttagggatgtggccatagaattctctcaggaggagtggaaatgcctggaccctgctcagaggatcttatacagggacgtgatgttggagaactactggaaccttgtttctctgggactgtgtcattttgatatgaatattatctccatgttggaggaagggaaagagccctggactgtgaagagctgtgtgaaaatagcaagaaaaccaagaacgccggaatgtgtcaaaggcgtggtcacagatatccctcctaaatgtacaatcaaggatttgctaccaaaagagaagagcagtacagaagcagtattccacacagtggtgttggaaagacacgaaagccctgacattgaagacttttccttcaaggaaccccagaaaaatgtgcatgattttgagtgtcaatggagagatgacacaggaaattacaagggagtgcttatggcccagaaagaaggtaaaagagatcaacgcgacagaagagacatagaaaacaagcttatgaacaatcagcttggagtaagctttcattctcatctgcctgaactgcagctatttcaaggtgaggggaaaatgtatgaatgtaatcaagttgagaagtctaccaacaatggttcctcagtgtcaccacttcaacaaattccttctagtgtccaaacccacaggtctaaaaaatatcatgaacttaaccatttttcattactcacacaaagacgaaaagcaaacagttgtggaaaaccttataaatgtaatgaatgtggcaaggcgttcactcagaattcgaaccttacaagtcataggagaattcatagtggagagaagccttacaaatgcagtgagtgcggcaaaacctttactgttcgttcaaatctaactattcatcaggtcatccatactggagaaaaaccttacaaatgtcatgagtgtggcaaggtcttcaggcacaattcataccttgcaactcatcggcgaattcatactggagagaaaccttacaagtgtaatgagtgtggaaaagcctttagaggacattcaaacctaactacccatcagttaattcatactggagaaaaaccgttcaaatgtaatgaatgtggcaagctcttcactcaaaattcacaccttataagtcattggagaattcacactggagagaaaccttacaagtgcaatgagtgcggcaaagcctttagtgttcgttcaagcctagcaatccatcagacaatccacactggagaaaaaccttacaaatgtaatgaatgtggcaaagtctttaggtacaattcatacctcggaaggcatcggagagttcatactggtgagaaaccttacaagtgtaatgaatgtggcaaagccttcagtatgcattcaaacctagctacccatcaggtcatccatactggaacaaaacctttcaaatgcaatgaatgcagcaaggttttcactcaaaattcacaacttgcaaatcatcgaagaattcatactggagagaaaccttacaagtgtaatgagtgtgggaaagccttcagtgttcgttcaagtctgactacccatcaggcaatccattctggagagaaaccttacaaatgtattgaatgtggcaagagcttcactcaaaaatcacaccttagaagtcatcggggaattcattctggagagaaaccttacaagtgtaatgaatgtggtaaagtcttcgctcaaacatcacaacttgcaaggcattggagagttcatactggagaaaaaccttacaagtgtaatgactgtggcagagcctttagtgatcgttcaagcctaacttttcatcaggcaatacatactggagagaaaccttacaaatgtcatgaatgcggcaaggtttttaggcacaattcataccttgcaactcatcggcgaattcatactggagagaaaccttacaagtgtaatgagtgtgggaaagcctttagtatgcattcaaacctaactacccataaggtcatccatactggagagaagccttacaaatgtaatcaatgtggcaaggtcttcactcagaactcacaccttgcaaatcatcaaaggactcacaccggagagaaaccttaccgatgcaatgagtgtgggaaagccttcagtgttcgttcaagcctaaccacccatcaggcaatccatactgggaaaaaaccttacaaatgtaatgaatgtggcaaggtctttactcaaaatgctcacctggcaaatcaccgaagaattcatactggggagaaaccttacaggtgtacagagtgtgggaaagcctttagggtaagatcaagtctaactacccatatggcaatccacactggagaaaagcgttacaaatgtaatgagtgtggcaaggtcttcaggcagagttcaaatcttgcaagtcatcacagaatgcataccggagagaaaccttacaaatgagtgtggtgaggtcattaggtacaattcactcctttcacatcagttaatttcattcttgacagaatccttacaaatgtagtgacagtggccaatccctcatgagttgaagcattaatagatatgagaggccataagcaagagacatcatgtaaacatatgtggcagagggtctatccaggcctcgcaggttactaggcatcaagatttatatctttgatgaaacgaaacaaatgtaatatgcatcctgaggccattacccagtgaccgatggtaagtgaggattcctaggaggaataacagtctctggtttccctgtttgcctttgatattatacactgtagaatactcacaagtccaaatatgctaaaaattatatatttttaactcacatacgaaaaggttgcaggatatttgtaggcagtcagttaccttcaccttatgaaatgtttcactgagttatttgaggttttttggaaagcctactattgcgtttcaatgtgaactttgaaatcttattgtgcatccttacacaccttccatggtgctttcttggaaagatcattgggatggaaggatcattgattgggtgaagatcattgattaggtgaaggattatttctatccaatttgtgaagaaggaggactttgcttttaaaattaagtatcatctgaattagcatttgggagtggcgaaaaacaatgtaaaactatgatgtcactcaccattctgataatgttcagggtgcctttctcctaccaggagagtactgtggcttagaggaaagaaatggtctatcaactgaacatgaaatggagcaggccaagaccttaggacattgggatttttgtgggaggagagtaataggtaattagacactgattgtgtggtagaaatactgcaggggaaaaggtcgccctcttatgcatcaaagagcaatacctgttgtttagcaaagagtgatgaaaaattgatcttgttttgaaattgaagagagaggccaggcgcggtggctcacacctgtaatcccagcactttgggaggctgaggcaggtggatcacctgaggtcgggagttcgagaccagcctgaccaacatggagaaaccccaattgtactaaaaatacaaaattagccgggcgtggtggcaggtgcctgtaatcccagctacttgggaggctgaggcaggagagtgcttgaacccaggaggcggaggttgtggtgagccaagatcatgccactgcactccagcctgggcaacaagaacaaaactccatctaaagaagaaaaagaaaaactgaagagagagtagttgtcagagtgaagagtttaatcaacagaagtagagtaacatattctttagtagaactcacattatctgcttgaagcacattttgctaatgttttattcagaatgtatcatagatataatgttttaactaataaaatagaatggtttttctct

SEQ ID NO: 201583 - DNA, 4229 bp, Homo sapiens
  Payload ID: 19778
  Gene Name: zinc finger protein 160
  Uniprot ID: Q9HCG1
  ENST ID: ENST00000599056
  CDS Start-End: 302-2758
cctgcgcctcgccgtcccccattcgcacacccgatgcccgggggtcgctacggacttaaaatctccgcaccgcaccctccacctcagaaacgttcctggatccgaacactgccccctgacgacctagagagatcccggctcccagcccactgagtggcttcagcctcgctggcgcctgccccgggccccgcctacaggggacccagctcttcttgcagccactggaagctgatcacctggagtgaagacctcacacgaagaagtctggaagaagaggaagaggaaagaaaaggagtcagggatggcccttactcaggtacggttgacatttagggatgtggccatagaattctctcaggaggagtggaaatgcctggaccctgctcagaggatcttatacagggacgtgatgttggagaactactggaaccttgtttctctgggactgtgtcattttgatatgaatattatctccatgttggaggaagggaaagagccctggactgtgaagagctgtgtgaaaatagcaagaaaaccaagaacgccggaatgtgtcaaaggcgtggtcacagatatccctcctaaatgtacaatcaaggatttgctaccaaaagagaagagcagtacagaagcagtattccacacagtggtgttggaaagacacgaaagccctgacattgaagacttttccttcaaggaaccccagaaaaatgtgcatgattttgagtgtcaatggagagatgacacaggaaattacaagggagtgcttatggcccagaaagaaggtaaaagagatcaacgcgacagaagagacatagaaaacaagcttatgaacaatcagcttggagtaagctttcattctcatctgcctgaactgcagctatttcaaggtgaggggaaaatgtatgaatgtaatcaagttgagaagtctaccaacaatggttcctcagtgtcaccacttcaacaaattccttctagtgtccaaacccacaggtctaaaaaatatcatgaacttaaccatttttcattactcacacaaagacgaaaagcaaacagttgtggaaaaccttataaatgtaatgaatgtggcaaggcgttcactcagaattcgaaccttacaagtcataggagaattcatagtggagagaagccttacaaatgcagtgagtgcggcaaaacctttactgttcgttcaaatctaactattcatcaggtcatccatactggagaaaaaccttacaaatgtcatgagtgtggcaaggtcttcaggcacaattcataccttgcaactcatcggcgaattcatactggagagaaaccttacaagtgtaatgagtgtggaaaagcctttagaggacattcaaacctaactacccatcagttaattcatactggagaaaaaccgttcaaatgtaatgaatgtggcaagctcttcactcaaaattcacaccttataagtcattggagaattcacactggagagaaaccttacaagtgcaatgagtgcggcaaagcctttagtgttcgttcaagcctagcaatccatcagacaatccacactggagaaaaaccttacaaatgtaatgaatgtggcaaagtctttaggtacaattcatacctcggaaggcatcggagagttcatactggtgagaaaccttacaagtgtaatgaatgtggcaaagccttcagtatgcattcaaacctagctacccatcaggtcatccatactggaacaaaacctttcaaatgcaatgaatgcagcaaggttttcactcaaaattcacaacttgcaaatcatcgaagaattcatactggagagaaaccttacaagtgtaatgagtgtgggaaagccttcagtgttcgttcaagtctgactacccatcaggcaatccattctggagagaaaccttacaaatgtattgaatgtggcaagagcttcactcaaaaatcacaccttagaagtcatcggggaattcattctggagagaaaccttacaagtgtaatgaatgtggtaaagtcttcgctcaaacatcacaacttgcaaggcattggagagttcatactggagaaaaaccttacaagtgtaatgactgtggcagagcctttagtgatcgttcaagcctaacttttcatcaggcaatacatactggagagaaaccttacaaatgtcatgaatgcggcaaggtttttaggcacaattcataccttgcaactcatcggcgaattcatactggagagaaaccttacaagtgtaatgagtgtgggaaagcctttagtatgcattcaaacctaactacccataaggtcatccatactggagagaagccttacaaatgtaatcaatgtggcaaggtcttcactcagaactcacaccttgcaaatcatcaaaggactcacaccggagagaaaccttaccgatgcaatgagtgtgggaaagccttcagtgttcgttcaagcctaaccacccatcaggcaatccatactgggaaaaaaccttacaaatgtaatgaatgtggcaaggtctttactcaaaatgctcacctggcaaatcaccgaagaattcatactggggagaaaccttacaggtgtacagagtgtgggaaagcctttagggtaagatcaagtctaactacccatatggcaatccacactggagaaaagcgttacaaatgtaatgagtgtggcaaggtcttcaggcagagttcaaatcttgcaagtcatcacagaatgcataccggagagaaaccttacaaatgagtgtggtgaggtcattaggtacaattcactcctttcacatcagttaatttcattcttgacagaatccttacaaatgtagtgacagtggccaatccctcatgagttgaagcattaatagatatgagaggccataagcaagagacatcatgtaaacatatgtggcagagggtctatccaggcctcgcaggttactaggcatcaagatttatatctttgatgaaacgaaacaaatgtaatatgcatcctgaggccattacccagtgaccgatggtaagtgaggattcctaggaggaataacagtctctggtttccctgtttgcctttgatattatacactgtagaatactcacaagtccaaatatgctaaaaattatatatttttaactcacatacgaaaaggttgcaggatatttgtaggcagtcagttaccttcaccttatgaaatgtttcactgagttatttgaggttttttggaaagcctactattgcgtttcaatgtgaactttgaaatcttattgtgcatccttacacaccttccatggtgctttcttggaaagatcattgggatggaaggatcattgattgggtgaagatcattgattaggtgaaggattatttctatccaatttgtgaagaaggaggactttgcttttaaaattaagtatcatctgaattagcatttgggagtggcgaaaaacaatgtaaaactatgatgtcactcaccattctgataatgttcagggtgcctttctcctaccaggagagtactgtggcttagaggaaagaaatggtctatcaactgaacatgaaatggagcaggccaagaccttaggacattgggatttttgtgggaggagagtaataggtaattagacactgattgtgtggtagaaatactgcaggggaaaaggtcgccctcttatgcatcaaagagcaatacctgttgtttagcaaagagtgatgaaaaattgatcttgttttgaaattgaagagagaggccaggcgcggtggctcacacctgtaatcccagcactttgggaggctgaggcaggtggatcacctgaggtcgggagttcgagaccagcctgaccaacatggagaaaccccaattgtactaaaaatacaaaattagccgggcgtggtggcaggtgcctgtaatcccagctacttgggaggctgaggcaggagagtgcttgaacccaggaggcggaggttgtggtgagccaagatcatgccactgcactccagcctgggcaacaagaacaaaactccatctaaagaagaaaaagaaaaactgaagagagagtagttgtcagagtgaagagtttaatcaacagaagtagagtaacatattctttagtagaactcacattatctgcttgaagcacattttgctaatgttttattcagaatgtatcatagatataatgttttaactaataaaatagaatggtttttctctatgaatgaa

SEQ ID NO: 201584 - DNA, 565 bp, Homo sapiens
  Payload ID: 19778
  Gene Name: zinc finger protein 160
  ENST ID: ENST00000599637
  CDS Start-End: 526-565
gcgcagttgcccacagacccggaagtggatcgtgcggagcaagcatcacaccatggcgtatgagtgttcctctgtgtagactcaacctgcgcctcgccgtcccccattcgcacacccgatgcccgggggtcgctacggacttaaaatctccgcaccgcaccctccacctcagaaacgttcctggatccgaacactgccccctgacgacctagagagatcccggctcccagcccactgagtggcttcagcctcgctggtaggtctctcctccaaagctctggaaacagactcctgggagtgagagggaggggagcgcaggcaccgccccctttccccaagtcccccgcccacttcatccctcaggcacctcccaactcctggcctctctgcacgaggcgcctgccccgggccccgcctacaggggacccagctcttcttgcagccactggaagctgatcacctggagtgaagacctcacacgaagaagtctggaagaagaggaagaggaaagaaaaggagtcagggatggcccttactcaggtacggttgacatttagggatgtgg

SEQ ID NO: 201585 - DNA, 2107 bp, Homo sapiens
  Payload ID: 19779
  Gene Name: zinc finger protein 165
  Uniprot ID: P49910
  ENST ID: ENST00000377325
  CDS Start-End: 557-2014
gtccgggtttggggatccagatgtccagccccgtgtccccctccaaacatccagtccctctcatattgcctttgaaattagcagcctctgggtgaccagaccttggccctcagaggaatcccggagaaaggtagaaccagcttcggcgttgggaacgcaggcgcgcttacgcatttagtgagggtttggcggtctccatagttaccgccgccgcgcgtgacgtcatagtggagcgctgagggcttggtggcgtggggtgggggctgtcctactgatcctgaatttggggtcactggtaagaggagttgcccattccagccaggtggaacggggaggggtgccacatgtctcagatctgccattgtctgcgaaaagaaactgctgcgaggaccatccccaatcccctgcttcccttgggaagagtaaccgccgttttgtaggacacttggggacaaccccgcttgtcctgaaatttattgacacggtaaatagtatttcctgtgtgccgaggatgcagttaaaccaacactgaccccctgcccttgagaaacacaagatggctacagaaccaaagaaagctgcagcccagaactctccagaggatgaaggacttctgatagtgaagatagaagaggaagaatttatccatgggcaggacacttgcttacagagaagtgaactccttaagcaggagctctgcaggcagctttttaggcagttctgctaccaggattctcctggacctcgcgaggcactgagccgcctccgggagctctgctgtcagtggctgaagccagagatccataccaaggaacagattctggaactgctggtgctagagcagttcctgaccatcctgccaggagatttgcaggcctgggtacatgaacattacccagagagtggagaggaggcagtgaccatactagaagatttggagagaggcactgatgaagcagtactccaggttcaagcccatgaacatggacaagaaatattccagaaaaaagtgtcacctcctggaccagcacttaatgtcaagttacagccagtggagaccaaggcccattttgattcatcagaaccccagctcctatgggactgtgataatgagagtgaaaacagtagatccatgccaaagctggaaatttttgaaaaaattgaatcacagagaattatatctggaagaatctcaggatacatatcagaagcatctggtgagtctcaagacatctgtaagtctgcaggcagggtaaagagacaatgggaaaaagaatcaggggagtctcagagactctcgtctgcccaggatgaaggttttggtaaaatcctcacccacaaaaatacagtcagaggtgaaataataagccacgatggatgtgagaggagattaaatctgaactcaaatgaattcacacaccagaaatcttgtaaacatggtacctgtgaccagagcttcaaatggaactcagattttattaaccatcaaataatttatgctggagaaaaaaatcaccaatatggaaaatctttcaagagcccaaaacttgctaaacatgcagcagttttcagtggagataaaactcatcagtgtaatgaatgtgggaaagctttcaggcacagctcaaaacttgctaggcatcagagaatccacactggagagagatgctatgaatgtaatgaatgtgggaaaagctttgcagagagctcagatcttactagacatcggcgaattcacactggggaaagaccctttggttgcaaagaatgtgggagagcattcaacctgaactcacatcttatcaggcatcagagaattcacaccagagagaaaccctacgagtgtagtgaatgtgggaaaaccttccgagtgagctcacatcttattcgacactttagaattcacactggagaaaaaccctatgaatgcagtgagtgtggaagagccttcagtcagagctcaaaccttagtcaacaccagagaattcacatgagggaaaacctattaatgtaaggaacttaaatttgtaagtaaatgctgaggaaatggcacaatatgaaaaatattaaataaaaaataaatattgggcaagatggaagactgaaa

SEQ ID NO: 201586 - DNA, 2336 bp, Homo sapiens
  Payload ID: 19780
  Gene Name: zinc finger protein 169
  ENST ID: ENST00000340911
  CDS Start-End: 74-451
atcgtcgcctggtgcgtgatttgcctctgcaacttgactctcctctaggaagagtactccagagagcagggatatgtcaccaggactcctgacaaccaggaaggaggcattgatggccttccgggatgtggctgtggccttcacccagaaggagtggaagctattgagttctgctcagaggaccctgtacagggaggtgatgctggagaactacagccatctggtctccctgggaattgcattttccaaaccaaaactcatcgaacagctggagcaaggcgacgaaccttggagagaggagaacgaacatcttctggacctttgtccagctcagacaccaagttcttggctcttgcataaacagcaggccgaacaaatgtttctcaggcaaggtttaataggcttgagctggagcaaaagcaagggagcggcgcccaagaaaggaagataaatgtgtaactctacttgcagcaatttatagagctgaagctgcctgtgatgcttttttgaaccttttagtttggctgataggactagtttgtagtgtgggttttctgtgctgcaatagagcatgtaatgtgcccttgtgggttggaagataagtctttgttgtgaacatctgaagaaaactgctgggcaggtattacaatccatggtcacctgtggtgattctgaccaagactttctctctagcagagcctagaacagaattccagccaagttttccccacctggtggccttttctagctcgcagctcctcagacaatatgcgctaagtggccatcccacacagatcttcccaagctcatctgcaggaggtgacttccaactagaagctccaagatgctctagtgaaaaaggagaaagtggagagacagaaggccccgacagctcattaagaaagaggccaagcagaatttctaggacattcttcagcccacatcaaggtgacccagtagaatgggtagaagggaacagagaaggaggaacagaccttcgcctggcccaaaggatgagtcttggggggtcagacacaatgttgaagggagcagacacttcagaatctggagcagtcatacgtggaaactatagactgggacttagcaaaaagtcaagcctgttcagccaccagaagcatcatgtgtgccctgaatgcgggagaggcttttgccagagatcagaccttatcaagcaccagaggacacacaccggggagaagccatacctgtgtcctgagtgtgggcgtcggtttagccagaaggcctccctctccatacaccagaggaagcactcgggggagaagccgtatgtgtgcagggaatgtgggcgacacttcaggtatacatcctctctcactaatcacaagaggattcactccggggagaggccctttgtatgtcaggagtgtgggcgaggctttcgccagaagatagccctccttctacaccagaggacgcacttggaggagaagcccttcgtgtgtcctgagtgtgggagaggcttttgccagaaggcatcactcctccagcaccagagctcacacacaggggagaggcccttcctgtgccttgagtgtgggcgtagcttcaggcagcagtcactcctccttagtcaccaggtcacacactcaggagagaagccttatgtctgtgctgagtgtgggcacagctttcgccaaaaggtcactctcatcaggcaccagaggacacacacaggggagaagccttacctgtgcccccagtgtgggcggggttttagccagaaggtcaccctcattggacaccagaggacacacacaggggagaagccctacctgtgccctgattgtgggcgtggctttggtcagaaggtcaccctcatcagacaccagaggacacacacaggggagaagccttatctgtgccccaagtgtgggcgtgcatttggctttaagtcgctcctcacccgacaccagaggacacactcagaggaggagctttacgtagacagggtgtgtggacaaggacttggccagaagtcacaccttatctctgaccaaaggacacactcaggagagaagccctgcatttgcgatgaatgtgggcgcggctttggctttaagtctgccctcatccgacatcagcggacccattctggggagaagccgtatgtctgcagggagtgtgggcgtggctttagccagaagtctcacttgcatagacacaggaggaccaagtctggtcatcagctcctaccccaagaggtcttctgacctttcctttccccgtgagtgtgaagctggcagaaatcactagtaaatgcttcagtttcctgaaatggaatggaaaaaaaaaaa

SEQ ID NO: 201587 - DNA, 1986 bp, Homo sapiens
  Payload ID: 19780
  Gene Name: zinc finger protein 169
  Uniprot ID: Q14929
  ENST ID: ENST00000395395
  CDS Start-End: 91-1902
tacttccgcgttccggcatcgtcgcctggtgcgtgatttgcctctgcaacttgactctcctctaggaagagtactccagagagcagggatatgtcaccaggactcctgacaaccaggaaggaggcattgatggccttccgggatgtggctgtggccttcacccagaaggagtggaagctattgagttctgctcagaggaccctgtacagggaggtgatgctggagaactacagccatctggtctccctgggaattgcattttccaaaccaaaactcatcgaacagctggagcaaggcgacgaaccttggagagaggagaacgaacatcttctggacctttgtccagagcctagaacagaattccagccaagttttccccacctggtggccttttctagctcgcagctcctcagacaatatgcgctaagtggccatcccacacagatcttcccaagctcatctgcaggaggtgacttccaactagaagctccaagatgctctagtgaaaaaggagaaagtggagagacagaaggccccgacagctcattaagaaagaggccaagcagaatttctaggacattcttcagcccacatcaaggtgacccagtagaatgggtagaagggaacagagaaggaggaacagaccttcgcctggcccaaaggatgagtcttggggggtcagacacaatgttgaagggagcagacacttcagaatctggagcagtcatacgtggaaactatagactgggacttagcaaaaagtcaagcctgttcagccaccagaagcatcatgtgtgccctgaatgcgggagaggcttttgccagagatcagaccttatcaagcaccagaggacacacaccggggagaagccatacctgtgtcctgagtgtgggcgtcggtttagccagaaggcctccctctccatacaccagaggaagcactcgggggagaagccgtatgtgtgcagggaatgtgggcgacacttcaggtatacatcctctctcactaatcacaagaggattcactccggggagaggccctttgtatgtcaggagtgtgggcgaggctttcgccagaagatagccctccttctacaccagaggacgcacttggaggagaagcccttcgtgtgtcctgagtgtgggagaggcttttgccagaaggcatcactcctccagcaccagagctcacacacaggggagaggcccttcctgtgccttgagtgtgggcgtagcttcaggcagcagtcactcctccttagtcaccaggtcacacactcaggagagaagccttatgtctgtgctgagtgtgggcacagctttcgccaaaaggtcactctcatcaggcaccagaggacacacacaggggagaagccttacctgtgcccccagtgtgggcggggttttagccagaaggtcaccctcattggacaccagaggacacacacaggggagaagccctacctgtgccctgattgtgggcgtggctttggtcagaaggtcaccctcatcagacaccagaggacacacacaggggagaagccttatctgtgccccaagtgtgggcgtgcatttggctttaagtcgctcctcacccgacaccagaggacacactcagaggaggagctttacgtagacagggtgtgtggacaaggacttggccagaagtcacaccttatctctgaccaaaggacacactcaggagagaagccctgcatttgcgatgaatgtgggcgcggctttggctttaagtctgccctcatccgacatcagcggacccattctggggagaagccgtatgtctgcagggagtgtgggcgtggctttagccagaagtctcacttgcatagacacaggaggaccaagtctggtcatcagctcctaccccaagaggtcttctgacctttcctttccccgtgagtgtgaagctggcagaaatcactagtaaatgcttcagtttcctgaaatggaatggaaaaaaaaaaa

SEQ ID NO: 201588 - DNA, 1696 bp, Homo sapiens
  Payload ID: 19780
  Gene Name: zinc finger protein 169
  ENST ID: ENST00000481550
  CDS Start-End: 56-436
atttgcctctgcaacttgactctcctctaggaagagtactccagagagcagggatatgtcaccaggactcctgacaaccaggaaggaggcattgatggccttccgggatgtggctgtggccttcacccagaaggagtggaagctattgagttctgctcagaggaccctgtacagggaggtgatgctggagaactacagccatctggtctccctgggaattgcattttccaaaccaaaactcatcgaacagctggagcaaggcgacgaaccttggagagaggagaacgaacatcttctggacctttgtccaggtgagtgggaagccctgggcaagcgagggtgcagggcagtgaggagctcagcaggtaaggaaggaggggctatctttgaggtgctaggaggaagttcttcttcaggcctcctaggccactggtaaaggctgcatggcactgcctgccttccacactgtgtgcctccccccaggacagggcacccctggcattccatctccttcctccatcagggagcctcactcctcacttggcttcctttctcgagcacattcaggatttctccattcttgggctcatgtggttggcatgatcttcaaaacagtacctgtcctttgagactaagtccctgcccctggttttttatttttatttttattttttttgagacagagtctcgttctgtcacccaggctggagtgcaatggcatgatctcggctcactgcaacctctgcctcctgtgttcaagtgatttctcctgcctcaccctcctgagtagctgggactacaggtgcccgccatcatgcccagctaaatttttttgtatttttagtagagatggggtttcaccttattggtcaggctggtcttgaattcctgagctcaggcaatccatctgcctttgcttcccaaagtgttgggattacaggcgtgagccaccacgcccagccagtttctattcttaacctggtagcttttttgtgcatcatttctatcctgtaaattctcataactttgtttcttttatcatagattatttaagattacagcaaggtgtgaaaaactgtacaatgagtagggttggggcagccctgtaccctaagagatagcatgttataaaaccaggtaatagccccatacttttcctgattgtgtcccgttcctccgcctctgttttctgagttagcattccatgactgtctttatccttttattccatctgatgggttcttcactcatatagggtgttgttttgcatgtctgtaaacttctctgcacataatgttattaagttgtttccaactttttggctatgaaataatcttgctctgtattcttgtatgcctccttgggaacatgtccaagagtttctcttaaaatatataccggccaggtgcagtggctcacacctgtaatcccagcactctgggaggccgaggcaggtggatcacgaggtcaggaattcgagaccattctggccaacatggtgaaaccccgtctctactaaaaatagaaaaattagctgggtgtggtggcgcatgcctataatcttagctacttgggaggctgaggcaggagaattgcttgaatccgggaggcggacgttgcagtgaactgagattgcgccactgcactccagcctaggtgacagagcgagtctccatctcacaaagaaaaaaaaaaa

SEQ ID NO: 201589 - DNA, 2716 bp, Homo sapiens
  Payload ID: 19780
  Gene Name: zinc finger protein 169
  ENST ID: ENST00000480716
  CDS Start-End: 56-391
atttgcctctgcaacttgactctcctctaggaagagtactccagagagcagggatatgtcaccaggactcctgacaaccaggaaggaggcattgatggccttccgggatgtggctgtggccttcacccagaaggagtggaagctattgagttctgctcagaggaccctgtacagggaggtgatgctggagaactacagccatctggtctccctgggaattgcattttccaaaccaaaactcatcgaacagctggagcaaggcgacgaaccttggagagaggagaacgaacatcttctggacctttgtccagagtctcgttctgtcacccaggctggagtgcaatggcatgatctcggctcactgcaacctctgcctcctgtgttcaagtgatttctcctgcctcaccctcctgagtagctgggactacaggtgcccgccatcatgcccagctaaatttttttgtatttttagtagagatggggtttcaccttattggtcaggctggtcttgaattcctgagctcaggcaatccatctgcctttgcttcccaaagtgttgggattacaggcgtgagccaccacgcccagccagtttctattcttaacctggtagcttttttgtgcatcatttctatcctgtaaattctcataactttgtttcttttatcatagattatttaagattacagcaaggtgtgaaaaactgtacaatgagtagggttggggcagccctgtaccctaagagatagcatgttataaaaccaggtaatagccccatacttttcctgattgtgtcccgttcctccgcctctgttttctgagttagcattccatgactgtctttatccttttattccatctgatgggttcttcactcatatagggtgttgttttgcatgtctgtaaacttctctgcacataatgttattaagttgtttccaactttttggctatgaaataatcttgctctgtattcttgtatgcctccttgggaacatgtccaagagtttctcttaaaatatataccggccaggtgcagtggctcacacctgtaatcccagcactctgggaggccgaggcaggtggatcacgaggtcaggaattcgagaccattctggccaacatggtgaaaccccgtctctactaaaaatagaaaaattagctgggtgtggtggcgcatgcctataatcttagctacttgggaggctgaggcaggagaattgcttgaatccgggaggcggacgttgcagtgaactgagattgcgccactgcactccagcctaggtgacagagcgagtctccatctcacaaagaaaaaaaaaaagatatatacttaggtgtgtagtagctggttcacaggcatgcatagcctcaacttatataagttatgccaacttgtgttctgaagtgggcatggcagcttatgctcccagcaggagtctatgagaattcttgttgtacatcctcaccaacatttgggattgtgagacctcatgttttatccatctattcagctggaagtgaaatctcagaggggtttttaagttgcttactagtgagcatgagcatcttttcatatgttgcttggcccttcctgtttccccatctgtgatttgaccattcaaggtgtttgcctacttttcaatgggtctattctttttgttattgatttgtagaaatcccatataaattatggaaacatttaggtctttaactggaattaattttatatgaatgctgggagatagaaataaatttttgcctgctttatcttcttacttgtttattttcatggtttcctggcattttatttttgttttattttttgcttttaaatgtaactatatagctggtattacactatgtagcaactgagtgcttttgtctttttaaaagcatttcgttatataaaaatggggtgggcacagtggctcacgcctgtaatcccagactttgagaggctgaggtgggtggatcacttgaggccaggagtttgagaccagcctggccaacatggcaaaatcccgtctctactaaaaatacacaaattagccgagcctggtggtgcatgcctgaaataccagctactcggatggctgaggagtgagaatcgcttgaacctgggaggcgaaggttgcaatgaactgagatcacaccactgtactccagcctgggctacagagtgagactctgtctcaaaaaaaaataaagtaaaataatgataaaaatgttattaagatacagcaattaaggtatattataagatatgttttttaaggtataataaactacacttatataggtgtgaaatttggttagttttggcatatgtatacatgcatgaaagcactgccacagctaaagtaacaagcatgtctgtcatccttgaaaattttctttcgccttactgtaatcctacctcccactccttcctgtcctcccctgtacctgggcaaccactgatcagctttctataattatagatttgtctgcattttctagaatttgtataactggattatacaggatacaactggattcttcactcagcataagtattttgaattttatctataatgtgtgtatcaatagtttattaatttttattgctgagtattcctttatatgtctaggtcacattttaatactgacctattaaaaggtatttgggttttcatttttgacaaatataaataaagctgttttaagcatgcaa

SEQ ID NO: 201590 - DNA, 2716 bp, Homo sapiens
  Payload ID: 19781
  Gene Name: zinc finger protein 17
  Uniprot ID: P17021
  ENST ID: ENST00000307658
  CDS Start-End: 264-2258
acgcctcctggggttgtcaatatggctgcgttgggatctgttcaccttcaggctgagtcgagactgaggtgaaaaagcggaaaaacgcgagaaaaggtttccccgttgtacagaggctagagtgaggctcggttgaatcggttgcaggcgttggtgcctctgtcagcgtccaggtcactgccgctcccgccccgctcttccctggctgtgctggcggaggctgcgccgatgaacctgactgagggttcatagcagtggcagcaatgcttatggatgctggacaggattatatggtttttgaggacgtggccatacatttctcccaggaggagtggggaattcttaatgacgttcagagacacctgcacagcgatgtgatgctggagaactttgcacttttgtcctcagtaggttgttggcatggagccaaggatgaggaggcaccttccaagcaatgtgtttctgtaggagtgtcacaggtcacaactttaaagccagctttgtccacccagaaggcccagccctgtgagacatgtagctcacttctgaaggacattctacacctggctgagcatgacggaacacaccccaagcgtacagccaagctttacctgcaccaaaaggagcatcttagagagaagctcaccagaagtgatgaagggaggccttcgtttgtgaatgacagtgttcacctggcaaagaggaacctcacatgcatgcagggtggcaaggattttactggtgattcagatcttcaacaacaggctcttcacagtgggtggaagccacacagggacactcatggtgtggaggcctttcaaagtggacagaataattacagctgcacccaatgtgggaaagacttttgccaccaacatacactgtttgagcaccagaaaatccacacagaggaaaggccttatgagtgcagtgaatgtggcaaattgtttaggtacaactccgaccttattaaacatcagcgaaatcatactggagaaaggccttataagtgtagtgaatgtggaaaagccttcagcctcaaatacaatgttgttcaacaccagaaaattcacactggagaaaggccttatgagtgcagtgaatgtgggaaagcttttcttagaaagtctcacctacttcagcaccagaggattcacaccaggccaaggccttatgtgtgtagtgaatgtgggaaggccttccttacacaggctcaccttgttggtcaccagaaaattcatactggagaacggccttatggatgcaatgaatgtgggaaatactttatgtacagttcagcactcattagacatcagaaagttcacactggagaaaggcctttttattgctgtgaatgtgggaaattctttatggacagctgcacactcattattcaccagagagttcatactggagaaaaaccttatgaatgcaacgaatgtgggaaattctttagataccgttccacactcattagacatcagaaagttcacactggagaaaagccttatgagtgtagtgaatgtgggaagttctttatggacacttccacactcattattcatcagagagttcatactggagaaaagccttatgaatgcaacaaatgtgggaaattctttaggtattgcttcacactgaatagacatcagagagttcactctggagagaggccttatgaatgcagtgaatgtggcaaattctttgtggacagctgtacactgaagagtcatcagagagttcacactggagaaagaccttttgaatgcagcatttgtgggaaatcctttagatgtcgctccacacttgatacacatcagagaattcacactggtgaaaggccttatgagtgtagtgaatgtgggaaattctttaggcacaactcaaatcatattagacatcggagaaatcactttggagaaaggtcttttgagtgcactgagtgtgggagagtttttagccaaaattcccacctcattcggcaccaaaaagttcacactagggaaagaacttacaaatgcagcaaatgtgggaaattttttatggacagctccacactcattagtcatgagagagttcatactggagaaaagccttatgagtgcagtgaatgtgggaaagtctttagatacaactccagcctcattaaacatcggagaattcacactggagagagaccttatcagtgcagtgaatgtggaagagtctttaaccaaaattctcatctcattcagcaccagaaagttcacaccagataaagaatgtatatataaagcagatggggaaagacttcacacagaaatctactctgatttagcactgggacctacgttttaaaaaaagtattcttgtagaatacagataacataaaatctaacatcttaaccatgttaaagtgtatagttcagtactgttaagtcattcacattgtgcaatgaatatctagaagtcttttcaacttatgaaactaagtctataccttttaaaaccttattcctcactccatccagcctcttgacaagcaccgctctgtatgaattttactagtccgggtacctcatataagaaaacttaagttttggtcttcttgtggtttattttgtggcttattttgcttaacgttatatttttaaggtttcatgttctaatccattagaatttccatcctttttaaaggctgaataaaattctgttagtcatgtgttgcttaacagtg

SEQ ID NO: 201591 - DNA, 630 bp, Homo sapiens
  Payload ID: 19781
  Gene Name: zinc finger protein 17
  ENST ID: ENST00000595162
  CDS Start-End: 219-374
gggttgtcaatatggctgcgttgggatctgttcaccttcaggctgagtcgagactgaggtgaaaaagcggaaaaacgcgagaaaaggtttccccgttgtacagaggctagagtgaggctcggttgaatcggttgcaggcgttggtgcctctgtcagcgtccaggtcactgccgctcccgccccgctcttccctggctgtgctggcggaggctgcgccgatgaacctgactgaggtgggtgccgcgtcccagggcgccccgcccgatccctcctccgagtgccgaagccccgaggaggggccctgcaggtcaggcccctgtgtcccaaagagaggagcgttcttgtgtggggtaccggtgtccgcggtgctgtgaggcgggggagctcctgtcagggacctgcacgtgcgaggcttagaggtgctgcagagcgggcggcactggggagcccgagcgtctttgtctccacggagctgaggggttcatagcagtggcagcaatgcttatggatgctggacaggttgttggcatggagccaaggatgaggaggcaccttccaagcaatgtgtttctgtaggagtgtcacaggtcacaactttaaagccagctttgtccacccagaaggcccagc

SEQ ID NO: 201592 - DNA, 2524 bp, Homo sapiens
  Payload ID: 19781
  Gene Name: zinc finger protein 17
  Uniprot ID: P17021
  ENST ID: ENST00000601808
  CDS Start-End: 214-2202
gtcaatatggctgcgttgggatctgttcaccttcaggctgagtcgagactgaggtgaaaaagcggaaaaacgcgagaaaaggtttccccgttgtacagaggctagagtgaggctcggttgaatcggttgcaggcgttggtgcctctgtcagcgtccaggtcactgccgctcccgccccgctcttccctggctgtgctggcggaggctgcgccgatgaacctgactgaggattatatggtttttgaggacgtggccatacatttctcccaggaggagtggggaattcttaatgacgttcagagacacctgcacagcgatgtgatgctggagaactttgcacttttgtcctcagtaggttgttggcatggagccaaggatgaggaggcaccttccaagcaatgtgtttctgtaggagtgtcacaggtcacaactttaaagccagctttgtccacccagaaggcccagccctgtgagacatgtagctcacttctgaaggacattctacacctggctgagcatgacggaacacaccccaagcgtacagccaagctttacctgcaccaaaaggagcatcttagagagaagctcaccagaagtgatgaagggaggccttcgtttgtgaatgacagtgttcacctggcaaagaggaacctcacatgcatgcagggtggcaaggattttactggtgattcagatcttcaacaacaggctcttcacagtgggtggaagccacacagggacactcatggtgtggaggcctttcaaagtggacagaataattacagctgcacccaatgtgggaaagacttttgccaccaacatacactgtttgagcaccagaaaatccacacagaggaaaggccttatgagtgcagtgaatgtggcaaattgtttaggtacaactccgaccttattaaacatcagcgaaatcatactggagaaaggccttataagtgtagtgaatgtggaaaagccttcagcctcaaatacaatgttgttcaacaccagaaaattcacactggagaaaggccttatgagtgcagtgaatgtgggaaagcttttcttagaaagtctcacctacttcagcaccagaggattcacaccaggccaaggccttatgtgtgtagtgaatgtgggaaggccttccttacacaggctcaccttgttggtcaccagaaaattcatactggagaacggccttatggatgcaatgaatgtgggaaatactttatgtacagttcagcactcattagacatcagaaagttcacactggagaaaggcctttttattgctgtgaatgtgggaaattctttatggacagctgcacactcattattcaccagagagttcatactggagaaaaaccttatgaatgcaacgaatgtgggaaattctttagataccgttccacactcattagacatcagaaagttcacactggagaaaagccttatgagtgtagtgaatgtgggaagttctttatggacacttccacactcattattcatcagagagttcatactggagaaaagccttatgaatgcaacaaatgtgggaaattctttaggtattgcttcacactgaatagacatcagagagttcactctggagagaggccttatgaatgcagtgaatgtggcaaattctttgtggacagctgtacactgaagagtcatcagagagttcacactggagaaagaccttttgaatgcagcatttgtgggaaatcctttagatgtcgctccacacttgatacacatcagagaattcacactggtgaaaggccttatgagtgtagtgaatgtgggaaattctttaggcacaactcaaatcatattagacatcggagaaatcactttggagaaaggtcttttgagtgcactgagtgtgggagagtttttagccaaaattcccacctcattcggcaccaaaaagttcacactagggaaagaacttacaaatgcagcaaatgtgggaaattttttatggacagctccacactcattagtcatgagagagttcatactggagaaaagccttatgagtgcagtgaatgtgggaaagtctttagatacaactccagcctcattaaacatcggagaattcacactggagagagaccttatcagtgcagtgaatgtggaagagtctttaaccaaaattctcatctcattcagcaccagaaagttcacaccagataaagaatgtatatataaagcagatggggaaagacttcacacagaaatctactctgatttagcactgggacctacgttttaaaaaaagtattcttgtagaatacagataacataaaatctaacatcttaaccatgttaaagtgtatagttcagtactgttaagtcattcacattgtgcaatgaatatctagaagtcttttcaacttatgaaactaagtctataccttttaaaaccttattcctcactccatccagcctcttgacaagcaccgctctgtatgaattttactagtccgggtacctcatataagaaaacttaagtttt

SEQ ID NO: 201593 - DNA, 391 bp, Homo sapiens
  Payload ID: 19781
  Gene Name: zinc finger protein 17
  ENST ID: ENST00000597350
  CDS Start-End: 244-391
ccatataagccctattagttggcaatccttttaatctctattttacacataagggcaccgagacttaaggaagttcagtcctcatcaagacactgaaccctgaggacttactgtgtaccctcagataactttgctctagttgcagggccagaggtggttgtacagtcagcctgtaggatgctgcaatgctgtcttaatcctcatggcctgcctcttcccacagggttcatagcagtggcagcaatgcttatggatgctggacaggattatatggtttttgaggacgtggccatacatttctcccaggaggagtggggaattcttaatgacgttcagagacacctgcacagcgatgtgatgctggagaactttgcacttttgtcctcagtag

SEQ ID NO: 201594 - DNA, 2260 bp, Homo sapiens
  Payload ID: 19782
  Gene Name: zinc finger protein 174
  Uniprot ID: Q15697
  ENST ID: ENST00000268655
  CDS Start-End: 586-1809
ccgccctggaggccggagccactgggcctgcggcgcctcggcagcgagcagccgctttgctcgcgtgcaggaggctgttcgctacctcacacccccggctggcgctgtggcctcgcttagctctaccgtttagcacccggcgacatgcacccggtcggtttccgccaggatgcgggagagttggggcaagctacctgcgacagcttgaacttttcctagggattccgctccacccgccggttagagcgtattgctcattaaatccgagacctgtgtgcttgctactgaaataaaagaagtattttttccccagagtccttttaggacgttatgacttttctcctttgcaagactgcaaaaaactgacaagaagacaaaactcttcccactcccagggaccgcgttgtcttgagtttggctagtaaaggctagcaagtgaggctttgtctctgcatcccgttccccctaacatcctcagagaaccttcgtttctagaatctttctagtattcagagacttctccagggtcatgatcccaaaggcttaacccgtttacaaggagagagttgtctcctgacgcccaaaatggcagctaaaatggagataactttaagctccaacactgaagcttcctccaagcaagagagacacataatagccaaactagaagagaaacggggccctcctctgcaaaaaaactgcccagatcctgagctctgccgccagagcttcagacgcttttgttatcaagaggtgtctggaccccaagaggctctctcccagctccgacagctctgccgtcagtggttgcaacccgagctgcacaccaaggagcagattttggagcttctggtgatggagcagttcctgaccatcctgcccccggagatccaggctcgggtcaggcatcgatgtccaatgagcagcaaggagattgtgaccctcgtggaagattttcacagagcatccaagaaaccaaagcagtgggtggccgtttgtatgcaggggcaaaaggtgctcttggagaaaactggatctcagcttggagaacaggaactgccagactttcaaccgcagactcctaggagagatctcagggagagctctccagcagagccttcccaggcaggagcttatgaccggctgagcccccatcattgggagaaatccccactcctccaagaaccaacccccaaattggctgggacagaggcccccagaatgagaagtgacaacaaggaaaatccacaacaggaaggggctaaaggagcaaagccatgtgcagtgtcagctggcagatccaaagggaatggtctgcagaatcctgaaccaagaggggcaaatatgagtgaacctcggttgtcacggaggcaggtcagctccccaaatgctcaaaagccatttgctcactaccagagacattgcagggtggaatacatcagcagccccctaaaaagccacccactgagagagctaaagaaaagcaaaggaggtaaacggagtctgagcaaccgtttgcaacatcttggtcaccagcccacccgctcagcaaagaaaccctacaaatgtgatgactgtgggaaaagcttcacgtggaattcagagctgaagagacacaagagagtccacacaggagagagaccctacacgtgcggagagtgtggaaactgctttgggcggcagtcaaccctgaagctgcaccagaggatccacactggagagaagccataccagtgtggccagtgtgggaaaagctttcgccagagctcaaaccttcaccagcatcaccgacttcaccatggggactaaaaggagcactccatgctttagattcacacggaaggtgtttgtgtttctcctcccccttacttgcatgtaaatcacaaaaactgtgtgacttacaaggaaagcacgaggcccttgaggaatgatgatgcacattctgctgtgaggaggcccagaaaaggccaaccagggcccaaccgtgcatgatgacagggtgaagagaaggcaggtctgggcactggggcaaagagaacttaagtctctgcagagagcaaggagtaactactgagagagaatcaggacaatcctgcaggtggcccgcttactgttaaatcgtccctctgttgctttatcctctaaaatatgttaagggataaattctatatatatagttatgcatttgctgtcataccagacaattttttatcatgagcacacttctttaataaagatgagtgatctaccagaatttcaa

SEQ ID NO: 201595 - DNA, 1557 bp, Homo sapiens
  Payload ID: 19782
  Gene Name: zinc finger protein 174
  Uniprot ID: Q15697
  ENST ID: ENST00000344823
  CDS Start-End: 762-1466
gtccctcggtcttgggttcccggagaggtgagtcggctgcaggtgggtgcggggcgccgggctgttcggggtaccggtgtcgcagtcgccagtccgagctcacaccgggcgtggagttcagctgcgcatcgggttgcggcagcttcgccaggcctggggctggctgggccgcggggccgccctggaggccggagccactgggcctgcggcgcctcggcagcgagcagccgctttgctcgcgtgcaggaggctgttcgctacctcacacccccggctggcgctgtggcctcgcttagctctaccgtttagcacccggcgacatgcacccggtcggtttccgccaggatgcgggagagttggggcaagctacctgcgacagcttgaacttttcctagggattccgctccacccgccggttagagcgtattgctcattaaatccgagacctgtgtgcttgctactgaaataaaagaagtattttttccccagagtccttttaggacgttatgacttttctcctttgcaagactgcaaaaaactgacaagaagacaaaactcttcccactcccagggaccgcgttgtcttgagtttggctagtaaaggctagcaagtgaggctttgtctctgcatcccgttccccctaacatcctcagagaaccttcgtttctagaatctttctagtattcagagacttctccagggtcatgatcccaaaggcttaacccgtttacaaggagagagttgtctcctgacgcccaaaatggcagctaaaatggagataactttaagctccaacactgaagcttcctccaagcaagagagacacataatagccaaactagaagagaaacggggccctcctctgcaaaaaaactgcccagatcctgagctctgccgccagagcttcagacgcttttgttatcaagaggtgtctggaccccaagaggctctctcccagctccgacagctctgccgtcagtggttgcaacccgagctgcacaccaaggagcagattttggagcttctggtgatggagcagttcctgaccatcctgcccccggagatccaggctcgggtcaggcatcgatgtccaatgagcagcaaggagattgtgaccctcgtggaagattttcacagagcatccaagaaaccaaagcagtgggtggccgtttgtatgcaggggcaaaaggtgctcttggagaaaactggatctcagcttggagaacaggaactgccagactttcaaccgcagactcctaggagagatctcagggagagctctccagcagagccttcccaggcaggagcttatgaccggctgagcccccatcattgggagaaatccccactcctccaagaaccaacccccaaattggctgggacagaacttcttatagaaaagacagatccaaatatggccacagatgaacttccatgcaagctatggctgagtttcattgcttaaaatgctcctctgtttagaggggcctggtagaaataaaaacccaccctatatcttatatctttgtcctcctctgtgatgttgcttgtacttt

SEQ ID NO: 201596 - DNA, 1002 bp, Homo sapiens
  Payload ID: 19782
  Gene Name: zinc finger protein 174
  ENST ID: ENST00000572544
  CDS Start-End: 32-781
acaaggagagagttgtctcctgacgcccaaaatggcagctaaaatggagataactttaagctccaacactgaagcttcctccaagcaagagagacacataatagccaaactagaagagaaacggggccctcctctgcaaaaaaactgcccagatcctgagctctgccgccagagcttcagacgcttttgttatcaagaggtgtctggaccccaagaggctctctcccagctccgacagctctgccgtcagtggttgcaacccgagctgcacaccaaggagcagattttggagcttctggtgatggagcagttcctgaccatcctgcccccggagatccaggctcgggtcaggcatcgatgtccaatgagcagcaaggagattgtgaccctcgtggaagattttcacagagcatccaagaaaccaaagcagtgggtggccgtttgtatgcaggggcaaaaggtgctcttggagaaaactggatctcagcttggagaacaggaactgccagactttcaaccgcagactcctaggagagatctcagggagagctctccagcagagccttcccaggcaggagcttatgaccggctgagcccccatcattgggagaaatccccactcctccaagaaccaacccccaaattggctgggacaggtaaacactctgccttttctctccctctcatcagccctttatctccatcaatgtatctcatggttctgcaaaggcatagaccacatgtgtgtgtttttttaaatgttatatataatagtagatgattattcactaaacaaatttcactaattaggatggtggtgatactacaagtaagtatgtttttatcgttttctgttaatgaaaatttaagaatccagtgcatgacagggttgtacctacttttctgtccgtttcagaacttcttatagaaaagacagatccaaatatggccacagatgaacttccatgcaagctatggctgagtttcattgcttaaaatgct

SEQ ID NO: 201597 - DNA, 1586 bp, Homo sapiens
  Payload ID: 19782
  Gene Name: zinc finger protein 174
  Uniprot ID: Q15697
  ENST ID: ENST00000571936
  CDS Start-End: 309-1532
gggtcctaagtccctcggtcttgggttcccggagagagtccttttaggacgttatgacttttctcctttgcaagactgcaaaaaactgacaagaagacaaaactcttcccactcccagggaccgcgttgtcttgagtttggctagtaaaggctagcaagtgaggctttgtctctgcatcccgttccccctaacatcctcagagaaccttcgtttctagaatctttctagtattcagagacttctccagggtcatgatcccaaaggcttaacccgtttacaaggagagagttgtctcctgacgcccaaaatggcagctaaaatggagataactttaagctccaacactgaagcttcctccaagcaagagagacacataatagccaaactagaagagaaacggggccctcctctgcaaaaaaactgcccagatcctgagctctgccgccagagcttcagacgcttttgttatcaagaggtgtctggaccccaagaggctctctcccagctccgacagctctgccgtcagtggttgcaacccgagctgcacaccaaggagcagattttggagcttctggtgatggagcagttcctgaccatcctgcccccggagatccaggctcgggtcaggcatcgatgtccaatgagcagcaaggagattgtgaccctcgtggaagattttcacagagcatccaagaaaccaaagcagtgggtggccgtttgtatgcaggggcaaaaggtgctcttggagaaaactggatctcagcttggagaacaggaactgccagactttcaaccgcagactcctaggagagatctcagggagagctctccagcagagccttcccaggcaggagcttatgaccggctgagcccccatcattgggagaaatccccactcctccaagaaccaacccccaaattggctgggacagaggcccccagaatgagaagtgacaacaaggaaaatccacaacaggaaggggctaaaggagcaaagccatgtgcagtgtcagctggcagatccaaagggaatggtctgcagaatcctgaaccaagaggggcaaatatgagtgaacctcggttgtcacggaggcaggtcagctccccaaatgctcaaaagccatttgctcactaccagagacattgcagggtggaatacatcagcagccccctaaaaagccacccactgagagagctaaagaaaagcaaaggaggtaaacggagtctgagcaaccgtttgcaacatcttggtcaccagcccacccgctcagcaaagaaaccctacaaatgtgatgactgtgggaaaagcttcacgtggaattcagagctgaagagacacaagagagtccacacaggagagagaccctacacgtgcggagagtgtggaaactgctttgggcggcagtcaaccctgaagctgcaccagaggatccacactggagagaagccataccagtgtggccagtgtgggaaaagctttcgccagagctcaaaccttcaccagcatcaccgacttcaccatggggactaaaaggagcactccatgctttagattcacacggaaggtgtttgtgtttctcctccc

SEQ ID NO: 201598 - DNA, 1068 bp, Homo sapiens
  Payload ID: 19782
  Gene Name: zinc finger protein 174
  Uniprot ID: Q15697
  ENST ID: ENST00000575752
  CDS Start-End: 309-1013
gggtcctaagtccctcggtcttgggttcccggagagagtccttttaggacgttatgacttttctcctttgcaagactgcaaaaaactgacaagaagacaaaactcttcccactcccagggaccgcgttgtcttgagtttggctagtaaaggctagcaagtgaggctttgtctctgcatcccgttccccctaacatcctcagagaaccttcgtttctagaatctttctagtattcagagacttctccagggtcatgatcccaaaggcttaacccgtttacaaggagagagttgtctcctgacgcccaaaatggcagctaaaatggagataactttaagctccaacactgaagcttcctccaagcaagagagacacataatagccaaactagaagagaaacggggccctcctctgcaaaaaaactgcccagatcctgagctctgccgccagagcttcagacgcttttgttatcaagaggtgtctggaccccaagaggctctctcccagctccgacagctctgccgtcagtggttgcaacccgagctgcacaccaaggagcagattttggagcttctggtgatggagcagttcctgaccatcctgcccccggagatccaggctcgggtcaggcatcgatgtccaatgagcagcaaggagattgtgaccctcgtggaagattttcacagagcatccaagaaaccaaagcagtgggtggccgtttgtatgcaggggcaaaaggtgctcttggagaaaactggatctcagcttggagaacaggaactgccagactttcaaccgcagactcctaggagagatctcagggagagctctccagcagagccttcccaggcaggagcttatgaccggctgagcccccatcattgggagaaatccccactcctccaagaaccaacccccaaattggctgggacagaacttcttatagaaaagacagatccaaatatggccacagatgaacttccatgcaagctatggctgagtttcattgcttaaaatgctcctctgtttagaggggcctggtagaaataaaaacccaccctatatctta

SEQ ID NO: 201599 - DNA, 6535 bp, Homo sapiens
  Payload ID: 19783
  Gene Name: zinc finger protein 175
  Uniprot ID: Q9Y473
  ENST ID: ENST00000262259
  CDS Start-End: 359-2494
gttgttaagtggatctaagcctatgtcgcttactggacgctgaagtgattgggaatattagcagtgggggttctgtagggtcaggaaggggcggctggctttgggggagtgatgaggggcttgttgggggtgggggtgcgtgataaagggatttctcggctgaagacgaggctgtgaggcttctgcagaacccccaggtcaggccacatcattgaggctgcaggatctctcttcatagcccagtacgactctccgccgtgtccctggttggaaaatccaaacacctatccagcttctggctcctgggaaaagtggagttgtcagcaagagagaccgagagtagaagcccagagtggagatgcctgctgatgtgaatttatcccagaagcctcaggtcctgggtccagagaagcaggatggatcttgcgaggcatcagtgtcatttgaggacgtgaccgtggacttcagcagggaggagtggcagcaactggaccctgcccagagatgcctgtaccgggatgtgatgctggagctctatagccatctcttcgcagtggggtatcacattcccaacccagaggtcatcttcagaatgctaaaagaaaaggagccgcgtgtggaggaggctgaagtctcacatcagaggtgtcaagaaagggagtttgggcttgaaatcccacaaaaggagatttctaagaaagcttcatttcaaaaggatatggtaggtgagttcacaagagatggttcatggtgttccattttagaagaactgaggctggatgctgaccgcacaaagaaagatgagcaaaatcaaattcaacccatgagtcacagtgctttcttcaacaagaaaacattgaacacagaaagcaattgtgaatataaggaccctgggaaaatgattcgcacgaggccccaccttgcttcttcacagaaacaacctcagaaatgttgcttatttacagaaagtttgaagctgaacctagaagtgaacggtcagaatgaaagcaatgacacagaacagcttgatgacgttgttgggtctggtcagctattcagccatagctcttctgatgcctgcagcaagaatattcatacaggagagacattttgcaaaggtaaccagtgtagaaaagtctgtggccataaacagtcactcaagcaacatcaaattcatactcagaagaaaccagatggatgttctgaatgtggggggagcttcacccagaagtcacacctctttgcccaacagagaattcatagtgtaggaaacctccatgaatgtggcaaatgtggaaaagccttcatgccacaactaaaactcagtgtatatctgacagatcatacaggtgatataccctgtatatgcaaggaatgtgggaaggtctttattcagagatcagaattgcttacgcaccagaaaacacacactagaaagaagccctataaatgccatgactgtggaaaagcctttttccagatgttatctctcttcagacatcagagaactcacagtagagaaaaactctatgaatgcagtgaatgtggcaaaggcttctcccaaaactcaaccctcattatacatcagaaaattcatactggtgagagacagtatgcatgcagtgaatgtgggaaagcctttacccagaagtcaacactcagcttgcaccagagaatccactcagggcagaagtcctatgtgtgtatcgaatgcgggcaggccttcatccagaaggcacacctgattgtccatcaaagaagccacacaggagaaaaaccttatcagtgccacaactgtgggaaatccttcatttccaagtcacagcttgatatacatcatcgaattcatacaggggagaaaccttatgaatgcagtgactgtggaaaaaccttcacccaaaagtcacacctgaatatacaccagaaaattcatactggagaaagacaccatgtatgcagtgaatgcgggaaagccttcaaccagaagtcaatactcagcatgcatcagagaattcacaccggagagaagccttacaaatgcagtgaatgtgggaaagccttcacttctaagtctcaattcaaagagcatcagcgaattcacacgggtgagaaaccctatgtgtgcactgaatgtgggaaggccttcaacggcaggtcaaatttccataaacatcaaataactcacactagagagaggccttttgtctgttacaaatgtgggaaggcttttgtccagaaatcagagttgattacccatcaaagaactcacatgggagagaaaccctatgaatgccttgactgtgggaaatcgttcagtaagaaaccacaactcaaggtgcatcagcgaattcacacgggagaaagaccttatgtgtgttctgaatgtggaaaggccttcaacaacaggtcaaacttcaataaacaccaaacaactcataccagagacaaatcttacaaatgcagttattctgtgaaaggctttaccaagcaatgaattcctagtgcatcagcatattcataaatgaaatatactccgagtttcttgaagaagagaaaatcttctcagaatcaggtctaattatatgttattgaattcatgcttcagaaaaactctagggatgcactgcatgtgtgaacacatgataaaaaagtcatgctttattttagtgagggcaattacagagaaaagagtaagcagaaatgtccttctgagtactggcctcattaaggattataaattttctccccgggaagaaaccctgactaacgcattgagaaaagcctttctgtaaagaatggtacaagacaggttgttactcgattatttatagtaaaatatgtgggaaattatatcaatgataaccctgtttattgtgggatatcaatatttttaaagtgccaacacagtcatgataggacaatattttatgtgtgtgtgtgcgccttatgtatataagcatatatataatatataagcatattattatatacaggttgagtatcccttctccaaaatgcctgggatcagaagcattttggatttcagatacttacagattttggaatatttgcattatatttattggttgagcatccctaatctgaaaatccaagattaaatgctccaattagcatttcctttgagcgtcatgttagagttcaaaaagtttcagattttgggttttcagattaggaatacccaacctgtatgtacgtatatttctgtatctatgtatgtatatatatgcatatgcagacatatgtatatggtctggtcagcatatgtgtatgtatgcgtatgtatgtatgtatgtatgccctcagtgcagtggggtttgctgcagaattcactgcatagcaggagatgtaagcagatgagttattttttaagagaatctaatctaattgtttttataaaaattattccctattgaatatttatataatgaggttgtatcaacaatgattaactcctttattatacatacacatgaatgtgcatttttggtaaatgcataaatgagattctataatgtttactgatctttatattacagattttctcttcttttaggattagctcagcttgccccccctttccatctccaccatctatagtgagcctctccataattagtgccaaccattagtctcgttcatatttttacaccaggagtcaacaaactgtggccattggccaaatatggcctcccaactgtttttttaaaataaagttttattggaacacagccatgttcatttggacatgtattgtctgggcttcttttgtgctgcactggcagaattgagtagttttggcggagatcaaatagcccccaagctggaaactgaaaatatctactctctggctctttacagaaaatgtttgccagcacatgatacacacacaaacacacacacatacacacatattactatgttcatcatcatatacctgtgtaagtactctttcattgatttataaaactcagatctcttacgtgtgtggatggtatttttttcattctacaatccatgatggattgtacacacgtgtattctatgaggttgacctgccataatttatttagccattcccacagttttgattacttatttcctccccacacacattttttgctaaaaaacggagagggaactgttatcaatacttccgagaagcagaccagcataatcttttaagtgcacaggcccaggagccaggttcctgcatttgattcctggctccactctctaccctctgcatctgctgagcaagttatttggtctcatctattctggttttctcatctacaaaagggagatgatgatagtaccctacccccatgcatttggtgtgagaagtgtgtgtgtgttaaacccttggaactgcatggacagaccaagtgctgatgaattttagcgggcctcgtatccctgagcctgcctggttcccttgtgctgggtgtgggactgtggtgggagatttctgtcagctggaagtcttttccagaagggtgttagagatgggcacccatggctttagtctccataccccttcaaggttgataggggcccacacagctggtcaggaaccagcacagacctcaggctgtgtctaaaacaaggtgactgcacatgcaggagcctgtgctgggccctggagagcaaatctgttctgtgtctcactggcctctccctgtccaggggcgtagtatcagtgaccatgtcccacctcctgagaaaggtggaagagtctcacctggggagtccaggtacaagggctggccggccgtagatgactggtgtggggtggaaaggctgcagaggcctctccatggtggtgaggggtggaaatagtgtgcacctgggtcctgggagtggcaccctgaccagtttcagggaggaaggtggcagggccctaggacaagtgtgttaaaaacttgagcccacagtgtagacacactggttccaaagacccctcaggatgtgcctcccttctcagatctgggctttccctgttcctaagcatcacctggggggatcactctgggtcctcatctccagccacatgttcactcctcacgtgggcctccctaactgtccccctcagggcaagcccttcctccccacttccagaaagctgctcgttccctggccatcccacacctctgacctcgtgccacttccggggcctgttggctttaacaacttagtttcctccctacctcgcaaccccctctgtctagagtgctcacctccctcccagcctctgtctcatactattttttctttcctctcagtaccaagcgctgggacaagccagtctgtactcaatgcctgtgggataatagacggaggaatctggagtttggttgggtgattagctttggaattgatgggtcccagggagctatctaaagttttcagtcacatgagggcatgctcacagatctgtgaaaagatctgttggctcagagaactaagagatgaataaatgttagtccaatggcctcatcatgagatgagaggtcaagagttttgagtttccagagggagaagctactattctaggcagcttgtatgaactaactcgtttattcctcacagccattgtaggaaataatctaacctcataaaccccattttagagatgaggaaacaggcttagagaatttgacgtaaactcaagaccgaaaatctaggaacaagaaaagcctggatttgaaccaagctatctgatgccagtgttttaactctcaaccattgtactactttacctcctcatgaccttttttttttttttcttgtgagatggagtctcgctctgtcgcccaggctctggagtgcagtggcacgatctcagctcactgcaagctccgcctcccgggttcacgccattctcctgcctcagcctcccgagtagctgggactacaggcgcccaccaccatgcctggctaattttttgtatttttagtagagacggggtttcaccgtgttggccaggatggtctcgatctcctgacctcgtgatccccccccctcggcctcccaaagtgcccatgacctttttattgttgggcagtgaaagccatggtgaaatgaagaatgtcctactgtcatgtgatgtgatcagaaaacatactgcccagagtcccctgcccccacccccaaaaccagtacttgatccatcctttgactgttgtggcgattggcacaaaggttgggcacagtagtagttaggctcatgggctctggagccaacctacctggatgctacacatcccagctctgcccctcgctagtttggtggcaagcaacttaacctctctgccttaatttctccagcagcacaatgggaataataatagatctcgccttgtggctcctttgcagattacatgcgttaattatgtaaagtcaagcattagaatggtggctgtccaccatgagtacaacacaaatgctcgttcttaatgattcaacaaacatggaatttcattaaatctgaaataaaggtattttgagaaattg

SEQ ID NO: 201600 - DNA, 488 bp, Homo sapiens
  Payload ID: 19783
  Gene Name: zinc finger protein 175
  ENST ID: ENST00000436511
  CDS Start-End: 3-341
agatgcctgctgatgtgaatttatcccagaagcctcaggtcctgggtccagagaagcaggatggatcttgcgaggcatcagtgtcatttgaggacgtgaccgtggacttcagcagggaggagtggcagcaactggaccctgcccagagatgcctgtaccgggatgtgatgctggagctctatagccatctcttcgcagtggggtatcacattcccaacccagaggtcatcttcagaatgctaaaagaaaaggagccgcgtgtggaggaggctgaagtctcacatcagaggtgtcaaggattagctcagcttgccccccctttccatctccaccatctatagtgagcctctccataattagtgccaaccattagtctcgttcatatttttacaccaggagtcaacaaactgtggccattggccaaatatggcctcccaactgtttttttaaaataaagttttattggaacacagccatgttcatttgga

SEQ ID NO: 201601 - DNA, 1239 bp, Homo sapiens
  Payload ID: 19783
  Gene Name: zinc finger protein 175
  ENST ID: ENST00000545217
  CDS Start-End: 359-514
gttgttaagtggatctaagcctatgtcgcttactggacgctgaagtgattgggaatattagcagtgggggttctgtagggtcaggaaggggcggctggctttgggggagtgatgaggggcttgttgggggtgggggtgcgtgataaagggatttctcggctgaagacgaggctgtgaggcttctgcagaacccccaggtcaggccacatcattgaggctgcaggatctctcttcatagcccagtacgactctccgccgtgtccctggttggaaaatccaaacacctatccagcttctggctcctgggaaaagtggagttgtcagcaagagagaccgagagtagaagcccagagtggagatgcctgctgatgtgaatttatcccagaagcctcaggtcctgggtccagagaagcaggatggatcttgcgaggtaaacaggggcagccctggggatagttctccagaacgtgagggcagacacaggatgcagcaggtctgggctccctgctcctgagtcagtcttgagcctcctgtcaagcgaggaccacagaggctgatgtttccacattcataggctatctgtgttctagaggaaaccatgaactggctgataaaagaggatagtagagggttggccttgggtcaagaaagaagaaactgtagtccctggtctgatcagaagccccagtcataggatggaaaagctgactctttcctgctaagcactggttctgctccttcatccaccactgggtctttgaaaaatttcaagtggtcccccccaccaaattccttgcttggtccatggggtttggcccgtttttcctctgttctcataaggtgcggcaaaatctccttcctttgtaatttaaatagtcacagggaggtagagtgagaagaggcttttaaggaccatgtgaagaggcttttaaacactttttcctgtttaaaaaggtgaacaaaaaatgctggaaaacagtgtttccagattgcccacagatagaaatagtcaggatttggtaacaagaaatcagaattcttggtatagtcaagatttcctgaaatcctaaattattctgtgtatctcttgatgctttatttacaagtctttaaatagtatgtgactataatagtaaacagtgtaccattgttctgtgatgggtttataaccaaatttacagagatgttctgttttttaaaaaaagtataataaatatgtgtgttattatcctgaaccaa

SEQ ID NO: 201602 - DNA, 580 bp, Homo sapiens
  Payload ID: 19783
  Gene Name: zinc finger protein 175
  ENST ID: ENST00000596504
  CDS Start-End: 353-565
aagtggatctaagcctatgtcgcttactggacgctgaagtgattgggaatattagcagtgggggttctgtagggtcaggaaggggcggctggctttgggggagtgatgaggggcttgttgggggtgggggtgcgtgataaagggatttctcggctgaagacgaggctgtgaggcttctgcagaacccccaggtcaggccacatcattgaggctgcaggatctctcttcatagcccagtacgactctccgccgtgtccctggttggaaaatccaaacacctatccagcttctggctcctgggaaaagtggagttgtcagcaagagagaccgagagtagaagcccagagtggagatgcctgctgatgtgaatttatcccagaagcctcaggtcctgggtccagagaagcaggatggatcttgcgaggcatcagtgtcatttgaggacgtgaccgtggacttcagcagggaggagtggcagcaactggaccctgcccagagatgcctgtaccgggatgtgatgctggagctctatagccatctcttcgcagtgggtgagcacaactgacctgggaatcttggc

SEQ ID NO: 201603 - DNA, 1835 bp, Homo sapiens
  Payload ID: 19784
  Gene Name: zinc finger protein 177
  Uniprot ID: Q13360
  ENST ID: ENST00000343499
  CDS Start-End: 457-1422
cgccatctcccatagctgtcgcctgcagctgagaaagggttgctgtcccagcaggccaggtccagggctgggtataagtaagcaagaagagggcctgggagaagagtctgacgagcaaggggaaggtagccaaggatggagtgaaatacagggtgacctgtgtttttcccctggctgctttggaaattatgggaaaaaatcaaataccaaggaagaaaaatctataatgaaattagatgtggatttctttttatgtattcagcttgggggcttatgatacttctagtacccaaagagatgcggtcttgctgtgttgcctaggctggtctcaaactcctgctctcaagtgatcctcctgcctcagcctcctgagtacatttatatttaaagtaattattgatggctctgcctgcttaggactctgcccagccaggaaggaaacctacaggaggaagaatggctgcagggtggctgacaacctggtcacagaactcagtaaccttccaggaagtggcagtggacttttcccaggaggagtgggcattgctggaccctgctcaaaaaaatctatacaaagatgtgatgctggagaactttaggaacctggcctcagtagggtatcagctctgcagacacagtctgatctccaaggtggatcaagaacagctgaagacagatgaaagaggaattttacaaggtgactgtgcagactgggaaactcaacttaaaccaaaagatacaattgctatgcagaacattcctgggggaaaaacatccaatggcataaacacgaactgtgtcagaactcactctggagagatgccctatgaatgcagtgactgtgggaaagccttcatttttcagtcttcccttaagaaacacatgagatctcatactggagagaagccttatgagtgtgatcactgtggaaaatcctttagccagagctctcatctgaatgtgcacaaaagaactcacactggagagaaaccctatgactgtaaggaatgtgggaaggctttcactgttccttcatcccttcagaaacatgtgagaacccacactggagagaaaccctatgaatgcagtgactgtggaaaagccttcatcgatcagtcatcccttaagaaacacacacgctctcacactggagagaagccttatgagtgtaaccagtgtggaaagtccttcagcacaggctcttaccttattgtgcacaagagaactcacactggtgagaaaacctatgagtgtaaagaatgtgggaaggcctttaggaattcctcttgcctgagggtacacgtgagaactcacactggagagaagccttataaatgtattcagtgtgaaaaagcctttagcacaagcactaaccttataatgcacaagcgaatccacaatggccagaaactccatgaatgaaatgactcagggaagtgtttgttgcccctcatgcctcctttctcactttagaacatatattggagagaagccctgttatggtcacctggaaacagccttctggcccaactctggatgcctgttatactgggacaaaccttataaatgttatagctatgattgtttttatcagtgagtatttcattcttatatgtgtcacaactgtagatcctatgaatattttagttatcttttcagtttaattgcattgtgaacagaacacatggtcttcaatatgtagattctgtgtgacatagatttgaacataattgctggacactgactgatgtactgtggcagacagaactagttgctgtctcaatatccattcctcccttctttcttaaagtaataaaatttaccatttagttcaa

SEQ ID NO: 201604 - DNA, 612 bp, Homo sapiens
  Payload ID: 19784
  Gene Name: zinc finger protein 177
  ENST ID: ENST00000590616
  CDS Start-End: 44-424
ttaggactctgcccagccaggaaggaaacctacaggaggaagaatggctgcagggtggctgacaacctggtcacagaactcagtaaccttccaggaagtggcagtggacttttcccaggaggagtgggcattgctggaccctgctcaaaaaaatctatacaaagatgtgatgctggagaactttaggaacctggcctcagtagggtatcagctctgcagacacagtctgatctccaaggtggatcaagaacagctgaagacagatgaaagaggaattttacaaggtgactgtgcagactgggaaactcaacttaaaccaaaagatacaattgctatgcagaacattcctgggggaaaaacatccaatggcataaacacgaaaatatatacaccaagaggaggacagagaaaggatactaaatgaaacaacaggggagatacaatattatctggttgcactaatcctgtgctgcttatctctggatttcatgttacatgagaaaaattaactgccatgtggtttaaaccactcttgtgggaagttcctctttcagctgatttcagtcccaactgttacatctaataaatggtcaagttttaggaatcgttcaa

SEQ ID NO: 201605 - DNA, 560 bp, Homo sapiens
  Payload ID: 19784
  Gene Name: zinc finger protein 177
  ENST ID: ENST00000592912
  CDS Start-End: 510-560
atagctgtcgcctgcagctgagaaagggttgctgtcccagcaggccaggtccaggtgcgccccactagtgaggccggcggaatcgggagggaaggggtcaagggcacagtgcgcagccccggctgctccagaccttgcctgcagcttcccgccccagcctccggctatcgcggcgtttcttctcagaggccgccggctttggttcctcccggcactgctgggcttggggctgccattccgggcattggttcccgggaggagggctgggtataagtaagcaagaagagggcctgggagaagagtctgacgagcaaggggaaggtagccaaggatggagtgaaatacaggagatgcggtcttgctgtgttgcctaggctggtctcaaactcctgctctcaagtgatcctcctgcctcagcctcctgagtacatttatatttaaagtaattattgatggctctgcctgcttaggactctgcccagccaggaaggaaacctacaggaggaagaatggctgcagggtggctgacaacctggtcacagaactcagtaaccttccag

SEQ ID NO: 201606 - DNA, 1920 bp, Homo sapiens
  Payload ID: 19784
  Gene Name: zinc finger protein 177
  Uniprot ID: Q13360
  ENST ID: ENST00000589262
  CDS Start-End: 67-1512
taattattgatggctctgcctgcttaggactctgcccagccaggaaggaaacctacaggaggaagaatggctgcagggtggctgacaacctggtcacagaactcagtaaccttccaggaagtggcagtggacttttcccaggaggagtgggcattgctggaccctgctcaaaaaaatctatacaaagatgtgatgctggagaactttaggaacctggcctcagtagggtatcagctctgcagacacagtctgatctccaaggtggatcaagaacagctgaagacagatgaaagaggaattttacaaggtgactgtgcagactgggaaactcaacttaaaccaaaagatacaattgctatgcagaacattcctgggggaaaaacatccaatggcataaacacggcagaaaatcaacctggtgagcactccctggagtgtaaccattgtgggaaattcagaaagaacactcgctttatttgtacaagatattgcaagggagagaaatgctataaatatataaagtatagcaaagtcttcaaccatccctcaactcttaggagtcatgtgagcattcacattggagagaaaactcttgaatttactgattgtagaaaagctttcaatcaagagtcatccctcaggaaacacttaagaactcccacaggacagaagtttcaggagtatgagcaatgtgatatgtccttcagcctacactcttcctgctcagtacgtgagcaaatacctactggagagaaaggtgatgaatgcagtgactatggcaaaatatctccccttagtgtccacacaaaaactggtagtgtggaggagggtttggaatgtaatgaacatgagaaaactttcactgaccctttgtcccttcagaactgtgtcagaactcactctggagagatgccctatgaatgcagtgactgtgggaaagccttcatttttcagtcttcccttaagaaacacatgagatctcatactggagagaagccttatgagtgtgatcactgtggaaaatcctttagccagagctctcatctgaatgtgcacaaaagaactcacactggagagaaaccctatgactgtaaggaatgtgggaaggctttcactgttccttcatcccttcagaaacatgtgagaacccacactggagagaaaccctatgaatgcagtgactgtggaaaagccttcatcgatcagtcatcccttaagaaacacacacgctctcacactggagagaagccttatgagtgtaaccagtgtggaaagtccttcagcacaggctcttaccttattgtgcacaagagaactcacactggtgagaaaacctatgagtgtaaagaatgtgggaaggcctttaggaattcctcttgcctgagggtacacgtgagaactcacactggagagaagccttataaatgtattcagtgtgaaaaagcctttagcacaagcactaaccttataatgcacaagcgaatccacaatggccagaaactccatgaatgaaatgactcagggaagtgtttgttgcccctcatgcctcctttctcactttagaacatatattggagagaagccctgttatggtcacctggaaacagccttctggcccaactctggatgcctgttatactgggacaaaccttataaatgttatagctatgattgtttttatcagtgagtatttcattcttatatgtgtcacaactgtagatcctatgaatattttagttatcttttcagtttaattgcattgtgaacagaacacatggtcttcaatatgtagattctgtgtgacatagatttgaacataattgctggacactgactgatgtactgtggcagacagaactagttgctgtctcaatatccattcctcccttctttcttaaagtaataaaatttaccatttag

SEQ ID NO: 201607 - DNA, 2767 bp, Homo sapiens
  Payload ID: 19785
  Gene Name: zinc finger protein 18
  Uniprot ID: P17022
  ENST ID: ENST00000322748
  CDS Start-End: 606-2255
atctgcgtccgcacctgactcagctgggcaccccggagctacggaggggccagcgggctcccttgcccatgcgtctgggagcgcgcgggggacgtggcgaggctgaaaatgagtctctggaagaggaaacccgatgggatgatgcctggagtctctccctctctcatcagagtgcagtcggcatttggggggcgcatggtggagaatacatatccaatgagcagcgctgccctggcctcgagcactaaatgccagttcccctagctgcttgtgacaaccagaaaacgccccaacaaatcaccagacgttggcagttctccccaaagcaaaggctttagagcttcctgggttaatctggctgccacttgtgagcctcggaggttcctgatctgtacaccaggatggagtctccctctgtcgcccaggctggagtgcagtggtacgatcttgactcactgcaacttccgcctcccaggttcaggctgttctcctacctcagcctcctgagttgctgggattacagtgtcctggtgaagacctagttcttgccggagacaattccactgcagaagcactttacttaaaaggacttgccaggctggacaatgcccgttgacttggggcaggccctaggcctgctgccatcgctggcgaaggccgaggactcccagttctcagaatcagatgctgcccttcaagaggaactctccagccctgagaccgcacgccagcttttcaggcagttccgttaccaggtgatgtctgggcctcatgagaccttgaagcaacttcggaagctctgtttccagtggctacagccagaggttcacaccaaagagcagatcctagagatcctcatgttggagcagtttctgaccatcctgcctggggagatccagatgtgggtgcggaaacagtgtccaggaagtggagaagaggcagtgacccttgtggaaagcttgaagggggacccccagagactgtggcaatggatcagtatccaggttctaggacaggacatcttatcagagaagatggaatctccaagctgccaagtgggggaagtggagccccatcttgaagtggtgcctcaggagttgggacttgagaattcatcctcagggcctggggagcttctgagccacatcgtgaaagaggaatctgacacagaagcagaactagccctggctgcctcccagcctgcccgactggaggaaaggctgatcagagaccaggacctcggagcctcactgctcccagcagcacctcaggaacagtggagacaactggattccactcaaaaggagcaatactgggatctcatgctggagacctatgggaaaatggtctcaggagcaggcatttcccatcccaaatctgacctgactaattcaatagaatttggggaagagctggcaggaatataccttcatgtcaatgagaagatcccaagacccacctgcataggagatagacaagagaatgacaaggagaacctaaatttggagaatcacagggaccaggagctcctgcatgcttcctgtcaagcttcaggagaggttccttctcaggcttccttgaggggcttcttcactgaggatgagccaggatgctttggagaaggagagaatctccctgaggctctgcaaaacattcaggatgagggaacaggggaacagctgtctcctcaagaaaggatttctgagaaacaactaggtcagcatttgcctaatcctcattcaggagaaatgtccaccatgtggcttgaggagaagagagagacctcccagaaggggcagccaagagcccccatggcccagaagctccccacctgcagggagtgtgggaagaccttttataggaattctcagcttatttttcaccaaagaactcacaccggagagacatactttcagtgcaccatctgcaaaaaagcctttctgcggagttcagactttgtgaagcatcagagaactcacacgggagagaagccctgtaaatgtgattactgtgggaaaggctttagtgacttctcaggattgcgccaccacgagaaaatccacacaggagagaaaccctataaatgtcctatctgtgagaaaagtttcattcagagatcaaactttaatagacatcagagggttcacactggagagaaaccttataaatgttcgcactgtgggaaaagtttcagctggagctcgagccttgacaaacatcaaagatcccacttaggaaagaagccctttcaatagccagtaaccaaactctctttccccatttctatctcccagcccagtcacaaaaatactcagctccatcaagaggaattgtgtctaagaggatacccctgttaatctccttttttcttggattggagaggagagaatctggacatggctttggacttggaggatatcttggattggattgcacaatggcttaaattcttgattctgcctcaggagaaagaatagtcttcatgtttccactcatccttcctttggacccatcggggaaaaagtctaaattggagatccagttttagaagtgctttctgggaagcatttaatgggattagctgtagtcactgcttatgggaagaacctcagatcagccccttaaaatgagttctagagcaggtcttctgttccagaaggggagaagcatagagggcctgtgagctcacgtgtgttctttgtcataggggtgaaaaactaacttcaagtgtcccttgtttgaaataaacttagcagagtcactttct

SEQ ID NO: 201608 - DNA, 2261 bp, Homo sapiens
  Payload ID: 19785
  Gene Name: zinc finger protein 18
  Uniprot ID: P17022
  ENST ID: ENST00000454073
  CDS Start-End: 110-1756
cgcccggagccggcgccgcgggccgagtgtcctggtgaagacctagttcttgccggagacaattccactgcagaagcactttacttaaaaggacttgccaggctggacaatgcccgttgacttggggcaggccctaggcctgctgccatcgctggcgaaggccgaggactcccagttctcagaatcagatgctgcccttcaagaggaactctccagccctgagaccgcacgccagcttttcaggcagttccgttaccaggtgatgtctgggcctcatgagaccttgaagcaacttcggaagctctgtttccagtggctacagccagaggttcacaccaaagagcagatcctagagatcctcatgttggagcagtttctgaccatcctgcctggggagatccagatgtgggtgcggaaacagtgtccaggaagtggagaagaggcagtgacccttgtggaaagcttgaagggggacccccagagactgtggcaatggatcagtatccaggttctaggacaggacatcttatcagagaagatggaatctccaagctgccaagtgggggaagtggagccccatcttgaagtggtgcctcaggagttgggacttgagaattcatcctcagggcctggggagcttctgagccacatcgtgaaagaggaatctgacacagaagcagaactagccctggctgcctcccagcctgcccgactggaggaaaggctgatcagagaccaggacctcggagcctcactgctcccagcagcacctcaggaacagtggagacaactggattccactcaaaaggagcaatactgggatctcatgctggagacctatgggaaaatggtctcaggaggcatttcccatcccaaatctgacctgactaattcaatagaatttggggaagagctggcaggaatataccttcatgtcaatgagaagatcccaagacccacctgcataggagatagacaagagaatgacaaggagaacctaaatttggagaatcacagggaccaggagctcctgcatgcttcctgtcaagcttcaggagaggttccttctcaggcttccttgaggggcttcttcactgaggatgagccaggatgctttggagaaggagagaatctccctgaggctctgcaaaacattcaggatgagggaacaggggaacagctgtctcctcaagaaaggatttctgagaaacaactaggtcagcatttgcctaatcctcattcaggagaaatgtccaccatgtggcttgaggagaagagagagacctcccagaaggggcagccaagagcccccatggcccagaagctccccacctgcagggagtgtgggaagaccttttataggaattctcagcttatttttcaccaaagaactcacaccggagagacatactttcagtgcaccatctgcaaaaaagcctttctgcggagttcagactttgtgaagcatcagagaactcacacgggagagaagccctgtaaatgtgattactgtgggaaaggctttagtgacttctcaggattgcgccaccacgagaaaatccacacaggagagaaaccctataaatgtcctatctgtgagaaaagtttcattcagagatcaaactttaatagacatcagagggttcacactggagagaaaccttataaatgttcgcactgtgggaaaagtttcagctggagctcgagccttgacaaacatcaaagatcccacttaggaaagaagccctttcaatagccagtaaccaaactctctttccccatttctatctcccagcccagtcacaaaaatactcagctccatcaagaggaattgtgtctaagaggatacccctgttaatctccttttttcttggattggagaggagagaatctggacatggctttggacttggaggatatcttggattggattgcacaatggcttaaattcttgattctgcctcaggagaaagaatagtcttcatgtttccactcatccttcctttggacccatcggggaaaaagtctaaattggagatccagttttagaagtgctttctgggaagcatttaatgggattagctgtagtcactgcttatgggaagaacctcagatcagccccttaaaatgagttctagagcaggtcttctgttccagaaggggagaagcatagagggcctgtgagctcacgtgtgttctttgtcataggggtgaaaaactaacttcaagtgtcccttgtttgaaataaacttagcagagtc

SEQ ID NO: 201609 - DNA, 2250 bp, Homo sapiens
  Payload ID: 19785
  Gene Name: zinc finger protein 18
  Uniprot ID: P17022
  ENST ID: ENST00000580613
  CDS Start-End: 89-1738
ttttagtgtcctggtgaagacctagttcttgccggagacaattccactgcagaagcactttacttaaaaggacttgccaggctggacaatgcccgttgacttggggcaggccctaggcctgctgccatcgctggcgaaggccgaggactcccagttctcagaatcagatgctgcccttcaagaggaactctccagccctgagaccgcacgccagcttttcaggcagttccgttaccaggtgatgtctgggcctcatgagaccttgaagcaacttcggaagctctgtttccagtggctacagccagaggttcacaccaaagagcagatcctagagatcctcatgttggagcagtttctgaccatcctgcctggggagatccagatgtgggtgcggaaacagtgtccaggaagtggagaagaggcagtgacccttgtggaaagcttgaagggggacccccagagactgtggcaatggatcagtatccaggttctaggacaggacatcttatcagagaagatggaatctccaagctgccaagtgggggaagtggagccccatcttgaagtggtgcctcaggagttgggacttgagaattcatcctcagggcctggggagcttctgagccacatcgtgaaagaggaatctgacacagaagcagaactagccctggctgcctcccagcctgcccgactggaggaaaggctgatcagagaccaggacctcggagcctcactgctcccagcagcacctcaggaacagtggagacaactggattccactcaaaaggagcaatactgggatctcatgctggagacctatgggaaaatggtctcaggagcaggcatttcccatcccaaatctgacctgactaattcaatagaatttggggaagagctggcaggaatataccttcatgtcaatgagaagatcccaagacccacctgcataggagatagacaagagaatgacaaggagaacctaaatttggagaatcacagggaccaggagctcctgcatgcttcctgtcaagcttcaggagaggttccttctcaggcttccttgaggggcttcttcactgaggatgagccaggatgctttggagaaggagagaatctccctgaggctctgcaaaacattcaggatgagggaacaggggaacagctgtctcctcaagaaaggatttctgagaaacaactaggtcagcatttgcctaatcctcattcaggagaaatgtccaccatgtggcttgaggagaagagagagacctcccagaaggggcagccaagagcccccatggcccagaagctccccacctgcagggagtgtgggaagaccttttataggaattctcagcttatttttcaccaaagaactcacaccggagagacatactttcagtgcaccatctgcaaaaaagcctttctgcggagttcagactttgtgaagcatcagagaactcacacgggagagaagccctgtaaatgtgattactgtgggaaaggctttagtgacttctcaggattgcgccaccacgagaaaatccacacaggagagaaaccctataaatgtcctatctgtgagaaaagtttcattcagagatcaaactttaatagacatcagagggttcacactggagagaaaccttataaatgttcgcactgtgggaaaagtttcagctggagctcgagccttgacaaacatcaaagatcccacttaggaaagaagccctttcaatagccagtaaccaaactctctttccccatttctatctcccagcccagtcacaaaaatactcagctccatcaagaggaattgtgtctaagaggatacccctgttaatctccttttttcttggattggagaggagagaatctggacatggctttggacttggaggatatcttggattggattgcacaatggcttaaattcttgattctgcctcaggagaaagaatagtcttcatgtttccactcatccttcctttggacccatcggggaaaaagtctaaattggagatccagttttagaagtgctttctgggaagcatttaatgggattagctgtagtcactgcttatgggaagaacctcagatcagccccttaaaatgagttctagagcaggtcttctgttccagaaggggagaagcatagagggcctgtgagctcacgtgtgttctttgtcataggggtgaaaaactaacttcaagtgtcccttgtttgaaataaacttagcagagtcactttct

SEQ ID NO: 201610 - DNA, 698 bp, Homo sapiens
  Payload ID: 19785
  Gene Name: zinc finger protein 18
  ENST ID: ENST00000577671
  CDS Start-End: 1-698
cacatcgtgaaagaggaatctgacacagaagcagaactagccctggctgcctcccagcctgcccgactggaggaaaggctgatcagagaccaggacctcggagcctcactgctcccagcagcacctcaggaacagtggagacaactggattccactcaaaaggagcaatactgggatctcatgctggagacctatgggaaaatggtctcaggaggagatagacaagagaatgacaaggagaacctaaatttggagaatcacagggaccaggagctcctgcatgcttcctgtcaagcttcaggagaggttccttctcaggcttccttgaggggcttcttcactgaggatgagccaggatgctttggagaaggagagaatctccctgaggctctgcaaaacattcaggatgagggaacaggggaacagctgtctcctcaagaaaggatttctgagaaacaactaggtcagcatttgcctaatcctcattcaggagaaatgtccaccatgtggcttgaggagaagagagagacctcccagaaggggcagccaagagcccccatggcccagaagctccccacctgcagggagtgtgggaagaccttttataggaattctcagcttatttttcaccaaagaactcacaccggagagacatactttcagtgcaccatctgcaaaaaagcctttctgcggagttc

SEQ ID NO: 201611 - DNA, 570 bp, Homo sapiens
  Payload ID: 19785
  Gene Name: zinc finger protein 18
  ENST ID: ENST00000580903
  CDS Start-End: 281-570
acccagctcccggaagtgcgcccggagccggcgccgcgggccgagtagagacggggtttcaccgtgttaaccaggatggtttcgatctcctgaccacgtgatccacctgcctcggcctcccaaagtgctgggattacaggcgtgagccaccatgcccagccttctcaccctctttaaccccaaggttgaaagtgtcagtgtcctggtgaagacctagttcttgccggagacaattccactgcagaagcactttacttaaaaggacttgccaggctggacaatgcccgttgacttggggcaggccctaggcctgctgccatcgctggcgaaggccgaggactcccagttctcagaatcagatgctgcccttcaagaggaactctccagccctgagaccgcacgccagcttttcaggcagttccgttaccaggtgatgtctgggcctcatgagaccttgaagcaacttcggaagctctgtttccagtggctacagccagaggttcacaccaaagagcagatcctagagatcctcatgttggagcagtttctgaccatcctgcctggggagat

SEQ ID NO: 201612 - DNA, 729 bp, Homo sapiens
  Payload ID: 19785
  Gene Name: zinc finger protein 18
  ENST ID: ENST00000582607
  CDS Start-End: 1-729
tctgagccacatcgtgaaagaggaatctgacacagaagcagaactagccctggctgcctcccagcctgcccgactggaggaaaggctgatcagagaccaggacctcggagcctcactgctcccagcagcacctcagtggagacaactggattccactcaaaaggagcaatactgggatctcatgctggagacctatgggaaaatggtctcaggaggcatttcccatcccaaatctgacctgactaattcaatagaatttggggaagagctggcaggaatataccttcatgtcaatgagaagatcccaagacccacctgcataggagatagacaagagaatgacaaggagaacctaaatttggagaatcacagggaccaggagctcctgcatgcttcctgtcaagcttcaggagaggttccttctcaggcttccttgaggggcttcttcactgaggatgagccaggatgctttggagaaggagagaatctccctgaggctctgcaaaacattcaggatgagggaacaggggaacagctgtctcctcaagaaaggatttctgagaaacaactaggtcagcatttgcctaatcctcattcaggagaaatgtccaccatgtggcttgaggagaagagagagacctcccagaaggggcagccaagagcccccatggcccagaagctccccacctgcagggagtgtgggaagaccttttataggaattctcagct

SEQ ID NO: 201613 - DNA, 2330 bp, Homo sapiens
  Payload ID: 19785
  Gene Name: zinc finger protein 18
  Uniprot ID: P17022
  ENST ID: ENST00000580306
  CDS Start-End: 163-1812
acgtcgttcgcctgccgcctgaggcgcgcgcagccacccagctcccggaagtgcgcccggagccggcgccgcgggccgagtgtcctggtgaagacctagttcttgccggagacaattccactgcagaagcactttacttaaaaggacttgccaggctggacaatgcccgttgacttggggcaggccctaggcctgctgccatcgctggcgaaggccgaggactcccagttctcagaatcagatgctgcccttcaagaggaactctccagccctgagaccgcacgccagcttttcaggcagttccgttaccaggtgatgtctgggcctcatgagaccttgaagcaacttcggaagctctgtttccagtggctacagccagaggttcacaccaaagagcagatcctagagatcctcatgttggagcagtttctgaccatcctgcctggggagatccagatgtgggtgcggaaacagtgtccaggaagtggagaagaggcagtgacccttgtggaaagcttgaagggggacccccagagactgtggcaatggatcagtatccaggttctaggacaggacatcttatcagagaagatggaatctccaagctgccaagtgggggaagtggagccccatcttgaagtggtgcctcaggagttgggacttgagaattcatcctcagggcctggggagcttctgagccacatcgtgaaagaggaatctgacacagaagcagaactagccctggctgcctcccagcctgcccgactggaggaaaggctgatcagagaccaggacctcggagcctcactgctcccagcagcacctcaggaacagtggagacaactggattccactcaaaaggagcaatactgggatctcatgctggagacctatgggaaaatggtctcaggagcaggcatttcccatcccaaatctgacctgactaattcaatagaatttggggaagagctggcaggaatataccttcatgtcaatgagaagatcccaagacccacctgcataggagatagacaagagaatgacaaggagaacctaaatttggagaatcacagggaccaggagctcctgcatgcttcctgtcaagcttcaggagaggttccttctcaggcttccttgaggggcttcttcactgaggatgagccaggatgctttggagaaggagagaatctccctgaggctctgcaaaacattcaggatgagggaacaggggaacagctgtctcctcaagaaaggatttctgagaaacaactaggtcagcatttgcctaatcctcattcaggagaaatgtccaccatgtggcttgaggagaagagagagacctcccagaaggggcagccaagagcccccatggcccagaagctccccacctgcagggagtgtgggaagaccttttataggaattctcagcttatttttcaccaaagaactcacaccggagagacatactttcagtgcaccatctgcaaaaaagcctttctgcggagttcagactttgtgaagcatcagagaactcacacgggagagaagccctgtaaatgtgattactgtgggaaaggctttagtgacttctcaggattgcgccaccacgagaaaatccacacaggagagaaaccctataaatgtcctatctgtgagaaaagtttcattcagagatcaaactttaatagacatcagagggttcacactggagagaaaccttataaatgttcgcactgtgggaaaagtttcagctggagctcgagccttgacaaacatcaaagatcccacttaggaaagaagccctttcaatagccagtaaccaaactctctttccccatttctatctcccagcccagtcacaaaaatactcagctccatcaagaggaattgtgtctaagaggatacccctgttaatctccttttttcttggattggagaggagagaatctggacatggctttggacttggaggatatcttggattggattgcacaatggcttaaattcttgattctgcctcaggagaaagaatagtcttcatgtttccactcatccttcctttggacccatcggggaaaaagtctaaattggagatccagttttagaagtgctttctgggaagcatttaatgggattagctgtagtcactgcttatgggaagaacctcagatcagccccttaaaatgagttctagagcaggtcttctgttccagaaggggagaagcatagagggcctgtgagctcacgtgtgttctttgtcataggggtgaaaaactaacttcaagtgtcccttgtttgaaataaacttagcagagtcactttctatctta

SEQ ID NO: 201614 - DNA, 4335 bp, Homo sapiens
  Payload ID: 19786
  Gene Name: zinc finger protein 180
  Uniprot ID: Q9UJW8
  ENST ID: ENST00000221327
  CDS Start-End: 283-2361
acaagagcagccattgtcccgcgcgcggacgcttgctgtcgccgagcagctcggcccttcagacttaacccccagcggccttgcggatgctgactaggagaggggaccgaactagcttaacccgagtcggccgtgttgcagaatcggggcagggggttgcctaacccgagttcgtcctgccgcagagccgtgctaggcactgaggcggtgacaggcccagcctgggctgcgggccagcggacgcccaggttggtaggggcgtggggcagcgcttggtgtccgatgcgcgcatgcgcagggtctacgcgggaagctggaagcggtgctcaggacctcagcaccctgctgtgcctggaggagagcatggaagagcaggatgagaagcccccagagcccccgaaggtctgtgcacaggattctttccttcctcaagagattatcatcaaagtcgagggagaagacactgggtctctgaccatcccatctcaggaaggagtgaacttcaaaattgtgactgtggacttcacacgggaggaacagggtacttgcaaccctgctcagaggaccctggacagagatgtgatcctggagaaccacagggacctagtctcttgggacttggcaactgcagttggaaaaaaagattcaacttcaaagcagaggatttttgatgaagaaccagctaatggagtgaagatagaaaggtttacaagggatgatccttggttatcttcatgtgaagaagtggatgattgtaaagaccagttggagaagcaacaggaaaaacaagagatacttttgcaggaagtggcattcactcaaaggaaagcagttattcatgagagagtctgcaaaagtgatgaaactggggagaagagtggtctgaattccagtctattttcatccccagttatacccataagaaaccattttcataaacatgtatcacatgctaaaaaatggcatcttaatgctgctgtaaacagtcatcagaagattaatgagaatgagacactatatgaaaataatgaatgtggaaaaccccctcagagcattcaccttattcagtttacaagaactcaaacaaaagataaatcctatggatttagtgaccgtattcaatctttttgccatggtacacccctacatatacatgaaaaaattcatggaggaggaaaaacctttgattttaaagaatgtgggcaggttttgaaccccaaaatatcccataatgaacaacagagaattccttttgaagagagtcaatataaatgtagtgaaacctctcatagttcctcccttactcaaaacatgagaaataattctgaagagaaaccttttgaatgtaatcagtgtgggaaatccttcagctggagctcgcatcttgttgcacatcagagaactcacacaggggagaaaccttatgaatgtagtgaatgtggaaaatccttcagccggagctcgcaccttgtttcccatcagagaactcatactggagagaaaccttacaggtgtaatcaatgtgggaaatcctttagccagagttatgtccttgttgtgcatcaaagaactcatactggggagaagccttatgaatgcaatcagtgtggaaagtcattcaggcagagctataaacttattgcacatcaaagaacacataccggagagaagccctatgaatgtaatcaatgtgggaaatcatttatccagagctataaacttattgcacatcaaagaattcatactggggaaaaaccctatgaatgcaatcagtgtgggaaatcctttagtcaaagttataaacttgttgctcatcagagaactcacacaggagaaaaaccctttgaatgtaatcagtgtgggaaatccttcagctggagctctcagcttgttgcacatcaaagaactcacactggagagaaaccgtatgaatgtagtgaatgtggaaaatcttttaaccgcagttctcaccttgttatgcatcagagaattcacactggggaaaaaccgtatgaatgtaatcagtgtgggaaatccttcagccagagttatgttcttgttgtacatcagagaactcatactggagaaaagccctatgaatgcagtcaatgtgggaagtccttcagacagagttcatgccttactcaacatcagagaactcatactggagagaaaccatttgaatgtaatcagtgtggaaaaacatttagcttgagtgctcgacttattgtgcatcaaagaactcatactggagagaaaccctttacatgtattcagtgtggaaaagctttcattaatagctataaacttattaggcatcaggcaactcatactgaagagaaactctatgaatgtaactagtttgtaaatcagctgggatttcttcctttttatttcattcttttaaaaaatttattttaaggtagtacatgtagttggaagaactactataaaaacaatatatgtgggaaaacttccagccctctgttaattgtgtgtctcaaatttgttctggaaaagaaagggggaaagtctatgaacgacttttcaacctggcaattccatatacaatgttaaacttgattcttatgacatattcctatgaaaataataaatactggcacttttccttgcagaaagcactcagacctgaatcagagaaaatcatatgccaaagccaactgccagtgttagacctctttttccataaagagtaaatggaatgctaacactagtgggcttattgagaaaatttaaaggttgctgtagtgtttagaacttaggctggaaaaccatattttagtgcatcattttactacatgatcttccaattagatagcttgtaatctgttccttacagcacttgctgttgttacatgtgaagattttataaattttaggaaagtgtctatgatatatagtgaaaagtgtgggaaaagaatatagaaataatattcacttctaaaaccattatgataaaatatttgtgtatggattagaatagaaagggattatggatgtatctattcaatttctcagtttatgttgggccttcctttttggaatgtacgctgttatgctatgataaatgatataatgagtaaaaattattcaaagccaaaaatgaaatacaaagatttccttctttgactatttaggaaagactaagcaaccaaatagcaaagatccctcaggataatgaggtttatgtttggaatagcatgagcagattactacttaggacatagattcctaggaacattcctcattgaaaataaaatggattcctggaaataggtaactagaaattttggccagaaatggtttcatatgaagaactgagaatgcgtgggaagtatagagggcaagtgggcttattttcatatatgcaaagcaatattaaggaactctattttcatgttttagttcttcccctcatgtagcattgtctctttcctctgggatatgttccctgatgtgagagtcctctgaatagaagggtgcttccctggctcagtgctgaccgtctaaattatgcttgcaaaaatgctttcatgaggcaaagttttagttactctttgatatttaagatttgattaacatgtctttctgacctttcccttgaatcatgaatttgaatcctgtggatgaccatatattgaagcctctgatcccagaaaggtaataagctgaaagttgaactgagagaccagataatagaggttaatacccttgggataggaaagaaaacttaaagggtaactgatggggttatccttagcaaaattctatccctatgagatgaccctaagtggagccatctctatgaggattaatccagagattgttgcacacctggcagtgtcaggtctgggaaaacagttgctgatgttttcatggagtgtgaaatactgaaagctgcgggcatcccttggggaccactgacccacactttgaagaaccctcaatgagtctgaaagaggttcagtatctcttgggaaggatgtgttccaggctccaggcctagtcttacatggccagtggggttgaaagactgtgcccctgcaatggtcttttcctaagacagttgaacaaagttccaagtctgtctgtcctattttaaccatctttaagaagcacaaaggggatatgagaaaaacagatgctgaaatgaaaattttaactgatatcttacttatctcacaagtcgtgtaaagaaagaaatgatatggtcgaatattagattagatggtttaatgatgttttgagtgttatatatgagctatgatgagacctagaaaataaagtaaaaataaaaaatatataagccatgaa

SEQ ID NO: 201615 - DNA, 3049 bp, Homo sapiens
  Payload ID: 19786
  Gene Name: zinc finger protein 180
  ENST ID: ENST00000391956
  CDS Start-End: 281-2284
aagagcagccattgtcccgcgcgcggacgcttgctgtcgccgagcagctcggcccttcagacttaacccccagcggccttgcggatgctgactaggagaggggaccgaactagcttaacccgagtcggccgtgttgcagaatcggggcagggggttgcctaacccgagttcgtcctgccgcagagccgtgctaggcactgaggcggtgacaggcccagcctgggctgcgggccagcggacgcccaggttggtaggggcgtggggcagcgcttggtgtccgatgcgcgcatgcgcagggtctacgcgggaagctggaagcggtgctcaggacctcagcaccctgctgtgcctggaggagagcatggaagagcaggatgagaagcccccagagcccccgaaggtctgtgcacaggaaggagtgaacttcaaaattgtgactgtggacttcacacgggaggaacagggtacttgcaaccctgctcagaggaccctggacagagatgtgatcctggagaaccacagggacctagtctcttgggacttggcaactgcagttggaaaaaaagattcaacttcaaagcagaggatttttgatgaagaaccagctaatggagtgaagatagaaaggtttacaagggatgatccttggttatcttcatgtgaagaagtggatgattgtaaagaccagttggagaagcaacaggaaaaacaagagatacttttgcaggaagtggcattcactcaaaggaaagcagttattcatgagagagtctgcaaaagtgatgaaactggggagaagagtggtctgaattccagtctattttcatccccagttatacccataagaaaccattttcataaacatgtatcacatgctaaaaaatggcatcttaatgctgctgtaaacagtcatcagaagattaatgagaatgagacactatatgaaaataatgaatgtggaaaaccccctcagagcattcaccttattcagtttacaagaactcaaacaaaagataaatcctatggatttagtgaccgtattcaatctttttgccatggtacacccctacatatacatgaaaaaattcatggaggaggaaaaacctttgattttaaagaatgtgggcaggttttgaaccccaaaatatcccataatgaacaacagagaattccttttgaagagagtcaatataaatgtagtgaaacctctcatagttcctcccttactcaaaacatgagaaataattctgaagagaaaccttttgaatgtaatcagtgtgggaaatccttcagctggagctcgcatcttgttgcacatcagagaactcacacaggggagaaaccttatgaatgtagtgaatgtggaaaatccttcagccggagctcgcaccttgtttcccatcagagaactcatactggagagaaaccttacaggtgtaatcaatgtgggaaatcctttagccagagttatgtccttgttgtgcatcaaagaactcatactggggagaagccttatgaatgcaatcagtgtggaaagtcattcaggcagagctataaacttattgcacatcaaagaacacataccggagagaagccctatgaatgtaatcaatgtgggaaatcatttatccagagctataaacttattgcacatcaaagaattcatactggggaaaaaccctatgaatgcaatcagtgtgggaaatcctttagtcaaagttataaacttgttgctcatcagagaactcacacaggagaaaaaccctttgaatgtaatcagtgtgggaaatccttcagctggagctctcagcttgttgcacatcaaagaactcacactggagagaaaccgtatgaatgtagtgaatgtggaaaatcttttaaccgcagttctcaccttgttatgcatcagagaattcacactggggaaaaaccgtatgaatgtaatcagtgtgggaaatccttcagccagagttatgttcttgttgtacatcagagaactcatactggagaaaagccctatgaatgcagtcaatgtgggaagtccttcagacagagttcatgccttactcaacatcagagaactcatactggagagaaaccatttgaatgtaatcagtgtggaaaaacatttagcttgagtgctcgacttattgtgcatcaaagaactcatactggagagaaaccctttacatgtattcagtgtggaaaagctttcattaatagctataaacttattaggcatcaggcaactcatactgaagagaaactctatgaatgtaactagtttgtaaatcagctgggatttcttcctttttatttcattcttttaaaaaatttattttaaggtagtacatgtagttggaagaactactataaaaacaatatatgtgggaaaacttccagccctctgttaattgtgtgtctcaaatttgttctggaaaagaaagggggaaagtctatgaacgacttttcaacctggcaattccatatacaatgttaaacttgattcttatgacatattcctatgaaaataataaatactggcacttttccttgcagaaagcactcagacctgaatcagagaaaatcatatgccaaagccaactgccagtgttagacctctttttccataaagagtaaatggaatgctaacactagtgggcttattgagaaaatttaaaggttgctgtagtgtttagaacttaggctggaaaaccatattttagtgcatcattttactacatgatcttccaattagatagcttgtaatctgttccttacagcacttgctgttgttacatgtgaagattttataaattttaggaaagtgtctatgatatatagtgaaaagtgtgggaaaagaatatagaaataatattcacttctaaaaccattatgataaaatatttgtgtatggattagaatagaaagggattatggatgtatctattcaatttctcagtttatgttgggccttcctttttggaatgtacgctgttatgctatgataaatgatataatgagtaaaaattattcaaagccaaaaatg

SEQ ID NO: 201616 - DNA, 525 bp, Homo sapiens
  Payload ID: 19786
  Gene Name: zinc finger protein 180
  ENST ID: ENST00000587047
  CDS Start-End: 271-468
attgtcccgcgcgcggacgcttgctgtcgccgagcagctcggcccttcagacttaacccccagcggccttgcggatgctgactaggagaggggaccgaactagcttaacccgagtcggccgtgttgcagaatcggggcagggggttgcctaacccgagttcgtcctgccgcagagccgtgctaggcactgaggcggtgacaggcccagcctgggctgcgggccagcggacgcccaggttggtaggggcgtggggcagcgcttggtgtccgatgcgcgcatgcgcagggtctacgcgggaagctggaagcggtgtgcagctcaggacctcagcaccctgctgtgcctggaggagagcatggaagagcaggatgagaagcccccagagcccccgaaggtctgtgcacaggattctttccttcctcaagagattatcatcaaagtcgagggagaagacactgggtctctgaccatcccatctcagacttggcaactgcagttggaaaaaaagattcaacttcaaagca

SEQ ID NO: 201617 - DNA, 3270 bp, Homo sapiens
  Payload ID: 19786
  Gene Name: zinc finger protein 180
  ENST ID: ENST00000592095
  CDS Start-End: 265-417
gacgcttgctgtcgccgagcagctcggcccttcagacttaacccccagcggccttgcggatgctgactaggagaggggaccgaactagcttaacccgagtcggccgtgttgcagaatcggggcagggggttgcctaacccgagttcgtcctgccgcagagccgtgctaggcactgaggcggtgacaggcccagcctgggctgcgggccagcggacgcccagtgcagctcaggacctcagcaccctgctgtgcctggaggagagcatggaagagcaggatgagaagcccccagagcccccgaaggtctgtgcacagagtcttgctctgtcgtccaggttggagtgcagtgacacaatcctagctcactgccgcctcaaacttctgggctcaagccatcctcctgcctcagccgcctgaataggtgggactacaggaattttggcaggtcccgctggacagttcttagcgtcttagtgctccttagtgtcttggatcactcagtcagctgcatttagctgcaatgggctggcccagaagacccaaaaagacctcatgtccaggattctttccttcctcaagagattatcatcaaagtcgagggagaagacactgggtctctgaccatcccatctcaggaaggagtgaacttcaaaattgtgactgtggacttcacacgggaggaacagggtacttgcaaccctgctcagaggaccctggacagagatgtgatcctggagaaccacagggacctagtctcttgggacttggcaactgcagttggaaaaaaagattcaacttcaaagcagaggatttttgatgaagaaccagctaatggagtgaagatagaaaggtttacaagggatgatccttggttatcttcatgtgaagaagtggatgattgtaaagaccagttggagaagcaacaggaaaaacaagagatacttttgcaggaagtggcattcactcaaaggaaagcagttattcatgagagagtctgcaaaagtgatgaaactggggagaagagtggtctgaattccagtctattttcatccccagttatacccataagaaaccattttcataaacatgtatcacatgctaaaaaatggcatcttaatgctgctgtaaacagtcatcagaagattaatgagaatgagacactatatgaaaataatgaatgtggaaaaccccctcagagcattcaccttattcagtttacaagaactcaaacaaaagataaatcctatggatttagtgaccgtattcaatctttttgccatggtacacccctacatatacatgaaaaaattcatggaggaggaaaaacctttgattttaaagaatgtgggcaggttttgaaccccaaaatatcccataatgaacaacagagaattccttttgaagagagtcaatataaatgtagtgaaacctctcatagttcctcccttactcaaaacatgagaaataattctgaagagaaaccttttgaatgtaatcagtgtgggaaatccttcagctggagctcgcatcttgttgcacatcagagaactcacacaggggagaaaccttatgaatgtagtgaatgtggaaaatccttcagccggagctcgcaccttgtttcccatcagagaactcatactggagagaaaccttacaggtgtaatcaatgtgggaaatcctttagccagagttatgtccttgttgtgcatcaaagaactcatactggggagaagccttatgaatgcaatcagtgtggaaagtcattcaggcagagctataaacttattgcacatcaaagaacacataccggagagaagccctatgaatgtaatcaatgtgggaaatcatttatccagagctataaacttattgcacatcaaagaattcatactggggaaaaaccctatgaatgcaatcagtgtgggaaatcctttagtcaaagttataaacttgttgctcatcagagaactcacacaggagaaaaaccctttgaatgtaatcagtgtgggaaatccttcagctggagctctcagcttgttgcacatcaaagaactcacactggagagaaaccgtatgaatgtagtgaatgtggaaaatcttttaaccgcagttctcaccttgttatgcatcagagaattcacactggggaaaaaccgtatgaatgtaatcagtgtgggaaatccttcagccagagttatgttcttgttgtacatcagagaactcatactggagaaaagccctatgaatgcagtcaatgtgggaagtccttcagacagagttcatgccttactcaacatcagagaactcatactggagagaaaccatttgaatgtaatcagtgtggaaaaacatttagcttgagtgctcgacttattgtgcatcaaagaactcatactggagagaaaccctttacatgtattcagtgtggaaaagctttcattaatagctataaacttattaggcatcaggcaactcatactgaagagaaactctatgaatgtaactagtttgtaaatcagctgggatttcttcctttttatttcattcttttaaaaaatttattttaaggtagtacatgtagttggaagaactactataaaaacaatatatgtgggaaaacttccagccctctgttaattgtgtgtctcaaatttgttctggaaaagaaagggggaaagtctatgaacgacttttcaacctggcaattccatatacaatgttaaacttgattcttatgacatattcctatgaaaataataaatactggcacttttccttgcagaaagcactcagacctgaatcagagaaaatcatatgccaaagccaactgccagtgttagacctctttttccataaagagtaaatggaatgctaacactagtgggcttattgagaaaatttaaaggttgctgtagtgtttagaacttaggctggaaaaccatattttagtgcatcattttactacatgatcttccaattagatagcttgtaatctgttccttacagcacttgctgttgttacatgtgaagattttataaattttaggaaagtgtctatgatatatagtgaaaagtgtgggaaaagaatatagaaataatattcacttctaaaaccattatgataaaatatttgtgtatggattagaatagaaagggattatggatgtatctattcaatttctcagtttatgttgggccttcctttttggaatgtacgctgttatgctatgataaatgatataatgagtaaaaattattcaaagccaaaaa

SEQ ID NO: 201618 - DNA, 1023 bp, Homo sapiens
  Payload ID: 19786
  Gene Name: zinc finger protein 180
  ENST ID: ENST00000586637
  CDS Start-End: 305-721
acaagagcagccattgtcccgcgcgcggacgcttgctgtcgccgagcagctcggcccttcagacttaacccccagcggccttgcggatgctgactaggagaggggaccgaactagcttaacccgagtcggccgtgttgcagaatcggggcagggggttgcctaacccgagttcgtcctgccgcagagccgtgctaggcactgaggcggtgacaggcccagcctgggctgcgggccagcggacgcccagtgcagctcaggacctcagcaccctgctgtgcctggaggagagcatggaagagcaggatgagaagcccccagagcccccgaaggtctgtgcacagatggagtcttgctctgttgcctaggctggagtacagtggcatgatcttggatcactgcaacctccacctcctgtgttcaagtgattctcctgcctcagcctcccaagtagctgggactacaggattctttccttcctcaagagattatcatcaaagtcgagggagaagacactgggtctctgaccatcccatctcaggaaggagtgaacttcaaaattgtgactgtggacttcacacgggaggaacagggtacttgcaaccctgctcagaggaccctggacagagatgtgatcctggagaaccacagggacctagtctcttgggacttggcaactgcagttggaaaaaaagattcaacttcaaagcagaggatttttgatgaagaaccagctaatggagtgaagatagaaaggtttacaagggatgatccttggttatcttcatgtgaagaagtggatgattgtaaagaccagttggagaagcaacaggaaaaacaagagatacttttgcaggaagtggcattcactcaaaggaaagcagttattcatgagagagtctgcaaaagtgatgaaactggggagaagagtggtctgaattccagtctattttcatccccagttatacccataagaaaccattttcataaacatgtatcacatgctaaaaaatggcatcttaatg

SEQ ID NO: 201619 - DNA, 837 bp, Homo sapiens
  Payload ID: 19786
  Gene Name: zinc finger protein 180
  ENST ID: ENST00000591064
  CDS Start-End: 287-837
acaagagcagccattgtcccgcgcgcggacgcttgctgtcgccgagcagctcggcccttcagacttaacccccagcggccttgcggatgctgactaggagaggggaccgaactagcttaacccgagtcggccgtgttgcagaatcggggcagggggttgcctaacccgagttcgtcctgccgcagagccgtgctaggcactgaggcggtgacaggcccagcctgggctgcgggccagcggacgcccagctcaggacctcagcaccctgctgtgcctggaggagagcatggaagagcaggatgagaagcccccagagcccccgaaggtctgtgcacaggattctttccttcctcaagagattatcatcaaagtcgagggagaagacactgggtctctgaccatcccatctcaggaaggagtgaacttcaaaattgtgactgtggacttcacacgggaggaacagggtacttgcaaccctgctcagaggaccctggacagagatgtgatcctggagaaccacagggacctagtctcttgggacttggcaactgcagttggaaaaaaagattcaacttcaaagcagaggatttttgatgaagaaccagctaatggagtgaagatagaaaggtttacaagggatgatccttggttatcttcatgtgaagaagtggatgattgtaaagaccagttggagaagcaacaggaaaaacaagagatacttttgcaggaagtggcattcactcaaaggaaagcagttattcatgagagagtctgcaaaagtgatgaaactggggagaagagtggtctgaattccagtctattttcatccccagttat

SEQ ID NO: 201620 - DNA, 3048 bp, Homo sapiens
  Payload ID: 19786
  Gene Name: zinc finger protein 180
  ENST ID: ENST00000592529
  CDS Start-End: 293-2290
cacaagagcagccattgtcccgcgcgcggacgcttgctgtcgccgagcagctcggcccttcagacttaacccccagcggccttgcggatgctgactaggagaggggaccgaactagcttaacccgagtcggccgtgttgcagaatcggggcagggggttgcctaacccgagttcgtcctgccgcagagccgtgctaggcactgaggcggtgacaggcccagcctgggctgcgggccagcggacgcccagtgcagctcaggacctcagcaccctgctgtgcctggaggagagcatggaagagcaggatgagaagcccccagagcccccgaaggtctgtgcacaggattctttccttcctcaagagattatcatcaaagtcgagggagaagacactgggtctctgaccatcccatctcaggaaggagtgaacttcaaaattgtgactgtggacttcacacgggaggaacagggtacttgcaaccctgctcagaggaccctggacagagatgtgatcctggagaaccacagggacctagtctcttgggacttggcaactgcagttggaaaaaaagattcaacttcaaagcagaggatttttgatgaagaaccagctaatggagtgaagatagaaaggtttacaagggatgatccttggttatcttcatgtgaagaagtggatgattgtaaagaccagttggagaagcaacaggaaaaacaagagatacttttgcaggaagtggcattcactcaaaggaaagcagttattcatgagagagtctgcaaaagtgatgaaactggggagaagagtggtctgaattccagtctattttcatccccagttatacccataagaaaccattttcataaacatgtatcacatgctaaaaaatggcatcttaatgctgctgtaaacagtcatcagaagattaatgagaatgagacactatatgaaaataatgaatgtggaaaaccccctcagagcattcaccttattcagtttacaagaactcaaacaaaagataaatcctatggatttagtgaccgtattcaatctttttgccatggtacacccctacatatacatgaaaaaattcatggaggaggaaaaacctttgattttaaagaatgtgggcaggttttgaaccccaaaatatcccataatgaacaacagagaattccttttgaagagagtcaatataaatgtagtgaaacctctcatagttcctcccttactcaaaacatgagaaataattctgaagagaaaccttttgaatgtaatcagtgtgggaaatccttcagctggagctcgcatcttgttgcacatcagagaactcacacaggggagaaaccttatgaatgtagtgaatgtggaaaatccttcagccggagctcgcaccttgtttcccatcagagaactcatactggagagaaaccttacaggtgtaatcaatgtgggaaatcctttagccagagttatgtccttgttgtgcatcaaagaactcatactggggagaagccttatgaatgcaatcagtgtggaaagtcattcaggcagagctataaacttattgcacatcaaagaacacataccggagagaagccctatgaatgtaatcaatgtgggaaatcatttatccagagctataaacttattgcacatcaaagaattcatactggggaaaaaccctatgaatgcaatcagtgtgggaaatcctttagtcaaagttataaacttgttgctcatcagagaactcacacaggagaaaaaccctttgaatgtaatcagtgtgggaaatccttcagctggagctctcagcttgttgcacatcaaagaactcacactggagagaaaccgtatgaatgtagtgaatgtggaaaatcttttaaccgcagttctcaccttgttatgcatcagagaattcacactggggaaaaaccgtatgaatgtaatcagtgtgggaaatccttcagccagagttatgttcttgttgtacatcagagaactcatactggagaaaagccctatgaatgcagtcaatgtgggaagtccttcagacagagttcatgccttactcaacatcagagaactcatactggagagaaaccatttgaatgtaatcagtgtggaaaaacatttagcttgagtgctcgacttattgtgcatcaaagaactcatactggagagaaaccctttacatgtattcagtgtggaaaagctttcattaatagctataaacttattaggcatcaggcaactcatactgaagagaaactctatgaatgtaactagtttgtaaatcagctgggatttcttcctttttatttcattcttttaaaaaatttattttaaggtagtacatgtagttggaagaactactataaaaacaatatatgtgggaaaacttccagccctctgttaattgtgtgtctcaaatttgttctggaaaagaaagggggaaagtctatgaacgacttttcaacctggcaattccatatacaatgttaaacttgattcttatgacatattcctatgaaaataataaatactggcacttttccttgcagaaagcactcagacctgaatcagagaaaatcatatgccaaagccaactgccagtgttagacctctttttccataaagagtaaatggaatgctaacactagtgggcttattgagaaaatttaaaggttgctgtagtgtttagaacttaggctggaaaaccatattttagtgcatcattttactacatgatcttccaattagatagcttgtaatctgttccttacagcacttgctgttgttacatgtgaagattttataaattttaggaaagtgtctatgatatatagtgaaaagtgtgggaaaagaatatagaaataatattcacttctaaaaccattatgataaaatatttgtgtatggattagaatagaaagggattatggatgtatctattcaatttctcagtttatgttgggccttcctttttggaatgtacgctgttatgctatgataaatgatataatgagtaaaaattattcaaagcc

SEQ ID NO: 201621 - DNA, 3131 bp, Homo sapiens
  Payload ID: 19786
  Gene Name: zinc finger protein 180
  ENST ID: ENST00000590088
  CDS Start-End: 285-482
ccacaagagcagccattgtcccgcgcgcggacgcttgctgtcgccgagcagctcggcccttcagacttaacccccagcggccttgcggatgctgactaggagaggggaccgaactagcttaacccgagtcggccgtgttgcagaatcggggcagggggttgcctaacccgagttcgtcctgccgcagagccgtgctaggcactgaggcggtgacaggcccagcctgggctgcgggccagcggacgcccaggttggtaggggcgtggggcagcgcttggtgtccgatgcgcgcatgcgcagggtctacgcgggaagctggaagcggtgtgcagctcaggacctcagcaccctgctgtgcctggaggagagcatggaagagcaggatgagaagcccccagagcccccgaaggtctgtgcacaggattctttccttcctcaagagattatcatcaaagtcgagggagaagacactgggtctctgaccatcccatctcaggaaggagtgaacttcaaaattgtgactgtggacttcacacgggaggaacagggtacttgcaaccctgctcagaggaccctggacagagatgtgatcctggagaaccacagggacctagtctcttgggacttggcaactgcagttggaaaaaaagattcaacttcaaagcagaggatttttgatgaagaaccagctaatggagtgaagatagaaaggtttacaagggatgatccttggttatcttcatgtgaagaagtggatgattgtaaagaccagttggagaagcaacaggaaaaacaagagatacttttgcaggaagtggcattcactcaaaggaaagcagttattcatgagagagtctgcaaaagtgatgaaactggggagaagagtggtctgaattccagtctattttcatccccagttatacccataagaaaccattttcataaacatgtatcacatgctaaaaaatggcatcttaatgctgctgtaaacagtcatcagaagattaatgagaatgagacactatatgaaaataatgaatgtggaaaaccccctcagagcattcaccttattcagtttacaagaactcaaacaaaagataaatcctatggatttagtgaccgtattcaatctttttgccatggtacacccctacatatacatgaaaaaattcatggaggaggaaaaacctttgattttaaagaatgtgggcaggttttgaaccccaaaatatcccataatgaacaacagagaattccttttgaagagagtcaatataaatgtagtgaaacctctcatagttcctcccttactcaaaacatgagaaataattctgaagagaaaccttttgaatgtaatcagtgtgggaaatccttcagctggagctcgcatcttgttgcacatcagagaactcacacaggggagaaaccttatgaatgtagtgaatgtggaaaatccttcagccggagctcgcaccttgtttcccatcagagaactcatactggagagaaaccttacaggtgtaatcaatgtgggaaatcctttagccagagttatgtccttgttgtgcatcaaagaactcatactggggagaagccttatgaatgcaatcagtgtggaaagtcattcaggcagagctataaacttattgcacatcaaagaacacataccggagagaagccctatgaatgtaatcaatgtgggaaatcatttatccagagctataaacttattgcacatcaaagaattcatactggggaaaaaccctatgaatgcaatcagtgtgggaaatcctttagtcaaagttataaacttgttgctcatcagagaactcacacaggagaaaaaccctttgaatgtaatcagtgtgggaaatccttcagctggagctctcagcttgttgcacatcaaagaactcacactggagagaaaccgtatgaatgtagtgaatgtggaaaatcttttaaccgcagttctcaccttgttatgcatcagagaattcacactggggaaaaaccgtatgaatgtaatcagtgtgggaaatccttcagccagagttatgttcttgttgtacatcagagaactcatactggagaaaagccctatgaatgcagtcaatgtgggaagtccttcagacagagttcatgccttactcaacatcagagaactcatactggagagaaaccatttgaatgtaatcagtgtggaaaaacatttagcttgagtgctcgacttattgtgcatcaaagaactcatactggagagaaaccctttacatgtattcagtgtggaaaagctttcattaatagctataaacttattaggcatcaggcaactcatactgaagagaaactctatgaatgtaactagtttgtaaatcagctgggatttcttcctttttatttcattcttttaaaaaatttattttaaggtagtacatgtagttggaagaactactataaaaacaatatatgtgggaaaacttccagccctctgttaattgtgtgtctcaaatttgttctggaaaagaaagggggaaagtctatgaacgacttttcaacctggcaattccatatacaatgttaaacttgattcttatgacatattcctatgaaaataataaatactggcacttttccttgcagaaagcactcagacctgaatcagagaaaatcatatgccaaagccaactgccagtgttagacctctttttccataaagagtaaatggaatgctaacactagtgggcttattgagaaaatttaaaggttgctgtagtgtttagaacttaggctggaaaaccatattttagtgcatcattttactacatgatcttccaattagatagcttgtaatctgttccttacagcacttgctgttgttacatgtgaagattttataaattttaggaaagtgtctatgatatatagtgaaaagtgtgggaaaagaatatagaaataatattcacttctaaaaccattatgataaaatatttgtgtatggattagaatagaaagggattatggatgtatctattcaatttctcagtttatgttgggccttcctttttggaatgtacgctgttatgctatgataaatgatataatgagtaaaaattattcaaagccaaaaa

SEQ ID NO: 201622 - DNA, 2791 bp, Homo sapiens
  Payload ID: 19787
  Gene Name: zinc finger protein 181
  ENST ID: ENST00000392232
  CDS Start-End: 169-2016
cggttcgttgcgcctggaattttgtcccctgcgcggatgattctgggaaatgtcgatcggctgtgggcggcgcactgggtccgccccgctgtagcctcaggacactgcccatctctaagataagagcctggaaagaggactctgttggctgttggaaattgcagagtaatgcctcagcttcagtacccagagggttacctggcaccaaatagatgcttagtaagtaattgtggagtgaataagatgagtaatgacgaactggtggggcagaatcatggcatggaaggtgaagcttgcataggaggggatgtgacatttaatgatgtggctatagacttcactcatgaagagtggggatggctcagttctgctcagagggacttatacaaggatgtgatggtccagaattatgagaacctggtctctgtagcaggtctttctgtaactaagccatatgtgatcacgttattggaggatggaaaagagccctggatgatggagaaaaaactgtcaaaaggtatgattccagattgggaatcaagatgggaaaacaaggaattatcaacaaagaaggataattatgatgaagattcaccccaaacagtaataatagaaaaagttgtaaaacaaagttatgaattttcaaattctaagaagaatttggaatatatagagaagttggaagggaagcatggaagtcaggtagaccatttcagaccagcaattctcacctctagagaaagccccactgcagacagtgtttacaaatacaatatatttagaagcacctttcattcaaagtctactctttctgaaccacaaaaaatttctgctgaagggaattcacacaaatatgatatattaaagaagaacttaccaaaaaagtcagttataaaaaatgagaaagtcaatggtggaaagaaacttttgaattctaataaaagtggggcagccttcagccagggcaaatctcttacccttccccagacttgtaatagagagaaaatctatacatgcagtgaatgtgggaaagcctttggcaaacagtcaatcctcaatcgccactggagaattcatacaggagagaagccctatgaatgtcgtgaatgtgggaagacttttagccatggctcatcccttacacgacatctgataagccatagtggagagaaaccttacaaatgtattgaatgtgggaaggcctttagccatgtctcatcacttactaaccatcagagcactcacactggagagaaaccatatgaatgtatgaactgtggaaagtcttttagtcgtgtgtcccatcttattgaacatctaagaattcatactcaagaaaaactctatgagtgtcgtatatgtggaaaggccttcattcataggtcatctctcattcaccatcagaaaatccatactggagagaagccttatgaatgtagagaatgtgggaaagctttctgctgtagctcacaccttactcgacatcaaagaattcacactatggagaaacaatatgaatgcaacaaatgtctgaaagtctttagtagcctctcatttcttgttcagcatcagagtattcatactgaagaaaaaccctttgaatgtcagaaatgcaggaaatccttcaaccagcttgaatcactgaatatgcatttgagaaatcacattagattgaaaccctacgaatgcagtatatgtgggaaagcctttagtcataggtcatccctgcttcaacatcacagaattcatactggagagaaaccttatgaatgtattaaatgtgggaagaccttcagctgtagttcaaaccttaccgtacatcagagaattcacactggagaaaagccatataaatgtaatgagtgtgggaaagcttttagcaaaggctcaaatcttactgcccatcaaagagtacataatggagagaaacccaatagtgtggtaagtgtggaaaagcctttagactatatgaatcactatacatgtgagaaatcttacagaagagaaactgtatgaagcagtggttatcatggtaaatttcctagattctcccttatttaacattagaaaaatttatactggggaaagtcttatgaatgtggtgaatataggaagaccttttagcaaagatgcaggccagtttgtttattagactttatactgtagagaaatcatatgaagaccataaatgtgggaaagcctttgtcagtattaatcccttaattgacataagtatactcacactaggataaaaccctgtacatgtagcaaatgtgggaaagactacagacaataggaatcttttacaaactcctacaggagagaagctgtatgaatgtagaaaatttagaaattgagggaagtcttcagttccaagtatatcccttattctacagcagagaactcaaaatggagagaaatctcatttaagagatgtagcaaagtgttcactaagagtgtttatcttggtacacatcagaagattaatggtagaacaacctgaaggatttaggagttatgtgtaaatctttgcagtcatgctatttgtaaactggattctacaggagagcaaataaacattataataaaatatgcatttcttagagcagtagcttgcagtttcagttgagttctacttagaaattctttttagctagtgggcatgtgaagatatttagtcacccagaggagccagtaagtgttataatattgaaaattaaagctgcaaaagaaataaagtgatgttaataaaagttttggcatctaataaaatcattttgtatatcacaaa

SEQ ID NO: 201623 - DNA, 2265 bp, Homo sapiens
  Payload ID: 19787
  Gene Name: zinc finger protein 181
  Uniprot ID: Q2M3W8
  ENST ID: ENST00000459757
  CDS Start-End: 464-2176
ctttgggttatgtcgtcatgaagccggcgctctacagttgtgtaaccttgaacaaatgggttcagtatcttggaatttcagttttgtcatcgtttaaaaaatagatctggaaaaatgtgaacgcacaccgtgcatagtggtgaagactgaacgagctgataaagtttttaccattgttttatgaggattttatttacagagtaattgattttcctcgcaggtggcacctggtaaatggttagcccttgcggagaaacaccctgttagttcccagggagagattggcgccctggagagtgattaccagtgtgcctttccattatggtgtgtcacaggtgccgcaagataagcctgatttttcatgactgctttttcctgcccttctgtgccctcaggacactgcccatctctaagataagagcctggaaagaggactctgttggctgttggaaattgcagagtaatgcctcaggtgacatttaatgatgtggctatagacttcactcatgaagagtggggatggctcagttctgctcagagggacttatacaaggatgtgatggtccagaattatgagaacctggtctctgtaggtctttctgtaactaagccatatgtgatcacgttattggaggatggaaaagagccctggatgatggagaaaaaactgtcaaaaggtatgattccagattgggaatcaagatgggaaaacaaggaattatcaacaaagaaggataattatgatgaagattcaccccaaacagtaataatagaaaaagttgtaaaacaaagttatgaattttcaaattctaagaagaatttggaatatatagagaagttggaagggaagcatggaagtcaggtagaccatttcagaccagcaattctcacctctagagaaagccccactgcagacagtgtttacaaatacaatatatttagaagcacctttcattcaaagtctactctttctgaaccacaaaaaatttctgctgaagggaattcacacaaatatgatatattaaagaagaacttaccaaaaaagtcagttataaaaaatgagaaagtcaatggtggaaagaaacttttgaattctaataaaagtggggcagccttcagccagggcaaatctcttacccttccccagacttgtaatagagagaaaatctatacatgcagtgaatgtgggaaagcctttggcaaacagtcaatcctcaatcgccactggagaattcatacaggagagaagccctatgaatgtcgtgaatgtgggaagacttttagccatggctcatcccttacacgacatctgataagccatagtggagagaaaccttacaaatgtattgaatgtgggaaggcctttagccatgtctcatcacttactaaccatcagagcactcacactggagagaaaccatatgaatgtatgaactgtggaaagtcttttagtcgtgtgtcccatcttattgaacatctaagaattcatactcaagaaaaactctatgagtgtcgtatatgtggaaaggccttcattcataggtcatctctcattcaccatcagaaaatccatactggagagaagccttatgaatgtagagaatgtgggaaagctttctgctgtagctcacaccttactcgacatcaaagaattcacactatggagaaacaatatgaatgcaacaaatgtctgaaagtctttagtagcctctcatttcttgttcagcatcagagtattcatactgaagaaaaaccctttgaatgtcagaaatgcaggaaatccttcaaccagcttgaatcactgaatatgcatttgagaaatcacattagattgaaaccctacgaatgcagtatatgtgggaaagcctttagtcataggtcatccctgcttcaacatcacagaattcatactggagagaaaccttatgaatgtattaaatgtgggaagaccttcagctgtagttcaaaccttaccgtacatcagagaattcacactggagaaaagccatataaatgtaatgagtgtgggaaagcttttagcaaaggctcaaatcttactgcccatcaaagagtacataatggagagaaacccaatagtgtggtaagtgtggaaaagcctttagactatatgaatcactatacatgtgagaaatcttacagaagagaaactgtatgaagcagtggttatcatggtaaatttcctagattctcccttatttaacattagaaaaatttatactggggaaagtcttatgaatgtggtga

SEQ ID NO: 201624 - DNA, 5086 bp, Homo sapiens
  Payload ID: 19787
  Gene Name: zinc finger protein 181
  Uniprot ID: Q2M3W8
  ENST ID: ENST00000492450
  CDS Start-End: 90-1805
cctgcccttctgtgccctcaggacactgcccatctctaagataagagcctggaaagaggactctgttggctgttggaaattgcagagtaatgcctcaggtgacatttaatgatgtggctatagacttcactcatgaagagtggggatggctcagttctgctcagagggacttatacaaggatgtgatggtccagaattatgagaacctggtctctgtagcaggtctttctgtaactaagccatatgtgatcacgttattggaggatggaaaagagccctggatgatggagaaaaaactgtcaaaaggtatgattccagattgggaatcaagatgggaaaacaaggaattatcaacaaagaaggataattatgatgaagattcaccccaaacagtaataatagaaaaagttgtaaaacaaagttatgaattttcaaattctaagaagaatttggaatatatagagaagttggaagggaagcatggaagtcaggtagaccatttcagaccagcaattctcacctctagagaaagccccactgcagacagtgtttacaaatacaatatatttagaagcacctttcattcaaagtctactctttctgaaccacaaaaaatttctgctgaagggaattcacacaaatatgatatattaaagaagaacttaccaaaaaagtcagttataaaaaatgagaaagtcaatggtggaaagaaacttttgaattctaataaaagtggggcagccttcagccagggcaaatctcttacccttccccagacttgtaatagagagaaaatctatacatgcagtgaatgtgggaaagcctttggcaaacagtcaatcctcaatcgccactggagaattcatacaggagagaagccctatgaatgtcgtgaatgtgggaagacttttagccatggctcatcccttacacgacatctgataagccatagtggagagaaaccttacaaatgtattgaatgtgggaaggcctttagccatgtctcatcacttactaaccatcagagcactcacactggagagaaaccatatgaatgtatgaactgtggaaagtcttttagtcgtgtgtcccatcttattgaacatctaagaattcatactcaagaaaaactctatgagtgtcgtatatgtggaaaggccttcattcataggtcatctctcattcaccatcagaaaatccatactggagagaagccttatgaatgtagagaatgtgggaaagctttctgctgtagctcacaccttactcgacatcaaagaattcacactatggagaaacaatatgaatgcaacaaatgtctgaaagtctttagtagcctctcatttcttgttcagcatcagagtattcatactgaagaaaaaccctttgaatgtcagaaatgcaggaaatccttcaaccagcttgaatcactgaatatgcatttgagaaatcacattagattgaaaccctacgaatgcagtatatgtgggaaagcctttagtcataggtcatccctgcttcaacatcacagaattcatactggagagaaaccttatgaatgtattaaatgtgggaagaccttcagctgtagttcaaaccttaccgtacatcagagaattcacactggagaaaagccatataaatgtaatgagtgtgggaaagcttttagcaaaggctcaaatcttactgcccatcaaagagtacataatggagagaaacccaatagtgtggtaagtgtggaaaagcctttagactatatgaatcactatacatgtgagaaatcttacagaagagaaactgtatgaagcagtggttatcatggtaaatttcctagattctcccttatttaacattagaaaaatttatactggggaaagtcttatgaatgtggtgaatataggaagaccttttagcaaagatgcaggccagtttgtttattagactttatactgtagagaaatcatatgaagaccataaatgtgggaaagcctttgtcagtattaatcccttaattgacataagtatactcacactaggataaaaccctgtacatgtagcaaatgtgggaaagactacagacaataggaatcttttacaaactcctacaggagagaagctgtatgaatgtagaaaatttagaaattgagggaagtcttcagttccaagtatatcccttattctacagcagagaactcaaaatggagagaaatctcatttaagagatgtagcaaagtgttcactaagagtgtttatcttggtacacatcagaagattaatggtagaacaacctgaaggatttaggagttatgtgtaaatctttgcagtcatgctatttgtaaactggattctacaggagagcaaataaacattataataaaatatgcatttcttagagcagtagcttgcagtttcagttgagttctacttagaaattctttttagctagtgggcatgtgaagatatttagtcacccagaggagccagtaagtgttataatattgaaaattaaagctgcaaaagaaataaagtgatgttaataaaagttttggcatctaataaaatcattttgtatatcacaaactctttcactgtgactatttcctgtaaaaaaaatttcactaagattagccttagcgtagcctttagtgggagactagcaaacctagagaaaaatgacctgctctttatactaagaatagcagtattttgatgaggattattcagagtcaatttccagtaggcttaatcaaatacatttcaaaaaaatttactgagcatcactcgtgtattattacacagcgatgggatataggaatccagtagttctgagctttagtggtgtgtcaaagtcagtaggagggcttgttaaagcacagattgctaagtctgaatcttagggtttctgtatgagttgatttgaatttgcatttttcatgcgttcttaggcgacacactgtccagaaagcacattttgataaccattgtaataatgaacaaaacaaatctgatctttttctcgcagggatgttatctgacaagaaagatggatagcaaataaatttgaaataatggtttacaagtgctatgaggacataaccaagaaacaacatactacaagagatcagagcaggcttagcgagatgtgatttttgaaatgaatcctaaatgatgaacactaattatgtaatgagtactactcatgtagccatgtgcatccctgcatgtgcctgtgcgtgtgtgtatgcggtgtgctgggtgttaatctaggtaaagcagacagtcgagttctgtcatacttgctgcagctggattccacgttcccatgtctagtttcagattctgtggctttgaggtagtgctgctggcagcatcattgcagcaaccgtcatttctctatccctgagtcatagttacgggagtttaccttgaaatcactagcccagaagtgttctcattacttttacagcccacctaccaattttgaaagcactaatttgcagcaatatatgtcttgaaatagttaagagagattttgttctctgcactgaaccttgacagataattatgttttgtaaggaggcaggatggcttcaaatattctaagttctagataagaaatggaacagtctcactggccctgtgattagaatcctatcttgtgattagaaaggtaatgcagatcaatttgatttggagtgtatggacactgatgcaagtgaaggggtgtgatatggattatgcttcagattttgttctttatctcaggtgagagtagtaagatatgttattttaaaaaggaacattatgttatagttatgataattctggtgtggaatgagtgataaggtttctgactttcaacaaaatgtatctcctctgatatatgtgctaccttaacagaaagccaaagcacagaggcatattccaatagcaatttgcaagagacagtaggtttggaatggggtggtaaacttttactattttgcagggattttatctttcatttgatttatttttaatcatgaaatttatattgaaattctgtgaaacattgaaggatctttggaagatttataattagggaagggccagatgtagtggctaatgtctgtactcccagcactttgggagaccgaggcaggaggattgcttgaggccaggagtttgagaccagcctgggcaatatagcaaaactcattagtctgttaaaaaaaaaaattacccaggtgtaggcacacatctgcagtcctagctattcaggaggctgagtggggagggattgcttgagtacaggagttttaaggtcacagtgagctatcatcacaccactgctttccagcctggacagcagaacaccaccctgtctccaaagtaaataaatacaattaaggaagcatgatgtggtatcagacagttgcaagtatggatagactggctaccacatatatacttatgggataatgagagtagctttcttttctctcattctgtgtcctttctctgctctcccaagcaactggtaccacagagatgaagtagtcctataatgcccagattttgtttccactacacatagtttaatgctaccatgtcactttgttatgagaggattcatcgaaatacctgtgctttgtcatttaaaaagcatgggcatacacatgataatgctttacgtttctggatttaaagtgccttcacaatacagaactaggaaaaagaaggccatctttttaaatgaagatagttttaagagagcaataagagactattactttgttatgatagaaggttgggctgatgtcataatgatgttatgatgtcactgacatcatattatttcctcagtcatacctattaaccatttcttgagcatccactatgggcttaatagataagaaacactccataccctttaagagccctgaggtgtgtgtgtgtgaacagcattaaactttggagtcatgttacctgggtttaaatccaagttgcatgaatactggctttgtgtgaccttggacaaactatttcactgtgtcttgcctcagtttctccatctgtaaaatgataataaagctatctcacagca

SEQ ID NO: 201625 - DNA, 498 bp, Homo sapiens
  Payload ID: 19787
  Gene Name: zinc finger protein 181
  ENST ID: ENST00000593781
  CDS Start-End: 167-498
ggcgactcccaggctccgggacgattctgggcagtgtcgtccccagaggtcggcggccgttgcccgctcaccagcgacgcggggcgcctgcggggacggacactgcccatctctaagataagagcctggaaagaggactctgttggctgttggaaattgcagagtaatgcctcaggtgacatttaatgatgtggctatagacttcactcatgaagagtggggatggctcagttctgctcagagggacttatacaaggatgtgatggtccagaattatgagaacctggtctctgtagcaggtctttctgtaactaagccatatgtgatcacgttattggaggatggaaaagagccctggatgatggagaaaaaactgtcaaaagattgggaatcaagatgggaaaacaaggaattatcaacaaagaaggataattatgatgaagattcaccccaaacagtaataatagaaaaagttgtaaaacaaagttatgaattttc

SEQ ID NO: 201626 - DNA, 499 bp, Homo sapiens
  Payload ID: 19787
  Gene Name: zinc finger protein 181
  ENST ID: ENST00000599244
  CDS Start-End: 275-499
gcggttcgttgcgcctggaattttgtcccctgcgcggatgattctgggaaatgtcgatcggctgtgggcggcgcactgggtccgccccgctgtagcctcaggcctgacggcgactcccaggctccgggacgattctgggcagtgtcgtccccagaggtcggcggccgttgcccgctcaccagcgacgcggggcgcctgcggggacggacactgcccatctctaagataagagcctggaaagaggactctgttggctgttggaaattgcagagtaatgcctcaggtgacatttaatgatgtggctatagacttcactcatgaagagtggggatggctcagttctgctcagagggacttatacaaggatgtgatggtccagaattatgagaacctggtctctgtaggtctttctgtaactaagccatatgtgatcacgttattggaggatggaaaagagccctggatgatggagaaaaaactgtcaaaaggtatgattcca

SEQ ID NO: 201627 - DNA, 567 bp, Homo sapiens
  Payload ID: 19787
  Gene Name: zinc finger protein 181
  ENST ID: ENST00000595708
  CDS Start-End: 134-567
gtagcctcaggcctgacggcgactcccaggctccgggacgattctgggcagtgtcgtccccagaggacactgcccatctctaagataagagcctggaaagaggactctgttggctgttggaaattgcagagtaatgcctcaggtgacatttaatgatgtggctatagacttcactcatgaagagtggggatggctcagttctgctcagagggacttatacaaggatgtgatggtccagaattatgagaacctggtctctgtaggtctttctgtaactaagccatatgtgatcacgttattggaggatggaaaagagccctggatgatggagaaaaaactgtcaaaaggtatgattccagattgggaatcaagatgggaaaacaaggaattatcaacaaagaaggataattatgatgaagattcaccccaaacagtaataatagaaaaagttgtaaaacaaagttatgaattttcaaattctaagaagaatttggaatatatagagaagttggaagggaagcatggaagtcaggtagaccatttcagaccagcaattctcacctctag

SEQ ID NO: 201628 - DNA, 3235 bp, Homo sapiens
  Payload ID: 19788
  Gene Name: zinc finger protein 182
  Uniprot ID: P17025
  ENST ID: ENST00000305127
  CDS Start-End: 1-1920
atgacaccagcatctgcatctggtgaggactcaggaagcttctactcatggcagaaggcaaagagggaacaggggctagtgacatttgaagatgtagctgtggatttcacccaggaggagtggcagtacctgaacccaccacagaggaccctgtacagagacgtgatgctggagacctacagcaacttggtctttgtggggcagcaggttaccaaaccaaacctcatcctcaagttggaggtagaagaatgcccggcagaaggaaaaatcccattttggaactttccagaagtctgtcaagttgatgaacagattgagaggcaacatcaggatgaccaagataaatgtctgctgatgcaagttggattttctgacaagaaaacaattatcaccaagagtgctcgtgactgtcatgagtttggaaacatacttcatctgagtacaaaccttgttgcttcaatacaaagacccgataaacacgaatcatttggaaataatatggtagataatttagacttatttagtagaagttctgcagaaaataaatatgataatggatgtgcaaaattgttcttccatactgagtatgagaaaacaaatcctggaatgaagccctatggctataaagagtgtgggaaaggtcttaggcgaaagaaaggccttagtctacatcagagaattaaaaatggagagaaaccctttgaatgtactgcatgtaggaaaaccttcagcaagaagtcacacctcattgtacattggagaactcatacgggagagaaaccttttggatgtaccgaatgtggaaaagcttttagccaaaaatctcagctcattatacacttgcgaactcatacaggagagagaccctttgagtgtcctgaatgtggaaaagccttcagagaaaagtcaactgtcatcatacattacaggactcacacaggagaaaaaccttatgaatgtaatgaatgtggaaaagccttcactcagaagtccaacctcattgtccatcagaaaacccacactggagagaaaacctatgaatgcactaaatgtggagaatctttcatacagaagcttgatctaattatacatcatagtacccatacaggaaagaaaccccatgaatgtaatgagtgtaagaaaactttcagtgataagtcaactctcattatacaccagagaactcatacgggagagaaacctcataaatgtactgaatgtgggaagtctttcaatgagaagtcaaccctcattgtgcatcaaagaactcatacaggagagaaaccctatgaatgtgatgtgtgtggaaaaaccttcacgcaaaagtcaaaccttggtgtacatcagagaactcattcaggagagaaaccctttgaatgtaatgaatgtgagaaagccttctctcagaagtcctacctcatgctgcatcagagaggtcatacaggagagaaaccttacgagtgcaatgaatgtgaaaaagcattttcacagaaatcatatctcattatacatcaaagaactcatacagaagaaaaaccctataaatgtaatgaatgtggcaaagccttcagagaaaagtcaaagctcattatacatcagagaattcatacaggagagaaaccttatgaatgtcctgtgtgttggaaagcttttagccagaagtcacagctcataatacatcagagaacgcacacgggagagaaaccctatgcatgcactgagtgtggcaaagccttccgagaaaagtcaacattcactgtacatcaaagaactcatactggagagaaaccctataaatgtacagaatgtgggaaagcctttacccaaaaatcaaaccttattgtacatcagcgaacccatgcaggaaagaaagcccatggaagaggccacactcggaagtcaaagttcatggcacattagagagctaatcagcagtatctattatggacactgaaagaaagttgtgtcaattttactcacattttaaaagtatattttgacttgtggtttaaatatgggagtaaattcagcctttcttcttttcatctcagtcataacccaaaagctacgggagaaaaagcagaagtgtaatctctgtatctgacaaaattaggagacagctgcaaccctaatgagagggctgccacaggcagaggaaatgaagcactggtgcaggagatttcagagtgagagtgctcaaggctgcaggtgcaagacagcactggtaaggactcttagctgaggttcgggatataccccgaggcgcggaaccatagatataacagtggtaacagtgcgtgggcaggtaggaggtaggatgtttcctagaccatttggggtctgaggagaaacaggctggggcctcgagaaggagtcactcagacaagccatatttttagaaagtagtctactgatgggagcaacagttatggcatgctgggggaagagaagggacttttccttgtgaagagccctacagctgcccctatttactgacttgggagaagtaaagtcagaaagaacgaacagctgtggggggaaaaaattctcagttgtcaaaaaaaaaaaaaactgatctgcttagaatgtggccctggtttcttttcccacatgaacctccagcaaatagcaagtccaggaaaaactcttctcattcaaagaggaattattcaaaagtaatcaaaaccacaaatgcatttggtttttgggccagcaattccacttctaggaatgtacatactcacacatgtacaaaatgatgaacatacagtattcattaatgcagcgtttgtgaaaacaaaagattggaagctgtttaaatgacaccatatcagggttctggttccctaaattgtggtatattcatacagcctactcctgggtagacaacaatgaataaataaggagaacttggaaaccatttatgtagtgatgtgggataaccttcagtttatgttattaggtaggaaaaataaggttgaggacagtgactgccatttgtatataaaaaggagaaaaatggtaagtacataattgtgaattcataagttatctctggaaagagacatgagaacctggtaaccctgattaccttgggaggggaaggggcagtggtggctggggggatggaattgagagggagacaactgtatcctttcatagcttttgaaaatgtgggtgtactatgtactatgtggatgtactaccttttcaaaaataaaacatttaaaaagct

SEQ ID NO: 201629 - DNA, 3465 bp, Homo sapiens
  Payload ID: 19788
  Gene Name: zinc finger protein 182
  Uniprot ID: P17025
  ENST ID: ENST00000376943
  CDS Start-End: 287-2149
gtaacggtctcctgagcagcgagcagaaaatctgttatcgagagagacacagtgacctgcccctaaaggttcatgcgcatccctcagacccctctttagacgcgccccgcttctccctctgccctctccccttgcccaagccccgaggtgggggcctggtgtgaatgctccggccgaagtgaacctgcacccccgcacccgaaggcctctttccggcttctgggcaaggcggccccggtgagctcggccgtcacacatctctgctttttcccaagaagagcaggaaatggccaaaccccaggggctagtgacatttgaagatgtagctgtggatttcacccaggaggagtggcagtacctgaacccaccacagaggaccctgtacagagacgtgatgctggagacctacagcaacttggtctttgtggggcagcaggttaccaaaccaaacctcatcctcaagttggaggtagaagaatgcccggcagaaggaaaaatcccattttggaactttccagaagtctgtcaagttgatgaacagattgagaggcaacatcaggatgaccaagataaatgtctgctgatgcaagttggattttctgacaagaaaacaattatcaccaagagtgctcgtgactgtcatgagtttggaaacatacttcatctgagtacaaaccttgttgcttcaatacaaagacccgataaacacgaatcatttggaaataatatggtagataatttagacttatttagtagaagttctgcagaaaataaatatgataatggatgtgcaaaattgttcttccatactgagtatgagaaaacaaatcctggaatgaagccctatggctataaagagtgtgggaaaggtcttaggcgaaagaaaggccttagtctacatcagagaattaaaaatggagagaaaccctttgaatgtactgcatgtaggaaaaccttcagcaagaagtcacacctcattgtacattggagaactcatacgggagagaaaccttttggatgtaccgaatgtggaaaagcttttagccaaaaatctcagctcattatacacttgcgaactcatacaggagagagaccctttgagtgtcctgaatgtggaaaagccttcagagaaaagtcaactgtcatcatacattacaggactcacacaggagaaaaaccttatgaatgtaatgaatgtggaaaagccttcactcagaagtccaacctcattgtccatcagaaaacccacactggagagaaaacctatgaatgcactaaatgtggagaatctttcatacagaagcttgatctaattatacatcatagtacccatacaggaaagaaaccccatgaatgtaatgagtgtaagaaaactttcagtgataagtcaactctcattatacaccagagaactcatacgggagagaaacctcataaatgtactgaatgtgggaagtctttcaatgagaagtcaaccctcattgtgcatcaaagaactcatacaggagagaaaccctatgaatgtgatgtgtgtggaaaaaccttcacgcaaaagtcaaaccttggtgtacatcagagaactcattcaggagagaaaccctttgaatgtaatgaatgtgagaaagccttctctcagaagtcctacctcatgctgcatcagagaggtcatacaggagagaaaccttacgagtgcaatgaatgtgaaaaagcattttcacagaaatcatatctcattatacatcaaagaactcatacagaagaaaaaccctataaatgtaatgaatgtggcaaagccttcagagaaaagtcaaagctcattatacatcagagaattcatacaggagagaaaccttatgaatgtcctgtgtgttggaaagcttttagccagaagtcacagctcataatacatcagagaacgcacacgggagagaaaccctatgcatgcactgagtgtggcaaagccttccgagaaaagtcaacattcactgtacatcaaagaactcatactggagagaaaccctataaatgtacagaatgtgggaaagcctttacccaaaaatcaaaccttattgtacatcagcgaacccatgcaggaaagaaagcccatggaagaggccacactcggaagtcaaagttcatggcacattagagagctaatcagcagtatctattatggacactgaaagaaagttgtgtcaattttactcacattttaaaagtatattttgacttgtggtttaaatatgggagtaaattcagcctttcttcttttcatctcagtcataacccaaaagctacgggagaaaaagcagaagtgtaatctctgtatctgacaaaattaggagacagctgcaaccctaatgagagggctgccacaggcagaggaaatgaagcactggtgcaggagatttcagagtgagagtgctcaaggctgcaggtgcaagacagcactggtaaggactcttagctgaggttcgggatataccccgaggcgcggaaccatagatataacagtggtaacagtgcgtgggcaggtaggaggtaggatgtttcctagaccatttggggtctgaggagaaacaggctggggcctcgagaaggagtcactcagacaagccatatttttagaaagtagtctactgatgggagcaacagttatggcatgctgggggaagagaagggacttttccttgtgaagagccctacagctgcccctatttactgacttgggagaagtaaagtcagaaagaacgaacagctgtggggggaaaaaattctcagttgtcaaaaaaaaaaaaaactgatctgcttagaatgtggccctggtttcttttcccacatgaacctccagcaaatagcaagtccaggaaaaactcttctcattcaaagaggaattattcaaaagtaatcaaaaccacaaatgcatttggtttttgggccagcaattccacttctaggaatgtacatactcacacatgtacaaaatgatgaacatacagtattcattaatgcagcgtttgtgaaaacaaaagattggaagctgtttaaatgacaccatatcagggttctggttccctaaattgtggtatattcatacagcctactcctgggtagacaacaatgaataaataaggagaacttggaaaccatttatgtagtgatgtgggataaccttcagtttatgttattaggtaggaaaaataaggttgaggacagtgactgccatttgtatataaaaaggagaaaaatggtaagtacataattgtgaattcataagttatctctggaaagagacatgagaacctggtaaccctgattaccttgggaggggaaggggcagtggtggctggggggatggaattgagagggagacaactgtatcctttcatagcttttgaaaatgtgggtgtactatgtactatgtggatgtactaccttttcaaaaataaaacatttaaaaagcta

SEQ ID NO: 201630 - DNA, 3586 bp, Homo sapiens
  Payload ID: 19788
  Gene Name: zinc finger protein 182
  Uniprot ID: P17025
  ENST ID: ENST00000396965
  CDS Start-End: 352-2271
agtgcttgttggggccaggctttgtaacggtctcctgagcagcgagcagaaaatctgttatcgagagagagtgagcacagtgacctgcccctaaaggttcatgcgcatccctcagacccctctttagacgcgccccgcttctccctctgccctctccccttgcccaagccccgaggtgggggcctggtgtgaatgctccggccgaagtgaacctgcacccccgcacccgaaggcctctttccggcttctgggcaaggcggccccggtgagctcggccgtcacacatctctgctttttcccaagaagagcaggaaatggccaaaccccagtcctgcaagctgtacaagaagcatgacaccagcatctgcatctggtgaggactcaggaagcttctactcatggcagaaggcaaagagggaacaggggctagtgacatttgaagatgtagctgtggatttcacccaggaggagtggcagtacctgaacccaccacagaggaccctgtacagagacgtgatgctggagacctacagcaacttggtctttgtggggcagcaggttaccaaaccaaacctcatcctcaagttggaggtagaagaatgcccggcagaaggaaaaatcccattttggaactttccagaagtctgtcaagttgatgaacagattgagaggcaacatcaggatgaccaagataaatgtctgctgatgcaagttggattttctgacaagaaaacaattatcaccaagagtgctcgtgactgtcatgagtttggaaacatacttcatctgagtacaaaccttgttgcttcaatacaaagacccgataaacacgaatcatttggaaataatatggtagataatttagacttatttagtagaagttctgcagaaaataaatatgataatggatgtgcaaaattgttcttccatactgagtatgagaaaacaaatcctggaatgaagccctatggctataaagagtgtgggaaaggtcttaggcgaaagaaaggccttagtctacatcagagaattaaaaatggagagaaaccctttgaatgtactgcatgtaggaaaaccttcagcaagaagtcacacctcattgtacattggagaactcatacgggagagaaaccttttggatgtaccgaatgtggaaaagcttttagccaaaaatctcagctcattatacacttgcgaactcatacaggagagagaccctttgagtgtcctgaatgtggaaaagccttcagagaaaagtcaactgtcatcatacattacaggactcacacaggagaaaaaccttatgaatgtaatgaatgtggaaaagccttcactcagaagtccaacctcattgtccatcagaaaacccacactggagagaaaacctatgaatgcactaaatgtggagaatctttcatacagaagcttgatctaattatacatcatagtacccatacaggaaagaaaccccatgaatgtaatgagtgtaagaaaactttcagtgataagtcaactctcattatacaccagagaactcatacgggagagaaacctcataaatgtactgaatgtgggaagtctttcaatgagaagtcaaccctcattgtgcatcaaagaactcatacaggagagaaaccctatgaatgtgatgtgtgtggaaaaaccttcacgcaaaagtcaaaccttggtgtacatcagagaactcattcaggagagaaaccctttgaatgtaatgaatgtgagaaagccttctctcagaagtcctacctcatgctgcatcagagaggtcatacaggagagaaaccttacgagtgcaatgaatgtgaaaaagcattttcacagaaatcatatctcattatacatcaaagaactcatacagaagaaaaaccctataaatgtaatgaatgtggcaaagccttcagagaaaagtcaaagctcattatacatcagagaattcatacaggagagaaaccttatgaatgtcctgtgtgttggaaagcttttagccagaagtcacagctcataatacatcagagaacgcacacgggagagaaaccctatgcatgcactgagtgtggcaaagccttccgagaaaagtcaacattcactgtacatcaaagaactcatactggagagaaaccctataaatgtacagaatgtgggaaagcctttacccaaaaatcaaaccttattgtacatcagcgaacccatgcaggaaagaaagcccatggaagaggccacactcggaagtcaaagttcatggcacattagagagctaatcagcagtatctattatggacactgaaagaaagttgtgtcaattttactcacattttaaaagtatattttgacttgtggtttaaatatgggagtaaattcagcctttcttcttttcatctcagtcataacccaaaagctacgggagaaaaagcagaagtgtaatctctgtatctgacaaaattaggagacagctgcaaccctaatgagagggctgccacaggcagaggaaatgaagcactggtgcaggagatttcagagtgagagtgctcaaggctgcaggtgcaagacagcactggtaaggactcttagctgaggttcgggatataccccgaggcgcggaaccatagatataacagtggtaacagtgcgtgggcaggtaggaggtaggatgtttcctagaccatttggggtctgaggagaaacaggctggggcctcgagaaggagtcactcagacaagccatatttttagaaagtagtctactgatgggagcaacagttatggcatgctgggggaagagaagggacttttccttgtgaagagccctacagctgcccctatttactgacttgggagaagtaaagtcagaaagaacgaacagctgtggggggaaaaaattctcagttgtcaaaaaaaaaaaaaactgatctgcttagaatgtggccctggtttcttttcccacatgaacctccagcaaatagcaagtccaggaaaaactcttctcattcaaagaggaattattcaaaagtaatcaaaaccacaaatgcatttggtttttgggccagcaattccacttctaggaatgtacatactcacacatgtacaaaatgatgaacatacagtattcattaatgcagcgtttgtgaaaacaaaagattggaagctgtttaaatgacaccatatcagggttctggttccctaaattgtggtatattcatacagcctactcctgggtagacaacaatgaataaataaggagaacttggaaaccatttatgtagtgatgtgggataaccttcagtttatgttattaggtaggaaaaataaggttgaggacagtgactgccatttgtatataaaaaggagaaaaatggtaagtacataattgtgaattcataagttatctctggaaagagacatgagaacctggtaaccctgattaccttgggaggggaaggggcagtggtggctggggggatggaattgagagggagacaactgtatcctttcatagcttttgaaaatgtgggtgtactatgtactatgtggatgtactaccttttcaaaaataaaacatttaaaaagct

SEQ ID NO: 201631 - DNA, 3101 bp, Homo sapiens
  Payload ID: 19789
  Gene Name: zinc finger protein 184
  Uniprot ID: Q99676
  ENST ID: ENST00000211936
  CDS Start-End: 286-2541
gttgaagccggttgtaggcgtggaaagaggttggcgcgctggaagtccagttgcttcggctccctgcgttaggtctggtggcggtcaatgcgcttccggacccgggatcagagtgtgtggatcgctatagggggaggggagctcagggtagacaacctcagcgtgttgcagattccctgcaaggggagttagacatctgagtcctagaccgagataccagctgaaggaacgctgcctggcgaaccctggtgttcaagttccagaggaacgggatgagctcctgagatggaagatctgtcctctccagactccacccttctccaagggggacataatctactctcatcagccagttttcaggaagcggtgactttcaaggatgtgatagtggactttacccaggaagaatggaaacagctggaccctggccagagagatttgttcagggatgtgacattggaaaattatacacacctggtctctataggactccaagtttctaaacctgatgtgatttcccagttagagcaagggacagagccatggatcatggagccaagcattccagtaggtacctgtgcagactgggagacaagacttgaaaatagtgtgtcagccccagagcctgacatttctgaagaagagctatctccagaggtaatagtggaaaaacacaaaagagatgattcttggagttccaacttgctagaaagttgggaatatgaaggcagtttagagagacagcaggcaaaccaacagacactgccaaaggaaataaaggtaaccgaaaagacaatacccagttgggaaaaaggccctgtaaataatgaatttgggaaaagtgtcaatgtgagttcaaaccttgtaacacaagaaccatctccagaagagacctctactaaaagaagcatcaaacagaattcaaacccagttaaaaaagagaaatcttgtaagtgcaatgaatgtgggaaagcctttagttattgttcagctcttattcgccatcagagaacacatactggagaaaaaccctacaaatgtaatgaatgtgaaaaagccttcagccggagtgaaaaccttataaaccatcaaagaattcatactggagataaaccatataaatgtgatcagtgtggaaaaggcttcattgagggtccatctcttactcaacatcaaagaattcatactggagaaaaaccatataaatgtgatgaatgtgggaaagcctttagtcagaggacccatcttgttcagcatcagagaattcatactggcgagaagccatacacttgtaatgagtgtggaaaagcctttagccagagaggccactttatggaacatcagaaaattcatacgggagaaaaaccttttaaatgtgatgaatgtgataaaaccttcaccaggagcacacaccttactcaacatcaaaaaattcatactggagaaaaaacctataaatgtaatgaatgtggaaaggccttcaacgggccctcaacttttatccgtcatcatatgattcatactggtgaaaaaccgtacgaatgcaatgaatgtgggaaagccttcagccagcactcaaacctcactcagcatcaaaaaactcatactggggagaaaccctatgattgtgcagaatgtggaaaatcttttagttactggtcatcccttgctcaacacctgaaaattcatactggagaaaaaccttacaaatgcaatgaatgtggaaaggccttcagttactgctcatcccttactcaacatcggagaattcacacgagagaaaagccctttgaatgcagtgaatgtggaaaggctttcagttatctctcaaaccttaatcagcatcagaaaactcatactcaagagaaagcttatgaatgtaaagaatgtgggaaagcttttattcggagttcatctcttgctaagcatgaaagaattcatactggagagaaaccctatcagtgtcatgaatgtgggaaaaccttcagttatggttcatcccttattcagcataggaagatccatactggagaacgaccttacaagtgtaatgagtgtgggagagcattcaaccagaacatacaccttacacagcataagagaattcatacaggagccaagccttatgagtgtgctgagtgtggtaaagcctttcgacattgttcatctcttgctcaacatcaaaaaactcacacagaagaaaaaccctaccagtgtaataaatgtgaaaagacctttagccagagctcccatctaactcagcatcaacgaattcacactggggagaagccctataagtgcaatgaatgtgacaaagcctttagccggagcactcatctgactgaacatcagaatactcatactggagagaaaccttataactgtaatgaatgcagaaagacttttagccagagcacatatctcattcagcaccagagaattcattcaggagagaagccttttggatgtaatgattgtggaaaatccttcagatatcgctctgctctcaacaaacatcagagactgcatcctggcatatgacaattctaggaacatcataaatttaggggagatatttactttagtttgtccttttgttaagtactgaagaatcagagtggatttagaaactgccttgaaatcttttaaattttcactatcatgttatggaatggaaagtacattgggctgaactaatccaattgttattaagccactctgtgacattagaaaactctactgttttaagctttagtttcctttatggaatgaaggatttggagtagattatttcaaaggtagtttggagttttataatcagttttgtatatttacaatattttcttgaatgggtttactatacatcagcattttgctgtgttgcatctagaatgtgtatgtttatgcatgttttgccaatagaatttgtgcttcagtaactagatcggggatctagtatgctcctggtctaatgcatttacattgtttaggtaactggttcctaataaaaagaattataaaataccctcaaattaacaattcaattgcatataatagcctaactcagtaagaatattaaaacttactattattcttcttct

SEQ ID NO: 201632 - DNA, 2899 bp, Homo sapiens
  Payload ID: 19789
  Gene Name: zinc finger protein 184
  Uniprot ID: Q99676
  ENST ID: ENST00000377419
  CDS Start-End: 161-2416
tgcacagagggaacacaccagggtagacaacctcagcgtgttgcagattccctgcaaggggagttagacatctgagtcctagaccgagataccagctgaaggaacgctgcctggcgaaccctggtgttcaagttccagaggaacgggatgagctcctgagatggaagatctgtcctctccagactccacccttctccaagggggacataatctactctcatcagccagttttcaggaagcggtgactttcaaggatgtgatagtggactttacccaggaagaatggaaacagctggaccctggccagagagatttgttcagggatgtgacattggaaaattatacacacctggtctctataggactccaagtttctaaacctgatgtgatttcccagttagagcaagggacagagccatggatcatggagccaagcattccagtaggtacctgtgcagactgggagacaagacttgaaaatagtgtgtcagccccagagcctgacatttctgaagaagagctatctccagaggtaatagtggaaaaacacaaaagagatgattcttggagttccaacttgctagaaagttgggaatatgaaggcagtttagagagacagcaggcaaaccaacagacactgccaaaggaaataaaggtaaccgaaaagacaatacccagttgggaaaaaggccctgtaaataatgaatttgggaaaagtgtcaatgtgagttcaaaccttgtaacacaagaaccatctccagaagagacctctactaaaagaagcatcaaacagaattcaaacccagttaaaaaagagaaatcttgtaagtgcaatgaatgtgggaaagcctttagttattgttcagctcttattcgccatcagagaacacatactggagaaaaaccctacaaatgtaatgaatgtgaaaaagccttcagccggagtgaaaaccttataaaccatcaaagaattcatactggagataaaccatataaatgtgatcagtgtggaaaaggcttcattgagggtccatctcttactcaacatcaaagaattcatactggagaaaaaccatataaatgtgatgaatgtgggaaagcctttagtcagaggacccatcttgttcagcatcagagaattcatactggcgagaagccatacacttgtaatgagtgtggaaaagcctttagccagagaggccactttatggaacatcagaaaattcatacgggagaaaaaccttttaaatgtgatgaatgtgataaaaccttcaccaggagcacacaccttactcaacatcaaaaaattcatactggagaaaaaacctataaatgtaatgaatgtggaaaggccttcaacgggccctcaacttttatccgtcatcatatgattcatactggtgaaaaaccgtacgaatgcaatgaatgtgggaaagccttcagccagcactcaaacctcactcagcatcaaaaaactcatactggggagaaaccctatgattgtgcagaatgtggaaaatcttttagttactggtcatcccttgctcaacacctgaaaattcatactggagaaaaaccttacaaatgcaatgaatgtggaaaggccttcagttactgctcatcccttactcaacatcggagaattcacacgagagaaaagccctttgaatgcagtgaatgtggaaaggctttcagttatctctcaaaccttaatcagcatcagaaaactcatactcaagagaaagcttatgaatgtaaagaatgtgggaaagcttttattcggagttcatctcttgctaagcatgaaagaattcatactggagagaaaccctatcagtgtcatgaatgtgggaaaaccttcagttatggttcatcccttattcagcataggaagatccatactggagaacgaccttacaagtgtaatgagtgtgggagagcattcaaccagaacatacaccttacacagcataagagaattcatacaggagccaagccttatgagtgtgctgagtgtggtaaagcctttcgacattgttcatctcttgctcaacatcaaaaaactcacacagaagaaaaaccctaccagtgtaataaatgtgaaaagacctttagccagagctcccatctaactcagcatcaacgaattcacactggggagaagccctataagtgcaatgaatgtgacaaagcctttagccggagcactcatctgactgaacatcagaatactcatactggagagaaaccttataactgtaatgaatgcagaaagacttttagccagagcacatatctcattcagcaccagagaattcattcaggagagaagccttttggatgtaatgattgtggaaaatccttcagatatcgctctgctctcaacaaacatcagagactgcatcctggcatatgacaattctaggaacatcataaatttaggggagatatttactttagtttgtccttttgttaagtactgaagaatcagagtggatttagaaactgccttgaaatcttttaaattttcactatcatgttatggaatggaaagtacattgggctgaactaatccaattgttattaagccactctgtgacattagaaaactctactgttttaagctttagtttcctttatggaatgaaggatttggagtagattatttcaaaggtagtttggagttttataatcagttttgtatatttacaatattttcttgaatgggtttactatacatcagcattttgctgtgttgcatctagaatgtgtatgtttatgcatgttttgccaatagaatttgtgcttcagtaactagatcggggatctagtatgctcctggtctaatgcatttacattgtttaggtaactggttcctaataaaaagaattataaaata

SEQ ID NO: 201633 - DNA, 4148 bp, Homo sapiens
  Payload ID: 19790
  Gene Name: zinc finger protein 185 (LIM domain)
  Uniprot ID: O15231
  ENST ID: ENST00000318504
  CDS Start-End: 49-1941
cagaagccctgctgaatcaagtgagaggagagctgcggagcaatcaccatgagtatctcagctcttggaggccgcaccaaagggaagcctctgccaccaggcgaggaggagcgcaataacgttctcaagcagatgaaagtgcgaaccacgctgaagggggacaagagctggattaccaagcaggatgaatcggagggtcgcaccatagagctgccctcaggccggagtcgcgccacatccttttcatcagctggggaggttccgaagcctaggcctccgagcacaagggctcccactggctacatcatccggggagtgttcaccaagcccatagacagctcttcccagccccagcagcagttccccaaggccaacgggactccaaaaagtgctgccagtctggtgagaacagctaacgctggtcctccccgcccctcctcctctggctacaagatgaccactgaggattacaagaagctggcaccctacaatatcaggcgcagctctacatcaggggacaccgaggaggaggaggaggaggaggtggtgccattctcctcagatgaacagaaacggaggtcagaggctgcaagcggtgttctgaggaggacagctccccgggagcactcctacgtcctgtcagcggccaagaagagcactggtcctacccaggagacacaggcaccgtttatcgcgaagagggtggaggtggtggaagaggacgggccttctgagaagagccaggacccacctgctctggcaagatccactcctggctcaaacaggtcttccccaggcaacaaagacaaggaggccccctgctccagagagctccagagggacttggctggtgaggaggctttcagggcccccaacacagatgctgcaaggtcaagtgcacagttgagtgatggcaatgtgggatccggagccacgggctcccggcctgaaggcttggctgcagtagacatcggctccgagagaggaagctccagtgccacttcagtctctgctgtccctgctgataggaagagcaacagcacagcagcccaggaggatgcaaaggcagacccaaagggggccttggctgattatgaggggaaggatgtggccaccagggtcggagaggcctggcaggagaggcctggagctccaagaggtggccaaggagacccagctgtacccgctcagcaacctgcagatcccagcaccccagagcggcagagcagccccagcggatctgagcaacttgtcagacgagagagttgtggcagcagcgtgttgactgattttgaggggaaggatgtggccaccaaggtcggagaggcctggcaggacaggcctggagccccaagaggtggccaaggagacccagctgtacccactcagcaacctgcagatcccagtaccccagaacagcagaacagccccagcggatctgagcaattcgtcagacgagagagctgcaccagcagggtgaggagcccctcgagctgcatggtcactgttactgtcactgccacatctgagcagcctcacatttatattccagcccccgcaagtgaattggactccagctctaccaccaaagggattctcttcgtgaaggagtacgtgaatgctagtgaagtgtcttctgggaagccagtatctgcacgctatagcaacgtcagcagcattgaggactcattcgccatggagaagaagcctccatgtggcagcactccatactctgagaggacaactggagggatctgtacttactgcaaccgtgagatccgagactgtccaaagattaccctagaacatcttggtatctgctgccatgaatattgctttaagtgtgggatttgcagtaaaccgatgggcgatctcctggatcagatcttcattcaccgtgacaccattcactgtgggaaatgctatgagaagctcttctagcgaccccccaccgccaggctgatcagaagctgatgactcgtggacaaatttggctgtccccagttttgccccaagttgctgtctccccttccctcacctcctccctccctgtttgatttcttcatgcttttgcccttctcaagttgaagttgcatacatccaatatcgtatcttaatgatgctatgataattgcttgtgtgtgtagcttcttgtagcttagaaagcgctttatgcccatgatgtcatttcaggctcaaccaaagaggatcaaacaggaattccatcttggcttccctaagacagattggctttctaatgagtttaagtgggcagaagtgtagggttcagtgtgtcctgactcccttgaggcttataatgggccaagttgaagactgttgatgatccctggtgggtaaattgcagacatcaaatgctagggattggcataggctagtgtttagcttgtctatttgccatatctattttttttaaatttccatacacttgtaaaagtagttagttgcttttgattgagttatatagcagtttttcatttggtcttccactcacctttcactatatttgagtgttcccttacaggtatgttggcatgtgttggaaaatttacacaattaggtttaaattcagtaggatgtgattttaggatgctactgatcaaagtgatatctgtgtctgttggaatcttgatagctgattaatttgccctcaattctgctccctgaacttcacacataaatcttcccaagtgggttttagggtgtatagatcccagcaggattaaggaggtggaaaagcagctaacatttcttgaggctctaccacatagcaggcactgtcacagagtaatggcattaatccccataataatcctgtgaaggtgatattctcatcccatcttagacatgaggatattggaactcagagaggtggctattgcattgcgcagaacgctacagagcccatgctcttcccagagcagcacccacaaaagcaagcattgattttgtgctcagtgtgtgccaagcactgtgcagagggtacacagttcctgccaggttaacaccctcccttcaggcctcccaaaggcataggcttgcaaagagcagaaggtgtgaaatcacactcttcctctgggcatcctggatccctgaattatccccccccccatgaagtacttcaagggccaagctgcccctttccctcctctccgcccatgaaaatgcctccaaactgagatgctttcagctgagaacagatttgactcacagacattaccaaagaggagcttgtgaatccaggaaaagctccagggggctagctgatctgagcagagagctttcagtgacccattttcctgtctagactctgccttaagctagtggcaactgctggggccccaggtacttgggacatggaaactcgttggatggctgggcagatgtaagcctgtccatgcagtcagccgatcctctgctcaggttcagctggactctgccatctgtgggcccagcatcactctgtaagttccttgaaaggaagaacaaccttagagtatttctgatacaaaatgagggcctctgctcttgatttaattataaaatgtctacgtctttctccagtttctgagccctatgcacattggcttgtgggcttgttcttcctgccaaatgatcagagaggaacattccatttatttgtagtggatttcctctggagggcatgtacccacactaaataccaactgctcttcctcagctgtagtccccaacatcagacttggcacgtggtggacactaacacacaggcactcaatgaatgagtgaaggaaataaaagtcaccccgttggtgagaggtgctatccctgagtctcagtgcaggaccagtggatgaaaggcaaggtaaagaggcccaagataggctggcttcccccgttcaaggtatagtctgcctttaagggagttttagaaccaacatgcaagacattgaaagaaatcttgcaagagccattattgacttagatccaaaacagcctctctcatgtctaaaaaggcacagaattttgcagatctgaggaagagggatgcattacctttttgcttcttttcaattgcttagtgtttctaatcatacttaatccacactaatgtgcgcaattataataaatggtaagatatcacatgtgtc

SEQ ID NO: 201634 - DNA, 3878 bp, Homo sapiens
  Payload ID: 19790
  Gene Name: zinc finger protein 185 (LIM domain)
  Uniprot ID: O15231
  ENST ID: ENST00000318529
  CDS Start-End: 265-1671
gttccctgaagctcggtggggtttgcctacacagctgctctgagtggcgcagttccgggtgtctgtcagggccaaaagcaaagaggaaaggctcccaggcagctcctggtccacctctcatgtgtccactgggctgtgtggccaaatctggaggcaggagggagcctgcaggtagacacatggaaccttctcctctctagtgctgccagtctggtgagaacagctaacgctggtcctccccgcccctcctcctctggctacaagatgaccactgaggattacaagaagctggcaccctacaatatcaggcgcagctctacatcaggggacaccgaggaggaggaggaggaggaggtggtgccattctcctcagatgaacagaaacggagcagtcctacccaggagacacaggcaccgtttatcgcgaagagggtggaggtggtggaagaggacgggccttctgagaagagccaggacccacctgctctggcaagatccactcctggctcaaacaggtcttccccaggcaacaaagacaaggaggccccctgctccagagagctccagagggacttggctggtgaggaggctttcagggcccccaacacagatgctgcaaggtcaagtgcacagttgagtgatggcaatgtgggatccggagccacgggctcccggcctgaaggcttggctgcagtagacatcggctccgagagaggaagctccagtgccacttcagtctctgctgtccctgctgataggaagagcaacagcacagcagcccaggaggatgcaaaggcagacccaaagggggccttggctgattatgaggggaaggatgtggccaccagggtcggagaggcctggcaggagaggcctggagctccaagaggtggccaaggagacccagctgtacccgctcagcaacctgcagatcccagcaccccagagcggcagagcagccccagcggatctgagcaacttgtcagacgagagagttgtggcagcagcgtgttgactgattttgaggggaaggatgtggccaccaaggtcggagaggcctggcaggacaggcctggagccccaagaggtggccaaggagacccagctgtacccactcagcaacctgcagatcccagtaccccagaacagcagaacagccccagcggatctgagcaattcgtcagacgagagagctgcaccagcagggtgaggagcccctcgagctgcatggtcactgttactgtcactgccacatctgagcagcctcacatttatattccagcccccgcaagtgaattggactccagctctaccaccaaagggattctcttcgtgaaggagtacgtgaatgctagtgaagtgtcttctgggaagccagtatctgcacgctatagcaacgtcagcagcattgaggactcattcgccatggagaagaagcctccatgtggcagcactccatactctgagaggacaactggagggatctgtacttactgcaaccgtgagatccgagactgtccaaagattaccctagaacatcttggtatctgctgccatgaatattgctttaagtgtgggatttgcagtaaaccgatgggcgatctcctggatcagatcttcattcaccgtgacaccattcactgtgggaaatgctatgagaagctcttctagcgaccccccaccgccaggctgatcagaagctgatgactcgtggacaaatttggctgtccccagttttgccccaagttgctgtctccccttccctcacctcctccctccctgtttgatttcttcatgcttttgcccttctcaagttgaagttgcatacatccaatatcgtatcttaatgatgctatgataattgcttgtgtgtgtagcttcttgtagcttagaaagcgctttatgcccatgatgtcatttcaggctcaaccaaagaggatcaaacaggaattccatcttggcttccctaagacagattggctttctaatgagtttaagtgggcagaagtgtagggttcagtgtgtcctgactcccttgaggcttataatgggccaagttgaagactgttgatgatccctggtgggtaaattgcagacatcaaatgctagggattggcataggctagtgtttagcttgtctatttgccatatctattttttttaaatttccatacacttgtaaaagtagttagttgcttttgattgagttatatagcagtttttcatttggtcttccactcacctttcactatatttgagtgttcccttacaggtatgttggcatgtgttggaaaatttacacaattaggtttaaattcagtaggatgtgattttaggatgctactgatcaaagtgatatctgtgtctgttggaatcttgatagctgattaatttgccctcaattctgctccctgaacttcacacataaatcttcccaagtgggttttagggtgtatagatcccagcaggattaaggaggtggaaaagcagctaacatttcttgaggctctaccacatagcaggcactgtcacagagtaatggcattaatccccataataatcctgtgaaggtgatattctcatcccatcttagacatgaggatattggaactcagagaggtggctattgcattgcgcagaacgctacagagcccatgctcttcccagagcagcacccacaaaagcaagcattgattttgtgctcagtgtgtgccaagcactgtgcagagggtacacagttcctgccaggttaacaccctcccttcaggcctcccaaaggcataggcttgcaaagagcagaaggtgtgaaatcacactcttcctctgggcatcctggatccctgaattatccccccccccatgaagtacttcaagggccaagctgcccctttccctcctctccgcccatgaaaatgcctccaaactgagatgctttcagctgagaacagatttgactcacagacattaccaaagaggagcttgtgaatccaggaaaagctccagggggctagctgatctgagcagagagctttcagtgacccattttcctgtctagactctgccttaagctagtggcaactgctggggccccaggtacttgggacatggaaactcgttggatggctgggcagatgtaagcctgtccatgcagtcagccgatcctctgctcaggttcagctggactctgccatctgtgggcccagcatcactctgtaagttccttgaaaggaagaacaaccttagagtatttctgatacaaaatgagggcctctgctcttgatttaattataaaatgtctacgtctttctccagtttctgagccctatgcacattggcttgtgggcttgttcttcctgccaaatgatcagagaggaacattccatttatttgtagtggatttcctctggagggcatgtacccacactaaataccaactgctcttcctcagctgtagtccccaacatcagacttggcacgtggtggacactaacacacaggcactcaatgaatgagtgaaggaaataaaagtcaccccgttggtgagaggtgctatccctgagtctcagtgcaggaccagtggatgaaaggcaaggtaaagaggcccaagataggctggcttcccccgttcaaggtatagtctgcctttaagggagttttagaaccaacatgcaagacattgaaagaaatcttgcaagagccattattgacttagatccaaaacagcctctctcatgtctaaaaaggcacagaattttgcagatctgaggaagagggatgcattacctttttgcttcttttcaattgcttagtgtttctaatcatacttaatccacactaatgtgcgcaattataataaatggtaagatatcacatgtgtc

SEQ ID NO: 201635 - DNA, 3597 bp, Homo sapiens
  Payload ID: 19790
  Gene Name: zinc finger protein 185 (LIM domain)
  Uniprot ID: O15231
  ENST ID: ENST00000324823
  CDS Start-End: 41-1399
gctacaagatgaccactgaggattacaagaagctgtgagtatgcaacgccaggcaccctacaatatcaggcgcagctctacatcaggggacaccgaggaggaggaggaggaggaggtggtgccattctcctcagatgaacagaaacggaggtcagaggctgcaagcggtgttctgaggaggacagctccccgggagcactcctacgtcctgtcagcggccaagaagagcactggcagtcctacccaggagacacaggcaccgtttatcgcgaagagggtggaggtggtggaagaggacgggccttctgagaagagccaggacccacctgctctggcaagatccactcctggctcaaacagctcaagaggtgaggaaattgtccgcctgcagatcctgacacccagggcaggactccgcctggtggccccagacgtggaaggcatgagctccagtgccacttcagtctctgctgtccctgctgataggaagagcaacagcacagcagcccaggaggatgcaaaggcagacccaaagggggccttggctgattatgaggggaaggatgtggccaccagggtcggagaggcctggcaggagaggcctggagctccaagaggtggccaaggagacccagctgtacccgctcagcaacctgcagatcccagcaccccagagcggcagagcagccccagcggatctgagcaacttgtcagacgagagagttgtggcagcagcgtgttgactgattttgaggggaaggatgtggccaccaaggtcggagaggcctggcaggacaggcctggagccccaagaggtggccaaggagacccagctgtacccactcagcaacctgcagatcccagtaccccagaacagcagaacagccccagcggatctgagcaattcgtcagacgagagagctgcaccagcagggtgaggagcccctcgagctgcatggtcactgttactgtcactgccacatctgagcagcctcacatttatattccagcccccgcaagtgaattggactccagctctaccaccaaagggattctcttcgtgaaggagtacgtgaatgctagtgaagtgtcttctgggaagccagtatctgcacgctatagcaacgtcagcagcattgaggactcattcgccatggagaagaagcctccatgtggcagcactccatactctgagaggacaactggagggatctgtacttactgcaaccgtgagatccgagactgtccaaagattaccctagaacatcttggtatctgctgccatgaatattgctttaagtgtgggatttgcagtaaaccgatgggcgatctcctggatcagatcttcattcaccgtgacaccattcactgtgggaaatgctatgagaagctcttctagcgaccccccaccgccaggctgatcagaagctgatgactcgtggacaaatttggctgtccccagttttgccccaagttgctgtctccccttccctcacctcctccctccctgtttgatttcttcatgcttttgcccttctcaagttgaagttgcatacatccaatatcgtatcttaatgatgctatgataattgcttgtgtgtgtagcttcttgtagcttagaaagcgctttatgcccatgatgtcatttcaggctcaaccaaagaggatcaaacaggaattccatcttggcttccctaagacagattggctttctaatgagtttaagtgggcagaagtgtagggttcagtgtgtcctgactcccttgaggcttataatgggccaagttgaagactgttgatgatccctggtgggtaaattgcagacatcaaatgctagggattggcataggctagtgtttagcttgtctatttgccatatctattttttttaaatttccatacacttgtaaaagtagttagttgcttttgattgagttatatagcagtttttcatttggtcttccactcacctttcactatatttgagtgttcccttacaggtatgttggcatgtgttggaaaatttacacaattaggtttaaattcagtaggatgtgattttaggatgctactgatcaaagtgatatctgtgtctgttggaatcttgatagctgattaatttgccctcaattctgctccctgaacttcacacataaatcttcccaagtgggttttagggtgtatagatcccagcaggattaaggaggtggaaaagcagctaacatttcttgaggctctaccacatagcaggcactgtcacagagtaatggcattaatccccataataatcctgtgaaggtgatattctcatcccatcttagacatgaggatattggaactcagagaggtggctattgcattgcgcagaacgctacagagcccatgctcttcccagagcagcacccacaaaagcaagcattgattttgtgctcagtgtgtgccaagcactgtgcagagggtacacagttcctgccaggttaacaccctcccttcaggcctcccaaaggcataggcttgcaaagagcagaaggtgtgaaatcacactcttcctctgggcatcctggatccctgaattatccccccccccatgaagtacttcaagggccaagctgcccctttccctcctctccgcccatgaaaatgcctccaaactgagatgctttcagctgagaacagatttgactcacagacattaccaaagaggagcttgtgaatccaggaaaagctccagggggctagctgatctgagcagagagctttcagtgacccattttcctgtctagactctgccttaagctagtggcaactgctggggccccaggtacttgggacatggaaactcgttggatggctgggcagatgtaagcctgtccatgcagtcagccgatcctctgctcaggttcagctggactctgccatctgtgggcccagcatcactctgtaagttccttgaaaggaagaacaaccttagagtatttctgatacaaaatgagggcctctgctcttgatttaattataaaatgtctacgtctttctccagtttctgagccctatgcacattggcttgtgggcttgttcttcctgccaaatgatcagagaggaacattccatttatttgtagtggatttcctctggagggcatgtacccacactaaataccaactgctcttcctcagctgtagtccccaacatcagacttggcacgtggtggacactaacacacaggcactcaatgaatgagtgaaggaaataaaagtcaccccgttggtgagaggtgctatccctgagtctcagtgcaggaccagtggatgaaaggcaaggtaaagaggcccaagataggctggcttcccccgttcaaggtatagtctgcctttaagggagttttagaaccaacatgcaagacattgaaagaaatcttgcaagagccattattgacttagatccaaaacagcctctctcatgtctaaaaaggcacagaattttgcagatctgaggaagagggatgcattacctttttgcttcttttcaattgcttagtgtttctaatcatacttaatccacactaatgtgcgcaattataataaatggtaagatatc

SEQ ID NO: 201636 - DNA, 4305 bp, Homo sapiens
  Payload ID: 19790
  Gene Name: zinc finger protein 185 (LIM domain)
  Uniprot ID: O15231
  ENST ID: ENST00000370268
  CDS Start-End: 38-2107
ctgaatcaagtgagaggagagctgcggagcaatcaccatgagtatctcagctcttggaggccgcaccaaagggaagcctctgccaccaggcgaggaggagcgcaataacgttctcaagcagatgaaagtgcgaaccacgctgaagggggacaagagctggattaccaagcaggatgaatcggagggtcgcaccatagagctgccctcaggccggagtcgcgccacatccttttcatcagctggggaggttccgaagcctaggcctccgagcacaagggctcccactggctacatcatccggggagtgttcaccaagcccatagacagctcttcccagccccagcagcagttccccaaggccaacgggactccaaaaagtgctgccagtctggtgagaacagctaacgctggtcctccccgcccctcctcctctggctacaagatgaccactgaggattacaagaagctggcaccctacaatatcaggcgcagctctacatcaggggacaccgaggaggaggaggaggaggaggtggtgccattctcctcagatgaacagaaacggaggtcagaggctgcaagcggtgttctgaggaggacagctccccgggagcactcctacgtcctgtcagcggccaagaagagcactggtcctacccaggagacacaggcaccgtttatcgcgaagagggtggaggtggtggaagaggacgggccttctgagaagagccaggacccacctgctctggcaagatccactcctggctcaaacagtgcggatggaggcaggaccaaagcgtctcgggcaatttggatcgagtgcctgccaagtatgcctagccccgctgggagccaggagctcagctcaagaggtgaggaaattgtccgcctgcagatcctgacacccagggcaggactccgcctggtggccccagacgtggaaggcatgaggtcttccccaggcaacaaagacaaggaggccccctgctccagagagctccagagggacttggctggtgaggaggctttcagggcccccaacacagatgctgcaaggtcaagtgcacagttgagtgatggcaatgtgggatccggagccacgggctcccggcctgaaggcttggctgcagtagacatcggctccgagagaggaagctccagtgccacttcagtctctgctgtccctgctgataggaagagcaacagcacagcagcccaggaggatgcaaaggcagacccaaagggggccttggctgattatgaggggaaggatgtggccaccagggtcggagaggcctggcaggagaggcctggagctccaagaggtggccaaggagacccagctgtacccgctcagcaacctgcagatcccagcaccccagagcggcagagcagccccagcggatctgagcaacttgtcagacgagagagttgtggcagcagcgtgttgactgattttgaggggaaggatgtggccaccaaggtcggagaggcctggcaggacaggcctggagccccaagaggtggccaaggagacccagctgtacccactcagcaacctgcagatcccagtaccccagaacagcagaacagccccagcggatctgagcaattcgtcagacgagagagctgcaccagcagggtgaggagcccctcgagctgcatggtcactgttactgtcactgccacatctgagcagcctcacatttatattccagcccccgcaagtgaattggactccagctctaccaccaaagggattctcttcgtgaaggagtacgtgaatgctagtgaagtgtcttctgggaagccagtatctgcacgctatagcaacgtcagcagcattgaggactcattcgccatggagaagaagcctccatgtggcagcactccatactctgagaggacaactggagggatctgtacttactgcaaccgtgagatccgagactgtccaaagattaccctagaacatcttggtatctgctgccatgaatattgctttaagtgtgggatttgcagtaaaccgatgggcgatctcctggatcagatcttcattcaccgtgacaccattcactgtgggaaatgctatgagaagctcttctagcgaccccccaccgccaggctgatcagaagctgatgactcgtggacaaatttggctgtccccagttttgccccaagttgctgtctccccttccctcacctcctccctccctgtttgatttcttcatgcttttgcccttctcaagttgaagttgcatacatccaatatcgtatcttaatgatgctatgataattgcttgtgtgtgtagcttcttgtagcttagaaagcgctttatgcccatgatgtcatttcaggctcaaccaaagaggatcaaacaggaattccatcttggcttccctaagacagattggctttctaatgagtttaagtgggcagaagtgtagggttcagtgtgtcctgactcccttgaggcttataatgggccaagttgaagactgttgatgatccctggtgggtaaattgcagacatcaaatgctagggattggcataggctagtgtttagcttgtctatttgccatatctattttttttaaatttccatacacttgtaaaagtagttagttgcttttgattgagttatatagcagtttttcatttggtcttccactcacctttcactatatttgagtgttcccttacaggtatgttggcatgtgttggaaaatttacacaattaggtttaaattcagtaggatgtgattttaggatgctactgatcaaagtgatatctgtgtctgttggaatcttgatagctgattaatttgccctcaattctgctccctgaacttcacacataaatcttcccaagtgggttttagggtgtatagatcccagcaggattaaggaggtggaaaagcagctaacatttcttgaggctctaccacatagcaggcactgtcacagagtaatggcattaatccccataataatcctgtgaaggtgatattctcatcccatcttagacatgaggatattggaactcagagaggtggctattgcattgcgcagaacgctacagagcccatgctcttcccagagcagcacccacaaaagcaagcattgattttgtgctcagtgtgtgccaagcactgtgcagagggtacacagttcctgccaggttaacaccctcccttcaggcctcccaaaggcataggcttgcaaagagcagaaggtgtgaaatcacactcttcctctgggcatcctggatccctgaattatccccccccccatgaagtacttcaagggccaagctgcccctttccctcctctccgcccatgaaaatgcctccaaactgagatgctttcagctgagaacagatttgactcacagacattaccaaagaggagcttgtgaatccaggaaaagctccagggggctagctgatctgagcagagagctttcagtgacccattttcctgtctagactctgccttaagctagtggcaactgctggggccccaggtacttgggacatggaaactcgttggatggctgggcagatgtaagcctgtccatgcagtcagccgatcctctgctcaggttcagctggactctgccatctgtgggcccagcatcactctgtaagttccttgaaaggaagaacaaccttagagtatttctgatacaaaatgagggcctctgctcttgatttaattataaaatgtctacgtctttctccagtttctgagccctatgcacattggcttgtgggcttgttcttcctgccaaatgatcagagaggaacattccatttatttgtagtggatttcctctggagggcatgtacccacactaaataccaactgctcttcctcagctgtagtccccaacatcagacttggcacgtggtggacactaacacacaggcactcaatgaatgagtgaaggaaataaaagtcaccccgttggtgagaggtgctatccctgagtctcagtgcaggaccagtggatgaaaggcaaggtaaagaggcccaagataggctggcttcccccgttcaaggtatagtctgcctttaagggagttttagaaccaacatgcaagacattgaaagaaatcttgcaagagccattattgacttagatccaaaacagcctctctcatgtctaaaaaggcacagaattttgcagatctgaggaagagggatgcattacctttttgcttcttttcaattgcttagtgtttctaatcatacttaatccacactaatgtgcgcaattataataaatggtaagatatc

SEQ ID NO: 201637 - DNA, 2166 bp, Homo sapiens
  Payload ID: 19790
  Gene Name: zinc finger protein 185 (LIM domain)
  Uniprot ID: O15231
  ENST ID: ENST00000370270
  CDS Start-End: 1-2166
atgagtatctcagctcttggaggccgcaccaaagggaagcctctgccaccaggcgaggaggagcgcaataacgttctcaagcagatgaaagtgcgaaccacgctgaagggggacaagagctggattaccaagcaggatgaatcggagggtcgcaccatagagctgccctcaggccggagtcgcgccacatccttttcatcagctggggaggttccgaagcctaggcctccgagcacaagggctcccactggctacatcatccggggagtgttcaccaagcccatagacagctcttcccagccccagcagcagttccccaaggccaacgggactccaaaaagtgctgccagtctggtgagaacagctaacgctggtcctccccgcccctcctcctctggctacaagatgaccactgaggattacaagaagctggcaccctacaatatcaggcgcagctctacatcaggggacaccgaggaggaggaggaggaggaggtggtgccattctcctcagatgaacagaaacggaggtcagaggctgcaagcggtgttctgaggaggacagctccccgggagcactcctacgtcctgtcagcggccaagaagagcactggtcctacccaggagacacaggcaccgtttatcgcgaagagggtggaggtggtggaagaggacgggccttctgagaagagccaggacccacctgctctggcaagatccactcctggctcaaacagtgcggatggaggcaggaccaaagcgtctcgggcaatttggatcgagtgcctgccaagtatgcctagccccgctgggagccaggagctcagctcaagaggtgaggaaattgtccgcctgcagatcctgacacccagggcaggactccgcctggtggccccagacgtggaaggcatgaggtcttccccaggcaacaaagacaaggaggccccctgctccagagagctccagagggacttggctggtgaggaggctttcagggcccccaacacagatgctgcaaggtcaagtgcacagttgagtgatggcaatgtgggatccggagccacgggctcccggcctgaaggcttggctgcagtagacatcggctccgagagaggaaggctgtgtgcagctgctagctttgcctctttcctggaagaccaggatgggcacagtgccaactctcagtcctgcaagcctagaccagcagccatcagctccagtgccacttcagtctctgctgtccctgctgataggaagagcaacagcacagcagcccaggaggatgcaaaggcagacccaaagggggccttggctgattatgaggggaaggatgtggccaccagggtcggagaggcctggcaggagaggcctggagctccaagaggtggccaaggagacccagctgtacccgctcagcaacctgcagatcccagcaccccagagcggcagagcagccccagcggatctgagcaacttgtcagacgagagagttgtggcagcagcgtgttgactgattttgaggggaaggatgtggccaccaaggtcggagaggcctggcaggacaggcctggagccccaagaggtggccaaggagacccagctgtacccactcagcaacctgcagatcccagtaccccagaacagcagaacagccccagcggatctgagcaattcgtcagacgagagagctgcaccagcagggtgaggagcccctcgagctgcatggtcactgttactgtcactgccacatctgagcagcctcacatttatattccagcccccgcaagtgaattggactccagctctaccaccaaagggattctcttcgtgaaggagtacgtgaatgctagtgaagtgtcttctgggaagccagtatctgcacgctatagcaacgtcagcagcattgaggactcattcgccatggagaagaagcctccatgtggcagcactccatactctgagaggacaactggagggatctgtacttactgcaaccgtgagatccgagactgtccaaagattaccctagaacatcttggtatctgctgccatgaatattgctttaagtgtgggatttgcagtaaaccgatgggcgatctcctggatcagatcttcattcaccgtgacaccattcactgtgggaaatgctatgagaagctcttctag

SEQ ID NO: 201638 - DNA, 2120 bp, Homo sapiens
  Payload ID: 19790
  Gene Name: zinc finger protein 185 (LIM domain)
  ENST ID: ENST00000436731
  CDS Start-End: 1-1659
atgagtatctcagctcttggaggccgcaccaaagggaagcctctgccaccaggcgaggaggagcgcaataacgttctcaagcagatgaaagtgcgaaccacgctgaagggggacaagagctggattaccaagcaggatgaatcggagggtcgcaccatagagctgccctcaggccggagtcgcgccacatccttttcatcagctggggaggttccgaagcctaggcctccgagcacaagggctcccactggctacatcatccggggagtgttcaccaagcccatagacagctcttcccagccccagcagcagttccccaaggccaacgggactccaaaaagtgctgccagtctggtgagaacagctaacgctggtcctccccgcccctcctcctctggctacaagatgaccactgaggattacaagaagctggcaccctacaatatcaggcgcagctctacatcaggggacaccgaggaggaggaggaggaggaggtggtgccattctcctcagatgaacagaaacggaggtcagaggctgcaagcggtgttctgaggaggacagctccccgggagcactcctacgtcctgtcagcggccaagaagagcactggtcctacccaggagacacaggcaccgtttatcgcgaagagggtggaggtggtggaagaggacgggccttctgagaagagccaggacccacctgctctggcaagatccactcctggctcaaacagtgcggatggaggcaggaccaaagcgtctcgggcaatttggatcgagtgcctgccaagtatgcctagccccgctgggagccaggagctcaggtcttccccaggcaacaaagacaaggaggccccctgctccagagagctccagagggacttggctggtgaggaggctttcagggcccccaacacagatgctgcaaggtcaagtgcacagttgagtgatggcaatgtgggatccggagccacgggctcccggcctgaaggcttggctgcagtagacatcggctccgagagaggaaggctgtgtgcagctgctagctttgcctctttcctggaagaccaggatgggcacagtgccaactctcagtcctgcaagcctagaccagcagccatcagctccagtgccacttcagtctctgctgtccctgctgataggaagagcaacagcacagcagcccaggaggatgcaaaggcagacccaaagggggccttggctgattatgaggggaaggatgtggccaccagggtcggagaggcctggcaggagaggcctggagctccaagaggtggccaaggagacccagctgtacccgctcagcaacctgcagatcccagcaccccagagcggcagagcagccccagcggatctgagcaacttgtcagacgagagagttgtggcagcagcgtgttgactgattttgaggggaaggatgtggccaccaaggtcggagaggcctggcaggacaggcctggagccccaagaggtggccaaggagacccagctgtacccactcagcaacctgcagatcccagtaccccagaacagcagaacagccccagcggatctgagcaattcgtcagacgagagagctgcaccagcaggtacgagccaaactgcactgggaccttacctgctagagccaggtgaggagcccctcgagctgcatggtcactgttactgtcactgccacatctgagcagcctcacatttatattccagcccccgcaagtgaattggactccagctctaccaccaaagggattctcttcgtgaaggagtacgtgaatgctagtgaagtgtcttctgggaagccagtatctgcacgctatagcaacgtcagcagcattgaggactcattcgccatggagaagaagcctccatgtggcagcactccatactctgagaggacaactggagggatctgtacttactgcaaccgtgagatccgagactgtccaaagattaccctagaacatcttggtatctgctgccatgaatattgctttaagtgtgggatttgcagtaaaccgatgggcgatctcctggatcagatcttcattcaccgtgacaccattcactgtgggaaatgctatgagaagctcttctag

SEQ ID NO: 201639 - DNA, 3191 bp, Homo sapiens
  Payload ID: 19790
  Gene Name: zinc finger protein 185 (LIM domain)
  Uniprot ID: O15231
  ENST ID: ENST00000454925
  CDS Start-End: 9-992
aaagtgaaatggccgcccgggacgagctcggcctcggcggggattctcttgaggccatgcccgtgccggccgccagaggtcgcccgaggatcacgaatgggcccgaggagctggctgccccttcccccgcggccttggctgattatgaggggaaggatgtggccaccagggtcggagaggcctggcaggagaggcctggagctccaagaggtggccaaggagacccagctgtacccgctcagcaacctgcagatcccagcaccccagagcggcagagcagccccagcggatctgagcaacttgtcagacgagagagttgtggcagcagcgtgttgactgattttgaggggaaggatgtggccaccaaggtcggagaggcctggcaggacaggcctggagccccaagaggtggccaaggagacccagctgtacccactcagcaacctgcagatcccagtaccccagaacagcagaacagccccagcggatctgagcaattcgtcagacgagagagctgcaccagcagggtgaggagcccctcgagctgcatggtcactgttactgtcactgccacatctgagcagcctcacatttatattccagcccccgcaagtgaattggactccagctctaccaccaaagggattctcttcgtgaaggagtacgtgaatgctagtgaagtgtcttctgggaagccagtatctgcacgctatagcaacgtcagcagcattgaggactcattcgccatggagaagaagcctccatgtggcagcactccatactctgagaggacaactggagggatctgtacttactgcaaccgtgagatccgagactgtccaaagattaccctagaacatcttggtatctgctgccatgaatattgctttaagtgtgggatttgcagtaaaccgatgggcgatctcctggatcagatcttcattcaccgtgacaccattcactgtgggaaatgctatgagaagctcttctagcgaccccccaccgccaggctgatcagaagctgatgactcgtggacaaatttggctgtccccagttttgccccaagttgctgtctccccttccctcacctcctccctccctgtttgatttcttcatgcttttgcccttctcaagttgaagttgcatacatccaatatcgtatcttaatgatgctatgataattgcttgtgtgtgtagcttcttgtagcttagaaagcgctttatgcccatgatgtcatttcaggctcaaccaaagaggatcaaacaggaattccatcttggcttccctaagacagattggctttctaatgagtttaagtgggcagaagtgtagggttcagtgtgtcctgactcccttgaggcttataatgggccaagttgaagactgttgatgatccctggtgggtaaattgcagacatcaaatgctagggattggcataggctagtgtttagcttgtctatttgccatatctattttttttaaatttccatacacttgtaaaagtagttagttgcttttgattgagttatatagcagtttttcatttggtcttccactcacctttcactatatttgagtgttcccttacaggtatgttggcatgtgttggaaaatttacacaattaggtttaaattcagtaggatgtgattttaggatgctactgatcaaagtgatatctgtgtctgttggaatcttgatagctgattaatttgccctcaattctgctccctgaacttcacacataaatcttcccaagtgggttttagggtgtatagatcccagcaggattaaggaggtggaaaagcagctaacatttcttgaggctctaccacatagcaggcactgtcacagagtaatggcattaatccccataataatcctgtgaaggtgatattctcatcccatcttagacatgaggatattggaactcagagaggtggctattgcattgcgcagaacgctacagagcccatgctcttcccagagcagcacccacaaaagcaagcattgattttgtgctcagtgtgtgccaagcactgtgcagagggtacacagttcctgccaggttaacaccctcccttcaggcctcccaaaggcataggcttgcaaagagcagaaggtgtgaaatcacactcttcctctgggcatcctggatccctgaattatccccccccccatgaagtacttcaagggccaagctgcccctttccctcctctccgcccatgaaaatgcctccaaactgagatgctttcagctgagaacagatttgactcacagacattaccaaagaggagcttgtgaatccaggaaaagctccagggggctagctgatctgagcagagagctttcagtgacccattttcctgtctagactctgccttaagctagtggcaactgctggggccccaggtacttgggacatggaaactcgttggatggctgggcagatgtaagcctgtccatgcagtcagccgatcctctgctcaggttcagctggactctgccatctgtgggcccagcatcactctgtaagttccttgaaaggaagaacaaccttagagtatttctgatacaaaatgagggcctctgctcttgatttaattataaaatgtctacgtctttctccagtttctgagccctatgcacattggcttgtgggcttgttcttcctgccaaatgatcagagaggaacattccatttatttgtagtggatttcctctggagggcatgtacccacactaaataccaactgctcttcctcagctgtagtccccaacatcagacttggcacgtggtggacactaacacacaggcactcaatgaatgagtgaaggaaataaaagtcaccccgttggtgagaggtgctatccctgagtctcagtgcaggaccagtggatgaaaggcaaggtaaagaggcccaagataggctggcttcccccgttcaaggtatagtctgcctttaagggagttttagaaccaacatgcaagacattgaaagaaatcttgcaagagccattattgacttagatccaaaacagcctctctcatgtctaaaaaggcacagaattttgcagatctgaggaagagggatgcattacctttttgcttcttttcaattgcttagtgtttctaatcatacttaatccacactaatgtgcgcaattataataaatggtaagatatca

SEQ ID NO: 201640 - DNA, 4328 bp, Homo sapiens
  Payload ID: 19790
  Gene Name: zinc finger protein 185 (LIM domain)
  Uniprot ID: O15231
  ENST ID: ENST00000449285
  CDS Start-End: 49-2121
cagaagccctgctgaatcaagtgagaggagagctgcggagcaatcaccatgagtatctcagctcttggaggccgcaccaaagggaagcctctgccaccaggcgaggaggagcgcaataacgttctcaagcagatgaaagtgcgaaccacgctgaagggggacaagagctggattaccaagcaggatgaatcggagggtcgcaccatagagctgccctcaggccggagtcgcgccacatccttttcatcagctggggaggttccgaagcctaggcctccgagcacaagggctcccactggctacatcatccggggagtgttcaccaagcccatagacagctcttcccagccccagcagcagttccccaaggccaacgggactccaaaaagtgctgccagtctggtgagaacagctaacgctggtcctccccgcccctcctcctctggctacaagatgaccactgaggattacaagaagctggcaccctacaatatcaggcgcagctctacatcaggggacaccgaggaggaggaggaggaggaggtggtgccattctcctcagatgaacagaaacggaggtcagaggctgcaagcggtgttctgaggaggacagctccccgggagcactcctacgtcctgtcagcggccaagaagagcactggcagtcctacccaggagacacaggcaccgtttatcgcgaagagggtggaggtggtggaagaggacgggccttctgagaagagccaggacccacctgctctggcaagatccactcctggctcaaacagtgcggatggaggcaggaccaaagcgtctcgggcaatttggatcgagtgcctgccaagtatgcctagccccgctgggagccaggagctcagctcaagaggtgaggaaattgtccgcctgcagatcctgacacccagggcaggactccgcctggtggccccagacgtggaaggcatgaggtcttccccaggcaacaaagacaaggaggccccctgctccagagagctccagagggacttggctggtgaggaggctttcagggcccccaacacagatgctgcaaggtcaagtgcacagttgagtgatggcaatgtgggatccggagccacgggctcccggcctgaaggcttggctgcagtagacatcggctccgagagaggaagctccagtgccacttcagtctctgctgtccctgctgataggaagagcaacagcacagcagcccaggaggatgcaaaggcagacccaaagggggccttggctgattatgaggggaaggatgtggccaccagggtcggagaggcctggcaggagaggcctggagctccaagaggtggccaaggagacccagctgtacccgctcagcaacctgcagatcccagcaccccagagcggcagagcagccccagcggatctgagcaacttgtcagacgagagagttgtggcagcagcgtgttgactgattttgaggggaaggatgtggccaccaaggtcggagaggcctggcaggacaggcctggagccccaagaggtggccaaggagacccagctgtacccactcagcaacctgcagatcccagtaccccagaacagcagaacagccccagcggatctgagcaattcgtcagacgagagagctgcaccagcagggtgaggagcccctcgagctgcatggtcactgttactgtcactgccacatctgagcagcctcacatttatattccagcccccgcaagtgaattggactccagctctaccaccaaagggattctcttcgtgaaggagtacgtgaatgctagtgaagtgtcttctgggaagccagtatctgcacgctatagcaacgtcagcagcattgaggactcattcgccatggagaagaagcctccatgtggcagcactccatactctgagaggacaactggagggatctgtacttactgcaaccgtgagatccgagactgtccaaagattaccctagaacatcttggtatctgctgccatgaatattgctttaagtgtgggatttgcagtaaaccgatgggcgatctcctggatcagatcttcattcaccgtgacaccattcactgtgggaaatgctatgagaagctcttctagcgaccccccaccgccaggctgatcagaagctgatgactcgtggacaaatttggctgtccccagttttgccccaagttgctgtctccccttccctcacctcctccctccctgtttgatttcttcatgcttttgcccttctcaagttgaagttgcatacatccaatatcgtatcttaatgatgctatgataattgcttgtgtgtgtagcttcttgtagcttagaaagcgctttatgcccatgatgtcatttcaggctcaaccaaagaggatcaaacaggaattccatcttggcttccctaagacagattggctttctaatgagtttaagtgggcagaagtgtagggttcagtgtgtcctgactcccttgaggcttataatgggccaagttgaagactgttgatgatccctggtgggtaaattgcagacatcaaatgctagggattggcataggctagtgtttagcttgtctatttgccatatctattttttttaaatttccatacacttgtaaaagtagttagttgcttttgattgagttatatagcagtttttcatttggtcttccactcacctttcactatatttgagtgttcccttacaggtatgttggcatgtgttggaaaatttacacaattaggtttaaattcagtaggatgtgattttaggatgctactgatcaaagtgatatctgtgtctgttggaatcttgatagctgattaatttgccctcaattctgctccctgaacttcacacataaatcttcccaagtgggttttagggtgtatagatcccagcaggattaaggaggtggaaaagcagctaacatttcttgaggctctaccacatagcaggcactgtcacagagtaatggcattaatccccataataatcctgtgaaggtgatattctcatcccatcttagacatgaggatattggaactcagagaggtggctattgcattgcgcagaacgctacagagcccatgctcttcccagagcagcacccacaaaagcaagcattgattttgtgctcagtgtgtgccaagcactgtgcagagggtacacagttcctgccaggttaacaccctcccttcaggcctcccaaaggcataggcttgcaaagagcagaaggtgtgaaatcacactcttcctctgggcatcctggatccctgaattatccccccccccatgaagtacttcaagggccaagctgcccctttccctcctctccgcccatgaaaatgcctccaaactgagatgctttcagctgagaacagatttgactcacagacattaccaaagaggagcttgtgaatccaggaaaagctccagggggctagctgatctgagcagagagctttcagtgacccattttcctgtctagactctgccttaagctagtggcaactgctggggccccaggtacttgggacatggaaactcgttggatggctgggcagatgtaagcctgtccatgcagtcagccgatcctctgctcaggttcagctggactctgccatctgtgggcccagcatcactctgtaagttccttgaaaggaagaacaaccttagagtatttctgatacaaaatgagggcctctgctcttgatttaattataaaatgtctacgtctttctccagtttctgagccctatgcacattggcttgtgggcttgttcttcctgccaaatgatcagagaggaacattccatttatttgtagtggatttcctctggagggcatgtacccacactaaataccaactgctcttcctcagctgtagtccccaacatcagacttggcacgtggtggacactaacacacaggcactcaatgaatgagtgaaggaaataaaagtcaccccgttggtgagaggtgctatccctgagtctcagtgcaggaccagtggatgaaaggcaaggtaaagaggcccaagataggctggcttcccccgttcaaggtatagtctgcctttaagggagttttagaaccaacatgcaagacattgaaagaaatcttgcaagagccattattgacttagatccaaaacagcctctctcatgtctaaaaaggcacagaattttgcagatctgaggaagagggatgcattacctttttgcttcttttcaattgcttagtgtttctaatcatacttaatccacactaatgtgcgcaattataataaatggtaagatatcacatgtgtc

SEQ ID NO: 201641 - DNA, 554 bp, Homo sapiens
  Payload ID: 19790
  Gene Name: zinc finger protein 185 (LIM domain)
  ENST ID: ENST00000447792
  CDS Start-End: 1-554
cagtcctacccaggagacacaggcaccgtttatcgcgaagagggtggaggtggtggaagaggacgggccttctgagaagagccaggacccacctgctctggcaagatccactcctggctcaaacagtgcggatggaggcaggaccaaagcgtctcgggcaatttggatcgagtgcctgccaagtatgcctagccccgctgggagccaggagctcaggtcttccccaggcaacaaagacaaggaggccccctgctccagagagctccagagggacttggctggtgaggaggctttcagggcccccaacacagatgctgcaagctccagtgccacttcagtctctgctgtccctgctgataggaagagcaacagcacagcagcccaggaggatgcaaaggcagacccaaagggcgtgttgactgattttgaggggaaggatgtggccaccaaggtcggagaggcctggcaggacaggcctggagccccaagaggtggccaaggagacccagctgtacccactcagcaacctgcagatcccagtaccccagaacagc

SEQ ID NO: 201642 - DNA, 3545 bp, Homo sapiens
  Payload ID: 19790
  Gene Name: zinc finger protein 185 (LIM domain)
  ENST ID: ENST00000426821
  CDS Start-End: 1-1345
tctgaggaggacagctccccgggagcactcctacgtcctgtcagcggccaagaagagcactggcagtcctacccaggagacacaggcaccgtttatcgcgaagagggtggaggtggtggaagaggacgggccttctgagaagagccaggacccacctgctctggcaagatccactcctggctcaaacaggtcttccccaggcaacaaagacaaggaggccccctgctccagagagctccagagggacttggctggtgaggaggctttcagggcccccaacacagatgctgcaaggtcaagtgcacagttgagtgatggcaatgtgggatccggagccacgggctcccggcctgaaggcttggctgcagtagacatcggctccgagagaggaagctccagtgccacttcagtctctgctgtccctgctgataggaagagcaacagcacagcagcccaggaggatgcaaaggcagacccaaagggggccttggctgattatgaggggaaggatgtggccaccagggtcggagaggcctggcaggagaggcctggagctccaagaggtggccaaggagacccagctgtacccgctcagcaacctgcagatcccagcaccccagagcggcagagcagccccagcggatctgagcaacttgtcagacgagagagttgtggcagcagcgtgttgactgattttgaggggaaggatgtggccaccaaggtcggagaggcctggcaggacaggcctggagccccaagaggtggccaaggagacccagctgtacccactcagcaacctgcagatcccagtaccccagaacagcagaacagccccagcggatctgagcaattcgtcagacgagagagctgcaccagcagggtgaggagcccctcgagctgcatggtcactgttactgtcactgccacatctgagcagcctcacatttatattccagcccccgcaagtgaattggactccagctctaccaccaaagggattctcttcgtgaaggagtacgtgaatgctagtgaagtgtcttctgggaagccagtatctgcacgctatagcaacgtcagcagcattgaggactcattcgccatggagaagaagcctccatgtggcagcactccatactctgagaggacaactggagggatctgtacttactgcaaccgtgagatccgagactgtccaaagattaccctagaacatcttggtatctgctgccatgaatattgctttaagtgtgggatttgcagtaaaccgatgggcgatctcctggatcagatcttcattcaccgtgacaccattcactgtgggaaatgctatgagaagctcttctagcgaccccccaccgccaggctgatcagaagctgatgactcgtggacaaatttggctgtccccagttttgccccaagttgctgtctccccttccctcacctcctccctccctgtttgatttcttcatgcttttgcccttctcaagttgaagttgcatacatccaatatcgtatcttaatgatgctatgataattgcttgtgtgtgtagcttcttgtagcttagaaagcgctttatgcccatgatgtcatttcaggctcaaccaaagaggatcaaacaggaattccatcttggcttccctaagacagattggctttctaatgagtttaagtgggcagaagtgtagggttcagtgtgtcctgactcccttgaggcttataatgggccaagttgaagactgttgatgatccctggtgggtaaattgcagacatcaaatgctagggattggcataggctagtgtttagcttgtctatttgccatatctattttttttaaatttccatacacttgtaaaagtagttagttgcttttgattgagttatatagcagtttttcatttggtcttccactcacctttcactatatttgagtgttcccttacaggtatgttggcatgtgttggaaaatttacacaattaggtttaaattcagtaggatgtgattttaggatgctactgatcaaagtgatatctgtgtctgttggaatcttgatagctgattaatttgccctcaattctgctccctgaacttcacacataaatcttcccaagtgggttttagggtgtatagatcccagcaggattaaggaggtggaaaagcagctaacatttcttgaggctctaccacatagcaggcactgtcacagagtaatggcattaatccccataataatcctgtgaaggtgatattctcatcccatcttagacatgaggatattggaactcagagaggtggctattgcattgcgcagaacgctacagagcccatgctcttcccagagcagcacccacaaaagcaagcattgattttgtgctcagtgtgtgccaagcactgtgcagagggtacacagttcctgccaggttaacaccctcccttcaggcctcccaaaggcataggcttgcaaagagcagaaggtgtgaaatcacactcttcctctgggcatcctggatccctgaattatccccccccccatgaagtacttcaagggccaagctgcccctttccctcctctccgcccatgaaaatgcctccaaactgagatgctttcagctgagaacagatttgactcacagacattaccaaagaggagcttgtgaatccaggaaaagctccagggggctagctgatctgagcagagagctttcagtgacccattttcctgtctagactctgccttaagctagtggcaactgctggggccccaggtacttgggacatggaaactcgttggatggctgggcagatgtaagcctgtccatgcagtcagccgatcctctgctcaggttcagctggactctgccatctgtgggcccagcatcactctgtaagttccttgaaaggaagaacaaccttagagtatttctgatacaaaatgagggcctctgctcttgatttaattataaaatgtctacgtctttctccagtttctgagccctatgcacattggcttgtgggcttgttcttcctgccaaatgatcagagaggaacattccatttatttgtagtggatttcctctggagggcatgtacccacactaaataccaactgctcttcctcagctgtagtccccaacatcagacttggcacgtggtggacactaacacacaggcactcaatgaatgagtgaaggaaataaaagtcaccccgttggtgagaggtgctatccctgagtctcagtgcaggaccagtggatgaaaggcaaggtaaagaggcccaagataggctggcttcccccgttcaaggtatagtctgcctttaagggagttttagaaccaacatgcaagacattgaaagaaatcttgcaagagccattattgacttagatccaaaacagcctctctcatgtctaaaaaggcacagaattttgcagatctgaggaagagggatgcattacctttttgcttcttttcaattgcttagtgtttctaatcatacttaatccacactaatgtgcgcaattataataaatggtaagatatcac

SEQ ID NO: 201643 - DNA, 4421 bp, Homo sapiens
  Payload ID: 19790
  Gene Name: zinc finger protein 185 (LIM domain)
  Uniprot ID: O15231
  ENST ID: ENST00000535861
  CDS Start-End: 49-2214
cagaagccctgctgaatcaagtgagaggagagctgcggagcaatcaccatgagtatctcagctcttggaggccgcaccaaagggaagcctctgccaccaggcgaggaggagcgcaataacgttctcaagcagatgaaagtgcgaaccacgctgaagggggacaagagctggattaccaagcaggatgaatcggagggtcgcaccatagagctgccctcaggccggagtcgcgccacatccttttcatcagctggggaggttccgaagcctaggcctccgagcacaagggctcccactggctacatcatccggggagtgttcaccaagcccatagacagctcttcccagccccagcagcagttccccaaggccaacgggactccaaaaagtgctgccagtctggtgagaacagctaacgctggtcctccccgcccctcctcctctggctacaagatgaccactgaggattacaagaagctggcaccctacaatatcaggcgcagctctacatcaggggacaccgaggaggaggaggaggaggaggtggtgccattctcctcagatgaacagaaacggaggtcagaggctgcaagcggtgttctgaggaggacagctccccgggagcactcctacgtcctgtcagcggccaagaagagcactggtcctacccaggagacacaggcaccgtttatcgcgaagagggtggaggtggtggaagaggacgggccttctgagaagagccaggacccacctgctctggcaagatccactcctggctcaaacagtgcggatggaggcaggaccaaagcgtctcgggcaatttggatcgagtgcctgccaagtatgcctagccccgctgggagccaggagctcagctcaagaggtgaggaaattgtccgcctgcagatcctgacacccagggcaggactccgcctggtggccccagacgtggaaggcatgaggtcttccccaggcaacaaagacaaggaggccccctgctccagagagctccagagggacttggctggtgaggaggctttcagggcccccaacacagatgctgcaaggtcaagtgcacagttgagtgatggcaatgtgggatccggagccacgggctcccggcctgaaggcttggctgcagtagacatcggctccgagagaggaaggctgtgtgcagctgctagctttgcctctttcctggaagaccaggatgggcacagtgccaactctcagtcctgcaagcctagaccagcagccatcagctccagtgccacttcagtctctgctgtccctgctgataggaagagcaacagcacagcagcccaggaggatgcaaaggcagacccaaagggggccttggctgattatgaggggaaggatgtggccaccagggtcggagaggcctggcaggagaggcctggagctccaagaggtggccaaggagacccagctgtacccgctcagcaacctgcagatcccagcaccccagagcggcagagcagccccagcggatctgagcaacttgtcagacgagagagttgtggcagcagcgtgttgactgattttgaggggaaggatgtggccaccaaggtcggagaggcctggcaggacaggcctggagccccaagaggtggccaaggagacccagctgtacccactcagcaacctgcagatcccagtaccccagaacagcagaacagccccagcggatctgagcaattcgtcagacgagagagctgcaccagcagggtgaggagcccctcgagctgcatggtcactgttactgtcactgccacatctgagcagcctcacatttatattccagcccccgcaagtgaattggactccagctctaccaccaaagggattctcttcgtgaaggagtacgtgaatgctagtgaagtgtcttctgggaagccagtatctgcacgctatagcaacgtcagcagcattgaggactcattcgccatggagaagaagcctccatgtggcagcactccatactctgagaggacaactggagggatctgtacttactgcaaccgtgagatccgagactgtccaaagattaccctagaacatcttggtatctgctgccatgaatattgctttaagtgtgggatttgcagtaaaccgatgggcgatctcctggatcagatcttcattcaccgtgacaccattcactgtgggaaatgctatgagaagctcttctagcgaccccccaccgccaggctgatcagaagctgatgactcgtggacaaatttggctgtccccagttttgccccaagttgctgtctccccttccctcacctcctccctccctgtttgatttcttcatgcttttgcccttctcaagttgaagttgcatacatccaatatcgtatcttaatgatgctatgataattgcttgtgtgtgtagcttcttgtagcttagaaagcgctttatgcccatgatgtcatttcaggctcaaccaaagaggatcaaacaggaattccatcttggcttccctaagacagattggctttctaatgagtttaagtgggcagaagtgtagggttcagtgtgtcctgactcccttgaggcttataatgggccaagttgaagactgttgatgatccctggtgggtaaattgcagacatcaaatgctagggattggcataggctagtgtttagcttgtctatttgccatatctattttttttaaatttccatacacttgtaaaagtagttagttgcttttgattgagttatatagcagtttttcatttggtcttccactcacctttcactatatttgagtgttcccttacaggtatgttggcatgtgttggaaaatttacacaattaggtttaaattcagtaggatgtgattttaggatgctactgatcaaagtgatatctgtgtctgttggaatcttgatagctgattaatttgccctcaattctgctccctgaacttcacacataaatcttcccaagtgggttttagggtgtatagatcccagcaggattaaggaggtggaaaagcagctaacatttcttgaggctctaccacatagcaggcactgtcacagagtaatggcattaatccccataataatcctgtgaaggtgatattctcatcccatcttagacatgaggatattggaactcagagaggtggctattgcattgcgcagaacgctacagagcccatgctcttcccagagcagcacccacaaaagcaagcattgattttgtgctcagtgtgtgccaagcactgtgcagagggtacacagttcctgccaggttaacaccctcccttcaggcctcccaaaggcataggcttgcaaagagcagaaggtgtgaaatcacactcttcctctgggcatcctggatccctgaattatccccccccccatgaagtacttcaagggccaagctgcccctttccctcctctccgcccatgaaaatgcctccaaactgagatgctttcagctgagaacagatttgactcacagacattaccaaagaggagcttgtgaatccaggaaaagctccagggggctagctgatctgagcagagagctttcagtgacccattttcctgtctagactctgccttaagctagtggcaactgctggggccccaggtacttgggacatggaaactcgttggatggctgggcagatgtaagcctgtccatgcagtcagccgatcctctgctcaggttcagctggactctgccatctgtgggcccagcatcactctgtaagttccttgaaaggaagaacaaccttagagtatttctgatacaaaatgagggcctctgctcttgatttaattataaaatgtctacgtctttctccagtttctgagccctatgcacattggcttgtgggcttgttcttcctgccaaatgatcagagaggaacattccatttatttgtagtggatttcctctggagggcatgtacccacactaaataccaactgctcttcctcagctgtagtccccaacatcagacttggcacgtggtggacactaacacacaggcactcaatgaatgagtgaaggaaataaaagtcaccccgttggtgagaggtgctatccctgagtctcagtgcaggaccagtggatgaaaggcaaggtaaagaggcccaagataggctggcttcccccgttcaaggtatagtctgcctttaagggagttttagaaccaacatgcaagacattgaaagaaatcttgcaagagccattattgacttagatccaaaacagcctctctcatgtctaaaaaggcacagaattttgcagatctgaggaagagggatgcattacctttttgcttcttttcaattgcttagtgtttctaatcatacttaatccacactaatgtgcgcaattataataaatggtaagatatcacatgtgtc

SEQ ID NO: 201644 - DNA, 4334 bp, Homo sapiens
  Payload ID: 19790
  Gene Name: zinc finger protein 185 (LIM domain)
  Uniprot ID: O15231
  ENST ID: ENST00000539731
  CDS Start-End: 49-2127
cagaagccctgctgaatcaagtgagaggagagctgcggagcaatcaccatgagtatctcagctcttggaggccgcaccaaagggaagcctctgccaccaggcgaggaggagcgcaataacgttctcaagcagatgaaagtgcgaaccacgctgaagggggacaagagctggattaccaagcaggatgaatcggagggtcgcaccatagagctgccctcaggccggagtcgcgccacatccttttcatcagctggggaggttccgaagcctaggcctccgagcacaagggctcccactggctacatcatccggggagtgttcaccaagcccatagacagctcttcccagccccagcagcagttccccaaggccaacgggactccaaaaagtgctgccagtctggtgagaacagctaacgctggtcctccccgcccctcctcctctggctacaagatgaccactgaggattacaagaagctggcaccctacaatatcaggcgcagctctacatcaggggacaccgaggaggaggaggaggaggaggtggtgccattctcctcagatgaacagaaacggaggtcagaggctgcaagcggtgttctgaggaggacagctccccgggagcactcctacgtcctgtcagcggccaagaagagcactggtcctacccaggagacacaggcaccgtttatcgcgaagagggtggaggtggtggaagaggacgggccttctgagaagagccaggacccacctgctctggcaagatccactcctggctcaaacagtgcggatggaggcaggaccaaagcgtctcgggcaatttggatcgagtgcctgccaagtatgcctagccccgctgggagccaggagctcaggtcttccccaggcaacaaagacaaggaggccccctgctccagagagctccagagggacttggctggtgaggaggctttcagggcccccaacacagatgctgcaaggtcaagtgcacagttgagtgatggcaatgtgggatccggagccacgggctcccggcctgaaggcttggctgcagtagacatcggctccgagagaggaaggctgtgtgcagctgctagctttgcctctttcctggaagaccaggatgggcacagtgccaactctcagtcctgcaagcctagaccagcagccatcagctccagtgccacttcagtctctgctgtccctgctgataggaagagcaacagcacagcagcccaggaggatgcaaaggcagacccaaagggggccttggctgattatgaggggaaggatgtggccaccagggtcggagaggcctggcaggagaggcctggagctccaagaggtggccaaggagacccagctgtacccgctcagcaacctgcagatcccagcaccccagagcggcagagcagccccagcggatctgagcaacttgtcagacgagagagttgtggcagcagcgtgttgactgattttgaggggaaggatgtggccaccaaggtcggagaggcctggcaggacaggcctggagccccaagaggtggccaaggagacccagctgtacccactcagcaacctgcagatcccagtaccccagaacagcagaacagccccagcggatctgagcaattcgtcagacgagagagctgcaccagcagggtgaggagcccctcgagctgcatggtcactgttactgtcactgccacatctgagcagcctcacatttatattccagcccccgcaagtgaattggactccagctctaccaccaaagggattctcttcgtgaaggagtacgtgaatgctagtgaagtgtcttctgggaagccagtatctgcacgctatagcaacgtcagcagcattgaggactcattcgccatggagaagaagcctccatgtggcagcactccatactctgagaggacaactggagggatctgtacttactgcaaccgtgagatccgagactgtccaaagattaccctagaacatcttggtatctgctgccatgaatattgctttaagtgtgggatttgcagtaaaccgatgggcgatctcctggatcagatcttcattcaccgtgacaccattcactgtgggaaatgctatgagaagctcttctagcgaccccccaccgccaggctgatcagaagctgatgactcgtggacaaatttggctgtccccagttttgccccaagttgctgtctccccttccctcacctcctccctccctgtttgatttcttcatgcttttgcccttctcaagttgaagttgcatacatccaatatcgtatcttaatgatgctatgataattgcttgtgtgtgtagcttcttgtagcttagaaagcgctttatgcccatgatgtcatttcaggctcaaccaaagaggatcaaacaggaattccatcttggcttccctaagacagattggctttctaatgagtttaagtgggcagaagtgtagggttcagtgtgtcctgactcccttgaggcttataatgggccaagttgaagactgttgatgatccctggtgggtaaattgcagacatcaaatgctagggattggcataggctagtgtttagcttgtctatttgccatatctattttttttaaatttccatacacttgtaaaagtagttagttgcttttgattgagttatatagcagtttttcatttggtcttccactcacctttcactatatttgagtgttcccttacaggtatgttggcatgtgttggaaaatttacacaattaggtttaaattcagtaggatgtgattttaggatgctactgatcaaagtgatatctgtgtctgttggaatcttgatagctgattaatttgccctcaattctgctccctgaacttcacacataaatcttcccaagtgggttttagggtgtatagatcccagcaggattaaggaggtggaaaagcagctaacatttcttgaggctctaccacatagcaggcactgtcacagagtaatggcattaatccccataataatcctgtgaaggtgatattctcatcccatcttagacatgaggatattggaactcagagaggtggctattgcattgcgcagaacgctacagagcccatgctcttcccagagcagcacccacaaaagcaagcattgattttgtgctcagtgtgtgccaagcactgtgcagagggtacacagttcctgccaggttaacaccctcccttcaggcctcccaaaggcataggcttgcaaagagcagaaggtgtgaaatcacactcttcctctgggcatcctggatccctgaattatccccccccccatgaagtacttcaagggccaagctgcccctttccctcctctccgcccatgaaaatgcctccaaactgagatgctttcagctgagaacagatttgactcacagacattaccaaagaggagcttgtgaatccaggaaaagctccagggggctagctgatctgagcagagagctttcagtgacccattttcctgtctagactctgccttaagctagtggcaactgctggggccccaggtacttgggacatggaaactcgttggatggctgggcagatgtaagcctgtccatgcagtcagccgatcctctgctcaggttcagctggactctgccatctgtgggcccagcatcactctgtaagttccttgaaaggaagaacaaccttagagtatttctgatacaaaatgagggcctctgctcttgatttaattataaaatgtctacgtctttctccagtttctgagccctatgcacattggcttgtgggcttgttcttcctgccaaatgatcagagaggaacattccatttatttgtagtggatttcctctggagggcatgtacccacactaaataccaactgctcttcctcagctgtagtccccaacatcagacttggcacgtggtggacactaacacacaggcactcaatgaatgagtgaaggaaataaaagtcaccccgttggtgagaggtgctatccctgagtctcagtgcaggaccagtggatgaaaggcaaggtaaagaggcccaagataggctggcttcccccgttcaaggtatagtctgcctttaagggagttttagaaccaacatgcaagacattgaaagaaatcttgcaagagccattattgacttagatccaaaacagcctctctcatgtctaaaaaggcacagaattttgcagatctgaggaagagggatgcattacctttttgcttcttttcaattgcttagtgtttctaatcatacttaatccacactaatgtgcgcaattataataaatggtaagatatcacatgtgtc

SEQ ID NO: 201645 - DNA, 3115 bp, Homo sapiens
  Payload ID: 19791
  Gene Name: zinc finger protein 189
  Uniprot ID: O75820
  ENST ID: ENST00000259395
  CDS Start-End: 350-2104
gcactggccagacccagccagggatcctcgtattcgtcgagcctaatttccagcagccgggtaggcctcaccagaggctcctttccgtgaggccgcccccaattcctgcccctattctctgcctgggagatggcttccccgagccccccgccggagtcgaagagagacttgataaatcggcctgagaaaataagtaatgctccagactagctctctcatttgtgagttctccaggtgaagcaccatttttgaccttcccttgtgtcttctgttcctggcacagtgcctggaccccaaggaggagtgggattatctggacccagctcagagaagcctgtataaagatgtcatgatggagaattatggaaacctggtctcactggatgttttgaacagagataaggatgaggagccaactgtaaaacaagagattgaagaaattgaggaagaagtggaaccacagggtgtaatagttacaagaatcaaaagtgaaattgaccaggatcctatgggtagagaaacatttgaacttgttggtaggttagataaacaaagagggatcttcctatgggaaataccaagggaatctttgacccaggaacagagaatgttcagagaaaacactaacattatccgtaaaagaccaaactcagaagagaaatgccataaatgtgaagaatgtggaaagggttttgtccgcaaggcccatttcattcaacatcaaagggtccatactggtgagaaaccttttcagtgcaatgaatgtgggaaaagttttagtcgcagttcatttgttattgaacatcagagaattcacactggggaaaggccctatgagtgtaattactgtggaaaaacctttagtgtgagctcaacccttattagacatcagagaatccacactggagaaagaccctatcagtgtaatcagtgtaaacagagcttcagccagagaaggagccttgttaaacatcaaaggattcatacaggtgagaaaccccataaatgtagtgactgtgggaaagccttcagttggaaatcacaccttattgagcatcaaagaactcacactggtgagaaaccttatcactgtaccaaatgtaagaagagctttagtcgaaattcattgcttgttgagcatcaaagaattcacactggggaaagaccccataaatgtggtgaatgtgggaaagcctttcgattaagcacataccttatacaacaccaaaaaattcacactggcgagaagccttttctttgtattgagtgtggaaaaagtttcagtcggagctcattccttattgaacatcagaggatccatactggtgaaagaccttatcagtgcaaagagtgtgggaaaagtttcagtcagctttgcaaccttactcgtcatcagagaattcacacaggagacaagccccataaatgtgaggaatgtggaaaagcctttagtagaagctcaggtcttattcagcatcagagaattcacaccagggagaagacttatccatacaatgaaactaaggaaagttttgatccaaattgcagtcttgttatacagcaggaagtctaccctaaggagaaatcttataaatgtgatgaatgtgggaaaacttttagtgttagtgctcatcttgtacaacatcaaagaatccacactggtgaaaagccctatctatgtactgtctgtgggaaaagcttcagccggagctcatttcttattgaacatcagagaatccacactggtgagagaccctatctgtgcagacagtgtggaaaaagctttagtcagctttgtaatcttattcgacatcagggtgttcacacaggtaataaaccccataaatgtgatgaatgtggaaaggcctttagccggaactcgggtcttattcagcatcagagaatacacacaggagagaaaccttataagtgtgagaagtgcgacaaaagtttcagtcaacagcgcagtcttgtcaaccatcagaagatccatgcagaggtgaaaacccaagaaacccatgaatgtgacgcttgtggtgaagcctttaattgccgtatttctcttattcagcatcagaaattgcacacagcatggatgcaataaatgtagagcaatacataagctcaatttgatttgagactagtacccaagtgcagttttagtatggctcaacatgggtcagatttagtgataaagcaaattctccttggcctcaggcaaatagtttctaaagattctgtgaatagtggacaactgcccatgagcatttgacttcccttactctttgatgatcgtagagaaagacttggtaatttatctaagtatctttaataaatctttcagcagagagattaaacctaggttcagagcatgggtgctctgagggacaaagttggattagtataagggagctggagcagctgatagtggaaaacagaataatgattcaaagagtcttctgtcaccatgtcatattgtggttctttcagttccatgatatgtttggctctgcatgccaaagtccagtgattaagcatatataagttgtcaaggaaacaaagcccaaatgtttttaaaacaagtatacagtttttgtcattgtttaagaaagccagttgtttggcatgtgagttaaaggcagttccaatgcctgatggttcccagatctatgaaatgagtggaccattaaccttacatgtaaagattatgttagtaattaagaaacctaacaaaggtgttaccaaggaacctttgggagtgccttttttgtttttcaagatggacccaaaaaagtggaggaagatattgttcttttgtgccctcctacctgtgagagatatttgtagtcctatgtgaatgagcttatccctccacaaccaggtgcatatgaaagtgtacatattatgactgccaagtattggaaatgaaaagacctggagtctatgctaggaagctgagatattttggtattgcattggtttttatggtaactaggttttgcatgcaattaaaaatccttatttcttgttctagggcttcccttagttaatggttattataaacctattaattcatctgttttaaccattaaaacctgttttgtttttagctttg

SEQ ID NO: 201646 - DNA, 3021 bp, Homo sapiens
  Payload ID: 19791
  Gene Name: zinc finger protein 189
  Uniprot ID: O75820
  ENST ID: ENST00000339664
  CDS Start-End: 130-2010
gcactggccagacccagccagggatcctcgtattcgtcgagcctaatttccagcagccgggtaggcctcaccagaggctcctttccgtgaggccgcccccaattcctgcccctattctctgcctgggagatggcttccccgagccccccgccggagtcgaaggggttgctgacatttgaggatgtggctgtgttttttacccaggaggagtgggattatctggacccagctcagagaagcctgtataaagatgtcatgatggagaattatggaaacctggtctcactggatgttttgaacagagataaggatgaggagccaactgtaaaacaagagattgaagaaattgaggaagaagtggaaccacagggtgtaatagttacaagaatcaaaagtgaaattgaccaggatcctatgggtagagaaacatttgaacttgttggtaggttagataaacaaagagggatcttcctatgggaaataccaagggaatctttgacccaggaacagagaatgttcagagaaaacactaacattatccgtaaaagaccaaactcagaagagaaatgccataaatgtgaagaatgtggaaagggttttgtccgcaaggcccatttcattcaacatcaaagggtccatactggtgagaaaccttttcagtgcaatgaatgtgggaaaagttttagtcgcagttcatttgttattgaacatcagagaattcacactggggaaaggccctatgagtgtaattactgtggaaaaacctttagtgtgagctcaacccttattagacatcagagaatccacactggagaaagaccctatcagtgtaatcagtgtaaacagagcttcagccagagaaggagccttgttaaacatcaaaggattcatacaggtgagaaaccccataaatgtagtgactgtgggaaagccttcagttggaaatcacaccttattgagcatcaaagaactcacactggtgagaaaccttatcactgtaccaaatgtaagaagagctttagtcgaaattcattgcttgttgagcatcaaagaattcacactggggaaagaccccataaatgtggtgaatgtgggaaagcctttcgattaagcacataccttatacaacaccaaaaaattcacactggcgagaagccttttctttgtattgagtgtggaaaaagtttcagtcggagctcattccttattgaacatcagaggatccatactggtgaaagaccttatcagtgcaaagagtgtgggaaaagtttcagtcagctttgcaaccttactcgtcatcagagaattcacacaggagacaagccccataaatgtgaggaatgtggaaaagcctttagtagaagctcaggtcttattcagcatcagagaattcacaccagggagaagacttatccatacaatgaaactaaggaaagttttgatccaaattgcagtcttgttatacagcaggaagtctaccctaaggagaaatcttataaatgtgatgaatgtgggaaaacttttagtgttagtgctcatcttgtacaacatcaaagaatccacactggtgaaaagccctatctatgtactgtctgtgggaaaagcttcagccggagctcatttcttattgaacatcagagaatccacactggtgagagaccctatctgtgcagacagtgtggaaaaagctttagtcagctttgtaatcttattcgacatcagggtgttcacacaggtaataaaccccataaatgtgatgaatgtggaaaggcctttagccggaactcgggtcttattcagcatcagagaatacacacaggagagaaaccttataagtgtgagaagtgcgacaaaagtttcagtcaacagcgcagtcttgtcaaccatcagaagatccatgcagaggtgaaaacccaagaaacccatgaatgtgacgcttgtggtgaagcctttaattgccgtatttctcttattcagcatcagaaattgcacacagcatggatgcaataaatgtagagcaatacataagctcaatttgatttgagactagtacccaagtgcagttttagtatggctcaacatgggtcagatttagtgataaagcaaattctccttggcctcaggcaaatagtttctaaagattctgtgaatagtggacaactgcccatgagcatttgacttcccttactctttgatgatcgtagagaaagacttggtaatttatctaagtatctttaataaatctttcagcagagagattaaacctaggttcagagcatgggtgctctgagggacaaagttggattagtataagggagctggagcagctgatagtggaaaacagaataatgattcaaagagtcttctgtcaccatgtcatattgtggttctttcagttccatgatatgtttggctctgcatgccaaagtccagtgattaagcatatataagttgtcaaggaaacaaagcccaaatgtttttaaaacaagtatacagtttttgtcattgtttaagaaagccagttgtttggcatgtgagttaaaggcagttccaatgcctgatggttcccagatctatgaaatgagtggaccattaaccttacatgtaaagattatgttagtaattaagaaacctaacaaaggtgttaccaaggaacctttgggagtgccttttttgtttttcaagatggacccaaaaaagtggaggaagatattgttcttttgtgccctcctacctgtgagagatatttgtagtcctatgtgaatgagcttatccctccacaaccaggtgcatatgaaagtgtacatattatgactgccaagtattggaaatgaaaagacctggagtctatgctaggaagctgagatattttggtattgcattggtttttatggtaactaggttttgcatgcaattaaaaatccttatttcttgttctagggcttcccttagttaatggttattataaacctattaattcatctgttttaaccattaaaacctgttttgtttttagctttg

SEQ ID NO: 201647 - DNA, 3134 bp, Homo sapiens
  Payload ID: 19791
  Gene Name: zinc finger protein 189
  Uniprot ID: O75820
  ENST ID: ENST00000374861
  CDS Start-End: 285-2123
aaggaggaggaactggcagcggggaggaggctctagcgaggcctgaaaggctgcgtaaccaggcaggagtaggggttggggttcggggttgggggacagccagggatcgcgtctgatatgctgttggggtcgtgaccgtctgggggccgaggcaggcactggccagacccagccagggatcctcgtattcgtcgagcctaatttccagcagccgggtaggcctcaccagaggctcctttccgtgaggccgcccccaattcctgcccctattctctgcctgggagatggcttccccgagccccccgccggagtcgaaggaggagtgggattatctggacccagctcagagaagcctgtataaagatgtcatgatggagaattatggaaacctggtctcactggatgttttgaacagagataaggatgaggagccaactgtaaaacaagagattgaagaaattgaggaagaagtggaaccacagggtgtaatagttacaagaatcaaaagtgaaattgaccaggatcctatgggtagagaaacatttgaacttgttggtaggttagataaacaaagagggatcttcctatgggaaataccaagggaatctttgacccaggaacagagaatgttcagagaaaacactaacattatccgtaaaagaccaaactcagaagagaaatgccataaatgtgaagaatgtggaaagggttttgtccgcaaggcccatttcattcaacatcaaagggtccatactggtgagaaaccttttcagtgcaatgaatgtgggaaaagttttagtcgcagttcatttgttattgaacatcagagaattcacactggggaaaggccctatgagtgtaattactgtggaaaaacctttagtgtgagctcaacccttattagacatcagagaatccacactggagaaagaccctatcagtgtaatcagtgtaaacagagcttcagccagagaaggagccttgttaaacatcaaaggattcatacaggtgagaaaccccataaatgtagtgactgtgggaaagccttcagttggaaatcacaccttattgagcatcaaagaactcacactggtgagaaaccttatcactgtaccaaatgtaagaagagctttagtcgaaattcattgcttgttgagcatcaaagaattcacactggggaaagaccccataaatgtggtgaatgtgggaaagcctttcgattaagcacataccttatacaacaccaaaaaattcacactggcgagaagccttttctttgtattgagtgtggaaaaagtttcagtcggagctcattccttattgaacatcagaggatccatactggtgaaagaccttatcagtgcaaagagtgtgggaaaagtttcagtcagctttgcaaccttactcgtcatcagagaattcacacaggagacaagccccataaatgtgaggaatgtggaaaagcctttagtagaagctcaggtcttattcagcatcagagaattcacaccagggagaagacttatccatacaatgaaactaaggaaagttttgatccaaattgcagtcttgttatacagcaggaagtctaccctaaggagaaatcttataaatgtgatgaatgtgggaaaacttttagtgttagtgctcatcttgtacaacatcaaagaatccacactggtgaaaagccctatctatgtactgtctgtgggaaaagcttcagccggagctcatttcttattgaacatcagagaatccacactggtgagagaccctatctgtgcagacagtgtggaaaaagctttagtcagctttgtaatcttattcgacatcagggtgttcacacaggtaataaaccccataaatgtgatgaatgtggaaaggcctttagccggaactcgggtcttattcagcatcagagaatacacacaggagagaaaccttataagtgtgagaagtgcgacaaaagtttcagtcaacagcgcagtcttgtcaaccatcagaagatccatgcagaggtgaaaacccaagaaacccatgaatgtgacgcttgtggtgaagcctttaattgccgtatttctcttattcagcatcagaaattgcacacagcatggatgcaataaatgtagagcaatacataagctcaatttgatttgagactagtacccaagtgcagttttagtatggctcaacatgggtcagatttagtgataaagcaaattctccttggcctcaggcaaatagtttctaaagattctgtgaatagtggacaactgcccatgagcatttgacttcccttactctttgatgatcgtagagaaagacttggtaatttatctaagtatctttaataaatctttcagcagagagattaaacctaggttcagagcatgggtgctctgagggacaaagttggattagtataagggagctggagcagctgatagtggaaaacagaataatgattcaaagagtcttctgtcaccatgtcatattgtggttctttcagttccatgatatgtttggctctgcatgccaaagtccagtgattaagcatatataagttgtcaaggaaacaaagcccaaatgtttttaaaacaagtatacagtttttgtcattgtttaagaaagccagttgtttggcatgtgagttaaaggcagttccaatgcctgatggttcccagatctatgaaatgagtggaccattaaccttacatgtaaagattatgttagtaattaagaaacctaacaaaggtgttaccaaggaacctttgggagtgccttttttgtttttcaagatggacccaaaaaagtggaggaagatattgttcttttgtgccctcctacctgtgagagatatttgtagtcctatgtgaatgagcttatccctccacaaccaggtgcatatgaaagtgtacatattatgactgccaagtattggaaatgaaaagacctggagtctatgctaggaagctgagatattttggtattgcattggtttttatggtaactaggttttgcatgcaattaaaaatccttatttcttgttctagggcttcccttagttaatggttattataaacctattaattcatctgttttaaccattaaaacctgttttgtttttagctttg

SEQ ID NO: 201648 - DNA, 2316 bp, Homo sapiens
  Payload ID: 19791
  Gene Name: zinc finger protein 189
  ENST ID: ENST00000615466
  CDS Start-End: 69-326
taggcctcaccagaggctcctttccgtgaggccgcccccaattcctgcccctattctctgcctgggagatggcttccccgagccccccgccggagtcgaaggaggagtgggattatctggacccagctcagagaagcctgtataaagatgtcatgatggagaattatggaaacctggtctcactgggtctcactctattgcctaggctggtgtgcagcgacgcaaacacagcttgctgcagcctcaacctgttgggcttaagtgatcaatcctcccacctcagctacctgagtagctgggactacagatgttttgaacagagataaggatgaggagccaactgtaaaacaagagattgaagaaattgaggaagaagtggaaccacagggtgtaatagttacaagaatcaaaagtgaaattgaccaggatcctatgggtagagaaacatttgaacttgttggtaggttagataaacaaagagggatcttcctatgggaaataccaagggaatctttgacccaggaacagagaatgttcagagaaaacactaacattatccgtaaaagaccaaactcagaagagaaatgccataaatgtgaagaatgtggaaagggttttgtccgcaaggcccatttcattcaacatcaaagggtccatactggtgagaaaccttttcagtgcaatgaatgtgggaaaagttttagtcgcagttcatttgttattgaacatcagagaattcacactggggaaaggccctatgagtgtaattactgtggaaaaacctttagtgtgagctcaacccttattagacatcagagaatccacactggagaaagaccctatcagtgtaatcagtgtaaacagagcttcagccagagaaggagccttgttaaacatcaaaggattcatacaggtgagaaaccccataaatgtagtgactgtgggaaagccttcagttggaaatcacaccttattgagcatcaaagaactcacactggtgagaaaccttatcactgtaccaaatgtaagaagagctttagtcgaaattcattgcttgttgagcatcaaagaattcacactggggaaagaccccataaatgtggtgaatgtgggaaagcctttcgattaagcacataccttatacaacaccaaaaaattcacactggcgagaagccttttctttgtattgagtgtggaaaaagtttcagtcggagctcattccttattgaacatcagaggatccatactggtgaaagaccttatcagtgcaaagagtgtgggaaaagtttcagtcagctttgcaaccttactcgtcatcagagaattcacacaggagacaagccccataaatgtgaggaatgtggaaaagcctttagtagaagctcaggtcttattcagcatcagagaattcacaccagggagaagacttatccatacaatgaaactaaggaaagttttgatccaaattgcagtcttgttatacagcaggaagtctaccctaaggagaaatcttataaatgtgatgaatgtgggaaaacttttagtgttagtgctcatcttgtacaacatcaaagaatccacactggtgaaaagccctatctatgtactgtctgtgggaaaagcttcagccggagctcatttcttattgaacatcagagaatccacactggtgagagaccctatctgtgcagacagtgtggaaaaagctttagtcagctttgtaatcttattcgacatcagggtgttcacacaggtaataaaccccataaatgtgatgaatgtggaaaggcctttagccggaactcgggtcttattcagcatcagagaatacacacaggagagaaaccttataagtgtgagaagtgcgacaaaagtttcagtcaacagcgcagtcttgtcaaccatcagaagatccatgcagaggtgaaaacccaagaaacccatgaatgtgacgcttgtggtgaagcctttaattgccgtatttctcttattcagcatcagaaattgcacacagcatggatgcaataaatgtagagcaatacataagctcaatttgatttgagactagtacccaagtgcagttttagtatggctcaacatgggtcagatttagtgataaagcaaattctccttggcctcaggcaaatagtttctaaagattctgtgaatagtggacaactgcccatgagcatttgacttcccttactctttgatgatcgtagagaaagacttggtaatttatctaagtatctttaataaatctttcagcagagagattaaacctaggttcagagcatgggtgctctgagggacaaa

SEQ ID NO: 201649 - DNA, 3220 bp, Homo sapiens
  Payload ID: 19792
  Gene Name: zinc finger protein 19
  Uniprot ID: P17023
  ENST ID: ENST00000288177
  CDS Start-End: 257-1633
acttccggcctcctaaccgttctcgctagcggtgcgcttctggcctgttttgagtccgcgctcaaaggtctctgaggatccccgggtggaaactcctcccgggagtaaaaccacacaaccactgagaagaccgctccggcatcctagagagtacgcgtgtgagcctgggtgcaaggccaaagtagtgacgcacttccgttcacgcaccgctttctgtttttcctgagcctttgcctgctaagagggagaccaggtcatggcagccatgcctctgaaagctcaataccaggagatggtgaccttcgaggatgtggctgtgcacttcaccaagacagaatggactggcctttctcctgcccagagggccctgtacagaagtgtgatgttggagaattttgggaacctgactgctttggggtacccagttcccaaacctgcactgatctcacttttggagagaggggacatggcttggggcctggaagcacaggatgatcccccagcagagaggaccaaaaacgtctgtaaagatgttgagaccaacattgacagtgagtccacattaatccagggaatttctgaagaaagagatgggatgatgtcacatggtcagctgaagagtgtccctcagagaactgacttcccagaaacacgtaatgtggaaaagcaccaggacatccccacagtgaaaaatatccaaggaaaggttccaagaatcccctgtgcaaggaaacctttcatatgtgaggagtgtgggaaatccttcagctacttttcttactatgctagacaccagagaatccacactggggagaaaccttttgagtgtagtgagtgtggaaaagcctttaatggtaattcttcgttaattcggcaccagaggattcacactggagagagaccctatcagtgtgaggagtgtgggcgagcctttaatgataatgcaaatctgatcaggcatcagagaatccacagtggggacagaccctattactgtacagagtgtgggaatagtttcacgagtagttccgagtttgttatacatcagagaatccacactggggagaaaccctatgagtgtaatgagtgtggcaaagcttttgttggtaattcacccctacttcggcatcagaaaatccacactggagagaaaccctatgagtgtaatgagtgtggcaaaagctttggaaggacttcccatctaagccaacatcagcgtattcacacaggggaaaagccttattcttgtaaagtatgtggacaagccttcaattttcatacaaaactaactcggcaccagagaattcacagtgaggagaaaccctttgactgtgtagattgtggaaaagccttcagtgctcaggaacaattaaaaaggcatctgagaattcatactcaggagtcttcctatgtatgtgatgagtgtggaaaagccttgactagcaaaagaaatcttcatcagcatcaaagaatccatactggagagaaaccctatgagtgtagcaagtatgagaaggcctttgggacttcttcccagctaggtcaccttgagcatgtctactctggagagaagcctgtgctggacatttgtcgttttggcctcccagaattttttacccccttttactggtaatagtacactccagtgaaatgtactgagtggattccgtcttctactcaggaatggaatgtgtgacacaggcctgactcagcctctgatccatccctcaagccacagttaatgattcagatgtcagtagatgaccaaagatggttcaattagagtcccaggattgcaagagctaataggaacaaatactctccccccgcccacccccattggttttaatgctgagaagaagaactagactcttacagaggtgagaatgaagtccacacagcaaaaatgcatctgagaattggagagcagtaaaagactgaagataatgtttgaacagccacatacaccatgcctgaagctaaaaatatatacgggtttttgaattgcagcagccaataaattccatttttgtttggttggttttggctttggcacacctgagttaggttttcttgccttggaacagaattttgacttaaacagtgttgtcattgtagcagttgtttgaagttttcagggataacatacctgatggagaaatgttttgtgtgtatgatatatgggaaagtctttagttatagtcatggcagctcctcaaccccatgattgtgatgagattgggaagcccactgtaacactggagagcccaggttatatcagacaccactagtagatagaagttctaacaacttgagctctgtaacaaaaatctcattgtactacaaaattatgtctgcaccagtgaatccattctcaagaaaagtcttaactaggaaactaaaagctttcactcttaaagctttcattttctgtttattcagttttttatttggaatggatgctactctaggccttaaactgagaaatgccaggctattgtagctattatatcttggtatttgccattttaattcctaggacagcacgcccgctttgcccttgacctggctagggagccaaggaaatgccatggttcttggtcataagacacactgcagagatctctcagtaggaaaacagggctggcccttttctttggtgatgaacacaaactgcaccctttttttctcccacgtgtccttccgctgccagccagtgttggaatctccctacccaattccagacttaattgcttactgcgtctagcacctgggtggcttcaccacctcttccttacttgtcagcagatgaatgagcagttgtatcatgtgcttgggttgaccaatgaatgatagacttggggaattgagtaaacaccttttaattgaagtataacacaaacataaaaatgcatgagtcagccaggcgcggtggctcacacttgtaatcccagtactttgggaggccgaggtgggcgattcatcaggtcaagagatcgagaccatcctggccaacatggtgaaaccccgtctctactaaaaatacaagaattagctgggcgtggtggtgcatgcctgtagtcccagctgctcaggaagctggggcaggcgaattgcttgaacccgggaggcggaggttgtagtgagccgagattacaccactgcactccagcctggtgacagagtgagattcctcaataaaataaaataaaaccatgaa

SEQ ID NO: 201650 - DNA, 567 bp, Homo sapiens
  Payload ID: 19792
  Gene Name: zinc finger protein 19
  ENST ID: ENST00000565541
  CDS Start-End: 111-302
tttcctcagaattacaaacctcatggtatgatgtggattaaaaagtacatatttatgcaccactaacccagtgagcatttacctttgcctgctaagagggagaccaggtcatggcagccatgcctctgaaagctcaataccaggagatggtgaccttcgaggatgtggctgtgcacttcaccaagacagaatggactggcctttctcctgcccagagggccctgtacagaagtgtgatgttggagaattttgggaacctgactgctttgggaagaagtcacaaatgctcagtttcctgttgatcggaatctctttggccttctccagtcgagaaccctcttctggtacccagttcccaaacctgcactgatctcacttttggagagaggggacatggcttggggcctggaagcacaggatgatcccccagcagagaggaccaaaaacgtctgtaaagatgttgagaccaacattgacagtgagtccacattaatccagggaatttctgaagaaagagatgggatgatgtcacatggtcagctgaagagtgtccctcagagaactgac

SEQ ID NO: 201651 - DNA, 587 bp, Homo sapiens
  Payload ID: 19792
  Gene Name: zinc finger protein 19
  ENST ID: ENST00000566202
  CDS Start-End: 519-587
aactggagagtatcaggactgggtgctaccaagcgcctcacagcagcccccagccgacaccaacatcccaaccctgggcgacccgcggctgcgcaggcgcggatgcatgtttagggggctgcgctagtcagtgcgcatgcgccgtcgctaggcaacaggacacagctccgggcgccggcgtagaatctgagctgcaggaaggaggagaagaaatgtggtcggaagatgaggaatgaggtggtccataaagtgaggtaggtgattataaattacatgtgaagtaaacttccctagcgtgtgggtctctgtatttaacctctgccttccaggtctctgaggatccccgggtggaaactcctcccgggagtaaaaccacacaaccactgagaagaccgctccggcatcctagagagtacgcgtgtgagcctgggtgcaaggccaaagtagtgacgcacttccgttcacgcaccgctttctgtttttcctgagcctttgcctgctaagagggagaccaggtcatggcagccatgcctctgaaagctcaataccaggagatggtgaccttcgaggatgtggctgtgcacttc

SEQ ID NO: 201652 - DNA, 2612 bp, Homo sapiens
  Payload ID: 19792
  Gene Name: zinc finger protein 19
  ENST ID: ENST00000565637
  CDS Start-End: 571-1821
gctagcggtgcgcttctggcctgttttgagtccgcgctcaaaggtgccaaagtgcaaggacccacagttgggcggagcttgggttgggagtgagacagcatagcagtccaggctggtcctttgagcgcagctcaaagaaggggacggggagggcgtcactatacaattgtggccgggtgggacctgggctgtttgctcttggaggctgtacagctgcaagctttgccgctcacgaactggagctggagaaagagccccccaaggatgggaggatgacagaagtgtctgcagatggcactgcctgggcaccaggagaggtctctgaggatccccgggtggaaactcctcccgggagtaaaaccacacaaccactgagaagaccgctccggcatcctagagagtacgcgtgtgagcctgggtgcaaggccaaagtagtgacgcacttccgttcacgcaccgctttctgtttttcctgaggagatggtgaccttcgaggatgtggctgtgcacttcaccaagacagaatggactggcctttctcctgcccagagggccctgtacagaagtgtgatgttggagaattttgggaacctgactgctttggggtacccagttcccaaacctgcactgatctcacttttggagagaggggacatggcttggggcctggaagcacaggatgatcccccagcagagaggaccaaaaacgtctgtaaagatgttgagaccaacattgacagtgagtccacattaatccagggaatttctgaagaaagagatgggatgatgtcacatggtcagctgaagagtgtccctcagagaactgacttcccagaaacacgtaatgtggaaaagcaccaggacatccccacagtgaaaaatatccaaggaaaggttccaagaatcccctgtgcaaggaaacctttcatatgtgaggagtgtgggaaatccttcagctacttttcttactatgctagacaccagagaatccacactggggagaaaccttttgagtgtagtgagtgtggaaaagcctttaatggtaattcttcgttaattcggcaccagaggattcacactggagagagaccctatcagtgtgaggagtgtgggcgagcctttaatgataatgcaaatctgatcaggcatcagagaatccacagtggggacagaccctattactgtacagagtgtgggaatagtttcacgagtagttccgagtttgttatacatcagagaatccacactggggagaaaccctatgagtgtaatgagtgtggcaaagcttttgttggtaattcacccctacttcggcatcagaaaatccacactggagagaaaccctatgagtgtaatgagtgtggcaaaagctttggaaggacttcccatctaagccaacatcagcgtattcacacaggggaaaagccttattcttgtaaagtatgtggacaagccttcaattttcatacaaaactaactcggcaccagagaattcacagtgaggagaaaccctttgactgtgtagattgtggaaaagccttcagtgctcaggaacaattaaaaaggcatctgagaattcatactcaggagtcttcctatgtatgtgatgagtgtggaaaagccttgactagcaaaagaaatcttcatcagcatcaaagaatccatactggagagaaaccctatgagtgtagcaagtatgagaaggcctttgggacttcttcccagctaggtcaccttgagcatgtctactctggagagaagcctgtgctggacatttgtcgttttggcctcccagaattttttacccccttttactggtaatagtacactccagtgaaatgtactgagtggattccgtcttctactcaggaatggaatgtgtgacacaggcctgactcagcctctgatccatccctcaagccacagttaatgattcagatgtcagtagatgaccaaagatggttcaattagagtcccaggattgcaagagctaataggaacaaatactctccccccgcccacccccattggttttaatgctgagaagaagaactagactcttacagaggtgagaatgaagtccacacagcaaaaatgcatctgagaattggagagcagtaaaagactgaagataatgtttgaacagccacatacaccatgcctgaagctaaaaatatatacgggtttttgaattgcagcagccaataaattccatttttgtttggttggttttggctttggcacacctgagttaggttttcttgccttggaacagaattttgacttaaacagtgttgtcattgtagcagttgtttgaagttttcagggataacatacctgatggagaaatgttttgtgtgtatgatatatgggaaagtctttagttatagtcatggcagctcctcaaccccatgattgtgatgagattgggaagcccactgtaacactggagagcccaggttatatcagacaccactagtagatagaagttctaacaacttgagctctgtaacaaaaatctcattgtactacaaaattatgtctgcaccagtgaatccattctcaagaaaagtcttaactaggaaactaaaagctttcactcttaaagcttt

SEQ ID NO: 201653 - DNA, 532 bp, Homo sapiens
  Payload ID: 19792
  Gene Name: zinc finger protein 19
  ENST ID: ENST00000564225
  CDS Start-End: 314-532
aggaaggaggagaagaaatgtggtcggaagatgaggaatgaggtggtccataaagtgagagaaacacagtgaagtactgacagtagaaatgatatgatgtctgagttcaactccagcaaaacaggtctctgaggatccccgggtggaaactcctcccgggagtaaaaccacacaaccactgagaagaccgctccggcatcctagagagtacgcgtgtgagcctgggtgcaaggccaaagtagtgacgcacttccgttcacgcaccgctttctgtttttcctgagcctttgcctgctaagagggagaccaggtcatggcagccatgcctctgaaagctcaataccaggagatggtgaccttcgaggatgtggctgtgcacttcaccaagacagaatggactggcctttctcctgcccagagggccctgtacagaagtgtgatgttggagaattttgggaacctgactgctttggggtacccagttcccaaacctgcactgatctcacttttggagagaggggacatggcttgg

SEQ ID NO: 201654 - DNA, 573 bp, Homo sapiens
  Payload ID: 19792
  Gene Name: zinc finger protein 19
  ENST ID: ENST00000568815
  CDS Start-End: 221-573
cttagaggtgatacattggctgggaagacaggtctctgaggatccccgggtggaaactcctcccgggagtaaaaccacacaaccactgagaagaccgctccggcatcctagagagtacgcgtgtgagcctgggtgcaaggccaaagtagtgacgcacttccgttcacgcaccgctttctgtttttcctgagcctttgcctgctaagagggagaccaggtcatggcagccatgcctctgaaagctcaataccaggagatggtgaccttcgaggatgtggctgtgcacttcaccaagacagaatggactggcctttctcctgcccagagggccctgtacagaagtgtgatgttggagaattttgggaacctgactgctttggggtacccagttcccaaacctgcactgatctcacttttggagagaggggacatggcttggggcctggaagcacaggatgatcccccagcagagaggaccaaaaacgtctgtaaagatgttgagaccaacattgacagtgagtccacattaatccagggaatttctgaagaaagagatgggatgatgtcacatgg

SEQ ID NO: 201655 - DNA, 1947 bp, Homo sapiens
  Payload ID: 19792
  Gene Name: zinc finger protein 19
  ENST ID: ENST00000569717
  CDS Start-End: 55-192
cgcaccgctttctgtttttcctgagcctttgcctgctaagagggagaccaggtcatggcagccatgcctctgaaagctcaataccaggactttccctcaagtccctacctgtcccctctgccccacactctggcccggagccagaggattggctctggggcagcaggaacctgttgttttaggagatggtgaccttcgaggatgtggctgtgcacttcaccaagacagaatggactggcctttctcctgcccagagggccctgtacagaagtgtgatgttggagaattttgggaacctgactgctttggggtacccagttcccaaacctgcactgatctcacttttggagagaggggacatggcttggggcctggaagcacaggatgatcccccagcagagaggaccaaaaacgtctgtaaagatgttgagaccaacattgacagtgagtccacattaatccagggaatttctgaagaaagagatgggatgatgtcacatggtcagctgaagagtgtccctcagagaactgacttcccagaaacacgtaatgtggaaaagcaccaggacatccccacagtgaaaaatatccaaggaaaggttccaagaatcccctgtgcaaggaaacctttcatatgtgaggagtgtgggaaatccttcagctacttttcttactatgctagacaccagagaatccacactggggagaaaccttttgagtgtagtgagtgtggaaaagcctttaatggtaattcttcgttaattcggcaccagaggattcacactggagagagaccctatcagtgtgaggagtgtgggcgagcctttaatgataatgcaaatctgatcaggcatcagagaatccacagtggggacagaccctattactgtacagagtgtgggaatagtttcacgagtagttccgagtttgttatacatcagagaatccacactggggagaaaccctatgagtgtaatgagtgtggcaaagcttttgttggtaattcacccctacttcggcatcagaaaatccacactggagagaaaccctatgagtgtaatgagtgtggcaaaagctttggaaggacttcccatctaagccaacatcagcgtattcacacaggggaaaagccttattcttgtaaagtatgtggacaagccttcaattttcatacaaaactaactcggcaccagagaattcacagtgaggagaaaccctttgactgtgtagattgtggaaaagccttcagtgctcaggaacaattaaaaaggcatctgagaattcatactcaggagtcttcctatgtatgtgatgagtgtggaaaagccttgactagcaaaagaaatcttcatcagcatcaaagaatccatactggagagaaaccctatgagtgtagcaagtatgagaaggcctttgggacttcttcccagctaggtcaccttgagcatgtctactctggagagaagcctgtgctggacatttgtcgttttggcctcccagaattttttacccccttttactggtaatagtacactccagtgaaatgtactgagtggattccgtcttctactcaggaatggaatgtgtgacacaggcctgactcagcctctgatccatccctcaagccacagttaatgattcagatgtcagtagatgaccaaagatggttcaattagagtcccaggattgcaagagctaataggaacaaatactctccccccgcccacccccattggttttaatgctgagaagaagaactagactcttacagaggtgagaatgaagtccacacagcaaaaatgcatctgagaattggagagcagtaaaagactgaagataatgtttgaacagccacatacaccatgcctgaagctaaaaatatatacgggtttttgaattgcagcagccaataaattccatttttgtttggttggttttggctttggc

SEQ ID NO: 201656 - DNA, 615 bp, Homo sapiens
  Payload ID: 19792
  Gene Name: zinc finger protein 19
  ENST ID: ENST00000569072
  CDS Start-End: 601-615
acaagcgtgacgcacttccggcctcctaaccgttctcgctagcggtgcgcttctggcctgttttgagtccgcgctcaaaggctgtacaggaggcatggctggggaggcctcaggatacttacaatcatggtggaaagcaaaggggaagcaggcacaatcttcacatggccagcaggagagagacagcaaaggaggaagcgcaacacacttcgaaacaaccagatcacatgagaactcactatcacgagaacagcaagggggaaatccgcccccatgatccaatcaccttccaccatgttcctcccccaacactgaagatcataattcaacatgagatttgcctggggacacagagccaaaacatatcaagtatacatttccttagaggtgatacattggctgggaagacaggtctctgaggatccccgggtggaaactcctcccgggagtaaaaccacacaaccactgagaagaccgctccggcatcctagagagtacgcgtgtgagcctgggtgcaaggccaaagtagtgacgcacttccgttcacgcaccgctttctgtttttcctgagcctttgcctgctaagagggagaccaggtcatggcagccatgcct

SEQ ID NO: 201657 - DNA, 2205 bp, Homo sapiens
  Payload ID: 19792
  Gene Name: zinc finger protein 19
  Uniprot ID: P17023
  ENST ID: ENST00000564230
  CDS Start-End: 469-1845
caaaggtgccaaagtgcaaggacccacagttgggcggagcttgggttgggagtgagacagcatagcagtccaggctggtcctttgagcgcagctcaaagaaggggacggggagggcgtcactatacaattgtggccgggtgggacctgggctgtttgctcttggaggctgtacagctgcaagctttgccgctcacgaactggagctggagaaagagccccccaaggatgggaggatgacagaagtgtctgcagatggcactgcctgggcaccaggagaggtctctgaggatccccgggtggaaactcctcccgggagtaaaaccacacaaccactgagaagaccgctccggcatcctagagagtacgcgtgtgagcctgggtgcaaggccaaagtagtgacgcacttccgttcacgcaccgctttctgtttttcctgagcctttgcctgctaagagggagaccaggtcatggcagccatgcctctgaaagctcaataccaggagatggtgaccttcgaggatgtggctgtgcacttcaccaagacagaatggactggcctttctcctgcccagagggccctgtacagaagtgtgatgttggagaattttgggaacctgactgctttggggtacccagttcccaaacctgcactgatctcacttttggagagaggggacatggcttggggcctggaagcacaggatgatcccccagcagagaggaccaaaaacgtctgtaaagatgttgagaccaacattgacagtgagtccacattaatccagggaatttctgaagaaagagatgggatgatgtcacatggtcagctgaagagtgtccctcagagaactgacttcccagaaacacgtaatgtggaaaagcaccaggacatccccacagtgaaaaatatccaaggaaaggttccaagaatcccctgtgcaaggaaacctttcatatgtgaggagtgtgggaaatccttcagctacttttcttactatgctagacaccagagaatccacactggggagaaaccttttgagtgtagtgagtgtggaaaagcctttaatggtaattcttcgttaattcggcaccagaggattcacactggagagagaccctatcagtgtgaggagtgtgggcgagcctttaatgataatgcaaatctgatcaggcatcagagaatccacagtggggacagaccctattactgtacagagtgtgggaatagtttcacgagtagttccgagtttgttatacatcagagaatccacactggggagaaaccctatgagtgtaatgagtgtggcaaagcttttgttggtaattcacccctacttcggcatcagaaaatccacactggagagaaaccctatgagtgtaatgagtgtggcaaaagctttggaaggacttcccatctaagccaacatcagcgtattcacacaggggaaaagccttattcttgtaaagtatgtggacaagccttcaattttcatacaaaactaactcggcaccagagaattcacagtgaggagaaaccctttgactgtgtagattgtggaaaagccttcagtgctcaggaacaattaaaaaggcatctgagaattcatactcaggagtcttcctatgtatgtgatgagtgtggaaaagccttgactagcaaaagaaatcttcatcagcatcaaagaatccatactggagagaaaccctatgagtgtagcaagtatgagaaggcctttgggacttcttcccagctaggtcaccttgagcatgtctactctggagagaagcctgtgctggacatttgtcgttttggcctcccagaattttttacccccttttactggtaatagtacactccagtgaaatgtactgagtggattccgtcttctactcaggaatggaatgtgtgacacaggcctgactcagcctctgatccatccctcaagccacagttaatgattcagatgtcagtagatgaccaaagatggttcaattagagtcccaggattgcaagagctaataggaacaaatactctccccccgcccacccccattggttttaatgctgagaagaagaactagactcttacagaggtgagaatgaagtccacacagcaaaaatgcatctgagaattggagagcagtaaaagactgaagataatgtttgaacagccacatacaccatgcctgaagctaaaaatatatac

SEQ ID NO: 201658 - DNA, 577 bp, Homo sapiens
  Payload ID: 19792
  Gene Name: zinc finger protein 19
  ENST ID: ENST00000561469
  CDS Start-End: 1-243
gtgaccttcgaggatgtggctgtgcacttcaccaagacagaatggactggcctttctcctgcccagagggccctgtacagaagtgtgatgttggagaattttgggaacctgactgctttggggtacccagttcccaaacctgcactgatctcacttttggagagaggggacatggcttggggcctggaagcacaggatgatcccccagcagagaggaccaaaaacgtctgtaaaggtaggtgaggcagatttagaaccaacaattgtagcgttttatggagcactgtattttaaaatgaatcatgctgggcaggatttaaataaaatagatgatttcacctaataggtaaaatatgaaacgtttctcaccaatcttaactcttaccaacatgtaatcactcagtacgtctcatctgcaatccttgaatccattgttcctttctgagtttcaacattgcctaccttagttgtcctccttggttgggatggatttattcaggagcagtttttgagcaacttgccatgtgctgaacgttgtttaagaagttctggcaggtacaagttatggagacagatg

SEQ ID NO: 201659 - DNA, 2838 bp, Homo sapiens
  Payload ID: 19792
  Gene Name: zinc finger protein 19
  ENST ID: ENST00000567225
  CDS Start-End: 23-325
ctgctaagagggagaccaggtcatggcagccatgcctctgaaagctcaataccaggagatggtgaccttcgaggatgtggctgtgcacttcaccaagacagaatggactggcctttctcctgcccagagggccctgtacagaagtgtgatgttggagaattttgggaacctgactgctttggggtacccagttcccaaacctgcactgatctcacttttggagagaggggacatggcttggggcctggaagcacaggatgatcccccagcagagaggaccaaaaacgtctgtaaagatgaatcattggaatttcagaaaagctaagtggttgtccaaggtctcatagctagtaggtgaagaaatcaggacttctcagtcctgtacatttatttttaattttcttttctctgtgtttgtttttgaatagtttctgttgctatgtcttcaaattcactcatcttttttctgtaatgtctaatctgccgttaatcccatccaatgtatttttattgcacattataggtttttatctttagaagtttgatttgggtcttttttatatgtttcatttctccaccaaacttttagatgtatcagatatggttgtaataacttttaaatgtcattgcctactaattctgttgtgactatttcagaagtctatcaggattagtttttaatgtaatttcttggattatgaattactggtccaagtagatagtattaatttaaactctatacttaatgatgcaaactatgattataaatttttagaagacatttctactaccacttcaaagcttaggcaaggaccataagattctttgttatctctctttgttcatgagatttttaaaaaatttatcctttcatgattggatgagtgtatgtgtgtgagaaaagtctctgttcctattccttgttcctgtaatatgcctcctgcatattataattctgctttctcagatatcaagacttacaactcttcaccattcccacccctgttggccaaagcatcagctgaggtcctcagtccaaaccaatgcctctggttttagtttcttgtttggttttggtacgtgggtacactttcctgtgagttaagtatttaaaatgatgtcgaatattatatcttattctaaatttctagattctagtttatattatttgctacattgccctcaactgaattctgcgtaatatttattgtcttaaacttattgttgtgagatattaatatagctgtgccattttccctttcccttaatacttgtctgatatatctattttccattctttgactttcaatacttgtgctttcttaagtttcagtagtaccttataagcatctaacattttctttccttccttccttcctttctttctctttctttctctttctctctctctttctttctttctctctccttctctctctctttttttttttgacggagtctcattctgtcacccaggctggagtgcagtggcatgatcttggctcactacaacctccgcctctcgggttcaagcaattctcctgccccagcttccccagtagctgggattacaggtgtgcgccaccacgctgggctaatttttgtatttttagtaaagacaaggtttcaccatgttggccaggctggtcttgaactcctgagctcaggtgatctgtccacgttggcctctcaaagtgctgggattataggcatgaggcactgtccagtcacttctaacattttttctgcgtaaattttagaatcattttcacaagttttaaaacaaatcctataggggttttatttggtatgacgttggacttatggattaaataaagaaaactacccttcctactgaaggattacctgtgcctttccatttacacaaggggttttcattggtttagtccccaaatgtttaaaattttcttgatatatgtcttatacatttattagtaaacttattcctatatatgtttggttgctttgagaataagaccttgccctaccctagtacatttctccacatagattaaatgatttattcacagaactcacaacatcaataagtaggtaaaaattttgtagcctgaaaacagccttgaactcctggaatgaacatcaaccagacagttgttttgccacagttttcatgagaagaagcaggcaaagccatctttactctgtcctattaaaactggaaacaacaagaaatattttttcttttttgagacggagtttcgctcttgtcgcccaggctggagtgcaatggcgctatctcagcccaccacaacttccgcctcctgggttcaggcgattctctggcctcagcctcccgagtagctgggaatacaggcatgcgccaccacgcctggctaattttgtatttttagtagagacagagtttctccacgttagtcaggctggtctcgaactcccaacctcaggtaactccccccacctcagcctgccaaagtgctgggattccaggtgtgagccaccacgcctggccaacaaaaaagattttttttaacatgagaagattgtcagctttccctggtggtcagagaggaagggctttagagaggtcttggggctgcagggacaaagggtgcaggagaagaagccttagagctgagcaggaggaaactgacactacatggctgcaggcccagcatggaaatgaacttctagaatgctgtagtcgaagagccagcttaattttttaactcttgtgttgtgtgatttttccatccttcctcatttctaggggtattagttaggctatgggcttggaaattaatttgaagaacccaaataaatgtggtttaaatttga

SEQ ID NO: 201660 - DNA, 2087 bp, Homo sapiens
  Payload ID: 19792
  Gene Name: zinc finger protein 19
  ENST ID: ENST00000565100
  CDS Start-End: 135-1301
accgctttctgtttttcctgagcctttgcctgctaagagggagaccaggtcatggcagccatgcctctgaaagctcaataccagggtacccagttcccaaacctgcactgatctcacttttggagagaggggacatggcttggggcctggaagcacaggatgatcccccagcagagaggaccaaaaacgtctgtaaagatgttgagaccaacattgacagtgagtccacattaatccagggaatttctgaagaaagagatgggatgatgtcacatggtcagctgaagagtgtccctcagagaactgacttcccagaaacacgtaatgtggaaaagcaccaggacatccccacagtgaaaaatatccaaggaaaggttccaagaatcccctgtgcaaggaaacctttcatatgtgaggagtgtgggaaatccttcagctacttttcttactatgctagacaccagagaatccacactggggagaaaccttttgagtgtagtgagtgtggaaaagcctttaatggtaattcttcgttaattcggcaccagaggattcacactggagagagaccctatcagtgtgaggagtgtgggcgagcctttaatgataatgcaaatctgatcaggcatcagagaatccacagtggggacagaccctattactgtacagagtgtgggaatagtttcacgagtagttccgagtttgttatacatcagagaatccacactggggagaaaccctatgagtgtaatgagtgtggcaaagcttttgttggtaattcacccctacttcggcatcagaaaatccacactggagagaaaccctatgagtgtaatgagtgtggcaaaagctttggaaggacttcccatctaagccaacatcagcgtattcacacaggggaaaagccttattcttgtaaagtatgtggacaagccttcaattttcatacaaaactaactcggcaccagagaattcacagtgaggagaaaccctttgactgtgtagattgtggaaaagccttcagtgctcaggaacaattaaaaaggcatctgagaattcatactcaggagtcttcctatgtatgtgatgagtgtggaaaagccttgactagcaaaagaaatcttcatcagcatcaaagaatccatactggagagaaaccctatgagtgtagcaagtatgagaaggcctttgggacttcttcccagctaggtcaccttgagcatgtctactctggagagaagcctgtgctggacatttgtcgttttggcctcccagaattttttacccccttttactggtaatagtacactccagtgaaatgtactgagtggattccgtcttctactcaggaatggaatgtgtgacacaggcctgactcagcctctgatccatccctcaagccacagttaatgattcagatgtcagtagatgaccaaagatggttcaattagagtcccaggattgcaagagctaataggaacaaatactctccccccgcccacccccattggttttaatgctgagaagaagaactagactcttacagaggtgagaatgaagtccacacagcaaaaatgcatctgagaattggagagcagtaaaagactgaagataatgtttgaacagccacatacaccatgcctgaagctaaaaatatatacgggtttttgaattgcagcagccaataaattccatttttgtttggttggttttggctttggcacacctgagttaggttttcttgccttggaacagaattttgacttaaacagtgttgtcattgtagcagttgtttgaagttttcagggataacatacctgatggagaaatgttttgtgtgtatgatatatgggaaagtctttagttatagtcatggcagctcctcaaccccatgattgtgatgagattgggaagcccactgtaacactggagagcccaggttatatcagacaccactagtagatagaagttctaacaacttgagctctgtaacaaaaatctcattgtactacaaaattatgtctgcaccagtgaatccattctcaagaaaagtcttaactaggaaactaaaagctttcactcttaaa

SEQ ID NO: 201661 - DNA, 2021 bp, Homo sapiens
  Payload ID: 19793
  Gene Name: zinc finger protein 195
  Uniprot ID: O14628
  ENST ID: ENST00000005082
  CDS Start-End: 77-1897
gctagccgtaggtcgtgtgacccgcaggcaccgggagatccagaagtgaaacgccaggctctctggaggccaggagatgactctgttgacgttcagggatgtggccatagaattctccctggaggagtggaaatgcctggacctcgctcagcagaatttgtacagggatgtgatgttggagaactacagaaacttgttctccgttggtctcactgtctgtaagccaggcctgatcacctgcctggagcaacgaaaagagccctggaatgtgaagagacaggaggcagcagacggacatccagagatgggatttcaccatgctactcaggcttgtcttgaactcctgggctcaagcgatctgcctgcctcagcctcccaaagtgctgggattacaggtgtgaaccaccgtgcccagccaggcctcaatgtttctgtggacaaattcactgctatgtcttctcattttacccaagaccttctgccagagcagggcatacaagatgcattcccaaaaagaatactgagaggatatggaaattgtggccttgataatttatatttaaggaaagactgggaaagtttagatgagtgtaagttgcaaaaagattataatggacttaaccaatgttcatcaactacccatagcaaaatctttcaatataataaatatgttaaaatctttgataacttttcaaatttacatagacgtaatataagtaatactggagagaaacctttcaaatgtcaagaatgtggcaaatcctttcaaatgctctcattcctaactgaacatcagaaaattcacactggaaaaaaattccaaaaatgtggagaatgtggcaaaacctttatccagtgctcacactttactgaacctgagaacattgacactggagagaaaccttacaagtgtcaagaatgtaacaacgtcattaaaacttgctcagtccttactaaaaatagaatttatgccggaggggaacattacagatgtgaagaatttggcaaagtatttaaccagtgctcccaccttactgaacatgagcatggtactgaggaaaaaccctgcaaatatgaagagtgcagcagtgtctttatctcttgctcaagcctttctaatcaacagatgattcttgctggagagaagctctccaaatgtgaaacatggtacaaaggttttaaccacagcccaaatccttccaaacaccagagaaatgagattggagggaaacctttcaaatgtgaggaatgtgacagcatcttcaagtggttctcagaccttactaaacataagagaattcacactggtgagaaaccatacaaatgtgacgaatgtgggaaagcctatacacagtcctcacacctcagtgaacacaggaggattcacaccggagagaaaccctaccaatgtgaagaatgtgggaaggtcttcagaacttgctcaagcctttctaaccataagagaactcattctgaagaaaaaccctacacgtgtgaagaatgtggcaacatctttaagcagttatcagacctcactaagcataagaaaacccatactggagagaagccctacaaatgtgacgaatgtggaaaaaactttacccagtcctccaaccttattgtacataagagaattcatactggagagaaaccctacaagtgtgaagaatgtggcagagtcttcatgtggttctcagacattaccaaacataagaaaacccatactggagagaaaccctacaaatgtgacgaatgtggaaaaaactttacccagtcctcaaaccttattgtacataagagaattcatactggagagaaaccctacaagtgtgaaaagtgtggcaaagccttcacccagttctcacacctgactgtacatgaaagcattcatacttgagaaaaaaataaacaaatataaaaataggcaaagccgttagtatctgctcgcatcccactttacatcagagttcagacttaataaagttatcataaatgtaattactattgaaagacctttcatg

SEQ ID NO: 201662 - DNA, 3145 bp, Homo sapiens
  Payload ID: 19793
  Gene Name: zinc finger protein 195
  Uniprot ID: O14628
  ENST ID: ENST00000343338
  CDS Start-End: 270-1955
gtccaatcaggcacatgtctggagaggagaggacggcttccgggatctagcggggcctttgtcccgacagagctccacttcctgtccccgcggctctgtgtcccctgctagccgtaggtcgtgtgacccgcaggcaccgggagatccagaagtgaaacgccaggctctctggaggccaggagatggcatattctcacgatgcaggtgtgatttgtccagagaatctttcctaagaggaaatcccagagaagcaggagaaagagaaagaaatggctggtgctcagactctgttgacgttcagggatgtggccatagaattctccctggaggagtggaaatgcctggacctcgctcagcagaatttgtacagggatgtgatgttggagaactacagaaacttgttctccgttggtctcactgtctgtaagccaggcctgatcacctgcctggagcaacgaaaagagccctggaatgtgaagagacaggaggcagcagacggacatccagctatgtcttctcattttacccaagaccttctgccagagcagggcatacaagatgcattcccaaaaagaatactgagaggatatggaaattgtggccttgataatttatatttaaggaaagactgggaaagtttagatgagtgtaagttgcaaaaagattataatggacttaaccaatgttcatcaactacccatagcaaaatctttcaatataataaatatgttaaaatctttgataacttttcaaatttacatagacgtaatataagtaatactggagagaaacctttcaaatgtcaagaatgtggcaaatcctttcaaatgctctcattcctaactgaacatcagaaaattcacactggaaaaaaattccaaaaatgtggagaatgtggcaaaacctttatccagtgctcacactttactgaacctgagaacattgacactggagagaaaccttacaagtgtcaagaatgtaacaacgtcattaaaacttgctcagtccttactaaaaatagaatttatgccggaggggaacattacagatgtgaagaatttggcaaagtatttaaccagtgctcccaccttactgaacatgagcatggtactgaggaaaaaccctgcaaatatgaagagtgcagcagtgtctttatctcttgctcaagcctttctaatcaacagatgattcttgctggagagaagctctccaaatgtgaaacatggtacaaaggttttaaccacagcccaaatccttccaaacaccagagaaatgagattggagggaaacctttcaaatgtgaggaatgtgacagcatcttcaagtggttctcagaccttactaaacataagagaattcacactggtgagaaaccatacaaatgtgacgaatgtgggaaagcctatacacagtcctcacacctcagtgaacacaggaggattcacaccggagagaaaccctaccaatgtgaagaatgtgggaaggtcttcagaacttgctcaagcctttctaaccataagagaactcattctgaagaaaaaccctacacgtgtgaagaatgtggcaacatctttaagcagttatcagacctcactaagcataagaaaacccatactggagagaagccctacaaatgtgacgaatgtggaaaaaactttacccagtcctccaaccttattgtacataagagaattcatactggagagaaaccctacaagtgtgaagaatgtggcagagtcttcatgtggttctcagacattaccaaacataagaaaacccatactggagagaaaccctacaaatgtgacgaatgtggaaaaaactttacccagtcctcaaaccttattgtacataagagaattcatactggagagaaaccctacaagtgtgaaaagtgtggcaaagccttcacccagttctcacacctgactgtacatgaaagcattcatacttgagaaaaaaataaacaaatataaaaataggcaaagccgttagtatctgctcgcatcccactttacatcagagttcagacttaataaagttatcataaatgtaattactattgaaagacctttcatgaaatataagtctccagagcacacaagagtatttcttctgaaaaaaatgttacaattatactagatggaagacttgcatcagttgcttaaactttcagaaaatttgtagagaaacccaacaaatctcataaatgtggaataacatttgttcaaaaatgatagcttagaaaacactagagttcatactaaaagatattttgcaaatacactaaatgggaaaaataagcaaggacacgttcagaaatgacactgaatccctgtgttgagtctacagagacatctagacttaaaatagatcatttatatttaagtttaaaaggaggatgagactgagtttttgtagagttataattacattcaaaatatacttttttgcattgaaaaaatgttaaatttttgaaaagcgaatattgatgtcattctattctcaaatcagtagatgctgtgtcttcatttctagtgctgatgtgaaaacacatggtcagttgttgctgcgtcagagatatgagaaattcttttctcttaggtgtgcatcactgatatacttgtccgtgaaaggtgaaagacactgaaatgtaagatgcgtgagtaaaatcttggtagagaggctctttgtggttgttttatatacttgtaagtgatttatgagataggtgtttagaataatactcttctgttagggtcaccctgatcagaccgttcccttcccctcccacaggacttacaatacggtcccttgtgctctctgcacagctaccccagggcaaaaaacaaaccccccttcactgatccctccagtaactgtgcagacagttacaggatgcggttaacatgtctgttcacctcgcataacaaagctggcaaaaaacatctccaggatgcagacaagacacctgcaccctcgactaagctcccccaccccaacccagttctcctgcacccccaactcagctcccgcaccccgacctagttctggccctataaaaacctgctatagtctgtaagcagggctgcctcctctaactgtggtggagcagccaagcagctcaataaagcttgcttgcctg

SEQ ID NO: 201663 - DNA, 2970 bp, Homo sapiens
  Payload ID: 19793
  Gene Name: zinc finger protein 195
  Uniprot ID: O14628
  ENST ID: ENST00000354599
  CDS Start-End: 106-1779
cttcctgtccccgcggctctgtgtcccctgctagccgtaggtcgtgtgacccgcaggcaccgggagatccagaagtgaaacgccaggctctctggaggccaggagatgactctgttgacgttcagggatgtggccatagaattctccctggaggagtggaaatgcctggacctcgctcagcagaatttgtacagggatgtgatgttggagaactacagaaacttgttctccgttggtctcactgtctgtaagccaggcctgatcacctgcctggagcaacgaaaagagccctggaatgtgaagagacaggaggcagcagacggacatccagctatgtcttctcattttacccaagaccttctgccagagcagggcatacaagatgcattcccaaaaagaatactgagaggatatggaaattgtggccttgataatttatatttaaggaaagactgggaaagtttagatgagtgtaagttgcaaaaagattataatggacttaaccaatgttcatcaactacccatagcaaaatctttcaatataataaatatgttaaaatctttgataacttttcaaatttacatagacgtaatataagtaatactggagagaaacctttcaaatgtcaagaatgtggcaaatcctttcaaatgctctcattcctaactgaacatcagaaaattcacactggaaaaaaattccaaaaatgtggagaatgtggcaaaacctttatccagtgctcacactttactgaacctgagaacattgacactggagagaaaccttacaagtgtcaagaatgtaacaacgtcattaaaacttgctcagtccttactaaaaatagaatttatgccggaggggaacattacagatgtgaagaatttggcaaagtatttaaccagtgctcccaccttactgaacatgagcatggtactgaggaaaaaccctgcaaatatgaagagtgcagcagtgtctttatctcttgctcaagcctttctaatcaacagatgattcttgctggagagaagctctccaaatgtgaaacatggtacaaaggttttaaccacagcccaaatccttccaaacaccagagaaatgagattggagggaaacctttcaaatgtgaggaatgtgacagcatcttcaagtggttctcagaccttactaaacataagagaattcacactggtgagaaaccatacaaatgtgacgaatgtgggaaagcctatacacagtcctcacacctcagtgaacacaggaggattcacaccggagagaaaccctaccaatgtgaagaatgtgggaaggtcttcagaacttgctcaagcctttctaaccataagagaactcattctgaagaaaaaccctacacgtgtgaagaatgtggcaacatctttaagcagttatcagacctcactaagcataagaaaacccatactggagagaagccctacaaatgtgacgaatgtggaaaaaactttacccagtcctccaaccttattgtacataagagaattcatactggagagaaaccctacaagtgtgaagaatgtggcagagtcttcatgtggttctcagacattaccaaacataagaaaacccatactggagagaaaccctacaaatgtgacgaatgtggaaaaaactttacccagtcctcaaaccttattgtacataagagaattcatactggagagaaaccctacaagtgtgaaaagtgtggcaaagccttcacccagttctcacacctgactgtacatgaaagcattcatacttgagaaaaaaataaacaaatataaaaataggcaaagccgttagtatctgctcgcatcccactttacatcagagttcagacttaataaagttatcataaatgtaattactattgaaagacctttcatgaaatataagtctccagagcacacaagagtatttcttctgaaaaaaatgttacaattatactagatggaagacttgcatcagttgcttaaactttcagaaaatttgtagagaaacccaacaaatctcataaatgtggaataacatttgttcaaaaatgatagcttagaaaacactagagttcatactaaaagatattttgcaaatacactaaatgggaaaaataagcaaggacacgttcagaaatgacactgaatccctgtgttgagtctacagagacatctagacttaaaatagatcatttatatttaagtttaaaaggaggatgagactgagtttttgtagagttataattacattcaaaatatacttttttgcattgaaaaaatgttaaatttttgaaaagcgaatattgatgtcattctattctcaaatcagtagatgctgtgtcttcatttctagtgctgatgtgaaaacacatggtcagttgttgctgcgtcagagatatgagaaattcttttctcttaggtgtgcatcactgatatacttgtccgtgaaaggtgaaagacactgaaatgtaagatgcgtgagtaaaatcttggtagagaggctctttgtggttgttttatatacttgtaagtgatttatgagataggtgtttagaataatactcttctgttagggtcaccctgatcagaccgttcccttcccctcccacaggacttacaatacggtcccttgtgctctctgcacagctaccccagggcaaaaaacaaaccccccttcactgatccctccagtaactgtgcagacagttacaggatgcggttaacatgtctgttcacctcgcataacaaagctggcaaaaaacatctccaggatgcagacaagacacctgcaccctcgactaagctcccccaccccaacccagttctcctgcacccccaactcagctcccgcaccccgacctagttctggccctataaaaacctgctatagtctgtaagcagggctgcctcctctaactgtggtggagcagccaagcagctcaataaagcttgcttgcctga

SEQ ID NO: 201664 - DNA, 2369 bp, Homo sapiens
  Payload ID: 19793
  Gene Name: zinc finger protein 195
  Uniprot ID: O14628
  ENST ID: ENST00000399602
  CDS Start-End: 128-2017
cctttgtcccgacagagctccacttcctgtccccgcggctctgtgtcccctgctagccgtaggtcgtgtgacccgcaggcaccgggagatccagaagtgaaacgccaggctctctggaggccaggagatgactctgttgacgttcagggatgtggccatagaattctccctggaggagtggaaatgcctggacctcgctcagcagaatttgtacagggatgtgatgttggagaactacagaaacttgttctccgttggtctcactgtctgtaagccaggcctgatcacctgcctggagcaacgaaaagagccctggaatgtgaagagacaggaggcagcagacggacatccagagatgggatttcaccatgctactcaggcttgtcttgaactcctgggctcaagcgatctgcctgcctcagcctcccaaagtgctgggattacaggtgtgaaccaccgtgcccagccaggcctcaatgtttctgtggacaaattcactgcactgtgctcacctggggtgctgcaaactgtgaaatggtttttagagttcagatgcatcttctcactagctatgtcttctcattttacccaagaccttctgccagagcagggcatacaagatgcattcccaaaaagaatactgagaggatatggaaattgtggccttgataatttatatttaaggaaagactgggaaagtttagatgagtgtaagttgcaaaaagattataatggacttaaccaatgttcatcaactacccatagcaaaatctttcaatataataaatatgttaaaatctttgataacttttcaaatttacatagacgtaatataagtaatactggagagaaacctttcaaatgtcaagaatgtggcaaatcctttcaaatgctctcattcctaactgaacatcagaaaattcacactggaaaaaaattccaaaaatgtggagaatgtggcaaaacctttatccagtgctcacactttactgaacctgagaacattgacactggagagaaaccttacaagtgtcaagaatgtaacaacgtcattaaaacttgctcagtccttactaaaaatagaatttatgccggaggggaacattacagatgtgaagaatttggcaaagtatttaaccagtgctcccaccttactgaacatgagcatggtactgaggaaaaaccctgcaaatatgaagagtgcagcagtgtctttatctcttgctcaagcctttctaatcaacagatgattcttgctggagagaagctctccaaatgtgaaacatggtacaaaggttttaaccacagcccaaatccttccaaacaccagagaaatgagattggagggaaacctttcaaatgtgaggaatgtgacagcatcttcaagtggttctcagaccttactaaacataagagaattcacactggtgagaaaccatacaaatgtgacgaatgtgggaaagcctatacacagtcctcacacctcagtgaacacaggaggattcacaccggagagaaaccctaccaatgtgaagaatgtgggaaggtcttcagaacttgctcaagcctttctaaccataagagaactcattctgaagaaaaaccctacacgtgtgaagaatgtggcaacatctttaagcagttatcagacctcactaagcataagaaaacccatactggagagaagccctacaaatgtgacgaatgtggaaaaaactttacccagtcctccaaccttattgtacataagagaattcatactggagagaaaccctacaagtgtgaagaatgtggcagagtcttcatgtggttctcagacattaccaaacataagaaaacccatactggagagaaaccctacaaatgtgacgaatgtggaaaaaactttacccagtcctcaaaccttattgtacataagagaattcatactggagagaaaccctacaagtgtgaaaagtgtggcaaagccttcacccagttctcacacctgactgtacatgaaagcattcatacttgagaaaaaaataaacaaatataaaaataggcaaagccgttagtatctgctcgcatcccactttacatcagagttcagacttaataaagttatcataaatgtaattactattgaaagacctttcatgaaatataagtctccagagcacacaagagtatttcttctgaaaaaaatgttacaattatactagatggaagacttgcatcagttgcttaaactttcagaaaatttgtagagaaacccaacaaatctcataaatgtggaataacatttgttcaaaaatgatagcttagaaaacactagagttcatactaaaagatattttgcaaatacactaaatgggaaaaataagcaa

SEQ ID NO: 201665 - DNA, 2389 bp, Homo sapiens
  Payload ID: 19793
  Gene Name: zinc finger protein 195
  Uniprot ID: O14628
  ENST ID: ENST00000429541
  CDS Start-End: 531-2216
aatcaggcacatgtctggagaggagaggacggcttccgggatctagcggggcctttgtcccgacagagctccacttcctgtccccgcggctctgtgtcccctgctagccgtaggtcgtgtgacccgcaggcaccgggagatccagaagtgaaacgccaggctctctggaggccaggagatggcacagacaccttaccagaatgtctttggtttgaggttccactttggaaacttgacagggtgatttgctctcagccaccctctggactttttcctcagtttcagtattgtccagggataacacaggatgcccaccatggccatgtctgctggagcatctagtgaatttcaggccctgggttatttctcagaggacagcctgaggtatgaagtgtggcctctccagggagcagctggatgccctgggctgagagaaatctcctggtctactcttcctctaaagaggtgtgatttgtccagagaatctttcctaagaggaaatcccagagaagcaggagaaagagaaagaaatggctggtgctcagactctgttgacgttcagggatgtggccatagaattctccctggaggagtggaaatgcctggacctcgctcagcagaatttgtacagggatgtgatgttggagaactacagaaacttgttctccgttggtctcactgtctgtaagccaggcctgatcacctgcctggagcaacgaaaagagccctggaatgtgaagagacaggaggcagcagacggacatccagctatgtcttctcattttacccaagaccttctgccagagcagggcatacaagatgcattcccaaaaagaatactgagaggatatggaaattgtggccttgataatttatatttaaggaaagactgggaaagtttagatgagtgtaagttgcaaaaagattataatggacttaaccaatgttcatcaactacccatagcaaaatctttcaatataataaatatgttaaaatctttgataacttttcaaatttacatagacgtaatataagtaatactggagagaaacctttcaaatgtcaagaatgtggcaaatcctttcaaatgctctcattcctaactgaacatcagaaaattcacactggaaaaaaattccaaaaatgtggagaatgtggcaaaacctttatccagtgctcacactttactgaacctgagaacattgacactggagagaaaccttacaagtgtcaagaatgtaacaacgtcattaaaacttgctcagtccttactaaaaatagaatttatgccggaggggaacattacagatgtgaagaatttggcaaagtatttaaccagtgctcccaccttactgaacatgagcatggtactgaggaaaaaccctgcaaatatgaagagtgcagcagtgtctttatctcttgctcaagcctttctaatcaacagatgattcttgctggagagaagctctccaaatgtgaaacatggtacaaaggttttaaccacagcccaaatccttccaaacaccagagaaatgagattggagggaaacctttcaaatgtgaggaatgtgacagcatcttcaagtggttctcagaccttactaaacataagagaattcacactggtgagaaaccatacaaatgtgacgaatgtgggaaagcctatacacagtcctcacacctcagtgaacacaggaggattcacaccggagagaaaccctaccaatgtgaagaatgtgggaaggtcttcagaacttgctcaagcctttctaaccataagagaactcattctgaagaaaaaccctacacgtgtgaagaatgtggcaacatctttaagcagttatcagacctcactaagcataagaaaacccatactggagagaagccctacaaatgtgacgaatgtggaaaaaactttacccagtcctccaaccttattgtacataagagaattcatactggagagaaaccctacaagtgtgaagaatgtggcagagtcttcatgtggttctcagacattaccaaacataagaaaacccatactggagagaaaccctacaaatgtgacgaatgtggaaaaaactttacccagtcctcaaaccttattgtacataagagaattcatactggagagaaaccctacaagtgtgaaaagtgtggcaaagccttcacccagttctcacacctgactgtacatgaaagcattcatacttgagaaaaaaataaacaaatataaaaataggcaaagccgttagtatctgctcgcatcccactttacatcagagttcagacttaataaagttatcataaatgtaattactattgaaagacctttcatgaaatataagtctccagagcacacaagagtatttcttctgaaaaaaatgt

SEQ ID NO: 201666 - DNA, 560 bp, Homo sapiens
  Payload ID: 19793
  Gene Name: zinc finger protein 195
  ENST ID: ENST00000427810
  CDS Start-End: 202-560
gtgacccgcaggcaccgggagatccagaagtgaaacgccaggctctctggaggccaggagatgtttcagtattgtccagggataacacaggatgcccaccatggccatgtctgctggagcatctagtgaatttcaggccctgggttatttctcagaggacagcctgaggtatgaagtgtggcctctccagggagcagctggatgccctgggctgagagaaatctcctggtctactcttcctctaaagagactctgttgacgttcagggatgtggccatagaattctccctggaggagtggaaatgcctggacctcgctcagcagaatttgtacagggatgtgatgttggagaactacagaaacttgttctccgttggtctcactgtctgtaagccaggcctgatcacctgcctggagcaacgaaaagagccctggaatgtgaagagacaggaggcagcagacggacatccagctatgtcttctcattttacccaagaccttctgccagagcagggcatacaagatgcattcccaaaaagaatactgagaggatatggaaa

SEQ ID NO: 201667 - DNA, 1018 bp, Homo sapiens
  Payload ID: 19793
  Gene Name: zinc finger protein 195
  Uniprot ID: O14628
  ENST ID: ENST00000438262
  CDS Start-End: 155-427
tgtgtcccctgctagccgtaggtcgtgtgacccgcaggcaccgggagatccagaagtgaaacgccaggctctctggaggccaggagatggtgtgatttgtccagagaatctttcctaagaggaaatcccagagaagcaggagaaagagaaagaaatggctggtgctcagactctgttgacgttcagggatgtggccatagaattctccctggaggagtggaaatgcctggacctcgctcagcagaatttgtacagggatgtgatgttggagaactacagaaacttgttctccgttggtctcactgtctgtaagccaggcctgatcacctgcctggagcaacgaaaagagccctggaatgtgaagagacaggaggcagcagacggacatccaggtattttctttgtggttaccatggaaattatataaaacatcttaaagttacaacaagctatgtcttctcattttacccaagaccttctgccagagcagggcatacaagatgcattcccaaaaagaatactgagaggatatggaaattgtggccttgataatttatatttaaggaaagactgggaaagtttagatgagtgtaagttgcaaaaagattataatggacttaaccaatgttcatcaactacccatagcaaaatctttcaatataataaatatgttaaaatctttgataacttttcaaatttacatagacgtaatataagtaatactggagagaaacctttcaaatgtcaagaatgtggcaaatcctttcaaatgctctcattcctaactgaacatcagaaaattcacactggaaaaaaattccaaaaatgtggagaatgtggcaaaacctttatccagtgctcacactttactgaacctgagaacattgacactggagagaaaccttacaagtgtcaagaatgtaacaacgtcattaaaacttgctcagtccttactaaaaatagaatttatgccggaggggaacattacagatgtgaagaatttggcaaagtatttaac

SEQ ID NO: 201668 - DNA, 1001 bp, Homo sapiens
  Payload ID: 19793
  Gene Name: zinc finger protein 195
  ENST ID: ENST00000528410
  CDS Start-End: 168-1001
gtccccgcggctctgtgtcccctgctagccgtaggtcgtgtgacccgcaggcaccgggagatccagaagtgaaacgccaggctctctggaggccaggagatggtgtgatttgtccagagaatctttcctaagaggaaatcccagagaagcaggagaaagagaaagaaatggctggtgctcagactctgttgacgttcagggatgtggccatagaattctccctggaggagtggaaatgcctggacctcgctcagcagaatttgtacagggatgtgatgttggagaactacagaaacttgttctccgttggtctcactgtctgtaagccaggcctgatcacctgcctggagcaacgaaaagagccctggaatgtgaagagacaggaggcagcagacggacatccagcactgtgctcacctggggtgctgcaaactgtgaaatggtttttagagttcagatgcatcttctcactagctatgtcttctcattttacccaagaccttctgccagagcagggcatacaagatgcattcccaaaaagaatactgagaggatatggaaattgtggccttgataatttatatttaaggaaagactgggaaagtttagatgagtgtaagttgcaaaaagattataatggacttaaccaatgttcatcaactacccatagcaaaatctttcaatataataaatatgttaaaatctttgataacttttcaaatttacatagacgtaatataagtaatactggagagaaacctttcaaatgtcaagaatgtggcaaatcctttcaaatgctctcattcctaactgaacatcagaaaattcacactggaaaaaaattccaaaaatgtggagaatgtggcaaaacctttatccagtgctcacactttactgaacctgagaacattgacactggagagaaaccttacaagtgtcaagaatgtaacaacgtcattaaaacttgctcagtccttactaaaaatagaatttatgccgga

SEQ ID NO: 201669 - DNA, 610 bp, Homo sapiens
  Payload ID: 19793
  Gene Name: zinc finger protein 195
  ENST ID: ENST00000526501
  CDS Start-End: 63-305
gtgtgacccgcaggcaccgggagatccagaagtgaaacgccaggctctctggaggccaggagatgactctgttgacgttcagggatgtggccatagaattctccctggaggagtggaaatgcctggacctcgctcagcagaatttgtacagggatgtgatgttggagaactacagaaacttgttctccgttggtctcactgtctgtaagccaggcctgatcacctgcctggagcaacgaaaagagccctggaatgtgaagagacaggaggcagcagacggacatccagcatccgcaaacgtttagcttgtctttatatcttgacaattgtgaataatgctgcagtgaacatgagggagcagataattcttcaagatgctgcttttattcccttcagttattatatacacagaagtgtgattgctgcgttgcagggaccaagtgttgaagagactatactgtctgtattgtatcttcttcgtgaacttgtgaaagattaagtttcactctatcacccaggctgtagtgcagtggtgccatctcagctcactgcaacctctgcttcctgggctcgagccttcttcccacttcagcctcctgaggacctggaa

SEQ ID NO: 201670 - DNA, 881 bp, Homo sapiens
  Payload ID: 19793
  Gene Name: zinc finger protein 195
  ENST ID: ENST00000528796
  CDS Start-End: 94-333
gcggctctgtgtcccctgctagccgtaggtcgtgtgacccgcaggcaccgggagatccagaagtgaaacgccaggctctctggaggccaggagatgactctgttgacgttcagggatgtggccatagaattctccctggaggagtggaaatgcctggacctcgctcagcagaatttgtacagggatgtgatgttggagaactacagaaacttgttctccgttggtctcactgtctgtaagccaggcctgatcacctgcctggagcaacgaaaagagccctggaatgtgaagagacaggaggcagcagacggacatccaggtcaacatggctgaacaggagcctcgttctctgtcagaatcgccctacttgccctacctcatggctggcccttccggaccattgatgggctgccagccaccccctccacctccgtgtcctctgggacctcaaccactctctgcaactgaaggttttctgggacctctgatacatcctccactcgaacatcctctgggacctgaaacaccttctccagctgaagttttactgagaactcagatacctcctccactcaagtttcctaatggacctcagcaatgtcctccactcgagtgtcccctggaacttcaatcatctcctccactctagtgtcctctgggacttcaactacctactgcacttgagtgtcctctgggacctcaaccacctccactcaagtgtcctctgggacctcaaccacctcctccagttgagtgtcctctgggacctcaaccacctcctccagttgagtgtcctctggaacctcaacaaccttcttattaaagtttcctctgggacctcaaccacctcctgcactcaagtgccctctgggacctcatca

SEQ ID NO: 201671 - DNA, 764 bp, Homo sapiens
  Payload ID: 19793
  Gene Name: zinc finger protein 195
  ENST ID: ENST00000533036
  CDS Start-End: 113-764
agctccacttcctgtccccgcggctctgtgtcccctgctagccgtaggtcgtgtgacccgcaggcaccgggagatccagaagtgaaacgccaggctctctggaggccaggagatgactctgttgacgttcagggatgtggccatagaattctccctggaggagtggaaatgcctggacctcgctcagcagaatttgtacagggatgtgatgttggagaactacagaaacttgttctccgttggtctcactgtctgtaagccaggcctgatcacctgcctggagcaacgaaaagagccctggaatgtgaagagacaggaggcagcagacggacatccaggctggaagtgcagtggtgtgatcgtggctcactgcggcctccacttcccaggttcagagatgggatttcaccatgctactcaggcttgtcttgaactcctgggctcaagcgatctgcctgcctcagcctcccaaagtgctgggattacaggtgtgaaccaccgtgcccagccaggcctcaatgtttctgtggacaaattcactgctatgtcttctcattttacccaagaccttctgccagagcagggcatacaagatgcattcccaaaaagaatactgagaggatatggaaattgtggccttgataatttatatttaaggaaagactgggaaagtttagatgagtgtaagttgcaaaaagattataatggacttaaccaatgttcatcaactacccatagcaaaatctttcaatataataaatatg

SEQ ID NO: 201672 - DNA, 546 bp, Homo sapiens
  Payload ID: 19793
  Gene Name: zinc finger protein 195
  ENST ID: ENST00000525502
  CDS Start-End: 107-546
acttcctgtccccgcggctctgtgtcccctgctagccgtaggtcgtgtgacccgcaggcaccgggagatccagaagtgaaacgccaggctctctggaggccaggagatgactctgttgacgttcagggatgtggccatagaattctccctggaggagtggaaatgcctggacctcgctcagcagaatttgtacagggatgtgatgttggagaactacagaaacttgttctccgttggtctcactgtctgtaagccaggcctgatcacctgcctggagcaacgaaaagagccctggaatgtgaagagacaggaggcagcagacggacatccagagtttcactctatcacccaggctgtagtgcagtggtgccatctcagctcactgcaacctctgcttcctgggctcgagccttcttcccacttcagcctcctgaggacctggaactacaggggcacaccgccacacccagctaacttttgtgtttttaatagagacagggttttgccatgttgcccaggctggtctcggactcctgggctcaagtg

SEQ ID NO: 201673 - DNA, 558 bp, Homo sapiens
  Payload ID: 19793
  Gene Name: zinc finger protein 195
  ENST ID: ENST00000529228
  CDS Start-End: 1-159
ggtctcactgtctgtaagccaggcctgatcacctgcctggagcaacgaaaagagccctggaatgtgaagagacaggaggcagcagacggacatccaggttgtactttttttgagacagggatttattctgtcactcaggctggaagtgcagtggtgtgatcgtggctcactgcggcctccacttcccaggttcagagatgggatttcaccatgctactcaggcttgtcttgaactcctgggctcaagcgatctgcctgcctcagcctcccaaagtgctgggattacaggtgtgaaccaccgtgcccagccaggcctcaatgtttctgtggacaaattcactgctatgtcttctcattttacccaagaccttctgccagagcagggcatacaagatgcattcccaaaaagaatactgagaggatatggaaattgtggccttgataatttatatttaaggaaagactgggaaagtttagatgagtgtaagttgcaaaaagattataatggacttaaccaatgttcatcaactacccatagcaaaatctttcaatataata

SEQ ID NO: 201674 - DNA, 579 bp, Homo sapiens
  Payload ID: 19793
  Gene Name: zinc finger protein 195
  ENST ID: ENST00000529678
  CDS Start-End: 187-579
gtccccgcggctctgtgtcccctgctagccgtaggtcgtgtgacccgcaggcaccgggagatccagaagtgaaacgccaggctctctggaggccaggagatggcatattctcacgatgcaggtgtgatttgtccagagaatctttcctaagaggaaatcccagagaagcaggagaaagagaaagaaatggctggtgctcagactctgttgacgttcagggatgtggccatagaattctccctggaggagtggaaatgcctggacctcgctcagcagaatttgtacagggatgtgatgttggagaactacagaaacttgttctccgttggtctcactgtctgtaagccaggcctgatcacctgcctggagcaacgaaaagagccctggaatgtgaagagacaggaggcagcagacggacatccagctatgtcttctcattttacccaagaccttctgccagagcagggcatacaagatgcattcccaaaaagaatactgagaggatatggaaattgtggccttgataatttatatttaaggaaagactgggaaagtttagatgagtgtaagttgcaaaaa

SEQ ID NO: 201675 - DNA, 575 bp, Homo sapiens
  Payload ID: 19793
  Gene Name: zinc finger protein 195
  ENST ID: ENST00000530643
  CDS Start-End: 91-333
gctctgtgtcccctgctagccgtaggtcgtgtgacccgcaggcaccgggagatccagaagtgaaacgccaggctctctggaggccaggagatgactctgttgacgttcagggatgtggccatagaattctccctggaggagtggaaatgcctggacctcgctcagcagaatttgtacagggatgtgatgttggagaactacagaaacttgttctccgttggtctcactgtctgtaagccaggcctgatcacctgcctggagcaacgaaaagagccctggaatgtgaagagacaggaggcagcagacggacatccagcatccgcaaacgtttagcttgtctttatatcttgacaattgtgaataatgctgcagtgaacatgagggagcagataattcttcaagatgctgcttttattcccttcagttattatatacacagaagtgtgattgctgcgttgcagggtattttctttgtggttaccatggaaattatataaaacatcttaaagttacaacaaggttgtactttttttgagacagggatttattctgtcactcaggctggaagtgcagtg

SEQ ID NO: 201676 - DNA, 519 bp, Homo sapiens
  Payload ID: 19793
  Gene Name: zinc finger protein 195
  ENST ID: ENST00000532539
  CDS Start-End: 247-519
aatcaggcacatgtctggagaggagaggacggcttccgggatctagcggggcctttgtcccgacagagctccacttcctgtccccgcggctctgtgtcccctgctagccgtaggtcgtgtgacccgcaggcaccgggagatccagaagtgaaacgccaggctctctggaggccaggagatggtgtgatttgtccagagaatctttcctaagaggaaatcccagagaagcaggagaaagagaaagaaatggctggtgctcagactctgttgacgttcagggatgtggccatagaattctccctggaggagtggaaatgcctggacctcgctcagcagaatttgtacagggatgtgatgttggagaactacagaaacttgttctccgttggtctcactgtctgtaagccaggcctgatcacctgcctggagcaacgaaaagagccctggaatgtgaagagacaggaggcagcagacggacatccaggaccaagtgttgaagagactatactgtctgtattg

SEQ ID NO: 201677 - DNA, 720 bp, Homo sapiens
  Payload ID: 19793
  Gene Name: zinc finger protein 195
  ENST ID: ENST00000525313
  CDS Start-End: 70-309
gtaggtcgtgtgacccgcaggcaccgggagatccagaagtgaaacgccaggctctctggaggccaggagatgactctgttgacgttcagggatgtggccatagaattctccctggaggagtggaaatgcctggacctcgctcagcagaatttgtacagggatgtgatgttggagaactacagaaacttgttctccgttggtctcactgtctgtaagccaggcctgatcacctgcctggagcaacgaaaagagccctggaatgtgaagagacaggaggcagcagacggacatccaggtgggtgggaatgaacgaagcaggtaacccagagatgggatttcaccatgctactcaggcttgtcttgaactcctgggctcaagcgatctgcctgcctcagcctcccaaagtgctgggattacaggtgtgaaccaccgtgcccagccaggcctcaatgtttctgtggacaaattcactgctatgtcttctcattttacccaagaccttctgccagagcagggcatacaagatgcattcccaaaaagaatactgagaggatatggaaattgtggccttgataatttatatttaaggaaagactgggaaagtttagatgagtgtaagttgcaaaaagattataatggacttaaccaatgttcatcaactacccatagcaaaatctttcaatataataaatatgttaaaatctttgataacttttcaa

SEQ ID NO: 201678 - DNA, 2008 bp, Homo sapiens
  Payload ID: 19793
  Gene Name: zinc finger protein 195
  Uniprot ID: O14628
  ENST ID: ENST00000526601
  CDS Start-End: 175-2007
acttcctgtccccgcggctctgtgtcccctgctagccgtaggtcgtgtgacccgcaggcaccgggagatccagaagtgaaacgccaggctctctggaggccaggagatggtgtgatttgtccagagaatctttcctaagaggaaatcccagagaagcaggagaaagagaaagaaatggctggtgctcagactctgttgacgttcagggatgtggccatagaattctccctggaggagtggaaatgcctggacctcgctcagcagaatttgtacagggatgtgatgttggagaactacagaaacttgttctccgttggtctcactgtctgtaagccaggcctgatcacctgcctggagcaacgaaaagagccctggaatgtgaagagacaggaggcagcagacggacatccagagatgggatttcaccatgctactcaggcttgtcttgaactcctgggctcaagcgatctgcctgcctcagcctcccaaagtgctgggattacaggtgtgaaccaccgtgcccagccaggcctcaatgtttctgtggacaaattcactgctatgtcttctcattttacccaagaccttctgccagagcagggcatacaagatgcattcccaaaaagaatactgagaggatatggaaattgtggccttgataatttatatttaaggaaagactgggaaagtttagatgagtgtaagttgcaaaaagattataatggacttaaccaatgttcatcaactacccatagcaaaatctttcaatataataaatatgttaaaatctttgataacttttcaaatttacatagacgtaatataagtaatactggagagaaacctttcaaatgtcaagaatgtggcaaatcctttcaaatgctctcattcctaactgaacatcagaaaattcacactggaaaaaaattccaaaaatgtggagaatgtggcaaaacctttatccagtgctcacactttactgaacctgagaacattgacactggagagaaaccttacaagtgtcaagaatgtaacaacgtcattaaaacttgctcagtccttactaaaaatagaatttatgccggaggggaacattacagatgtgaagaatttggcaaagtatttaaccagtgctcccaccttactgaacatgagcatggtactgaggaaaaaccctgcaaatatgaagagtgcagcagtgtctttatctcttgctcaagcctttctaatcaacagatgattcttgctggagagaagctctccaaatgtgaaacatggtacaaaggttttaaccacagcccaaatccttccaaacaccagagaaatgagattggagggaaacctttcaaatgtgaggaatgtgacagcatcttcaagtggttctcagaccttactaaacataagagaattcacactggtgagaaaccatacaaatgtgacgaatgtgggaaagcctatacacagtcctcacacctcagtgaacacaggaggattcacaccggagagaaaccctaccaatgtgaagaatgtgggaaggtcttcagaacttgctcaagcctttctaaccataagagaactcattctgaagaaaaaccctacacgtgtgaagaatgtggcaacatctttaagcagttatcagacctcactaagcataagaaaacccatactggagagaagccctacaaatgtgacgaatgtggaaaaaactttacccagtcctccaaccttattgtacataagagaattcatactggagagaaaccctacaagtgtgaagaatgtggcagagtcttcatgtggttctcagacattaccaaacataagaaaacccatactggagagaaaccctacaaatgtgacgaatgtggaaaaaactttacccagtcctcaaaccttattgtacataagagaattcatactggagagaaaccctacaagtgtgaaaagtgtggcaaagccttcacccagttctcacacctgactgtacatgaaagcattcatacttgag

SEQ ID NO: 201679 - DNA, 891 bp, Homo sapiens
  Payload ID: 19793
  Gene Name: zinc finger protein 195
  Uniprot ID: O14628
  ENST ID: ENST00000528218
  CDS Start-End: 167-439
tccccgcggctctgtgtcccctgctagccgtaggtcgtgtgacccgcaggcaccgggagatccagaagtgaaacgccaggctctctggaggccaggagatggtgtgatttgtccagagaatctttcctaagaggaaatcccagagaagcaggagaaagagaaagaaatggctggtgctcagactctgttgacgttcagggatgtggccatagaattctccctggaggagtggaaatgcctggacctcgctcagcagaatttgtacagggatgtgatgttggagaactacagaaacttgttctccgttggtctcactgtctgtaagccaggcctgatcacctgcctggagcaacgaaaagagccctggaatgtgaagagacaggaggcagcagacggacatccaggtattttctttgtggttaccatggaaattatataaaacatcttaaagttacaacaagagatgggatttcaccatgctactcaggcttgtcttgaactcctgggctcaagcgatctgcctgcctcagcctcccaaagtgctgggattacaggtgtgaaccaccgtgcccagccaggcctcaatgtttctgtggacaaattcactgctatgtcttctcattttacccaagaccttctgccagagcagggcatacaagatgcattcccaaaaagaatactgagaggatatggaaattgtggccttgataatttatatttaaggaaagactgggaaagtttagatgagtgtaagttgcaaaaagattataatggacttaaccaatgttcatcaactacccatagcaaaatctttcaatataataaatatgttaaaatctttgataacttttcaaatttacatagacgtaatataagtaatactggagagaa

SEQ ID NO: 201680 - DNA, 682 bp, Homo sapiens
  Payload ID: 19793
  Gene Name: zinc finger protein 195
  ENST ID: ENST00000534569
  CDS Start-End: 338-682
gtcccctgctagccgtaggtcgtgtgacccgcaggcaccgggagatccagaagtgaaacgccaggctctctggaggccaggagatgtttcagtattgtccagggataacacaggatgcccaccatggccatgtctgctggagcatctagtgaatttcaggccctgggttatttctcagaggacagcctgaggtatgaagtgtggcctctccagggagcagctggatgccctgggctgagagaaatctcctggtctactcttcctctaaagaggtgtgatttgtccagagaatctttcctaagaggaaatcccagagaagcaggagaaagagaaagaaatggctggtgctcagactctgttgacgttcagggatgtggccatagaattctccctggaggagtggaaatgcctggacctcgctcagcagaatttgtacagggatgtgatgttggagaactacagaaacttgttctccgttggtctcactgtctgtaagccaggcctgatcacctgcctggagcaacgaaaagagccctggaatgtgaagagacaggaggcagcagacggacatccagagatgggatttcaccatgctactcaggcttgtcttgaactcctgggctcaagcgatctgcctgcctcagcctcccaaagtgctgggattacaggtgtgaaccaccgt

SEQ ID NO: 201681 - DNA, 3342 bp, Homo sapiens
  Payload ID: 19793
  Gene Name: zinc finger protein 195
  ENST ID: ENST00000620374
  CDS Start-End: 251-2152
gtccaatcaggcacatgtctggagaggagaggacggcttccgggatctagcggggcctttgtcccgacagagctccacttcctgtccccgcggctctgtgtcccctgctagccgtaggtcgtgtgacccgcaggcaccgggagatccagaagtgaaacgccaggctctctggaggccaggagatggtgtgatttgtccagagaatctttcctaagaggaaatcccagagaagcaggagaaagagaaagaaatggctggtgctcagactctgttgacgttcagggatgtggccatagaattctccctggaggagtggaaatgcctggacctcgctcagcagaatttgtacagggatgtgatgttggagaactacagaaacttgttctccgttggtctcactgtctgtaagccaggcctgatcacctgcctggagcaacgaaaagagccctggaatgtgaagagacaggaggcagcagacggacatccagagatgggatttcaccatgctactcaggcttgtcttgaactcctgggctcaagcgatctgcctgcctcagcctcccaaagtgctgggattacaggtgtgaaccaccgtgcccagccaggcctcaatgtttctgtggacaaattcactgcactgtgctcacctggggtgctgcaaactgtgaaatggtttttagagttcagatgcatcttctcactagctatgtcttctcattttacccaagaccttctgccagagcagggcatacaagatgcattcccaaaaagaatactgagaggatatggaaattgtggccttgataatttatatttaaggaaagactgggaaagtttagatgagtgtaagttgcaaaaagattataatggacttaaccaatgttcatcaactacccatagcaaaatctttcaatataataaatatgttaaaatctttgataacttttcaaatttacatagacgtaatataagtaatactggagagaaacctttcaaatgtcaagaatgtggcaaatcctttcaaatgctctcattcctaactgaacatcagaaaattcacactggaaaaaaattccaaaaatgtggagaatgtggcaaaacctttatccagtgctcacactttactgaacctgagaacattgacactggagagaaaccttacaagtgtcaagaatgtaacaacgtcattaaaacttgctcagtccttactaaaaatagaatttatgccggaggggaacattacagatgtgaagaatttggcaaagtatttaaccagtgctcccaccttactgaacatgagcatggtactgaggaaaaaccctgcaaatatgaagagtgcagcagtgtctttatctcttgctcaagcctttctaatcaacagatgattcttgctggagagaagctctccaaatgtgaaacatggtacaaaggttttaaccacagcccaaatccttccaaacaccagagaaatgagattggagggaaacctttcaaatgtgaggaatgtgacagcatcttcaagtggttctcagaccttactaaacataagagaattcacactggtgagaaaccatacaaatgtgacgaatgtgggaaagcctatacacagtcctcacacctcagtgaacacaggaggattcacaccggagagaaaccctaccaatgtgaagaatgtgggaaggtcttcagaacttgctcaagcctttctaaccataagagaactcattctgaagaaaaaccctacacgtgtgaagaatgtggcaacatctttaagcagttatcagacctcactaagcataagaaaacccatactggagagaagccctacaaatgtgacgaatgtggaaaaaactttacccagtcctccaaccttattgtacataagagaattcatactggagagaaaccctacaagtgtgaagaatgtggcagagtcttcatgtggttctcagacattaccaaacataagaaaacccatactggagagaaaccctacaaatgtgacgaatgtggaaaaaactttacccagtcctcaaaccttattgtacataagagaattcatactggagagaaaccctacaagtgtgaaaagtgtggcaaagccttcacccagttctcacacctgactgtacatgaaagcattcatacttgagaaaaaaataaacaaatataaaaataggcaaagccgttagtatctgctcgcatcccactttacatcagagttcagacttaataaagttatcataaatgtaattactattgaaagacctttcatgaaatataagtctccagagcacacaagagtatttcttctgaaaaaaatgttacaattatactagatggaagacttgcatcagttgcttaaactttcagaaaatttgtagagaaacccaacaaatctcataaatgtggaataacatttgttcaaaaatgatagcttagaaaacactagagttcatactaaaagatattttgcaaatacactaaatgggaaaaataagcaaggacacgttcagaaatgacactgaatccctgtgttgagtctacagagacatctagacttaaaatagatcatttatatttaagtttaaaaggaggatgagactgagtttttgtagagttataattacattcaaaatatacttttttgcattgaaaaaatgttaaatttttgaaaagcgaatattgatgtcattctattctcaaatcagtagatgctgtgtcttcatttctagtgctgatgtgaaaacacatggtcagttgttgctgcgtcagagatatgagaaattcttttctcttaggtgtgcatcactgatatacttgtccgtgaaaggtgaaagacactgaaatgtaagatgcgtgagtaaaatcttggtagagaggctctttgtggttgttttatatacttgtaagtgatttatgagataggtgtttagaataatactcttctgttagggtcaccctgatcagaccgttcccttcccctcccacaggacttacaatacggtcccttgtgctctctgcacagctaccccagggcaaaaaacaaaccccccttcactgatccctccagtaactgtgcagacagttacaggatgcggttaacatgtctgttcacctcgcataacaaagctggcaaaaaacatctccaggatgcagacaagacacctgcaccctcgactaagctcccccaccccaacccagttctcctgcacccccaactcagctcccgcaccccgacctagttctggccctataaaaacctgctatagtctgtaagcagggctgcctcctctaactgtggtggagcagccaagcagctcaataaagcttgcttgcctg

SEQ ID NO: 201682 - DNA, 440 bp, Homo sapiens
  Payload ID: 19793
  Gene Name: zinc finger protein 195
  Uniprot ID: O14628
  ENST ID: ENST00000618467
  CDS Start-End: 168-440
gtccccgcggctctgtgtcccctgctagccgtaggtcgtgtgacccgcaggcaccgggagatccagaagtgaaacgccaggctctctggaggccaggagatggtgtgatttgtccagagaatctttcctaagaggaaatcccagagaagcaggagaaagagaaagaaatggctggtgctcagactctgttgacgttcagggatgtggccatagaattctccctggaggagtggaaatgcctggacctcgctcagcagaatttgtacagggatgtgatgttggagaactacagaaacttgttctccgttggtctcactgtctgtaagccaggcctgatcacctgcctggagcaacgaaaagagccctggaatgtgaagagacaggaggcagcagacggacatccaggtattttctttgtggttaccatggaaattatataa

SEQ ID NO: 201683 - DNA, 2320 bp, Homo sapiens
  Payload ID: 19794
  Gene Name: zinc finger protein 197
  ENST ID: ENST00000334075
  CDS Start-End: 131-652
ggcgccgaggcggcggtacgcaaggctggagccgcagcgggagcccccgatgatactctccaagctgtaaggaagaagtcaaggattaaggagacctggactggagaggagcctttttcaaaaaacaacaatgacaagagaaaatgtagcccacaatgctctgagacaagagggccttgtgaaggggaaggatgatacctggaaatggggaaccagcttccaaggaagtagctcctctgtttgggagacctcccacctacactttagacaattacgttaccatgagacatctggaccccaggaagccctgagccggctcagggaactctgtcgccggtggctgagaccagaagcacgcaccaaggcacagatcctggagctgctggtgctggagcagtttctgagcatcctgcctggggagattcggacctgggtacagctccatcaccctggaagtggcgaggaggctgtggccctggtagaggagctgcagaaagaccttgatggaccagcaatacaagtctggcttctgttcccaccgttgtgtacagtctcctctgggagaggtcaccagtgccatgagtggggctcgagggcagctccattgttctcaatgcaaagctttactgctgttttgatgctccatacttgaggttccagtccttgtcaaggatcaggacactctccagaaggtggtgagtgccccaggaacaacacttcctcctgtacttcctggcagccacatagcagctgaaatttgcccgcatcctcctactgacctagtggcattcaacctccaggatcctcagcatgattctcctgcccctgaagcttctgccctttcccaggaagagaacccaagaaatcaattaatggcacttatgctcctaacagcccagccccaggagttggtgatgttcgaggaggtgtcagtatgcttcacttcagaggaatgggcatgtctgggcccaatccagagggccttgtactgggatgtgatgctggagaattatggaaatgtgacctccctaggttacaggaaatacaggaggcagaggaacaaataaaagacaccacgagaaacagacacatccagaacgtggaatattgcataagaaagctgccctggattcttcaaaatattattatgatgaaaaagagaggggagtgaaaattgttcaagctgtcttgagtctgctgtgagtttattataccattctctgcttttgtgtatgtatgaaaatttcgatatgaaaggtataaaacatggatgaggaggcttgtttttaaaagataatactagagagccgttaggtactaagaaccagaaatagactcacataaatggccaattgatttttgacaggggcaaaagcaattcaatggaggagggatcgccttttcagcaaatactgttggagtaattggatatccataggcagtaaaccaacaacttcaggacctaggactgagctaagaaggctcagatgactcaaaagcatgctccttagaaggaaaaaaaatgttaaattggacttcatcaaaattaagataatttaccctgtaagagacctttttacaaagatgatattacaggttgggaaaaaatatttgcaaatcatatccaacaagggatttgtatgtaaactacataaagaactttccaaatttaacagtaataagtaaatacaattagaaaataagcaaaagacagacatttcactgaagtatagatagcaaataagcaaatgaaaagatgttcaacatcattaggcatgagggaaatgcagagtaaaatcgtgagatatcacctatcagaatagcttaactttttttttttaatggtggtaactgctggcaaggatgaagagaaacaggatctcatacattgctgggaatgtaaaatggtacagccactctggaatataatttggcagtttcttgtaaaaccacacatgtatatgtcatgcttcaggaattgcacttctgagcatttatcccagagaaatgaaaacttgcgttcacacaaaaacctgtatacgaatgttcatagcagctttatttgtaatggtcgaaacctgtaggcaacccatatatccttccttaggtggttaaaacaaattgtggtttatgtattaccatggaatacttgttactctgcaataaaattgacttattgatatccataacaactcaaataaatttcaagggaattaatgctgagtgaaaataatcacaaaaggccatattctgtatgaaaatattcatataacattctcaaaatgataaaactatagagatgaaaaatggattaatggtt

SEQ ID NO: 201684 - DNA, 3275 bp, Homo sapiens
  Payload ID: 19794
  Gene Name: zinc finger protein 197
  Uniprot ID: O14709
  ENST ID: ENST00000344387
  CDS Start-End: 186-3275
attctgtgcctcggctgccggaagggctcgttcctgtgtcatctcctagcggcctggcgccgaggcggcggtacgcaaggctggagccgcagcgggagcccccgatgatactctccaagctgtaaggaagaagtcaaggattaaggagacctggactggagaggagcctttttcaaaaaacaacaatgacaagagaaaatgtagcccacaatgctctgagacaagagggccttgtgaaggggaaggatgatacctggaaatggggaaccagcttccaaggaagtagctcctctgtttgggagacctcccacctacactttagacaattacgttaccatgagacatctggaccccaggaagccctgagccggctcagggaactctgtcgccggtggctgagaccagaagcacgcaccaaggcacagatcctggagctgctggtgctggagcagtttctgagcatcctgcctggggagattcggacctgggtacagctccatcaccctggaagtggcgaggaggctgtggccctggtagaggagctgcagaaagaccttgatggaccagcaatacaagttccagtccttgtcaaggatcaggacactctccagaaggtggtgagtgccccaggaacaacacttcctcctgtacttcctggcagccacatagcagctgaaatttgcccgcatcctcctactgacctagtggcattcaacctccaggatcctcagcatgattctcctgcccctgaagcttctgccctttcccaggaagagaacccaagaaatcaattaatggcacttatgctcctaacagcccagccccaggagttggtgatgttcgaggaggtgtcagtatgcttcacttcagaggaatgggcatgtctgggcccaatccagagggccttgtactgggatgtgatgctggagaattatggaaatgtgacctccctagaatgggagaccatgaccgagaatgaggaggtgacatcaaagccaagtagttctcaaagagcagactctcataaaggaacatcaaaaagacttcaaggaagtgttccccaggtccttgattttgaagaagagtgtgaatggcaagttttggcaagtcagtggggaaatgaaacagatgaaagggcagatacagtgaagaaagtttccctttgtgaacgagacaagaagaaaaggactccaccagagaaacaaggccaaaagtggaaggaattaggagacagcttgactttcggttcagctatttctgaaagtttaataggtactgaaggaaagaagttttataaatgtgatatgtgttgtaaacattttaataaaatctcccatcttataaaccatcggagaatccacactggtgagaaacctcataaatgtaaggaatgtggaaaaggctttattcagcgttcgagccttctaatgcatttacggaaccattcaggggagaaaccttataaatgtaatgaatgtgggaaagcattttctcaaagtgcttaccttctaaaccatcagaggatccacactggggagaaaccttataagtgtaaggagtgtggaaagggcttctataggcactcaggcctaattatacatctaaggcgccattcaggggagagaccttataagtgtaatgaatgtgggaaagtcttctctcagaatgcttacctcattgaccatcagaggctccacaaaggggaagaaccttataaatgtaataagtgtcagaaagctttcattctgaagaagagcctcattctgcaccagagaatccactctggggaaaaaccctataaatgtgatgaatgtggaaagacctttgctcagaccacttatcttattgaccatcagcgactccacagtgcagagaacccttacaagtgtaaagaatgtggaaaagttttcattcgaagcaaaagcctcctcttacatcagagagtccacacagaaaagaaaacctttggttgtaaaaagtgtgggaagattttcagttctaagtcaaacttcattgaccataagaggatgcacagcagagagaaaccttacaaatgcactgaatgtgggaaagcctttactcaaagtgcttacctttttgaccaccagagactccacaatggggagaagccctatgaatgtaatgaatgtgggaaagtttttattctgaagaagagcctcattttacatcaaaggttccacactggagagaatctctatgaatgtaaagattgtggtaaggtcttcggttcaaacagaaacctcattgaccatgagagactccacaatggggagaagccatatgaatgtcgagagtgtgggaaaacctttattatgagcaaaagttttatggtccatcagaaactccatacacaagagaaagcctacaaatgtgaggattgtgggaaggctttcagttacaattcaagcctgcttgtacatcggagaatccacaccggagaaaaaccctttgaatgcagtgagtgtggaagagctttcagttcaaacagaaacctcattgagcataagagaatccacagtggtgagaaaccctatgagtgtgatgagtgtggcaaatgcttcattctgaagaaaagcctcattggacatcagagaattcacacgagggaaaaatcttataaatgcaatgactgtgggaaggtcttcagttaccgctcaaaccttatagcccatcagaggatccatactggtgagaagccctatgcgtgtagtgagtgtggaaaaggttttacgtacaacagaaacctgattgaacatcaaagaattcacagtggagaaaaaacctacgaatgtcatgtatgtaggaaagtccttacctctagtagaaatcttatggtacatcaaagaatccatactggagagaaaccttataaatgtaatgagtgtggaaaagactttagtcagaataaaaaccttgttgtacatcagagaatgcacactggggaaaaaccttatgagtgtgacaagtgtaggaaatcctttacttctaagaggaatttagttggccaccagagaattcacacaggggagaaaccctatgggtgtaatgattgtagtaaagtttttaggcaaagaaaaaaccttactgtacatcagaaaatccacacagatgaaaaaccttgtgaatgtgatgtgtctgaaaaagaattctctcagacttccaaccttcatcttcaacagaaaatccataccattgaggaattctcttggctacaaaacaccaatgagtccaagattgagattcagaaaatctag

SEQ ID NO: 201685 - DNA, 1989 bp, Homo sapiens
  Payload ID: 19794
  Gene Name: zinc finger protein 197
  Uniprot ID: O14709
  ENST ID: ENST00000383744
  CDS Start-End: 207-1010
agtattctcggctcggccattattctgtgcctcggctgccggaagggctcgttcctgtgtcatctcctagcggcctggcgccgaggcggcggtacgcaaggctggagccgcagcgggagcccccgatgatactctccaagctgtaaggaagaagtcaaggattaaggagacctggactggagaggagcctttttcaaaaaacaacaatgacaagagaaaatgtagcccacaatgctctgagacaagagggccttgtgaaggggaaggatgatacctggaaatggggaaccagcttccaaggaagtagctcctctgtttgggagacctcccacctacactttagacaattacgttaccatgagacatctggaccccaggaagccctgagccggctcagggaactctgtcgccggtggctgagaccagaagcacgcaccaaggcacagatcctggagctgctggtgctggagcagtttctgagcatcctgcctggggagattcggacctgggtacagctccatcaccctggaagtggcgaggaggctgtggccctggtagaggagctgcagaaagaccttgatggaccagcaatacaagttccagtccttgtcaaggatcaggacactctccagaaggtggtgagtgccccaggaacaacacttcctcctgtacttcctggcagccacatagcagctgaaatttgcccgcatcctcctactgacctagtggcattcaacctccaggatcctcagcatgattctcctgcccctgaagcttctgccctttcccaggaagagaacccaagaaatcaattaatggcacttatgctcctaacagcccagccccaggagttggtgatgttcgaggaggtgtcagtatgcttcacttcagaggaatgggcatgtctgggcccaatccagagggccttgtactgggatgtgatgctggagaattatggaaatgtgacctccctaggttacaggaaatacaggaggcagaggaacaaataaaagacaccacgagaaacagacacatccagaacgtggaatattgcataagaaagctgccctggattcttcaaaatattattatgatgaaaaagagaggggagtgaaaattgttcaagctgtcttgagtctgctgtgagtttattataccattctctgcttttgtgtatgtatgaaaatttcgatatgaaaggtataaaacatggatgaggaggcttgtttttaaaagataatactagagagccgttaggtactaagaaccagaaatagactcacataaatggccaattgatttttgacaggggcaaaagcaattcaatggaggagggatcgccttttcagcaaatactgttggagtaattggatatccataggcagtaaaccaacaacttcaggacctaggactgagctaagaaggctcagatgactcaaaagcatgctccttagaaggaaaaaaaatgttaaattggacttcatcaaaattaagataatttaccctgtaagagacctttttacaaagatgatattacaggttgggaaaaaatatttgcaaatcatatccaacaagggatttgtatgtaaactacataaagaactttccaaatttaacagtaataagtaaatacaattagaaaataagcaaaagacagacatttcactgaagtatagatagcaaataagcaaatgaaaagatgttcaacatcattaggcatgagggaaatgcagagtaaaatcgtgagatatcacctatcagaatagcttaactttttttttttaatggtggtaactgctggcaaggatgaagagaaacaggatctcatacattgctgggaatgtaaaatggtacagccactctggaatataatttggcagtttcttgtaaaaccacacatgtatatgtcatgcttcaggaattgcacttctgagcatttatcccagagaaatgaaaacttgcgttcacacaaaaacctgtatacgaatg

SEQ ID NO: 201686 - DNA, 2935 bp, Homo sapiens
  Payload ID: 19794
  Gene Name: zinc finger protein 197
  Uniprot ID: O14709
  ENST ID: ENST00000383745
  CDS Start-End: 186-989
ctcggctgccggaagggctcgttcctgtgtcatctcctagcggcctggcgccgaggcggcggtacgcaaggctggagccgcagcgggagcccccggtcttgtagatgatactctccaagctgtaaggaagaagtcaaggattaaggagacctggactggagaggagcctttttcaaaaaacaacaatgacaagagaaaatgtagcccacaatgctctgagacaagagggccttgtgaaggggaaggatgatacctggaaatggggaaccagcttccaaggaagtagctcctctgtttgggagacctcccacctacactttagacaattacgttaccatgagacatctggaccccaggaagccctgagccggctcagggaactctgtcgccggtggctgagaccagaagcacgcaccaaggcacagatcctggagctgctggtgctggagcagtttctgagcatcctgcctggggagattcggacctgggtacagctccatcaccctggaagtggcgaggaggctgtggccctggtagaggagctgcagaaagaccttgatggaccagcaatacaagttccagtccttgtcaaggatcaggacactctccagaaggtggtgagtgccccaggaacaacacttcctcctgtacttcctggcagccacatagcagctgaaatttgcccgcatcctcctactgacctagtggcattcaacctccaggatcctcagcatgattctcctgcccctgaagcttctgccctttcccaggaagagaacccaagaaatcaattaatggcacttatgctcctaacagcccagccccaggagttggtgatgttcgaggaggtgtcagtatgcttcacttcagaggaatgggcatgtctgggcccaatccagagggccttgtactgggatgtgatgctggagaattatggaaatgtgacctccctaggttacaggaaatacaggaggcagaggaacaaataaaagacaccacgagaaacagacacatccagaacgtggaatattgcataagaaagctgccctggattcttcaaaatattattatgatgaaaaagagaggggagtgaaaattgttcaagctgtcttgagtctgctgtgagtttattataccattctctgcttttgtgtatgtatgaaaatttcgatatgaaaggtataaaacatggatgaggaggcttgtttttaaaagataatactagagagccgttaggtactaagaaccagaaatagactcacataaatggccaattgatttttgacaggggcaaaagcaattcaatggaggagggatcgccttttcagcaaatactgttggagtaattggatatccataggcagtaaaccaacaacttcaggacctaggactgagctaagaaggctcagatgactcaaaagcatgctccttagaaggaaaaaaaatgttaaattggacttcatcaaaattaagataatttaccctgtaagagacctttttacaaagatgatattacaggttgggaaaaaatatttgcaaatcatatccaacaagggatttgtatgtaaactacataaagaactttccaaatttaacagtaataagtaaatacaattagaaaataagcaaaagacagacatttcactgaagtatagatagcaaataagcaaatgaaaagatgttcaacatcattaggcatgagggaaatgcagagtaaaatcgtgagatatcacctatcagaatagcttaactttttttttttaatggtggtaactgctggcaaggatgaagagaaacaggatctcatacattgctgggaatgtaaaatggtacagccactctggaatataatttggcagtttcttgtaaaaccacacatgtatatgtcatgcttcaggaattgcacttctgagcatttatcccagagaaatgaaaacttgcgttcacacaaaaacctgtatacgaatgttcatagcagctttatttgtaatggtcgaaacctgtaggcaacccatatatccttccttaggtggttaaaacaaattgtggtttatgtattaccatggaatacttgttactctgcaataaaattgacttattgatatccataacaactcaaataaatttcaagggaattaatgctgagtgaaaataatcacaaaaggccatattctgtatgaaaatattcatataacattctcaaaatgataaaactatagagatgaaaaatggattaatggttgccaaaggttagggatggtgggaggaaaaatggggagagggttggatggaactattaaaaggtagcaccagaaaggtctttgtggtgatggaacacttgtgtatcttgattgcagtggtggttacacaaatctataggtgctatacctatacacacatactgtaccaatgttgatttcctttttcattttatgtaagatgtaaccatgaggggaaagtgggtgaagggtgctatctttgcaacttcctgtgattctatcatttcaaaataaaaagtaaaaaccaacaatggcaacgaaaacccaaaactaaagagctgtaaccaactaaagtgtgtgaaactgatttgaaaaaaagttataaaatacatgttttaggacagttgggaaatttgaatatgactggttattagatggtattagggaatttttgttgattttcttacctgtgacggtggtggtagtttgaagaatattcttaatcttaagggatgcatgttgaagtatttggaatgaagtgttctgatgtttacaactttcaaaaaaatgattttaaatatgtattgagagatcaggcaaacatagcaaaatgttcattgttgagtccacatggaaaatacgggtattcaatgtgccatactttcaactcttctgtactctgatattttcaaaataaaacatttgaggggaaatta

SEQ ID NO: 201687 - DNA, 4299 bp, Homo sapiens
  Payload ID: 19794
  Gene Name: zinc finger protein 197
  Uniprot ID: O14709
  ENST ID: ENST00000396058
  CDS Start-End: 168-3257
ggagctgactgggagctgactggggcctggaaagctcagttgtttctctgggctaactttaacaatgatttcttgaggtcttgtagatgatactctccaagctgtaaggaagaagtcaaggattaaggagacctggactggagaggagcctttttcaaaaaacaacaatgacaagagaaaatgtagcccacaatgctctgagacaagagggccttgtgaaggggaaggatgatacctggaaatggggaaccagcttccaaggaagtagctcctctgtttgggagacctcccacctacactttagacaattacgttaccatgagacatctggaccccaggaagccctgagccggctcagggaactctgtcgccggtggctgagaccagaagcacgcaccaaggcacagatcctggagctgctggtgctggagcagtttctgagcatcctgcctggggagattcggacctgggtacagctccatcaccctggaagtggcgaggaggctgtggccctggtagaggagctgcagaaagaccttgatggaccagcaatacaagttccagtccttgtcaaggatcaggacactctccagaaggtggtgagtgccccaggaacaacacttcctcctgtacttcctggcagccacatagcagctgaaatttgcccgcatcctcctactgacctagtggcattcaacctccaggatcctcagcatgattctcctgcccctgaagcttctgccctttcccaggaagagaacccaagaaatcaattaatggcacttatgctcctaacagcccagccccaggagttggtgatgttcgaggaggtgtcagtatgcttcacttcagaggaatgggcatgtctgggcccaatccagagggccttgtactgggatgtgatgctggagaattatggaaatgtgacctccctagaatgggagaccatgaccgagaatgaggaggtgacatcaaagccaagtagttctcaaagagcagactctcataaaggaacatcaaaaagacttcaaggaagtgttccccaggtccttgattttgaagaagagtgtgaatggcaagttttggcaagtcagtggggaaatgaaacagatgaaagggcagatacagtgaagaaagtttccctttgtgaacgagacaagaagaaaaggactccaccagagaaacaaggccaaaagtggaaggaattaggagacagcttgactttcggttcagctatttctgaaagtttaataggtactgaaggaaagaagttttataaatgtgatatgtgttgtaaacattttaataaaatctcccatcttataaaccatcggagaatccacactggtgagaaacctcataaatgtaaggaatgtggaaaaggctttattcagcgttcgagccttctaatgcatttacggaaccattcaggggagaaaccttataaatgtaatgaatgtgggaaagcattttctcaaagtgcttaccttctaaaccatcagaggatccacactggggagaaaccttataagtgtaaggagtgtggaaagggcttctataggcactcaggcctaattatacatctaaggcgccattcaggggagagaccttataagtgtaatgaatgtgggaaagtcttctctcagaatgcttacctcattgaccatcagaggctccacaaaggggaagaaccttataaatgtaataagtgtcagaaagctttcattctgaagaagagcctcattctgcaccagagaatccactctggggaaaaaccctataaatgtgatgaatgtggaaagacctttgctcagaccacttatcttattgaccatcagcgactccacagtgcagagaacccttacaagtgtaaagaatgtggaaaagttttcattcgaagcaaaagcctcctcttacatcagagagtccacacagaaaagaaaacctttggttgtaaaaagtgtgggaagattttcagttctaagtcaaacttcattgaccataagaggatgcacagcagagagaaaccttacaaatgcactgaatgtgggaaagcctttactcaaagtgcttacctttttgaccaccagagactccacaatggggagaagccctatgaatgtaatgaatgtgggaaagtttttattctgaagaagagcctcattttacatcaaaggttccacactggagagaatctctatgaatgtaaagattgtggtaaggtcttcggttcaaacagaaacctcattgaccatgagagactccacaatggggagaagccatatgaatgtcgagagtgtgggaaaacctttattatgagcaaaagttttatggtccatcagaaactccatacacaagagaaagcctacaaatgtgaggattgtgggaaggctttcagttacaattcaagcctgcttgtacatcggagaatccacaccggagaaaaaccctttgaatgcagtgagtgtggaagagctttcagttcaaacagaaacctcattgagcataagagaatccacagtggtgagaaaccctatgagtgtgatgagtgtggcaaatgcttcattctgaagaaaagcctcattggacatcagagaattcacacgagggaaaaatcttataaatgcaatgactgtgggaaggtcttcagttaccgctcaaaccttatagcccatcagaggatccatactggtgagaagccctatgcgtgtagtgagtgtggaaaaggttttacgtacaacagaaacctgattgaacatcaaagaattcacagtggagaaaaaacctacgaatgtcatgtatgtaggaaagtccttacctctagtagaaatcttatggtacatcaaagaatccatactggagagaaaccttataaatgtaatgagtgtggaaaagactttagtcagaataaaaaccttgttgtacatcagagaatgcacactggggaaaaaccttatgagtgtgacaagtgtaggaaatcctttacttctaagaggaatttagttggccaccagagaattcacacaggggagaaaccctatgggtgtaatgattgtagtaaagtttttaggcaaagaaaaaaccttactgtacatcagaaaatccacacagatgaaaaaccttgtgaatgtgatgtgtctgaaaaagaattctctcagacttccaaccttcatcttcaacagaaaatccataccattgaggaattctcttggctacaaaacaccaatgagtccaagattgagattcagaaaatctagtgtcatatgtaaaatggaatagaatccctgcctacttaagtaactgttggacaaatgatatatatttcttctaaggaaaaagtttattatttactctttactagacaaatgagtagcatatagaagaaagttaataggccgggcttggtggctcatgcctgtaatcccagcactttgagaggccgaagcgagtggatcacctgaggtcaggattttgagaccagcctgaccaacatggtgaaaccccatctctactaaaatacaaaaattatccgggcatgggggcacacaccggtaatcccagctactcaggaggctgagacaggagagtcgcttgaacctgggagggcggaggttgcagtgagccaggatcgcgccattgcactccagcctgggcaacaagagcgaaactcttgtctgaaaaaataaagttcatcccaactttcaagtctacaaaaacataatccaaatctaataacatagttgtaaatgagagcaacaataaaaagtagacatgggctgggtgcagtggctcactcctgtagtcccaggactttgggaggccgaggtgggaagatcccttgagcccaggagttcgagacaagcctgggtaacacggggagacccgtctttagtaaataaaaataaatttattaataaaactaaaaatttaataataaaaagtggacattgttttttaaaatgtgtatagtatgcattttaaagatagtgtcactgctgtggaaaacctgaacagacagtatgatccagaatgtcaggtgtggagttgggcggacaagagtctgctgatgaggacaacctaaaagagcactggatttggaatcagaagacctacctttgattcctggctttcccttaatggccatgtgatgttattaagtcagcctctaaagctttagtttcctgtcagtcaaatgttgacatgatacctacctcacagggttgttgtgagggttaagtgaaaggatctttgtgaaagtactttttgaaatcattcagttgtcaataaagttggataaaa

SEQ ID NO: 201688 - DNA, 546 bp, Homo sapiens
  Payload ID: 19794
  Gene Name: zinc finger protein 197
  ENST ID: ENST00000412641
  CDS Start-End: 311-546
acagagatgtggaaacctcacgaagcctagaagggccggagggacaggctgggagttagctgggagttgctgacgcagttccttctgcgctttgttcaagatgtgggtctggcgctttcgtgactcaagaccctcttaggaacttcttcactgaactcaaggaggagatcaggcaagatctgtgctgtgcagatcctttggattgaggctgctgtgcacaggaatatggatgatactctccaagctgtaaggaagaagtcaaggattaaggagacctggactggagaggagcctttttcaaaaaacaacaatgacaagagaaaatgtagcccacaatgctctgagacaagagggccttgtgaaggggaaggatgatacctggaaatggggaaccagcttccaaggaagtagctcctctgtttgggagacctcccacctacactttagacaattacgttaccatgagacatctggaccccaggaagccctgagccggctcagggaactctgtcgccggtggctgagaccagaagcacgcaccaaggc

SEQ ID NO: 201689 - DNA, 3275 bp, Homo sapiens; identical to SEQ ID NO: 201684
  Payload ID: 19794
  Gene Name: zinc finger protein 197
  Uniprot ID: O14709
  ENST ID: ENST00000628172
  CDS Start-End: 186-3275

SEQ ID NO: 201690 - DNA, 2320 bp, Homo sapiens; identical to SEQ ID NO: 201683
  Payload ID: 19794
  Gene Name: zinc finger protein 197
  ENST ID: ENST00000627858
  CDS Start-End: 131-652

SEQ ID NO: 201691 - DNA, 4299 bp, Homo sapiens; identical to SEQ ID NO: 201687
  Payload ID: 19794
  Gene Name: zinc finger protein 197
  Uniprot ID: O14709
  ENST ID: ENST00000627845
  CDS Start-End: 168-3257

SEQ ID NO: 201692 - DNA, 2935 bp, Homo sapiens; identical to SEQ ID NO: 201686
  Payload ID: 19794
  Gene Name: zinc finger protein 197
  Uniprot ID: O14709
  ENST ID: ENST00000627752
  CDS Start-End: 186-989

SEQ ID NO: 201693 - DNA, 546 bp, Homo sapiens; identical to SEQ ID NO: 201688
  Payload ID: 19794
  Gene Name: zinc finger protein 197
  ENST ID: ENST00000627004
  CDS Start-End: 311-546

SEQ ID NO: 201694 - DNA, 1989 bp, Homo sapiens; identical to SEQ ID NO: 201685
  Payload ID: 19794
  Gene Name: zinc finger protein 197
  Uniprot ID: O14709
  ENST ID: ENST00000627517
  CDS Start-End: 207-1010

SEQ ID NO: 201695 - DNA, 3737 bp, Homo sapiens
  Payload ID: 19795
  Gene Name: zinc finger protein 2
  ENST ID: ENST00000611463
  CDS Start-End: 489-1526
tcttccccagagctggacacgaggcaccatgatcagagagacacattccctgcggacggcgctcccatcggatactggagggacgcgacactagaggcaggcagtacttcagggtgaccataagtctcccaaacagccacaacggctcgctctcccagctaaggcgacagcgctgccattttggatcctgttcagccacgggaagccggcgtttgcacacattttcggacgtcatattaaagcgcaccggacgccgagacttctgggagatgaagtccttgcgaaggccccgcattgattgggagcgcagtcgccaggaccctgtgcgcaggcgcgttggtttcccgacctgaagaggcgccgtcttcccgggtcccgagcactctgtgccggaggaatcagtgacattcgaagacgttgccgtggttttcacagatgaagagtggagtcgtctggtccccatacagagggacctctacaaggaggtgatgctggagaactataacagcattgtgtcattggactgggaaactaagcctgagattcacgatgcttcagacaaaaaatcagaaggatcattgagggaatgccttggaaggcaaagtcctctgtgtcctaaatttgaagttcatacacccaatggcaggatgggaacagaaaagcaaagcccttcaggggagactcgtaagaaatccctctcccgggacaaaggcttgcggcgacggtcagccctgtccagggaaattctcactaaagagagacaccaggaatgcagtgactgtgggaagaccttttttgaccactcatccctcacccgccatcagaggactcacactggggagaagccctacgactgccgcgagtgtgggaaagccttcagccacaggagcagcctcagcagacatctgatgtcacacactggggagagcccctacgagtgcagtgtgtgctcaaaagccttctttgaccgttcgtccctaactgtccatcagcgaattcacactggagagaaaccctttcagtgcaacgagtgtggaaaagccttttttgaccgttcatcccttactcgacaccagagaattcacactggagaaagtccttatgaatgtcatcagtgtgggaaagcctttagccagaaaagtattcttactcgccatcagctaatccacactggcaggaagccttatgagtgtaacgagtgcgggaaagctttctatggtgtctcgtctctgaatagacatcagaaagctcatgctggggaccctcgctatcagtgtaacgagtgtggcaaagctttctttgaccgctcatcccttacacagcatcagaagatccacactggagacaagccatatgaatgcagcgaatgcgggaaagcctttagccagcggtgccggctcacgcggcatcagcgtgtccacacgggagagaagccctttgaatgcactgtgtgtgggaaagttttcagttcaaaatcttctgttattcaacatcaacggcgttacgccaaacagggaatagactgagttgggcaaaagcttgggtaggacaagaacttccatacaaatttgagatagatctcgcctgtcttaaagctgccatttgctcattctacccactctggctgccgttgtcctgtcctgcttctgcgccagagtgtttaataagcactcccttcctgctgtgttatagaactgtaggggaggccatggaaatgactctaaagatacaaaattttgaagaggtttgtcagacaataggatagatgttaggaggagacacacctcttgtctgagaacctaggccccaggtatcactgcactttaagaaactggaggctgcaacaggagggaaaggcagaatgatatcacagcagtactatttttttttttcagaacatttgttttgatggctgttagtccccctctcttggagcattttggggcactaatcttgttctcttgtgtcccagcttttagacctcttacttccactgctagtagctagcacttactgagcacctgcgatgaggtaaagactcagctaagggttttacaggaagtagattaattgatcctgtcaccaaccatatgaagtaggcactgttaccatctgcatctccagatgagcaccctgaggtttagagagattaaatcacttgcccaaggtgaaccagctggtaaaaggtgatgccaggtcttgaagacaggtccaccttcaaaatctattctctttaccattatgctcgatggtttgtttgttttataatttatgtatatgtattatcctctcaactagattgtaagcacttggaggtgtgacttacaggtctttgtatctcacacagtgccttgctaataggtgctcaataaatatttatatgagtgaatgacttttctacttaccaaattctctccattcagaacacctcttggatttgcatactttctctgaattcacagcccagcctatacttttatcatccccagctcccactcctggcagcagtagctttctaattccagttcttcctgctttattgaagagggatgtgctaagctgtggtacagtaacaagcccgcagagagctatgtctcccttaaaacctgacgggaaccattctgtcttattctatcctcattatttggaacatctggcttccaaagtcaccacaagggcggaagagaaagctagaggaatttgtaggatattttcttagacccaggcttacatcacttctgtccacatctaataagccagaacccagcacctagaagctaggaaagtaaacaagcacctcgaaagttggttaataccaagaacctctctcacagttatattttgcatactactgttaagccagtctttgcaaatgaccccttcctgcccatcactgccttcctcaagacctaaaatagctccctatttagtgaaaaattatctgaatatttaaggtctgccttaacgtgatccccattgctgaattttacctcctgactccaaaaactcttctcttccctgggcccagtcctatttttttttttttttttttttttgtgagacagagtctcactctgtcacccaggttggaatgcaatggcacaatctccgctcactgcaagctccgcctcccgggttcacgccattctcctgcctcagcctcccgaatagctgggactacaggtgcccgccaacacgcccggctaattttttgtatttttagtagagacggggtttcaccgtgttagccaggatggtctcaatctcctgacctcgtgatccgcccgcctcggcctcccaaagtgctgggattacagacgtaagtcaccgtgcccggcctatatttttattttattaaaggttaggcactagatgaccttgactctaggcatctgcattctcttgatctttgcttagggtgaagctcagaaaaggacttggttctgaaaggctgtctggaattagattgtcctacgtgattcccagtgaattgagatgaatttcctctggaagttcaagtcggattcgagaagctgaattaccaaacagaccctccccaacctactaacgaccctattactctgttcaccctagagcagacgaacggcagggaagacttgatctgtggacttttgaaagcaacttgaggaaaaacacataacagaatctataggtgtggacaatatgtgatattgctaaataatgtcaagtaggaaataaaagagactattgacaaa

SEQ ID NO: 201696 - DNA, 3885 bp, Homo sapiens
  Payload ID: 19795
  Gene Name: zinc finger protein 2
  ENST ID: ENST00000617923
  CDS Start-End: 523-1674
tctcccaacgccagctgactcgatttcgtctcggtcttccccagagctggacacgaggcaccatgatcagagagacacattccctgcggacggcgctcccatcggatactggagggacgcgacactagaggcaggcagtacttcagggtgaccataagtctcccaaacagccacaacggctcgctctcccagctaaggcgacagcgctgccattttggatcctgttcagccacgggaagccggcgtttgcacacattttcggacgtcatattaaagcgcaccggacgccgagacttctgggagatgaagtccttgcgaaggccccgcattgattgggagcgcagtcgccaggaccctgtgcgcaggcgcgttggtttcccgacctgaagaggcgccgtcttcccgggtcccgagcactctgtgccggaggaatcagtgacattcgaagacgttgccgtggttttcacagatgaagagtggagtcgtctggtccccatacagagggacctctacaaggaggtgatgctggagaactataacagcattgtgtcattgggccttccagttcctcaacctgatgtgattttccaattgaagagaggggacaagccgtggatggtagatcttcatgggtctgaggagagagaatggccagagagtgtctctctagactgggaaactaagcctgagattcacgatgcttcagacaaaaaatcagaaggatcattgagggaatgccttggaaggcaaagtcctctgtgtcctaaatttgaagttcatacacccaatggcaggatgggaacagaaaagcaaagcccttcaggggagactcgtaagaaatccctctcccgggacaaaggcttgcggcgacggtcagccctgtccagggaaattctcactaaagagagacaccaggaatgcagtgactgtgggaagaccttttttgaccactcatccctcacccgccatcagaggactcacactggggagaagccctacgactgccgcgagtgtgggaaagccttcagccacaggagcagcctcagcagacatctgatgtcacacactggggagagcccctacgagtgcagtgtgtgctcaaaagccttctttgaccgttcgtccctaactgtccatcagcgaattcacactggagagaaaccctttcagtgcaacgagtgtggaaaagccttttttgaccgttcatcccttactcgacaccagagaattcacactggagaaagtccttatgaatgtcatcagtgtgggaaagcctttagccagaaaagtattcttactcgccatcagctaatccacactggcaggaagccttatgagtgtaacgagtgcgggaaagctttctatggtgtctcgtctctgaatagacatcagaaagctcatgctggggaccctcgctatcagtgtaacgagtgtggcaaagctttctttgaccgctcatcccttacacagcatcagaagatccacactggagacaagccatatgaatgcagcgaatgcgggaaagcctttagccagcggtgccggctcacgcggcatcagcgtgtccacacgggagagaagccctttgaatgcactgtgtgtgggaaagttttcagttcaaaatcttctgttattcaacatcaacggcgttacgccaaacagggaatagactgagttgggcaaaagcttgggtaggacaagaacttccatacaaatttgagatagatctcgcctgtcttaaagctgccatttgctcattctacccactctggctgccgttgtcctgtcctgcttctgcgccagagtgtttaataagcactcccttcctgctgtgttatagaactgtaggggaggccatggaaatgactctaaagatacaaaattttgaagaggtttgtcagacaataggatagatgttaggaggagacacacctcttgtctgagaacctaggccccaggtatcactgcactttaagaaactggaggctgcaacaggagggaaaggcagaatgatatcacagcagtactatttttttttttcagaacatttgttttgatggctgttagtccccctctcttggagcattttggggcactaatcttgttctcttgtgtcccagcttttagacctcttacttccactgctagtagctagcacttactgagcacctgcgatgaggtaaagactcagctaagggttttacaggaagtagattaattgatcctgtcaccaaccatatgaagtaggcactgttaccatctgcatctccagatgagcaccctgaggtttagagagattaaatcacttgcccaaggtgaaccagctggtaaaaggtgatgccaggtcttgaagacaggtccaccttcaaaatctattctctttaccattatgctcgatggtttgtttgttttataatttatgtatatgtattatcctctcaactagattgtaagcacttggaggtgtgacttacaggtctttgtatctcacacagtgccttgctaataggtgctcaataaatatttatatgagtgaatgacttttctacttaccaaattctctccattcagaacacctcttggatttgcatactttctctgaattcacagcccagcctatacttttatcatccccagctcccactcctggcagcagtagctttctaattccagttcttcctgctttattgaagagggatgtgctaagctgtggtacagtaacaagcccgcagagagctatgtctcccttaaaacctgacgggaaccattctgtcttattctatcctcattatttggaacatctggcttccaaagtcaccacaagggcggaagagaaagctagaggaatttgtaggatattttcttagacccaggcttacatcacttctgtccacatctaataagccagaacccagcacctagaagctaggaaagtaaacaagcacctcgaaagttggttaataccaagaacctctctcacagttatattttgcatactactgttaagccagtctttgcaaatgaccccttcctgcccatcactgccttcctcaagacctaaaatagctccctatttagtgaaaaattatctgaatatttaaggtctgccttaacgtgatccccattgctgaattttacctcctgactccaaaaactcttctcttccctgggcccagtcctatttttttttttttttttttttttgtgagacagagtctcactctgtcacccaggttggaatgcaatggcacaatctccgctcactgcaagctccgcctcccgggttcacgccattctcctgcctcagcctcccgaatagctgggactacaggtgcccgccaacacgcccggctaattttttgtatttttagtagagacggggtttcaccgtgttagccaggatggtctcaatctcctgacctcgtgatccgcccgcctcggcctcccaaagtgctgggattacagacgtaagtcaccgtgcccggcctatatttttattttattaaaggttaggcactagatgaccttgactctaggcatctgcattctcttgatctttgcttagggtgaagctcagaaaaggacttggttctgaaaggctgtctggaattagattgtcctacgtgattcccagtgaattgagatgaatttcctctggaagttcaagtcggattcgagaagctgaattaccaaacagaccctccccaacctactaacgaccctattactctgttcaccctagagcagacgaacggcagggaagacttgatctgtggacttttgaaagcaacttgaggaaaaacacataacagaatctataggtgtggacaatatgtgatattgctaaataatgtcaagtaggaaataaaagagactattgacaaa

SEQ ID NO: 201697 - DNA, 2601 bp, Homo sapiens
  Payload ID: 19795
  Gene Name: zinc finger protein 2
  Uniprot ID: Q9BSG1
  ENST ID: ENST00000614034
  CDS Start-End: 463-1740
aacgccagctgactcgatttcgtctcggtcttccccagagctggacacgaggcaccatgatcagagagacacattccctgcggacggcgctcccatcggatactggagggacgcgacactagaggcaggcagtacttcagggtgaccataagtctcccaaacagccacaacggctcgctctcccagctaaggcgacagcgctgccattttggatcctgttcagccacgggaagccggcgtttgcacacattttcggacgtcatattaaagcgcaccggacgccgagacttctgggagatgaagtccttgcgaaggccccgcattgattgggagcgcagtcgccaggaccctgtgcgcaggcgcgttggtttcccgacctgaagaggcgccgtcttcccgggtcccgagcactctgtgccggaggactctgcccttgtccacaaggagagcacacaggagagaatggctgctgtgtctccgaccaccagatgccaggaatcagtgacattcgaagacgttgccgtggttttcacagatgaagagtggagtcgtctggtccccatacagagggacctctacaaggaggtgatgctggagaactataacagcattgtgtcattgggccttccagttcctcaacctgatgtgattttccaattgaagagaggggacaagccgtggatggtagatcttcatgggtctgaggagagagaatggccagagagtgtctctctagactgggaaactaagcctgagattcacgatgcttcagacaaaaaatcagaaggatcattgagggaatgccttggaaggcaaagtcctctgtgtcctaaatttgaagttcatacacccaatggcaggatgggaacagaaaagcaaagcccttcaggggagactcgtaagaaatccctctcccgggacaaaggcttgcggcgacggtcagccctgtccagggaaattctcactaaagagagacaccaggaatgcagtgactgtgggaagaccttttttgaccactcatccctcacccgccatcagaggactcacactggggagaagccctacgactgccgcgagtgtgggaaagccttcagccacaggagcagcctcagcagacatctgatgtcacacactggggagagcccctacgagtgcagtgtgtgctcaaaagccttctttgaccgttcgtccctaactgtccatcagcgaattcacactggagagaaaccctttcagtgcaacgagtgtggaaaagccttttttgaccgttcatcccttactcgacaccagagaattcacactggagaaagtccttatgaatgtcatcagtgtgggaaagcctttagccagaaaagtattcttactcgccatcagctaatccacactggcaggaagccttatgagtgtaacgagtgcgggaaagctttctatggtgtctcgtctctgaatagacatcagaaagctcatgctggggaccctcgctatcagtgtaacgagtgtggcaaagctttctttgaccgctcatcccttacacagcatcagaagatccacactggagacaagccatatgaatgcagcgaatgcgggaaagcctttagccagcggtgccggctcacgcggcatcagcgtgtccacacgggagagaagccctttgaatgcactgtgtgtgggaaagttttcagttcaaaatcttctgttattcaacatcaacggcgttacgccaaacagggaatagactgagttgggcaaaagcttgggtaggacaagaacttccatacaaatttgagatagatctcgcctgtcttaaagctgccatttgctcattctacccactctggctgccgttgtcctgtcctgcttctgcgccagagtgtttaataagcactcccttcctgctgtgttatagaactgtaggggaggccatggaaatgactctaaagatacaaaattttgaagaggtttgtcagacaataggatagatgttaggaggagacacacctcttgtctgagaacctaggccccaggtatcactgcactttaagaaactggaggctgcaacaggagggaaaggcagaatgatatcacagcagtactatttttttttttcagaacatttgttttgatggctgttagtccccctctcttggagcattttggggcactaatcttgttctcttgtgtcccagcttttagacctcttacttccactgctagtagctagcacttactgagcacctgcgatgaggtaaagactcagctaagggttttacaggaagtagattaattgatcctgtcaccaaccatatgaagtaggcactgttaccatctgcatctccagatgagcaccctgaggtttagagagattaaatcacttgcccaaggtgaaccagctggtaaaaggtgatgccaggtcttgaagacaggtccaccttcaaaatctattctctttaccattatgctcgatggtttgtttgttttataatttatgtatatgtattatcctctcaactagattgtaagcacttggaggtgtgacttacaggtctttgtatctcacacagtgccttgctaataggtgctcaataaatatttatatgagtg

SEQ ID NO: 201698 - DNA, 1465 bp, Homo sapiens
  Payload ID: 19795
  Gene Name: zinc finger protein 2
  ENST ID: ENST00000611147
  CDS Start-End: 84-1400
gaagaggcgccgtcttcccgggtcccgagcactctgtgccggaggactctgcccttgtccacaaggagagcacacaggagagaatggctgctgtgtctccgaccaccagatgccaggaatcagtgacattcgaagacgttgccgtggttttcacagatgaagagtggagtcgtctggtccccatacagagggacctctacaaggaggtgatgctggagaactataacagcattgtgtcattgggccttccagttcctcaacctgatgtgattttccaattgaagagaggggacaagccgtggatggtagatcttcatgggtctgaggagagagaatggccagagagtgtctctctagcccaggaaaaaaactgcatctgttttctgtttgttccagactgggaaactaagcctgagattcacgatgcttcagacaaaaaatcagaaggatcattgagggaatgccttggaaggcaaagtcctctgtgtcctaaatttgaagttcatacacccaatggcaggatgggaacagaaaagcaaagcccttcaggggagactcgtaagaaatccctctcccgggacaaaggcttgcggcgacggtcagccctgtccagggaaattctcactaaagagagacaccaggaatgcagtgactgtgggaagaccttttttgaccactcatccctcacccgccatcagaggactcacactggggagaagccctacgactgccgcgagtgtgggaaagccttcagccacaggagcagcctcagcagacatctgatgtcacacactggggagagcccctacgagtgcagtgtgtgctcaaaagccttctttgaccgttcgtccctaactgtccatcagcgaattcacactggagagaaaccctttcagtgcaacgagtgtggaaaagccttttttgaccgttcatcccttactcgacaccagagaattcacactggagaaagtccttatgaatgtcatcagtgtgggaaagcctttagccagaaaagtattcttactcgccatcagctaatccacactggcaggaagccttatgagtgtaacgagtgcgggaaagctttctatggtgtctcgtctctgaatagacatcagaaagctcatgctggggaccctcgctatcagtgtaacgagtgtggcaaagctttctttgaccgctcatcccttacacagcatcagaagatccacactggagacaagccatatgaatgcagcgaatgcgggaaagcctttagccagcggtgccggctcacgcggcatcagcgtgtccacacgggagagaagccctttgaatgcactgtgtgtgggaaagttttcagttcaaaatcttctgttattcaacatcaacggcgttacgccaaacagggaatagactgagttgggcaaaagcttgggtaggacaagaacttccatacaaatttgagatagatctcgcctgtctt

SEQ ID NO: 201699 - DNA, 1624 bp, Homo sapiens
  Payload ID: 19795
  Gene Name: zinc finger protein 2
  ENST ID: ENST00000622059
  CDS Start-End: 112-1275
gtgcgcaggcgcgttggtttcccgacctgaagaggcgccgtcttcccgggtcccgagcactctgtgccggaggactctgcccttgtccacaaggagagcacacaggagagaatggctgctgtgtctccgaccaccagatgccaggaatcagtgacattcgaagacgttgccgtggttttcacagatgaagagtggagtcgtctggtccccatacagagggacctctacaaggaggtgatgctggagaactataacagcattgtgtcattggactgggaaactaagcctgagattcacgatgcttcagacaaaaaatcagaaggatcattgagggaatgccttggaaggcaaagtcctctgtgtcctaaatttgaagttcatacacccaatggcaggatgggaacagaaaagcaaagcccttcaggggagactcgtaagaaatccctctcccgggacaaaggcttgcggcgacggtcagccctgtccagggaaattctcactaaagagagacaccaggaatgcagtgactgtgggaagaccttttttgaccactcatccctcacccgccatcagaggactcacactggggagaagccctacgactgccgcgagtgtgggaaagccttcagccacaggagcagcctcagcagacatctgatgtcacacactggggagagcccctacgagtgcagtgtgtgctcaaaagccttctttgaccgttcgtccctaactgtccatcagcgaattcacactggagagaaaccctttcagtgcaacgagtgtggaaaagccttttttgaccgttcatcccttactcgacaccagagaattcacactggagaaagtccttatgaatgtcatcagtgtgggaaagcctttagccagaaaagtattcttactcgccatcagctaatccacactggcaggaagccttatgagtgtaacgagtgcgggaaagctttctatggtgtctcgtctctgaatagacatcagaaagctcatgctggggaccctcgctatcagtgtaacgagtgtggcaaagctttctttgaccgctcatcccttacacagcatcagaagatccacactggagacaagccatatgaatgcagcgaatgcgggaaagcctttagccagcggtgccggctcacgcggcatcagcgtgtccacacgggagagaagccctttgaatgcactgtgtgtgggaaagttttcagttcaaaatcttctgttattcaacatcaacggcgttacgccaaacagggaatagactgagttgggcaaaagcttgggtaggacaagaacttccatacaaatttgagatagatctcgcctgtcttaaagctgccatttgctcattctacccactctggctgccgttgtcctgtcctgcttctgcgccagagtgtttaataagcactcccttcctgctgtgttatagaactgtaggggaggccatggaaatgactctaaagatacaaaattttgaagaggtttgtcagacaataggatagatgttaggaggagacacacctcttgtctgagaacctaggccccaggtatcactgcactttaagaaactggaggctgcaacaggagggaaaggcagaatgatatcacagca

SEQ ID NO: 201700 - DNA, 3061 bp, Homo sapiens
  Payload ID: 19796
  Gene Name: zinc finger protein 20
  Uniprot ID: P17024
  ENST ID: ENST00000334213
  CDS Start-End: 226-1824
agaagcgccggggcggagcccggccaacggtccgtccggaaggaggaggcccattccagcttctacttttgttgctatgcaggttgttgtcgggataccagatttcctactccgagaggccccgggtccctctgccacaacttctgtcgctctgccgcctgcaccgtgacccgcactattcacgggagccctagagaggacaccgggacacccagaagccgggaaatgatgtttcaggattcagtggcctttgaggatgtggctgtcagcttcacccaggaggagtgggctttgctggatccttcccagaagaatctctacagggatgtgatgcaggaaaccttcaagaacctgacctctgtaggaaaaacatggaaagttcagaacattgaagatgagtacaaaaatcccaggagaaatctaagtcttatgagagagaaactctgtgaaagtaaagaaagtcatcactgtggagaaagcttcaaccagattgcagatgacatgctgaacaggaaaactcttcctggaataacaccatgtgaaagcagtgtgtgtggagaagttggcacgggtcattcatctcttaatacgcatatcagagctgacactggacacaagtcatctgagtatcaggaatatggagagaatccatatagaaataaggaatgtaagaaagccttcagttatcttgactcctttcaatcacatgataaagcttgcactaaagagaaaccctatgatggtaaagaatgtacagaaaccttcatttcccattcatgcattcaaagacacagggtaatgcacagtggagatggaccttataaatgtaagttttgtgggaaagccttctattttctcaatttatgtcttatccatgaacgaattcacactggtgtgaaaccatataagtgtaaacaatgtggtaaggcctttactcgttccactacccttccagtacatgaaagaactcacacaggagtgaatgccgatgaatgtaaagaatgtgggaatgcattcagttttcctagtgaaattcgtagacataaaaggtctcacactggagaaaaaccctatgagtgtaagcaatgtgggaaagtcttcatttctttcagttccattcagtatcataagatgactcacactggagagaaaccctatgaatgtaagcagtgtgggaaagcctttagatgtggctcacaccttcaaaagcatggaaggactcacactggagagaaaccctatgaatgtaggcaatgtggtaaagccttcagatgtacctcggaccttcaaaggcatgaaaagacacacactgaggataaaccctatggatgtaagcagtgtgggaaaggctttagatgtgcttcacaacttcaaattcatgaaaggacgcacagtggagagaaaccccatgaatgtaaggaatgtggaaaagtattcaagtatttttcttccttgcgtatacatgaaaggacgcacactggagagaagccccatgaatgtaagcaatgtggaaaagcattcaggtatttctcttccttgcatatacatgaaaggacacacactggagataagccatatgagtgtaaggtatgtggcaaagccttcacttgttccagttccattcgatatcatgaaaggactcacactggagagaaaccctatgaatgtaagcactgtggtaaggcctttatttccaattacattcgatatcatgaaaggactcacactggagagaaaccctatcaatgcaagcaatgtggcaaagcctttattcgtgccagttcatgtcgagaacatgaaagaactcataccattaatagatgagaaatccttttagtggaagcaacgggagaagctttctgttgtcccacttcctttgaaacacaagaaaagagagtggtgaaagaacctctggataactgctttttgaattgagaagagagacttgcgataggacaataaaatctagaagaacttggatggtttcgtaatacaattcacctatagccaatcttgcatgagatttcaaaggcacagaaaaggaaggcatcagtcacatattagaggccccacacagggagagaggtgtgtggctacccgcttccagcccattttcctgattctttggcttgttaatcgagaatatcccccaaatcacttgtctctgttcctcagagttgtaggtctccagatatgtccccagtgctccacattaaagatacatgcccactttgctgtttcttcagaaatgttaaaatgtttaccagagaactaataaatgttgttatggctggaaatactcactgatgcccaactcttctatagattgagttggtttaagaggtctactttgtattgcaagcattgttgtttctacggattagcgagcctgttcttgattaaaccaactagatgggagcttgttcctctgctgcattgtgcagtgattggtctcaccaagggcttttatgtgagaagagccaccttgctcttatcaggaaatttcaagcatttgctgttattcacaactgaatgtaatgtctcacttcgtttttaactttgtatgagtatacctgactaaaaacactaatgcggtttcttggcaacaaatacttctgttcatgtattttagaaataagcttattaactgtttataacaactgcatactaacaattattattttttaatgaagaagctacattacaacctcccattaacatcatgtattagatcaagttgataatgttaccatgttatccggtggtcactgtgagtcagtgttgccatgtggatgtcaggcatatttttcctcatgtagattttacttttcatgcttatattcttagtttttatctggatcatgaattttcatctattctaaataccaaaggtgatctcatgttcttatgagtgacttctgaccaaagaccaccagtggcataagtgtcgtcaaagagggtgtaataatatactgtggtaatgaatatgaccaaaagccatagatgactgtgagatgtgtgagatattaaaagatagtcacatttcgtgagaagagaaaaa

SEQ ID NO: 201701 - DNA, 642 bp, Homo sapiens
  Payload ID: 19796
  Gene Name: zinc finger protein 20
  ENST ID: ENST00000418866
  CDS Start-End: 134-642
ggataccagatttcctactccgagaggccccgggtccctctgccacaacttctgtcgctctgccgcctgcaccgtgacccgcactattcacgggagccctagagaggacaccgggacacccagaagccgggaaatggattcagtggcctttgaggatgtggctgtcagcttcacccaggaggagtgggctttgctggatccttcccagaagaatctctacagggatgtgatgcaggaaaccttcaagaacctgacctctgtaggaaaaacatggaaagttcagaacattgaagatgagtacaaaaatcccaggagaaatctaagtcttatgagagagaaactctgtgaaagtaaagaaagtcatcactgtggagaaagcttcaaccagattgcagatgacatgctgaacaggaaaactcttcctggaataacaccatgtgaaagcagtgtgtgtggagaagttggcacgggtcattcatctcttaatacgcatatcagagctgacactggacacaagtcatctgagtatcaggaatatggagagaatccatatagaaataaggaatgtaagaaagccttcagttatcttgactcctttcaatcacatgataaagcttgcactaaagagaaaccctatgatgg

SEQ ID NO: 201702 - DNA, 669 bp, Homo sapiens
  Payload ID: 19796
  Gene Name: zinc finger protein 20
  ENST ID: ENST00000454949
  CDS Start-End: 145-267
ggttgttgtcgggataccagatttcctactccgagaggccccgggtccctctgccacaacttctgtcgctctgccgcctgcaccgtgacccgcactattcacgggagccctagagaggacaccgggacacccagaagccgggaaatggtaaccatctgtccctgttccttctggattcagtggcctttgaggatgtggctgtcagcttcacccaggaggagtgggctttgctggatccttcccagaagaatctctacagggatgtgatgcaggaaaccttcaagaacctgacctctgtaggaaaaacatggaaagttcagaacattgaagatgagtacaaaaatcccaggagaaatctaagtcttatgagagagaaactctgtgaaagtaaagaaagtcatcactgtggagaaagcttcaaccagattgcagatgacatgctgaacaggaaaactcttcctggaataacaccatgtgaaagcagtgtgtgtggagaagttggcacgggtcattcatctcttaatacgcatatcagagctgacactggacacaagtcatctgagtatcaggaatatggagagaatccatatagaaataaggaatgtaagaaagccttcagttatcttgactcctttcaatcacatgataaagcttgcactaaagagaaac

SEQ ID NO: 201703 - DNA, 560 bp, Homo sapiens
  Payload ID: 19796
  Gene Name: zinc finger protein 20
  ENST ID: ENST00000600335
  CDS Start-End: 160-555
ttttgttgctatgcaggttgttgtcgggataccagatttcctactccgagaggccccgggtccctctgccacaacttctgtcgctctgccgcctgcaccgtgacccgcactattcacgggagccctagagaggacaccgggacacccagaagccgggaaatggattcagtggcctttgaggatgtggctgtcagcttcacccaggaggagtgggctttgctggatccttcccagaagaatctctacagggatgtgatgcaggaaaccttcaagaacctgacctctgtaggaaaaacatggaaagttcagaacattgaagatgagtacaaaaatcccaggagaaatctaagacggagttttactcttgttgcccaggctggagtgcaacggcgggatctcggctcaccgcaacctccgcctccagggttcaagcgattctcctgcctcagtctcccgagtagctgggattacaagcacgcgccaccacgccaggctaattttgtatttttagtagagacggggtttctccatgttaggttggtctcgaactcctgacctca

SEQ ID NO: 201704 - DNA, 3082 bp, Homo sapiens
  Payload ID: 19797
  Gene Name: zinc finger protein 200
  Uniprot ID: P98182
  ENST ID: ENST00000396868
  CDS Start-End: 331-1515
gcagaaccacagagaggctacagccgtcctggcctccctccggccctgagagctcctctggcctgtctcaagtcttaacgtctcaagcgcagactgccggctccgaacggggagaccaggcttctgcaccggaaacaaggcaccggttgtgacgtcacagccgcagagcgcccgacttcccagaaggcaccgagtccctgccgttctcctcaactggcggcggcgcgaacgaatagtcgccggcgacctcttggctctctggcagatttcctctagtaagaggtggctctggaggccccgcgaaacgagtgtggtgtgtggttgcaaggcatgatggctgcaaaagtggttcctatgcccccaaagccaaagcagtcctttatactgagagttccgccagactccaagctgggccaagacctacttcgagatgccactaacgggcccaagaccatccaccagctagtgctggagcacttcctcaccttcttgcccaagccaagcctggtccagcccagtcagaaagtcaaggagaccttggttattatgaaagatgtgagctcaagccttcagaacagagtgcatcctcgtcccttggtgaagcttctgcccaaaggagtccaaaaggaacaagagacagtgtctctgtatttgaaagctaaccctgagctggtggtctttgaggatttgaatgtatttcactgccaggaagaatgtgtgagcttggatcctactcaacaactcacgtcagagaaggaagatgacagcagtgtcggggaaatgatgttactggcagtcaatggcagtaatcctgaaggtgaagatcctgagagggaacctgtagaaaatgaagattatagagaaaagtcttcagatgatgatgaaatggattcttccttggtctctcagcagcctcccgataaccaggaaaaggaacgactaaatacatccattccacaaaaaaggaaaatgagaaatctgttagttaccattgagaatgatactcctctagaggaactctcaaaatatgtagacatcagtattattgcccttactcgaaatcggaggacaaggagatggtacacttgtccactgtgtgggaaacagtttaatgaaagttcttacctcatttcccaccagaggacccacactggagaaaaaccctatgactgtaatcactgtgggaaaagcttcaatcataaaacaaacctcaataaacatgagcgaattcatacaggagagaaaccttattcctgttctcagtgtggaaaaaacttccgtcagaattctcatcggagtcgtcatgaaggaatccatataagggagaagatatttaagtgtccagaatgtgggaaaaccttcccaaagaatgaggagtttgtgcttcatctgcagagtcatgaggctgagagaccatatggttgcaaaaaatgtgggagaagatttggtcggctgtcaaactgtacccggcatgagaaaacccactcagcctgtaagacccgaaagcagaagtaatactgggaaccctttctgggtctgatggtgctgcctcaacctgagagctttcataagtagttctgaattcccaagctgcctaaaaaggtataaatgtgtaaaaatctcattattgccaaaattggataaatgcccatcttagctaaaacctcaaattgctagaaaattcacagggaagaaaacatttcaagggctatacctcagcatctaggctttttggactaaggagctttcctttttgaagttatatgataatgtacaggtcacagatcccctttcccaacactttgaagatgaatctggagtctgcttacttggaaggcaaagagtgacttgtgtctattgaaagtatatccgttttccccccacatggggattcatacttgagaaatagtgcaaagatgcttatctggaactgtgttctggtgaaagaaccaaattactggcttgttagccaacagcttctgatagcaattcatataaccctctaagaatacctgtttaagtcttgagtgttgaaaggaattgtttactttggaatataggaaaacagttgaatgtcagactctcatttgtatgtgatctaaatttgcaatcaatttcaataatatttacaatttgtgataaaactgacttttacagattccttttcacaacataatttaggtgtctactgttcttattgtattttgttctgctgttgatctctccagcagccgtctcatgcttctcccttgctaaaagaagtttggattactcaggcagggccatccagccccaccactagaaaagctcttcagaatcttgtccctctgttgagcccagatctcatgtgctacgaaggaaaccccaagacccagagaggaagggtcaacctggaggcaggaaaaagttggcttggatccatgtctcatcaataaccttaccatatgcttaggtcccctctatgctgtcatcagacctttggcaatggggtggtcactacctcacaaggcaaagtgttgtatgattagaaattacgtctccagtggttagctcacattgcctctcaagagacaggtttccaggtgtcttcattgtagtgggtattaattgtcttcagcctcttgatatccataccttcctgtcctctgcctagaagcaaggccagcggtgcctttacggactgatcgtgtggtgcgatttagggattcttcagttttgcttgctttaggtttccaaaagttatacattggtgttttgattggaataaagaaatcctataagctatttgggaaaaattatagtgtatgtttcccatccagaaacatgcctttctatttattagagtattatattcctgtgaaaatttttctaattttcttcacttgttttacacaattttgttattgtagttttttccattatatttttatagttgattattgcttttacatgggaaagttatttttaattatatatttgtatagtcatctcactgttgttaattttcaatagtttgttggtttagttctgttaacttttggtaaaatgacaccatctacaaagaatagtttttgtttcttgc

SEQ ID NO: 201705 - DNA, 2373 bp, Homo sapiens
  Payload ID: 19797
  Gene Name: zinc finger protein 200
  Uniprot ID: P98182
  ENST ID: ENST00000396870
  CDS Start-End: 633-1817
acttcccagaaggcaccgagtccctgccgttctcctcaactggcggcggcgcgaacgaatagtcgccggcgacctgtgagggcactcggaagggcgaggggagggctcgaccgctcgcgcctagtttttctatctctcccggagcctgagtctctgagccgtccccagcaaacgctcaggggctgcagaggccccgagaggtgaggggctccgtgagggcgggaaccaggctgaggccgcctctggggagcggagcgtgtccgttgctgagggagcaaggccgggtagggagcctggtgagcgcctcaggcaggggcgcacgctgagctttacggtaaaggtgttccttgaccagcggaagaggccccagagtgagcctggcccggcggtccttagtgggatgtcgcctgccgctctcagcagagctttgacggcggagaggagtcggcaggcggtgtgtggacacctcctcggccttgcatctgctccccgggagagtcaccaaccgcctccccgcccaaagggcaccggagggagcttcggttcgagggcttggctctctggcagatttcctctagtaagaggtggctctggaggccccgcgaaacgagtgtggtgtgtggttgcaaggcatgatggctgcaaaagtggttcctatgcccccaaagccaaagcagtcctttatactgagagttccgccagactccaagctgggccaagacctacttcgagatgccactaacgggcccaagaccatccaccagctagtgctggagcacttcctcaccttcttgcccaagccaagcctggtccagcccagtcagaaagtcaaggagaccttggttattatgaaagatgtgagctcaagccttcagaacagagtgcatcctcgtcccttggtgaagcttctgcccaaaggagtccaaaaggaacaagagacagtgtctctgtatttgaaagctaaccctgaggagctggtggtctttgaggatttgaatgtatttcactgccaggaagaatgtgtgagcttggatcctactcaacaactcacgtcagagaaggaagatgacagcagtgtcggggaaatgatgttactggtcaatggcagtaatcctgaaggtgaagatcctgagagggaacctgtagaaaatgaagattatagagaaaagtcttcagatgatgatgaaatggattcttccttggtctctcagcagcctcccgataaccaggaaaaggaacgactaaatacatccattccacaaaaaaggaaaatgagaaatctgttagttaccattgagaatgatactcctctagaggaactctcaaaatatgtagacatcagtattattgcccttactcgaaatcggaggacaaggagatggtacacttgtccactgtgtgggaaacagtttaatgaaagttcttacctcatttcccaccagaggacccacactggagaaaaaccctatgactgtaatcactgtgggaaaagcttcaatcataaaacaaacctcaataaacatgagcgaattcatacaggagagaaaccttattcctgttctcagtgtggaaaaaacttccgtcagaattctcatcggagtcgtcatgaaggaatccatataagggagaagatatttaagtgtccagaatgtgggaaaaccttcccaaagaatgaggagtttgtgcttcatctgcagagtcatgaggctgagagaccatatggttgcaaaaaatgtgggagaagatttggtcggctgtcaaactgtacccggcatgagaaaacccactcagcctgtaagacccgaaagcagaagtaatactgggaaccctttctgggtctgatggtgctgcctcaacctgagagctttcataagtagttctgaattcccaagctgcctaaaaaggtataaatgtgtaaaaatctcattattgccaaaattggataaatgcccatcttagctaaaacctcaaattgctagaaaattcacagggaagaaaacatttcaagggctatacctcagcatctaggctttttggactaaggagctttcctttttgaagttatatgataatgtacaggtcacagatcccctttcccaacactttgaagatgaatctggagtctgcttacttggaaggcaaagagtgacttgtgtctattgaaagtatatccgttttccccccacatggggattcatacttgagaaatagtgcaaagatgcttatctggaactgtgttctggtgaaagaaccaaattactggcttgttagccaacagcttctgatagcaattcatataaccctctaagaatacctgtttaagtcttgagtgttgaaaggaattgtttactttggaatataggaaaacagttg

SEQ ID NO: 201706 - DNA, 3162 bp, Homo sapiens
  Payload ID: 19797
  Gene Name: zinc finger protein 200
  Uniprot ID: P98182
  ENST ID: ENST00000396871
  CDS Start-End: 428-1612
atttcccagcaggccctggggttagactggccgcagctggagaggtgccagcccgtcgtggatgactagagccaaccacctgccttccgtcttccaggcagaaccacagagaggctacagccgtcctggcctccctccggccctgagagctcctctggcctgtctcaagtcttaacgtctcaagcgcagactgccggctccgaacggggagaccaggcttctgcaccggaaacaaggcaccggttgtgacgtcacagccgcagagcgcccgacttcccagaaggcaccgagtccctgccgttctcctcaactggcggcggcgcgaacgaatagtcgccggcgacctcttggctctctggcagatttcctctagtaagaggtggctctggaggccccgcgaaacgagtgtggtgtgtggttgcaaggcatgatggctgcaaaagtggttcctatgcccccaaagccaaagcagtcctttatactgagagttccgccagactccaagctgggccaagacctacttcgagatgccactaacgggcccaagaccatccaccagctagtgctggagcacttcctcaccttcttgcccaagccaagcctggtccagcccagtcagaaagtcaaggagaccttggttattatgaaagatgtgagctcaagccttcagaacagagtgcatcctcgtcccttggtgaagcttctgcccaaaggagtccaaaaggaacaagagacagtgtctctgtatttgaaagctaaccctgaggagctggtggtctttgaggatttgaatgtatttcactgccaggaagaatgtgtgagcttggatcctactcaacaactcacgtcagagaaggaagatgacagcagtgtcggggaaatgatgttactggtcaatggcagtaatcctgaaggtgaagatcctgagagggaacctgtagaaaatgaagattatagagaaaagtcttcagatgatgatgaaatggattcttccttggtctctcagcagcctcccgataaccaggaaaaggaacgactaaatacatccattccacaaaaaaggaaaatgagaaatctgttagttaccattgagaatgatactcctctagaggaactctcaaaatatgtagacatcagtattattgcccttactcgaaatcggaggacaaggagatggtacacttgtccactgtgtgggaaacagtttaatgaaagttcttacctcatttcccaccagaggacccacactggagaaaaaccctatgactgtaatcactgtgggaaaagcttcaatcataaaacaaacctcaataaacatgagcgaattcatacaggagagaaaccttattcctgttctcagtgtggaaaaaacttccgtcagaattctcatcggagtcgtcatgaaggaatccatataagggagaagatatttaagtgtccagaatgtgggaaaaccttcccaaagaatgaggagtttgtgcttcatctgcagagtcatgaggctgagagaccatatggttgcaaaaaatgtgggagaagatttggtcggctgtcaaactgtacccggcatgagaaaacccactcagcctgtaagacccgaaagcagaagtaatactgggaaccctttctgggtctgatggtgctgcctcaacctgagagctttcataagtagttctgaattcccaagctgcctaaaaaggtataaatgtgtaaaaatctcattattgccaaaattggataaatgcccatcttagctaaaacctcaaattgctagaaaattcacagggaagaaaacatttcaagggctatacctcagcatctaggctttttggactaaggagctttcctttttgaagttatatgataatgtacaggtcacagatcccctttcccaacactttgaagatgaatctggagtctgcttacttggaaggcaaagagtgacttgtgtctattgaaagtatatccgttttccccccacatggggattcatacttgagaaatagtgcaaagatgcttatctggaactgtgttctggtgaaagaaccaaattactggcttgttagccaacagcttctgatagcaattcatataaccctctaagaatacctgtttaagtcttgagtgttgaaaggaattgtttactttggaatataggaaaacagttgaatgtcagactctcatttgtatgtgatctaaatttgcaatcaatttcaataatatttacaatttgtgataaaactgacttttacagattccttttcacaacataatttaggtgtctactgttcttattgtattttgttctgctgttgatctctccagcagccgtctcatgcttctcccttgctaaaagaagtttggattactcaggcagggccatccagccccaccactagaaaagctcttcagaatcttgtccctctgttgagcccagatctcatgtgctacgaaggaaaccccaagacccagagaggaagggtcaacctggaggcaggaaaaagttggcttggatccatgtctcatcaataaccttaccatatgcttaggtcccctctatgctgtcatcagacctttggcaatggggtggtcactacctcacaaggcaaagtgttgtatgattagaaattacgtctccagtggttagctcacattgcctctcaagagacaggtttccaggtgtcttcattgtagtgggtattaattgtcttcagcctcttgatatccataccttcctgtcctctgcctagaagcaaggccagcggtgcctttacggactgatcgtgtggtgcgatttagggattcttcagttttgcttgctttaggtttccaaaagttatacattggtgttttgattggaataaagaaatcctataagctatttgggaaaaattatagtgtatgtttcccatccagaaacatgcctttctatttattagagtattatattcctgtgaaaatttttctaattttcttcacttgttttacacaattttgttattgtagttttttccattatatttttatagttgattattgcttttacatgggaaagttatttttaattatatatttgtatagtcatctcactgttgttaattttcaatagtttgttggtttagttctgttaacttttggtaaaatgacaccatctacaaagaa

SEQ ID NO: 201707 - DNA, 3348 bp, Homo sapiens
  Payload ID: 19797
  Gene Name: zinc finger protein 200
  Uniprot ID: P98182
  ENST ID: ENST00000431561
  CDS Start-End: 614-1801
gtccctgccgttctcctcaactggcggcggcgcgaacgaatagtcgccggcgacctgtgagggcactcggaagggcgaggggagggctcgaccgctcgcgcctagtttttctatctctcccggagcctgagtctctgagccgtccccagcaaacgctcaggggctgcagaggccccgagaggtgaggggctccgtgagggcgggaaccaggctgaggccgcctctggggagcggagcgtgtccgttgctgagggagcaaggccgggtagggagcctggtgagcgcctcaggcaggggcgcacgctgagctttacggtaaaggtgttccttgaccagcggaagaggccccagagtgagcctggcccggcggtccttagtgggatgtcgcctgccgctctcagcagagctttgacggcggagaggagtcggcaggcggtgtgtggacacctcctcggccttgcatctgctccccgggagagtcaccaaccgcctccccgcccaaagggcaccggagggagcttcggttcgagggcttggctctctggcagatttcctctagtaagaggtggctctggaggccccgcgaaacgagtgtggtgtgtggttgcaaggcatgatggctgcaaaagtggttcctatgcccccaaagccaaagcagtcctttatactgagagttccgccagactccaagctgggccaagacctacttcgagatgccactaacgggcccaagaccatccaccagctagtgctggagcacttcctcaccttcttgcccaagccaagcctggtccagcccagtcagaaagtcaaggagaccttggttattatgaaagatgtgagctcaagccttcagaacagagtgcatcctcgtcccttggtgaagcttctgcccaaaggagtccaaaaggaacaagagacagtgtctctgtatttgaaagctaaccctgaggagctggtggtctttgaggatttgaatgtatttcactgccaggaagaatgtgtgagcttggatcctactcaacaactcacgtcagagaaggaagatgacagcagtgtcggggaaatgatgttactggcagtcaatggcagtaatcctgaaggtgaagatcctgagagggaacctgtagaaaatgaagattatagagaaaagtcttcagatgatgatgaaatggattcttccttggtctctcagcagcctcccgataaccaggaaaaggaacgactaaatacatccattccacaaaaaaggaaaatgagaaatctgttagttaccattgagaatgatactcctctagaggaactctcaaaatatgtagacatcagtattattgcccttactcgaaatcggaggacaaggagatggtacacttgtccactgtgtgggaaacagtttaatgaaagttcttacctcatttcccaccagaggacccacactggagaaaaaccctatgactgtaatcactgtgggaaaagcttcaatcataaaacaaacctcaataaacatgagcgaattcatacaggagagaaaccttattcctgttctcagtgtggaaaaaacttccgtcagaattctcatcggagtcgtcatgaaggaatccatataagggagaagatatttaagtgtccagaatgtgggaaaaccttcccaaagaatgaggagtttgtgcttcatctgcagagtcatgaggctgagagaccatatggttgcaaaaaatgtgggagaagatttggtcggctgtcaaactgtacccggcatgagaaaacccactcagcctgtaagacccgaaagcagaagtaatactgggaaccctttctgggtctgatggtgctgcctcaacctgagagctttcataagtagttctgaattcccaagctgcctaaaaaggtataaatgtgtaaaaatctcattattgccaaaattggataaatgcccatcttagctaaaacctcaaattgctagaaaattcacagggaagaaaacatttcaagggctatacctcagcatctaggctttttggactaaggagctttcctttttgaagttatatgataatgtacaggtcacagatcccctttcccaacactttgaagatgaatctggagtctgcttacttggaaggcaaagagtgacttgtgtctattgaaagtatatccgttttccccccacatggggattcatacttgagaaatagtgcaaagatgcttatctggaactgtgttctggtgaaagaaccaaattactggcttgttagccaacagcttctgatagcaattcatataaccctctaagaatacctgtttaagtcttgagtgttgaaaggaattgtttactttggaatataggaaaacagttgaatgtcagactctcatttgtatgtgatctaaatttgcaatcaatttcaataatatttacaatttgtgataaaactgacttttacagattccttttcacaacataatttaggtgtctactgttcttattgtattttgttctgctgttgatctctccagcagccgtctcatgcttctcccttgctaaaagaagtttggattactcaggcagggccatccagccccaccactagaaaagctcttcagaatcttgtccctctgttgagcccagatctcatgtgctacgaaggaaaccccaagacccagagaggaagggtcaacctggaggcaggaaaaagttggcttggatccatgtctcatcaataaccttaccatatgcttaggtcccctctatgctgtcatcagacctttggcaatggggtggtcactacctcacaaggcaaagtgttgtatgattagaaattacgtctccagtggttagctcacattgcctctcaagagacaggtttccaggtgtcttcattgtagtgggtattaattgtcttcagcctcttgatatccataccttcctgtcctctgcctagaagcaaggccagcggtgcctttacggactgatcgtgtggtgcgatttagggattcttcagttttgcttgctttaggtttccaaaagttatacattggtgttttgattggaataaagaaatcctataagctatttgggaaaaattatagtgtatgtttcccatccagaaacatgcctttctatttattagagtattatattcctgtgaaaatttttctaattttcttcacttgttttacacaattttgttattgtagttttttccattatatttttatagttgattattgcttttacatgggaaagttatttttaattatatatttgtatagtcatctcactgttgttaattttcaatagtttgttggtttagttctgttaacttttggtaaaatgacaccatctacaaa

SEQ ID NO: 201708 - DNA, 3306 bp, Homo sapiens
  Payload ID: 19797
  Gene Name: zinc finger protein 200
  Uniprot ID: P98182
  ENST ID: ENST00000414144
  CDS Start-End: 552-1739
tttcccagcaggccctggggttagactggccgcagctggagaggtgccagcccgtcgtggatgactagagccaaccacctgccttccgtcttccaggcagaaccacagagaggctacagccgtcctggcctccctccggccctgagagctcctctggcctgtctcaagtcttaacgtctcaagcgcagactgccggctccgaacggggagaccaggcttctgcaccggaaacaaggcaccggttgtgacgtcacagccgcagagcgcccgacttcccagaaggcaccgagtccctgccgttctcctcaactggcggcggcgcgaacgaatagtcgccggcgacctgtgagggcactcggaagggcgaggggagggctcgaccgctcgcgcctagtttttctatctctcccggagcctgagtctctgagccgtccccagcaaacgctcaggggctgcagaggccccgagagcttggctctctggcagatttcctctagtaagaggtggctctggaggccccgcgaaacgagtgtggtgtgtggttgcaaggcatgatggctgcaaaagtggttcctatgcccccaaagccaaagcagtcctttatactgagagttccgccagactccaagctgggccaagacctacttcgagatgccactaacgggcccaagaccatccaccagctagtgctggagcacttcctcaccttcttgcccaagccaagcctggtccagcccagtcagaaagtcaaggagaccttggttattatgaaagatgtgagctcaagccttcagaacagagtgcatcctcgtcccttggtgaagcttctgcccaaaggagtccaaaaggaacaagagacagtgtctctgtatttgaaagctaaccctgaggagctggtggtctttgaggatttgaatgtatttcactgccaggaagaatgtgtgagcttggatcctactcaacaactcacgtcagagaaggaagatgacagcagtgtcggggaaatgatgttactggcagtcaatggcagtaatcctgaaggtgaagatcctgagagggaacctgtagaaaatgaagattatagagaaaagtcttcagatgatgatgaaatggattcttccttggtctctcagcagcctcccgataaccaggaaaaggaacgactaaatacatccattccacaaaaaaggaaaatgagaaatctgttagttaccattgagaatgatactcctctagaggaactctcaaaatatgtagacatcagtattattgcccttactcgaaatcggaggacaaggagatggtacacttgtccactgtgtgggaaacagtttaatgaaagttcttacctcatttcccaccagaggacccacactggagaaaaaccctatgactgtaatcactgtgggaaaagcttcaatcataaaacaaacctcaataaacatgagcgaattcatacaggagagaaaccttattcctgttctcagtgtggaaaaaacttccgtcagaattctcatcggagtcgtcatgaaggaatccatataagggagaagatatttaagtgtccagaatgtgggaaaaccttcccaaagaatgaggagtttgtgcttcatctgcagagtcatgaggctgagagaccatatggttgcaaaaaatgtgggagaagatttggtcggctgtcaaactgtacccggcatgagaaaacccactcagcctgtaagacccgaaagcagaagtaatactgggaaccctttctgggtctgatggtgctgcctcaacctgagagctttcataagtagttctgaattcccaagctgcctaaaaaggtataaatgtgtaaaaatctcattattgccaaaattggataaatgcccatcttagctaaaacctcaaattgctagaaaattcacagggaagaaaacatttcaagggctatacctcagcatctaggctttttggactaaggagctttcctttttgaagttatatgataatgtacaggtcacagatcccctttcccaacactttgaagatgaatctggagtctgcttacttggaaggcaaagagtgacttgtgtctattgaaagtatatccgttttccccccacatggggattcatacttgagaaatagtgcaaagatgcttatctggaactgtgttctggtgaaagaaccaaattactggcttgttagccaacagcttctgatagcaattcatataaccctctaagaatacctgtttaagtcttgagtgttgaaaggaattgtttactttggaatataggaaaacagttgaatgtcagactctcatttgtatgtgatctaaatttgcaatcaatttcaataatatttacaatttgtgataaaactgacttttacagattccttttcacaacataatttaggtgtctactgttcttattgtattttgttctgctgttgatctctccagcagccgtctcatgcttctcccttgctaaaagaagtttggattactcaggcagggccatccagccccaccactagaaaagctcttcagaatcttgtccctctgttgagcccagatctcatgtgctacgaaggaaaccccaagacccagagaggaagggtcaacctggaggcaggaaaaagttggcttggatccatgtctcatcaataaccttaccatatgcttaggtcccctctatgctgtcatcagacctttggcaatggggtggtcactacctcacaaggcaaagtgttgtatgattagaaattacgtctccagtggttagctcacattgcctctcaagagacaggtttccaggtgtcttcattgtagtgggtattaattgtcttcagcctcttgatatccataccttcctgtcctctgcctagaagcaaggccagcggtgcctttacggactgatcgtgtggtgcgatttagggattcttcagttttgcttgctttaggtttccaaaagttatacattggtgttttgattggaataaagaaatcctataagctatttgggaaaaattatagtgtatgtttcccatccagaaacatgcctttctatttattagagtattatattcctgtgaaaatttttctaattttcttcacttgttttacacaattttgttattgtagttttttccattatatttttatagttgattattgcttttacatgggaaagttatttttaattatatatttgtatagtcatctcactgttgttaattttcaatagtttgttggtttagttctgttaacttttggtaaaatgacaccatctacaaagaatagtttttgtttcttgc

SEQ ID NO: 201709 - DNA, 1350 bp, Homo sapiens
  Payload ID: 19797
  Gene Name: zinc finger protein 200
  Uniprot ID: P98182
  ENST ID: ENST00000575948
  CDS Start-End: 166-1350
gcgcctagtttttctatctctcccggagcctgagtctctgagccgtccccagcaaacgctcaggggctgcagaggccccgagagcttggctctctggcagatttcctctagtaagaggtggctctggaggccccgcgaaacgagtgtggtgtgtggttgcaaggcatgatggctgcaaaagtggttcctatgcccccaaagccaaagcagtcctttatactgagagttccgccagactccaagctgggccaagacctacttcgagatgccactaacgggcccaagaccatccaccagctagtgctggagcacttcctcaccttcttgcccaagccaagcctggtccagcccagtcagaaagtcaaggagaccttggttattatgaaagatgtgagctcaagccttcagaacagagtgcatcctcgtcccttggtgaagcttctgcccaaaggagtccaaaaggaacaagagacagtgtctctgtatttgaaagctaaccctgaggagctggtggtctttgaggatttgaatgtatttcactgccaggaagaatgtgtgagcttggatcctactcaacaactcacgtcagagaaggaagatgacagcagtgtcggggaaatgatgttactggtcaatggcagtaatcctgaaggtgaagatcctgagagggaacctgtagaaaatgaagattatagagaaaagtcttcagatgatgatgaaatggattcttccttggtctctcagcagcctcccgataaccaggaaaaggaacgactaaatacatccattccacaaaaaaggaaaatgagaaatctgttagttaccattgagaatgatactcctctagaggaactctcaaaatatgtagacatcagtattattgcccttactcgaaatcggaggacaaggagatggtacacttgtccactgtgtgggaaacagtttaatgaaagttcttacctcatttcccaccagaggacccacactggagaaaaaccctatgactgtaatcactgtgggaaaagcttcaatcataaaacaaacctcaataaacatgagcgaattcatacaggagagaaaccttattcctgttctcagtgtggaaaaaacttccgtcagaattctcatcggagtcgtcatgaaggaatccatataagggagaagatatttaagtgtccagaatgtgggaaaaccttcccaaagaatgaggagtttgtgcttcatctgcagagtcatgaggctgagagaccatatggttgcaaaaaatgtgggagaagatttggtcggctgtcaaactgtacccggcatgagaaaacccactcagcctgtaagacccgaaagcagaagtaa

SEQ ID NO: 201710 - DNA, 713 bp, Homo sapiens
  Payload ID: 19797
  Gene Name: zinc finger protein 200
  ENST ID: ENST00000575617
  CDS Start-End: 585-713
gaaattgagaaaggaaaccgagacagtaggagaagggcaattaagatgtctttaaaaacaagacggccggtgcggacagcagtgtagaagttagcaagctggagtgggcaatgtcggtgccccatctctaacctatgggagtcaccagagcgggggcggagtcccatggcggccacaccctgtccgcctccgcagtctttttactggagaaccgcagtaaaaggcggaaaccgcggaggcgtcttgattttccggcagaaccacagagaggctacagccgtcctggcctccctccggccctgagagctcctctggcctgtctcaagtcttaacgtctcaagcgcagactgccggctccgaacggggagaccaggcttctgcaccggaaacaaggcaccggttgtgacgtcacagccgcagagcgcccgacttcccagaaggcaccgagtccctgccgttctcctcaactggcggcggcgcgaacgaatagtcgccggcgacctcttggctctctggcagatttcctctagtaagaggtggctctggaggccccgcgaaacgagtgtggtgtgtggttgcaaggcatgatggctgcaaaagtggttcctatgcccccaaagccaaagcagtcctttatactgagagttccgccagactccaagctgggccaagacctacttcgagatgccactaacgggcccaagaccatccac

SEQ ID NO: 201711 - DNA, 4130 bp, Homo sapiens
  Payload ID: 19798
  Gene Name: zinc finger protein 202
  Uniprot ID: O95125
  ENST ID: ENST00000336139
  CDS Start-End: 364-2310
aaggccccacgtgttccgacccgctaggccccgcgcggctcggatccggcggcgctgtttcggtcgggagtgggtgggagagaagccggggcaggggaggagccgccggagctgtcggagccgtgacacccagggcagctacactcagaagccacaaggaatgctagtggagcccctcatccctcccagcttctcttccaagctgccccgtggggcttgatccaggaagctacttcagaaaggttgtgggatagccttgggaggagggcccttggaagaaaatcctcgctgtgtccaggctgaggcggggggctaatgacagtgtgagctctagatggtgtgagaccaccccaaagccaagaaatggctacagccgtggaaccagaggaccaggatctttgggaagaagagggaattctgatggtgaaactggaagatgatttcacctgtcggccagagtctgtcttacagagggatgacccggtgctggaaacctcccaccagaacttccgacgcttccgctaccaggaggcagcaagccctagagaagctctcatcagactccgagaactttgtcaccagtggctgagaccagagaggcggacaaaggagcagatcctagagctgcttgtgctggaacaatttcttaccgtcctacctggagaactacagagctgggtgcggggccaacggccagaaagtggcgaggaggcagtgacgctggtggagggtttgcagaaacaacccaggagaccaaggcggtgggtgactgtccatgttcacggccaggaagtcctgtcagaggagacggtgcatttaggagtggagcctgagtcacctaatgagctgcaggatcctgtgcaaagctcgacccccgagcagtctcctgaggaaaccacacagagcccagatctgggggcaccggcagagcagcgtccacaccaggaagaggagctccagaccctgcaggagagcgaggtcccagtgcccgaggacccagaccttcctgcagagaggagctctggagactcagagatggttgctcttcttactgctctgtcacagggactggtaacgttcaaggatgtggccgtatgcttttcccaggaccagtggagtgatctggacccaacacagaaagagttctatggagaatatgtcttggaagaagactgtggaattgttgtctctctgtcatttccaatccccagacctgatgagatctcccaggttagagaggaagagccttgggtcccagatatccaagagcctcaggagactcaagagccagaaatcctgagttttacctacacaggagataggagtaaagatgaggaagagtgtctggagcaggaagatctgagtttggaggatatacacaggcctgttttgggagaaccagaaattcaccagactccagattgggaaatagtctttgaggacaatccaggtagacttaatgaaagaagatttggtactaatatttctcaagtgaatagttttgtgaaccttcgggaaactacacccgtccaccccctgttagggaggcatcatgactgttctgtgtgtggaaagagcttcacttgtaactcccaccttgttagacacctgaggactcacacaggagagaaaccctataaatgtatggaatgtggaaaaagttacacacgaagctcacatcttgccaggcaccaaaaggttcacaagatgaacgcgccttacaaatatcccctaaaccggaagaatttggaagagacctcccctgtgacacaggctgagagaactccatcagtggagaaaccctatagatgtgatgattgcggaaagcacttccgctggacttcagaccttgtcagacatcagaggacacatactggagaaaaacccttcttttgtactatttgtggcaaaagcttcagccagaaatctgtgttaacaacacaccaaagaatccacctgggaggcaaaccctacttgtgtggagagtgtggtgaggacttcagtgaacacaggcggtacctggcgcaccggaagacgcacgctgctgaggaactctacctctgcagcgagtgcgggcgctgcttcacccacagcgcagcgttcgccaagcacttgagaggacacgcctcagtgaggccctgccgatgcaacgaatgtgggaagagcttcagtcgcagggaccacctcgtcaggcatcagagaacacacactggggagaaaccattcacgtgccctacctgtggaaaaagcttcagcagaggatatcacttaattaggcatcagaggacccactcagaaaagacctcctagctaggtccccatgtgaggagatctgctttcagccctcacctaagggaggtgaggaagaggaaaagccctcttgtcagcctgggaagaccttttcgagggagtctccctgacctgctcagatctgacattacctcttcctgcaactaaacacgagcctgggcagaacctctcagccttcctctacgccttgaggggatgtttcatccaaagtacaacctgaattgaggcttctccttcactggagtgcacctgcctctacctcatgggtataaagtaggagaactaagagacttaagaggtcgtggttcctatatcgtccaaaaaataggctgttacatatcctaaagactgctcaacagcttcaagttgaaagtggccaaggacagccccttaggtttgggaagggacgagcctgaaggattctgtctttactggggtcaaatcttaaagcacacagctctggactcaagacaggaggtttgcgtcctgatggctttgccacacattcacaggataactgcatagatccctcgctgtctgattcacttcttaccatgcactttcctttgatgctgaggagaaatggaagtgggcgaaaaatctcaaggctgcttcatgtggaccttgtcaagctgctccctcccccagcgtcaaattgttatcaggtgccaaacactgctagaaaggagggcctagtcagaagcctctttccatacgagttttggttttgtttttaatatttttttctattaaaatactcatgcatttaaccttcccgttattcaaccagtctcttggttgcatccctagcacttctactacaagtgagatggtagtgtttgagtgcttattgagtaaagcataattcggtcataatgaaatcgttcacattccctcatatgcacaagcccaccaaccccttcacaccccccttcacaggggtcgtatgagtaaggggatttggaaactgtcaacttacaaaggcactataacaattacagaatcatgattgccatgggccactttatttacatgaagacaactggagaacgactaagaccaaattatggaaaataagaaaaagctgttgctggcaagaccatcaagactgttctgacaccctgtccccatcatccctgactgagtactctgacatcacggaaagtgttgaacctgggaccctgaggaattcaccaggagtaaatggctttcatgtatttgtgttgtttgctttttcttacgtgattttatgttcatagagctagaaagtagcatctcatgatggcccaacaatctctgttgccagttaaaggttccttggagatgaggctgaataattatgaacctcaccttctctgattgtgggagtggcaagaactggggagacgtcctccataagtggagcacagggtatggggttaaagcatgacagggagagtcttctgtgcctggtttcttctcctctatctcataatgcattatgggcccgaggaataggggagggttaataagactccaaccctaatggcccaacagggaaattctcattttggtcgatgatattctgatggactggtttggtcttaataccagtcaaccgttgtccttctggaaatatacatatatgaaataaataaaggtaacacttgcagccaagttccctggtttctgggacttcccatcttacccattccttttccagggcttcagtgtcctgatacttctgagggtggttcatactcaaatagatctgggagtacagagtatttttccttgaggaaaggaagggttgggatgattagcagagtccggtgaaacat

SEQ ID NO: 201712 - DNA, 855 bp, Homo sapiens
  Payload ID: 19798
  Gene Name: zinc finger protein 202
  ENST ID: ENST00000533463
  CDS Start-End: 477-855
gccccacgtgttccgacccgctaggccccgcgcggctcggatccggcggcgctgtttcggtcgggagtgggtgggagagaagccggggcaggggaggagccgccggagctgtcggagccgtgacacccagggcagctacactcagaagccacaaggaatgctagtggagcccctcatccctcccagcttctcttccaagctgccccgtggggcttgatccaggaagctacttcagaaaggttgtgggatagccttgggaggagctataccctttttgtactctgtgtatatactatattgcagtagacaatcattccaagggtacaacaaggtttaccacaatgtgagggactcagccattgcaaattgtacagatgagggcccttggaagaaaatcctcgctgtgtccaggctgaggcggggggctaatgacagtgtgagctctagatggtgtgagaccaccccaaagccaagaaatggctacagccgtggaaccagaggaccaggatctttgggaagaagagggaattctgatggtgaaactggaagatgatttcacctgtcggccagagtctgtcttacagagggatgacccggtgctggaaacctcccaccagaacttccgacgcttccgctaccaggaggcagcaagccctagagaagctctcatcagactccgagaactttgtcaccagtggctgagaccagagaggcggacaaaggagcagatcctagagctgcttgtgctggaacaatttcttaccgtcctacctggagaactacagagctgggtgcggggccaacggccagaaagtggcgaggaggcagtgacgctggtggagggtttgcagaaac

SEQ ID NO: 201713 - DNA, 552 bp, Homo sapiens
  Payload ID: 19798
  Gene Name: zinc finger protein 202
  ENST ID: ENST00000528306
  CDS Start-End: 416-552
gcaaaggccccacgtgttccgacccgctaggccccgcgcggctcggatccggcggcgctgtttcggtcgggagtgggtgggagagaagccggggcaggggaggagccgccggagctgtcggagccgtgacacccagggcagctacactcagaagccacaaggaatgctagtggagcccctcatccctcccagcttctcttccaagctgccccgtggggcttgatccaggaagctacttcagaaagacaatcattccaagggtacaacaaggtttaccacaatgtgagggactcagccattgcaaattgtacagatgagggcccttggaagaaaatcctcgctgtgtccaggctgaggcggggggctaatgacagtgtgagctctagatggtgtgagaccaccccaaagccaagaaatggctacagccgtggaaccagaggaccaggatctttgggaagaagagggaattctgatggtgaaactggaagatgatttcacctgtcggccagagtctgtcttacagagggatgacccggtgctggaaacctccca

SEQ ID NO: 201714 - DNA, 3564 bp, Homo sapiens
  Payload ID: 19798
  Gene Name: zinc finger protein 202
  Uniprot ID: O95125
  ENST ID: ENST00000530393
  CDS Start-End: 401-2347
ccgacccgctaggccccgcgcggctcggatccggcggcgctgtttcggtcgggagtgggtgggagagaagccggggcaggggaggagccgccggagctgtcggagccgtgacacccagggcagctacactcagaagccacaaggaatgctagtggagcccctcatccctcccagcttctcttccaagctgccccgtggggcttgatccaggaagctacttcagaaagtagacaatcattccaagggtacaacaaggtttaccacaatgtgagggactcagccattgcaaattgtacagatgagggcccttggaagaaaatcctcgctgtgtccaggctgaggcggggggctaatgacagtgtgagctctagatggtgtgagaccaccccaaagccaagaaatggctacagccgtggaaccagaggaccaggatctttgggaagaagagggaattctgatggtgaaactggaagatgatttcacctgtcggccagagtctgtcttacagagggatgacccggtgctggaaacctcccaccagaacttccgacgcttccgctaccaggaggcagcaagccctagagaagctctcatcagactccgagaactttgtcaccagtggctgagaccagagaggcggacaaaggagcagatcctagagctgcttgtgctggaacaatttcttaccgtcctacctggagaactacagagctgggtgcggggccaacggccagaaagtggcgaggaggcagtgacgctggtggagggtttgcagaaacaacccaggagaccaaggcggtgggtgactgtccatgttcacggccaggaagtcctgtcagaggagacggtgcatttaggagtggagcctgagtcacctaatgagctgcaggatcctgtgcaaagctcgacccccgagcagtctcctgaggaaaccacacagagcccagatctgggggcaccggcagagcagcgtccacaccaggaagaggagctccagaccctgcaggagagcgaggtcccagtgcccgaggacccagaccttcctgcagagaggagctctggagactcagagatggttgctcttcttactgctctgtcacagggactggtaacgttcaaggatgtggccgtatgcttttcccaggaccagtggagtgatctggacccaacacagaaagagttctatggagaatatgtcttggaagaagactgtggaattgttgtctctctgtcatttccaatccccagacctgatgagatctcccaggttagagaggaagagccttgggtcccagatatccaagagcctcaggagactcaagagccagaaatcctgagttttacctacacaggagataggagtaaagatgaggaagagtgtctggagcaggaagatctgagtttggaggatatacacaggcctgttttgggagaaccagaaattcaccagactccagattgggaaatagtctttgaggacaatccaggtagacttaatgaaagaagatttggtactaatatttctcaagtgaatagttttgtgaaccttcgggaaactacacccgtccaccccctgttagggaggcatcatgactgttctgtgtgtggaaagagcttcacttgtaactcccaccttgttagacacctgaggactcacacaggagagaaaccctataaatgtatggaatgtggaaaaagttacacacgaagctcacatcttgccaggcaccaaaaggttcacaagatgaacgcgccttacaaatatcccctaaaccggaagaatttggaagagacctcccctgtgacacaggctgagagaactccatcagtggagaaaccctatagatgtgatgattgcggaaagcacttccgctggacttcagaccttgtcagacatcagaggacacatactggagaaaaacccttcttttgtactatttgtggcaaaagcttcagccagaaatctgtgttaacaacacaccaaagaatccacctgggaggcaaaccctacttgtgtggagagtgtggtgaggacttcagtgaacacaggcggtacctggcgcaccggaagacgcacgctgctgaggaactctacctctgcagcgagtgcgggcgctgcttcacccacagcgcagcgttcgccaagcacttgagaggacacgcctcagtgaggccctgccgatgcaacgaatgtgggaagagcttcagtcgcagggaccacctcgtcaggcatcagagaacacacactggggagaaaccattcacgtgccctacctgtggaaaaagcttcagcagaggatatcacttaattaggcatcagaggacccactcagaaaagacctcctagctaggtccccatgtgaggagatctgctttcagccctcacctaagggaggtgaggaagaggaaaagccctcttgtcagcctgggaagaccttttcgagggagtctccctgacctgctcagatctgacattacctcttcctgcaactaaacacgagcctgggcagaacctctcagccttcctctacgccttgaggggatgtttcatccaaagtacaacctgaattgaggcttctccttcactggagtgcacctgcctctacctcatgggtataaagtaggagaactaagagacttaagaggtcgtggttcctatatcgtccaaaaaataggctgttacatatcctaaagactgctcaacagcttcaagttgaaagtggccaaggacagccccttaggtttgggaagggacgagcctgaaggattctgtctttactggggtcaaatcttaaagcacacagctctggactcaagacaggaggtttgcgtcctgatggctttgccacacattcacaggataactgcatagatccctcgctgtctgattcacttcttaccatgcactttcctttgatgctgaggagaaatggaagtgggcgaaaaatctcaaggctgcttcatgtggaccttgtcaagctgctccctcccccagcgtcaaattgttatcaggtgccaaacactgctagaaaggagggcctagtcagaagcctctttccatacgagttttggttttgtttttaatatttttttctattaaaatactcatgcatttaaccttcccgttattcaaccagtctcttggttgcatccctagcacttctactacaagtgagatggtagtgtttgagtgcttattgagtaaagcataattcggtcataatgaaatcgttcacattccctcatatgcacaagcccaccaaccccttcacaccccccttcacaggggtcgtatgagtaaggggatttggaaactgtcaacttacaaaggcactataacaattacagaatcatgattgccatgggccactttatttacatgaagacaactggagaacgactaagaccaaattatggaaaataagaaaaagctgttgctggcaagaccatcaagactgttctgacaccctgtccccatcatccctgactgagtactctgacatcacggaaagtgttgaacctgggaccctgaggaattcaccaggagtaaatggctttcatgta

SEQ ID NO: 201715 - DNA, 3384 bp, Homo sapiens
  Payload ID: 19798
  Gene Name: zinc finger protein 202
  Uniprot ID: O95125
  ENST ID: ENST00000529691
  CDS Start-End: 221-2167
aaaggccccacgtgttccgacccgctaggccccgcgcggctcggatccggcggcgctgtttcggtcgggagtgggtgggagagaagccggggcaggggaggagccgccggagctgtcggagccggcccttggaagaaaatcctcgctgtgtccaggctgaggcggggggctaatgacagtgtgagctctagatggtgtgagaccaccccaaagccaagaaatggctacagccgtggaaccagaggaccaggatctttgggaagaagagggaattctgatggtgaaactggaagatgatttcacctgtcggccagagtctgtcttacagagggatgacccggtgctggaaacctcccaccagaacttccgacgcttccgctaccaggaggcagcaagccctagagaagctctcatcagactccgagaactttgtcaccagtggctgagaccagagaggcggacaaaggagcagatcctagagctgcttgtgctggaacaatttcttaccgtcctacctggagaactacagagctgggtgcggggccaacggccagaaagtggcgaggaggcagtgacgctggtggagggtttgcagaaacaacccaggagaccaaggcggtgggtgactgtccatgttcacggccaggaagtcctgtcagaggagacggtgcatttaggagtggagcctgagtcacctaatgagctgcaggatcctgtgcaaagctcgacccccgagcagtctcctgaggaaaccacacagagcccagatctgggggcaccggcagagcagcgtccacaccaggaagaggagctccagaccctgcaggagagcgaggtcccagtgcccgaggacccagaccttcctgcagagaggagctctggagactcagagatggttgctcttcttactgctctgtcacagggactggtaacgttcaaggatgtggccgtatgcttttcccaggaccagtggagtgatctggacccaacacagaaagagttctatggagaatatgtcttggaagaagactgtggaattgttgtctctctgtcatttccaatccccagacctgatgagatctcccaggttagagaggaagagccttgggtcccagatatccaagagcctcaggagactcaagagccagaaatcctgagttttacctacacaggagataggagtaaagatgaggaagagtgtctggagcaggaagatctgagtttggaggatatacacaggcctgttttgggagaaccagaaattcaccagactccagattgggaaatagtctttgaggacaatccaggtagacttaatgaaagaagatttggtactaatatttctcaagtgaatagttttgtgaaccttcgggaaactacacccgtccaccccctgttagggaggcatcatgactgttctgtgtgtggaaagagcttcacttgtaactcccaccttgttagacacctgaggactcacacaggagagaaaccctataaatgtatggaatgtggaaaaagttacacacgaagctcacatcttgccaggcaccaaaaggttcacaagatgaacgcgccttacaaatatcccctaaaccggaagaatttggaagagacctcccctgtgacacaggctgagagaactccatcagtggagaaaccctatagatgtgatgattgcggaaagcacttccgctggacttcagaccttgtcagacatcagaggacacatactggagaaaaacccttcttttgtactatttgtggcaaaagcttcagccagaaatctgtgttaacaacacaccaaagaatccacctgggaggcaaaccctacttgtgtggagagtgtggtgaggacttcagtgaacacaggcggtacctggcgcaccggaagacgcacgctgctgaggaactctacctctgcagcgagtgcgggcgctgcttcacccacagcgcagcgttcgccaagcacttgagaggacacgcctcagtgaggccctgccgatgcaacgaatgtgggaagagcttcagtcgcagggaccacctcgtcaggcatcagagaacacacactggggagaaaccattcacgtgccctacctgtggaaaaagcttcagcagaggatatcacttaattaggcatcagaggacccactcagaaaagacctcctagctaggtccccatgtgaggagatctgctttcagccctcacctaagggaggtgaggaagaggaaaagccctcttgtcagcctgggaagaccttttcgagggagtctccctgacctgctcagatctgacattacctcttcctgcaactaaacacgagcctgggcagaacctctcagccttcctctacgccttgaggggatgtttcatccaaagtacaacctgaattgaggcttctccttcactggagtgcacctgcctctacctcatgggtataaagtaggagaactaagagacttaagaggtcgtggttcctatatcgtccaaaaaataggctgttacatatcctaaagactgctcaacagcttcaagttgaaagtggccaaggacagccccttaggtttgggaagggacgagcctgaaggattctgtctttactggggtcaaatcttaaagcacacagctctggactcaagacaggaggtttgcgtcctgatggctttgccacacattcacaggataactgcatagatccctcgctgtctgattcacttcttaccatgcactttcctttgatgctgaggagaaatggaagtgggcgaaaaatctcaaggctgcttcatgtggaccttgtcaagctgctccctcccccagcgtcaaattgttatcaggtgccaaacactgctagaaaggagggcctagtcagaagcctctttccatacgagttttggttttgtttttaatatttttttctattaaaatactcatgcatttaaccttcccgttattcaaccagtctcttggttgcatccctagcacttctactacaagtgagatggtagtgtttgagtgcttattgagtaaagcataattcggtcataatgaaatcgttcacattccctcatatgcacaagcccaccaaccccttcacaccccccttcacaggggtcgtatgagtaaggggatttggaaactgtcaacttacaaaggcactataacaattacagaatcatgattgccatgggccactttatttacatgaagacaactggagaacgactaagaccaaattatggaaaataagaaaaagctgttgctggcaagaccatcaagactgttctgacaccctgtccccatcatccctgactgagtactctgacatcacggaaagtgttgaacctgggaccctgaggaattcaccaggagtaaatggctttcatgta

SEQ ID NO: 201716 - DNA, 564 bp, Homo sapiens
  Payload ID: 19798
  Gene Name: zinc finger protein 202
  ENST ID: ENST00000526252
  CDS Start-End: 534-564
gtttcggtcgggagtgggtgggagagaagccggggcaggggaggagccgccggagctgtcggagccgtgacacccagggcagctacactcagaagccacaaggaatgctagtggagcccctcatccctcccagcttctcttccaagctgccccgtggggcttgatccaggaagctacttcagaaaggttgtgggatagccttgggaggagctataccctttttgtactctgtgtatatactatattgcagtagacaatcattccaagggtacaacaaggtttaccacaatgtgagggactcagccattgcaaattgtacagatgaggggcttcacgttttgatcaaaatattacacctgtattctgggcttttgctgtgaattcctagtattgctaaaattctgcaatttcttaactacctgttaagttcctcaagggcccttggaagaaaatcctcgctgtgtccaggctgaggcggggggctaatgacagtgtgagctctagatggtgtgagaccaccccaaagccaagaaatggctacagccgtggaaccagaggaccagg

SEQ ID NO: 201717 - DNA, 1947 bp, Homo sapiens
  Payload ID: 19799
  Gene Name: zinc finger protein 205
  Uniprot ID: O95201
  ENST ID: ENST00000219091
  CDS Start-End: 125-1789
actcccagtctccacccaactcccccgcccgccccgtgcaggctgtggagactcccttcccgggggagggggcccccactgccgcaggtgccccctctgcctccaccccgctctgaaatagaaaatgtctgcagacggcggaggcatccaggacacccaggacaaggagacacccccggaggttccagatcgtggacatcctcatcaggaaatgccttctaagctgggggaggcggtaccttcaggggacactcaggagtcactgcacattaagatggagcccgaagagccacactccgagggggcatcgcaggaggatggggctcaaggtgcctggggctgggcacccctaagtcacggctctaaggagaaagctctcttcctgcctggcggagccctcccctccccccggatccccgtgctttcccgagaggggaggaccagagaccggcagatggctgcagcgctcctcactgcctggtcccagatgccagtgactttcgaggatgtggccttgtacctctcccgggaggagtggggacggctggaccacacgcagcagaacttctacagggatgtcctgcagaagaaaaatgggctgtcactgggctttcccttcagcaggcctttctgggcccctcaagcgcacggcaagggtgaggcctcgggctccagccggcaggcaggagatgagaaggagtggagaggcgcgtgcacaggagccgtcgaggtggggcagagggtgcagacctcatccgtggcagcccttgggaatgtgaagcccttcagaaccagggcagggagagtccagtggggcgtcccgcagtgcgcgcaggaagcagcctgcggccggagctcagggccggccaaagactccgggcagccggctgagccagatcgcaccccggatgcagctccgccagaccccagtcccacggagccccaggagtaccgcgtcccggagaagcccaacgaggaggagaagggcgccccggagagtggcgaggagggcctggcccctgacagtgaggtgggcaggaagagctaccggtgcgagcagtgcggcaagggcttcagctggcactcgcacctggtgacgcaccggcgcacgcacacgggcgagaagccctacgcctgcactgactgcgggaagcgcttcggccgcagctcgcacctcatccagcaccagatcatccacacgggcgagaagccctacacctgccccgcctgccggaagagcttcagccaccactccacgctgattcagcaccagcgcatccacaccggagagaagccctacgtgtgcgaccgctgcgccaagcgcttcacccgccgctcggacttggtcacccaccagggcacccacacgggcgccaagccgcacaagtgccccatctgcgccaagtgcttcacgcagagctcggcgctagtcacccaccagcgcacccacactggggtcaagccctatccgtgccccgagtgcggcaagtgcttcagccagcgttccaacctcatcgcgcacaaccgcacacacacaggcgagaagccctaccactgcctcgactgcggcaagagcttcagccacagctcgcacctcaccgcgcaccagcgcacccaccgtggcgtgcggccctacgcctgcccgttgtgcggcaagagcttcagccggcgctccaacctgcaccggcacgagaagatccacaccaccgggcccaaggccctggccatgctgatgctgggggcggcggcggcgggggctctggccacacccccacccgctcccacctaggaggccaggaaagggggagcggggcgcccagggccactggaacagccccactggagtcaaggctccgagggaggagagaggggctcgggaagggagctggggcggtgagggcatggggtgaggcatggcgatgggggagggcgagggcgagaaagggc

SEQ ID NO: 201718 - DNA, 2062 bp, Homo sapiens
  Payload ID: 19799
  Gene Name: zinc finger protein 205
  Uniprot ID: O95201
  ENST ID: ENST00000382192
  CDS Start-End: 206-1870
tcctgtcttccctactcccagtctccacccaactcccccgcccgccccgtgcaggctgtggagactcccttcccgggggagggggcccccactgccgcaggtgccccctctgcctccaccccggctcctggccagaagctggagggggcttggccaaaaagagggagaaacaactcagctgttctttctagctctgaaatagaaaatgtctgcagacggcggaggcatccaggacacccaggacaaggagacacccccggaggttccagatcgtggacatcctcatcaggaaatgccttctaagctgggggaggcggtaccttcaggggacactcaggagtcactgcacattaagatggagcccgaagagccacactccgagggggcatcgcaggaggatggggctcaaggtgcctggggctgggcacccctaagtcacggctctaaggagaaagctctcttcctgcctggcggagccctcccctccccccggatccccgtgctttcccgagaggggaggaccagagaccggcagatggctgcagcgctcctcactgcctggtcccagatgccagtgactttcgaggatgtggccttgtacctctcccgggaggagtggggacggctggaccacacgcagcagaacttctacagggatgtcctgcagaagaaaaatgggctgtcactgggctttcccttcagcaggcctttctgggcccctcaagcgcacggcaagggtgaggcctcgggctccagccggcaggcaggagatgagaaggagtggagaggcgcgtgcacaggagccgtcgaggtggggcagagggtgcagacctcatccgtggcagcccttgggaatgtgaagcccttcagaaccagggcagggagagtccagtggggcgtcccgcagtgcgcgcaggaagcagcctgcggccggagctcagggccggccaaagactccgggcagccggctgagccagatcgcaccccggatgcagctccgccagaccccagtcccacggagccccaggagtaccgcgtcccggagaagcccaacgaggaggagaagggcgccccggagagtggcgaggagggcctggcccctgacagtgaggtgggcaggaagagctaccggtgcgagcagtgcggcaagggcttcagctggcactcgcacctggtgacgcaccggcgcacgcacacgggcgagaagccctacgcctgcactgactgcgggaagcgcttcggccgcagctcgcacctcatccagcaccagatcatccacacgggcgagaagccctacacctgccccgcctgccggaagagcttcagccaccactccacgctgattcagcaccagcgcatccacaccggagagaagccctacgtgtgcgaccgctgcgccaagcgcttcacccgccgctcggacttggtcacccaccagggcacccacacgggcgccaagccgcacaagtgccccatctgcgccaagtgcttcacgcagagctcggcgctagtcacccaccagcgcacccacactggggtcaagccctatccgtgccccgagtgcggcaagtgcttcagccagcgttccaacctcatcgcgcacaaccgcacacacacaggcgagaagccctaccactgcctcgactgcggcaagagcttcagccacagctcgcacctcaccgcgcaccagcgcacccaccgtggcgtgcggccctacgcctgcccgttgtgcggcaagagcttcagccggcgctccaacctgcaccggcacgagaagatccacaccaccgggcccaaggccctggccatgctgatgctgggggcggcggcggcgggggctctggccacacccccacccgctcccacctaggaggccaggaaagggggagcggggcgcccagggccactggaacagccccactggagtcaaggctccgagggaggagagaggggctcgggaagggagctggggcggtgagggcatggggtgaggcatggcgatgggggagggcgagggcgagaaagggcaggcactctgcgaattaaaggccttggacttgaa

SEQ ID NO: 201719 - DNA, 726 bp, Homo sapiens
  Payload ID: 19799
  Gene Name: zinc finger protein 205
  ENST ID: ENST00000444510
  CDS Start-End: 373-726
tgccccctctgcctccaccccggtgagaagggggtgctggggagggcatctggatcccgagaccggcgcagatgatcagcttgcaggaggggatggggtcaaaggtggaaggcttcaagctggcaggagagaagggggccaggaccgggtttgggaaggagaaggacattgtctgccaggaccgagagcaggatgggcatcccaggcctggggcaggtggttgcagctgcaggggggctgctgagagcgggcaggttgatttctgaattcctggtgggcatgggagtcaggctcctggccagaagctggagggggcttggccaaaaagagggagaaacaactcagctgttctttctagctctgaaatagaaaatgtctgcagacggcggaggcatccaggacacccaggacaaggagacacccccggaggttccagatcgtggacatcctcatcaggaaatgccttctaagctgggggaggcggtaccttcaggggacactcaggagtcactgcacattaagatggagcccgaagagccacactccgagggggcatcgcaggaggatggggctcaaggtgcctggggctgggcacccctaagtcacggctctaaggagaaagctctcttcctgcctggcggagccctcccctccccccggatccccgtgctttcccgagaggggaggaccagagaccggcagatggctgcagcgctcctcactgcc

SEQ ID NO: 201720 - DNA, 1006 bp, Homo sapiens
  Payload ID: 19799
  Gene Name: zinc finger protein 205
  ENST ID: ENST00000414351
  CDS Start-End: 171-1006
ggggccaggaccgggtttgggaaggagaaggacattgtctgccaggaccgagagcaggatgggcatcccaggcctggggcaggtggttgcagctgcaggggggctgctgagagcgggcaggttgatttctgaattcctggtgggcatgggagtcagctctgaaatagaaaatgtctgcagacggcggaggcatccaggacacccaggacaaggagacacccccggaggttccagatcgtggacatcctcatcaggaaatgccttctaagctgggggaggcggtaccttcaggggacactcaggagtcactgcacattaagatggagcccgaagagccacactccgagggggcatcgcaggaggatggggctcaaggtgcctggggctgggcacccctaagtcacggctctaaggagaaagctctcttcctgcctggcggagccctcccctccccccggatccccgtgctttcccgagaggggaggaccagagaccggcagatggctgcagcgctcctcactgcctggtcccagatgccagtgactttcgaggatgtggccttgtacctctcccgggaggagtggggacggctggaccacacgcagcagaacttctacagggatgtcctgcagaagaaaaatgggctgtcactgggctttcccttcagcaggcctttctgggcccctcaagcgcacggcaagggtgaggcctcgggctccagccggcaggcaggagatgagaaggagtggagaggcgcgtgcacaggagccgtcgaggtggggcagagggtgcagacctcatccgtggcagcccttgggaatgtgaagcccttcagaaccagggcagggagagtccagtggggcgtcccgcagtgcgcgcaggaagcagcctgcggccggagctcagggccggccaaagactccgggcagccggctgagccagatcgcaccccggatgcagctccgccagaccccagtcccacggagccccaggagtaccgcgtccc

SEQ ID NO: 201721 - DNA, 766 bp, Homo sapiens
  Payload ID: 19799
  Gene Name: zinc finger protein 205
  ENST ID: ENST00000570935
  CDS Start-End: 1-766
ccctaagtcacggctctaaggagaaagctctcttcctgcctggcggagccctcccctccccccggatccccgtgctttcccgagaggggaggaccagagaccggcagatggctgcagcgctcctcactgcctggtcccagatgccagtgactttcgaggatgtggccttgtacctctcccgggaggagtggggacggctggaccacacgcagcagaacttctacagggatgtcctgcagaagaaaaatgggctgtcactgggagccgtcgaggtggggcagagggtgcagacctcatccgtggcagcccttgggaatgtgaagcccttcagaaccagggcagggagagtccagtggggcgtcccgcagtgcgcgcaggaagcagcctgcggccggagctcagggccggccaaagactccgggcagccggctgagccagatcgcaccccggatgcagctccgccagaccccagtcccacggagccccaggagtaccgcgtcccggagaagcccaacgaggaggagaagggcgccccggagagtggcgaggagggcctggcccctgacagtgaggtgggcaggaagagctaccggtgcgagcagtgcggcaagggcttcagctggcactcgcacctggtgacgcaccggcgcacgcacacgggcgagaagccctacgcctgcactgactgcgggaagcgcttcggccgcagctcgcacctcatccagcaccagatcatccacacgggcgagaagccctacacctgccc

SEQ ID NO: 201722 - DNA, 2309 bp, Homo sapiens
  Payload ID: 19799
  Gene Name: zinc finger protein 205
  Uniprot ID: O95201
  ENST ID: ENST00000620094
  CDS Start-End: 455-2119
agtctccacccaactcccccgcccgccccgtgcaggctgtggagactcccttcccgggggagggggcccccactgccgcaggtgccccctctgcctccaccccggtgagaagggggtgctggggagggcatctggatcccgagaccggcgcagatgatcagcttgcaggaggggatggggtcaaaggtggaaggcttcaagctggcaggagagaagggggccaggaccgggtttgggaaggagaaggacattgtctgccaggaccgagagcaggatgggcatcccaggcctggggcaggtggttgcagctgcaggggggctgctgagagcgggcaggttgatttctgaattcctggtgggcatgggagtcaggctcctggccagaagctggagggggcttggccaaaaagagggagaaacaactcagctgttctttctagctctgaaatagaaaatgtctgcagacggcggaggcatccaggacacccaggacaaggagacacccccggaggttccagatcgtggacatcctcatcaggaaatgccttctaagctgggggaggcggtaccttcaggggacactcaggagtcactgcacattaagatggagcccgaagagccacactccgagggggcatcgcaggaggatggggctcaaggtgcctggggctgggcacccctaagtcacggctctaaggagaaagctctcttcctgcctggcggagccctcccctccccccggatccccgtgctttcccgagaggggaggaccagagaccggcagatggctgcagcgctcctcactgcctggtcccagatgccagtgactttcgaggatgtggccttgtacctctcccgggaggagtggggacggctggaccacacgcagcagaacttctacagggatgtcctgcagaagaaaaatgggctgtcactgggctttcccttcagcaggcctttctgggcccctcaagcgcacggcaagggtgaggcctcgggctccagccggcaggcaggagatgagaaggagtggagaggcgcgtgcacaggagccgtcgaggtggggcagagggtgcagacctcatccgtggcagcccttgggaatgtgaagcccttcagaaccagggcagggagagtccagtggggcgtcccgcagtgcgcgcaggaagcagcctgcggccggagctcagggccggccaaagactccgggcagccggctgagccagatcgcaccccggatgcagctccgccagaccccagtcccacggagccccaggagtaccgcgtcccggagaagcccaacgaggaggagaagggcgccccggagagtggcgaggagggcctggcccctgacagtgaggtgggcaggaagagctaccggtgcgagcagtgcggcaagggcttcagctggcactcgcacctggtgacgcaccggcgcacgcacacgggcgagaagccctacgcctgcactgactgcgggaagcgcttcggccgcagctcgcacctcatccagcaccagatcatccacacgggcgagaagccctacacctgccccgcctgccggaagagcttcagccaccactccacgctgattcagcaccagcgcatccacaccggagagaagccctacgtgtgcgaccgctgcgccaagcgcttcacccgccgctcggacttggtcacccaccagggcacccacacgggcgccaagccgcacaagtgccccatctgcgccaagtgcttcacgcagagctcggcgctagtcacccaccagcgcacccacactggggtcaagccctatccgtgccccgagtgcggcaagtgcttcagccagcgttccaacctcatcgcgcacaaccgcacacacacaggcgagaagccctaccactgcctcgactgcggcaagagcttcagccacagctcgcacctcaccgcgcaccagcgcacccaccgtggcgtgcggccctacgcctgcccgttgtgcggcaagagcttcagccggcgctccaacctgcaccggcacgagaagatccacaccaccgggcccaaggccctggccatgctgatgctgggggcggcggcggcgggggctctggccacacccccacccgctcccacctaggaggccaggaaagggggagcggggcgcccagggccactggaacagccccactggagtcaaggctccgagggaggagagaggggctcgggaagggagctggggcggtgagggcatggggtgaggcatggcgatgggggagggcgagggcgagaaagggcaggcactctgcgaattaaaggccttggacttg

SEQ ID NO: 201723 - DNA, 2283 bp, Homo sapiens
  Payload ID: 19800
  Gene Name: zinc finger protein 207
  Uniprot ID: O43670
  ENST ID: ENST00000321233
  CDS Start-End: 155-1591
gggaggcggagcggggaacgaggccgtcggccattttgtgtctgcttcctgtgggacgtggtggtagccgttgggttgggaaagtgagggatttttggcctcgtttctcctgcttcttttctcctcccttttactttgccggtagaacacagttatgggtcgcaagaagaagaagcagctgaagccgtggtgctggtattgtaatagagattttgatgatgagaagatccttattcagcaccaaaaagcaaagcattttaaatgccatatatgtcacaagaaattgtatacaggacctggcttagctattcattgcatgcaggtacataaagaaacaatagatgccgtaccaaatgcaatacctggaagaacagacatagagttggaaatatatggtatggaaggtattccagaaaaagacatggatgaaagacgacgacttcttgaacagaaaacacaagaaagtcaaaaaaagaagcaacaagatgattctgatgaatatgatgatgacgactctgcagcctcaacttcatttcagccacagcctgttcaacctcagcaaggttatattcctccaatggcacagccaggactgccaccagtaccaggagcaccaggaatgcctccaggcatacctccattaatgccaggtgttcctcctctgatgccaggaatgccaccagttatgccaggcatgccacctggaatgatgccaatgggtggaatgatgccacctggaccaggaataccacctctgatgcctggaatgccaccaggtatgcccccacctgttccacgtcctggaattcctccaatgactcaagcacaggctgtttcagcgccaggtattcttaatagaccacctgcaccaacagcaactgtacctgccccacagcctccagttactaagcctcttttccccagtgctggacagatggggacacctgtcacaagctcaagtacagcttcatccaattcagaaagtctgtctgcatcttctaaagctctgtttcctagcacagcacaagctcaggcagctgtccaaggacctgttggtacagatttcaaacccttaaatagtacccctgcaacaactacagaacccccaaagcctacattccctgcttatacacagtctacagcttcaacaactagtacaacaaatagtactgcagctaaaccagcggcttcaataacaagtaagcctgctacacttacaacaactagtgcaaccagtaagttgatccatccagatgaggatatatccctggaagagagaagggcacagttacctaagtatcaacgtaatcttcctcggccaggacaggcccccatcggtaatccaccagttggaccaattggaggtatgatgccaccacagccaggcatcccacagcaacaaggaatgagacccccaatgccacctcatggtcagtatggtggtcatcatcaaggcatgccaggataccttcctggtgctatgcccccgtatgggcagggaccgccaatggtgcccccttaccagggtgggcctcctcgacctccgatgggaatgagacctcctgtaatgtcgcaaggtggccgttactgatcttacttcatccagtctaataggtttggagattaaaccttttctcaacttgtgctgtttatatagccaagcttccgtcaataaggcttcattgtgactttaacaaacattatcttcccacataccaggaactattggacatttattttacatgggaaaaattatttggaataataaagcaggaacttttcctgaagttgcaatttatactgtatggcttctttttcatgtttcatctaggtttttagaagtgaagtatagtaaatttggttcgttaaattgtgaaggcgctggaattacatgaacataccaccctagtaaaggcaagttctgtaagcttacattgctatttgtaaagtttgccttcacagcatttcagatgctgttggacttcatgtccccaacctagcttggtgagggctgtaactgtttccaagtacttgtacattggaagtctgaatgtgtaacaatatttaatgtatttagagttcctcatgttgcagggtttaagaaatctgacccaccaaggtcatgtgacttttctgtactgttaaacttcattgtaataaaatgagagaaaaatttatgcctttttattcataacccagctgtggaccactgcctgaaaggtttgtacagatgcatgccacagtagatgtccacataataaaattcatagttaccaatgcagt

SEQ ID NO: 201724 - DNA, 1905 bp, Homo sapiens
  Payload ID: 19800
  Gene Name: zinc finger protein 207
  ENST ID: ENST00000342555
  CDS Start-End: 311-1804
gcttcctgtgggacgtggtggtagccgttgggttgggaaagtgagggatttttggcctcgtttctcctgcttcttttctcctcccttttactttgccggtagaacacagttatgggtcgcaagaagaagaagcagctgaagccgtggtgctgtgtgcatttgtaaatgttgaaatatttataacaaaagtttcaccgacatctctgttaaacacaggaatttgacaaagtatattgctgattattgagatgtgttttttggggtggtgaagagagctggccttctaggaaattgaaaatactgaaataacatggcaatgtcatcattaggctgtctttgtgccttaacagtattgatcaggtattgtaatagagattttgatgatgagaagatccttattcagcaccaaaaagcaaagcattttaaatgccatatatgtcacaagaaattgtatacaggacctggcttagctattcattgcatgcaggtacataaagaaacaatagatgccgtaccaaatgcaatacctggaagaacagacatagagttggaaatatatggtatggaaggtattccagaaaaagacatggatgaaagacgacgacttcttgaacagaaaacacaagaaagtcaaaaaaagaagcaacaagatgattctgatgaatatgatgatgacgactctgcagcctcaacttcatttcagccacagcctgttcaacctcagcaaggttatattcctccaatggcacagccaggactgccaccagtaccaggagcaccaggaatgcctccaggcatacctccattaatgccaggtgttcctcctctgatgccaggaatgccaccagttatgccaggcatgccacctggattgcatcatcagagaaaatacacccagtcattttgcggtgaaaacataatgatgccaatgggtggaatgatgccacctggaccaggaataccacctctgatgcctggaatgccaccaggtatgcccccacctgttccacgtcctggaattcctccaatgactcaagcacaggctgtttcagcgccaggtattcttaatagaccacctgcaccaacagcaactgtacctgccccacagcctccagttactaagcctcttttccccagtgctggacagatggggacacctgtcacaagctcaagtacagcttcatccaattcagaaagtctgtctgcatcttctaaagctctgtttcctagcacagcacaagctcaggcagctgtccaaggacctgttggtacagatttcaaacccttaaatagtacccctgcaacaactacagaacccccaaagcctacattccctgcttatacacagtctacagcttcaacaactagtacaacaaatagtactgcagctaaaccagcggcttcaataacaagtaagcctgctacacttacaacaactagtgcaaccagtaagttgatccatccagatgaggatatatccctggaagagagaagggcacagttacctaagtatcaacgtaatcttcctcggccaggacaggcccccatcggtaatccaccagttggaccaattggaggtatgatgccaccacagccaggcatcccacagcaacaaggaatgagacccccaatgccacctcatggtcagtatggtggtcatcatcaaggcatgccaggataccttcctggtgctatgcccccgtatgggcagggaccgccaatggtgcccccttaccagggtgggcctcctcgacctccgatgggaatgagacctcctgtaatgtcgcaaggtggccgttactgatcttacttcatccagtctaataggtttggagattaaaccttttctcaacttgtgctgtttatatagccaagcttccgtcaataaggcttcattgtgacttt

SEQ ID NO: 201725 - DNA, 13781 bp, Homo sapiens
  Payload ID: 19800
  Gene Name: zinc finger protein 207
  Uniprot ID: O43670
  ENST ID: ENST00000394670
  CDS Start-End: 170-1654
accgcagtgcttgacgggaggcggagcggggaacgaggccgtcggccattttgtgtctgcttcctgtgggacgtggtggtagccgttgggttgggaaagtgagggatttttggcctcgtttctcctgcttcttttctcctcccttttactttgccggtagaacacagttatgggtcgcaagaagaagaagcagctgaagccgtggtgctggtattgtaatagagattttgatgatgagaagatccttattcagcaccaaaaagcaaagcattttaaatgccatatatgtcacaagaaattgtatacaggacctggcttagctattcattgcatgcaggtacataaagaaacaatagatgccgtaccaaatgcaatacctggaagaacagacatagagttggaaatatatggtatggaaggtattccagaaaaagacatggatgaaagacgacgacttcttgaacagaaaacacaagaaagtcaaaaaaagaagcaacaagatgattctgatgaatatgatgatgacgactctgcagcctcaacttcatttcagccacagcctgttcaacctcagcaaggttatattcctccaatggcacagccaggactgccaccagtaccaggagcaccaggaatgcctccaggcatacctccattaatgccaggtgttcctcctctgatgccaggaatgccaccagttatgccaggcatgccacctggattgcatcatcagagaaaatacacccagtcattttgcggtgaaaacataatgatgccaatgggtggaatgatgccacctggaccaggaataccacctctgatgcctggaatgccaccaggtatgcccccacctgttccacgtcctggaattcctccaatgactcaagcacaggctgtttcagcgccaggtattcttaatagaccacctgcaccaacagcaactgtacctgccccacagcctccagttactaagcctcttttccccagtgctggacagatggggacacctgtcacaagctcaagtacagcttcatccaattcagaaagtctgtctgcatcttctaaagctctgtttcctagcacagcacaagctcaggcagctgtccaaggacctgttggtacagatttcaaacccttaaatagtacccctgcaacaactacagaacccccaaagcctacattccctgcttatacacagtctacagcttcaacaactagtacaacaaatagtactgcagctaaaccagcggcttcaataacaagtaagcctgctacacttacaacaactagtgcaaccagtaagttgatccatccagatgaggatatatccctggaagagagaagggcacagttacctaagtatcaacgtaatcttcctcggccaggacaggcccccatcggtaatccaccagttggaccaattggaggtatgatgccaccacagccaggcatcccacagcaacaaggaatgagacccccaatgccacctcatggtcagtatggtggtcatcatcaaggcatgccaggataccttcctggtgctatgcccccgtatgggcagggaccgccaatggtgcccccttaccagggtgggcctcctcgacctccgatgggaatgagacctcctgtaatgtcgcaaggtggccgttactgatcttacttcatccagtctaataggtttggagattaaaccttttctcaacttgtgctgtttatatagccaagcttccgtcaataaggcttcattgtgactttaacaaacattatcttcccacataccaggaactattggacatttattttacatgggaaaaattatttggaataataaagcaggaacttttcctgaagttgcaatttatactgtatggcttctttttcatgtttcatctaggtttttagaagtgaagtatagtaaatttggttcgttaaattgtgaaggcgctggaattacatgaacataccaccctagtaaaggcaagttctgtaagcttacattgctatttgtaaagtttgccttcacagcatttcagatgctgttggacttcatgtccccaacctagcttggtgagggctgtaactgtttccaagtacttgtacattggaagtctgaatgtgtaacaatatttaatgtatttagagttcctcatgttgcagggtttaagaaatctgacccaccaaggtcatgtgacttttctgtactgttaaacttcattgtaataaaatgagagaaaaatttatgcctttttattcataacccagctgtggaccactgcctgaaaggtttgtacagatgcatgccacagtagatgtccacataataaaattcatagttaccaatgcagttttgatatatcattggattctgtctttgagttgtaggttatttcttagctgcatgttttaaactgaatttgcatagagttgtatgttaatgtttcagttaagagaaaaacttaagatacatgagtcattacataatgggtatgaaatctttataatcacccttccaccctctatggtgtcagtacacatcacgtgtcatagatacttaaaatgtaaatgttaacacttttccttcctgctgagatgtttagagcctagtgccagacccattcatttccttttgattatttttgagactcagtactgcatggacctcagaagcttttcaggtgcaaacttctagaagcttaggtgcatgcagtaatagcttcttgtgctgttaatgggttattatatattattctaagtgtaatgctgagaatctaaatgtgtctctgttgggatggttaacagatgaattggcaatttttattatgttcctggaagattacattattcatttgagtaccttctgttattaagcctaggtagccttactgtgcaactttttatttatccttggaaattttgaatgttgtgttcttacagagagcttttctgtagagatgactgctattcaatattttgtgttgcaacctcttaaaataatagctcttgttgacctttttgggatctgtttttctgatcttttgcagggtagttttatgattttttaggcatcaaataacctatgcaaagtattaatataatgaactcaagttgagtttttctcattataaagttaagacttctaagaaaatggtaacatttctttataactttcctgtgaaggtatagataaaacacatgaagtctgaagttgtatggaaaaaagggctttaactttgaaggaaaatatattgaaaagtgatttagccatcacaaaagagttcgtatttatgtgacagatgaaagtcatacctttaagcaaaacattgcaagtattataaagctgaatgctattttaactcacattggctgggtgcagtggctcacgcctgtaatcccagccctctggaaggctgagatgggaggattgcttgagtccaggagtttgagaccagcctggccaacatggcaaaaccccatctgtacaaaacatttaaaaattagccaggcgcgttagtgtgtgtctgtggtcccagctgctcaagaggctgaggaaggaggttcttcctccttccgaggctgcggtgagctatgttcactccagcctgggcaacagagcgagactctgtcaaaaaataaattaaaatatctgattatctggcttcaatgattttggctcctgtgcttgtggtaccatagtggtacaaaaattttcatagtttgaaaataaaacaggtattttgccagtaatgtatttctttctgccagcagccaagtcccaaaccactttcccctctgaacctctgcttacctaaatggtttcaaaattaatacatgctgctttgatttggcagcacacttaatatactgctgaaggaaaacttgtgttgaaagtctttaagataaaaatggtgtgataggccgggcgcagtggctcacgcctgtaatcccagcactttgggaggcccaggcgggtggatcatgaggtcaggagatggagaccatcctggctaacacggtgaaaccccgtttctactaaaaatacaaaaaattagctgggcgtagttgcggatgcctgtagtcccaactactctggagaccgaggcaggagaatggcgtgaacccgggaggcatagcttgcagtgagcggagatcacaccactgcactctagcctggacgacagattgagactccgtctcaaaaaaaaaaaatgctgtgattaaatttagaataattaagtaaggggtgctctcccaaattctcaggaatttcatgtatacggttattgacaaactgcaatagggttagtagacctgtttcagaaattatgtgaagctttatttgcattttatgcaaagaaggttgatactttgtagcaaggttttttgctctctgtataggtctgatgggcaaaaatggaacttttaaatatgggatagaattctaattaaaaattaattgaaagtgttaggcattggcagataaaacttaagctcatgagttcctgagtttgtagctataggctcagaggtggtgtacccatttaatatatttgaagtgtaatttttgcatgcatccaaacgtaattaagcttctagaaaataccttttttctaaatgcttctggggtccatagtgtggttgaattatgagtggagcaaattatattcatataattaactctgactcaaccttccttaagtagtagatgaagttgagtcaaagtggatgccaactgccctcacagaagacaacttttgggacttgataattcaggcaggcattgtgattgtcataattaaggaagctgtaaggttagtagggctggcaactttggctctaccttacatccaccccttttagaaaaacaagaaaacattttgtctggcactagtttctgttgtataagttttcatactgtttaacaagaccacagcaggtaaggattaatttttgagtggctgctggaattacttgatttgaatacttagtattttagtagtgtctcacacatttgccattaggtatgaataaaatattcctactgtactcctattccactaagttacattttgaacttagactcaccttaattaaacttaattaattggggagggggattccccaacaaaaagaagtacgggctcagagtggaattgtagtggacaatagttaaaaacaaagctgctccttttgcttgcttgatcattgggatttttaaaaaaaaaaattttaatgcatgtcttttaaattaattgggaactgtttttctaaaattaaaattttcttcttcctatagccctgccataggacaggctgaggctgagtctcagtgttgccctgttcagtctgaggcaagtgggatttattttattccttataggggctttcacagctttatggctgttggatatttatgtccccaaacttgcagcaagtttggtgaaggcccctaaatttaattaaacttaggatttttatactcttttggcagagaaggctctatattaatattcacgtttgactgtggtgttaataaacataagtatttcatatgcaattttatgtaatttgctgtgtgttacataattaacagcttcagtaaagcttgtgttcctatattgaacttcaataaattgacaaaatttgatatttttgattggaggcaagaaatgtttcattcaagttttttactttcacttctaggaaaatcttactggttttattttctccataaactattaaatttaacctcaaggataagtttaatcattggaaatgccactggatactgaaatgtgccttctcttttttgagacggagtttcactcttatcacccaggatggagtgcagtggtgcgatctcggttcactgcaacctctgcctcccggattcaagtgattctcctgcctcagcctcccgagtagctgggattataggctcccgccaccacatctggctattttttcaatatttttcagtagggatggggttttgccgtgttggccaggctggtctcaaactcctgacctcaggtgatccacccatctcagcctcccagagtgctggagtagcaggtgtgagccaccgcgcctggccaaaatctgcattctttttttttttttttttttttttttgagactgtctcgctgtgtcacccaggccagagtgcagtagcacgatctcagctcactacaacctccacctcctggattcaagcgattctcctgtctcagcctcccgagtagctgggactacaggtgcttgccaccacacccggctaattttttgtatttttagtagagacggggtttcaccgtgttagccaggatggtctcgatctcctgactttgcgatccccctgcctcggcctcccaaagtgctgggattacaggcgtgggccaccgcgcttggccaaaatctgcattcttaatcacaaacttacgcattgaatgttaaggctaaaaggtcatctggaaatgcttaattttaaaatattttcaagcctcaccacattagagcaaatgttaatgtagagccctgtaaaggtgggaaggtggtgtctatgtgtgtgcttgtgtatgtgggggtatagaccatatagttgatataacaacagaatttgggtgttacagacctttcagcatggatggattactaattttcaggtatcgaaactgaaatttgatacctgatcctgtggtaaagtatgttaaactatggttttggagtgattattttgaggttcattttcagcctcactgaacagtgttttacgcacatgtgaaaagtatccacatttgtttccaactaaaatttgcttttatttggtgagaaaagttgtgtgcgtgtgtttgttgtagggaataattagggaattggaagagaggccaaaaacaaacctgaattacttttgtttcttgtgtttgagccacgattctatccagatagcagtttactctgagcagtaacaatgaacaagcagtatagcatttagcaaacctggaattgtttgtatatggttttcattcttggaagcataaagaaaaaatatgcattaaatgaattgtaaattttgacttgttaaataacatgtttttcactataactaataggattttaatatttaaagaattttgttgcttccatgacaaaatatcccattggactattttataacctcagtaatcaacatttaagagtccttaattggagatctgttttctctattacctaccatcctgcaatatgctgaaatctttctaagttgcttatcttaattctaatggtgataattgaaaaaagtgtgctggaaatacaggctcttatctggttgagtactgggggtgggaaggatttagtaatgtcataatctgttgaaggtaatatctatagataactaagatagttcctttttttttgtagttctgtgactcagacaaataagattttgagaattatgtagtttttaggtgtctgtaacatccactagtaaaacttggcaaatgaaagaaaattgtgaagtcaccactttaactgagtcaaaattttgtttgaataagctgatgaaaatagacatgtaccctagaagtagatactctaaaattatacagacatgaatgtcttttttaaaaggttgtcattattgacctaatattgagtaatctttctgcgttattccaaattgaaatttgtttgctcttcattgtaacttttatgtaaaagtcctttaaaaggggattcaattataaggctatttgactatagggcagatttttataagtaaacattcccccaattccacttatgctaactgtctcatgacagtaaagtttactcctttttagaaaccctttctcagtattttaatttctgtcattgaatcatttaaataataaccttttgtttttatagcaaagaaatcatctgacttttctgtgtgatgtttcttggcaaaataagcacttgatgtatggtcatgtacataatggatattcattaattttgtgattagtgctgagttttctaaactactatcttaagctcttaggcaccctattatggatctaattcaaaccaatatgtaggaaatggagaaagtaggacttcagtttgcgcttcccaataactttaaatatatccaccttttccaagtgtttaagccctaaaacatctatctttatttttttacctggcatttttgttagaaaatagattacgttttaaagtaacattaaaaaaattcttcagtaagataattgcttttaataagtatatttttcttgctcttggctctatacatttttgcataatattttagtcttgaaaagcttttcattttcttaactctggaaaataatagtttggaactaaattagtttgagaaatctgaatcatctctctttaaatctgttcagttagtctcatgtattctcaggggaaaatgtctttattttactaagcggaagtagtagtcatattgaggcagaaatttgtagcccaaacaaggtaggtcttcgctgaaactaatttgaactattcctatttgaagcaaattgaacactattataaatctagactggctaattagatggaaactttgatggttaggttctttaagaggcatacaatccgttatgagaatgtttatgtttatgttttaatttttatcaaaataacctcagaggaggtacatgtgagtaaactgtcttaatggttgattacttggaacccacccattaattctaaatgatgtaatggtctataaggtagtaatctggcacagcttcagtaatgtgtgctgtgtttgtaaaaaggtgaagtactttattggcattttctaagccctctgacattgttagtgtctgggttggttggtttgcattttactattatggtggaatctgtgttccttcaccattggttaagtctgaggaactaacagtgaaattcattgatggccaacttggataaaaatgaagaatgatattttcccagtttactacacatggaccaatagtgattatttgggagagaacactgggtagtattgtttgacttaagaaccttaaatatattgaaaagtaatggcattcttgctcatgatttgcatttgttagtgaggtctcaccatagtattttaatgtagcttcttattaaaattttattcataaatagtttagcagtcacagaggtgaaaaaaaaaagatttgcaccatcatatccgagtctttactaataaaatgaggctgcttaagtacccaagtggagcaagggaagagttactacagttactgtaagtctgagttagaaaaaatacagagcatctagttattgagcaaagcccccttttacctgttcgcttattcaaagagaaacaatagaatttgcttctcagtacatgtttttaaaattgagaatctctgatgtgacaaaatcaatttttacaaaagttgaattaaaaacttttaaaaattgcttgtctttgggggtatgtctacatattcgtttaaatttagaaattcccacatgtttaagatatatgcccatcccctttttagagtaatcaaaatttctatcacagttcacatactggaatacatagtaaaattgagatgtgtccaagagattttcaatgttaattagctcattctaaatagccaatataaggtaacttctgtttaaaaaaaaaaaaaactagggaaaagttttaaatgtattagtatcaggctctgaggaaatttaatgcacattgactttttaaactatggattgaactcctcagtttaatacaatttgtgtttttgttaactagcagcagaatttcagcatttgctacttactggtagagaagaaaaatcccacagccctgccagtacaggttagtttaatctgtaagtacctgatgttcctatttttttcaaacatatccatataactcacacaaggaagaaagctgtgcggttacttaaatgttagtataactaataatagatccattggacactttaaacactcagtacttgggccaaagtagatctaggtttgctaaccccagttgtaataaaggtgtaatactgctcctttgttatctccttgtggttcaacctaagtagatacattgtacataaaaggaaaagacagtttcagttggctatgcccttgttgatagatgatatggagtccagggctttgggtccagggtcttttacttaagctatttcatggtggttctctcattcaccttttaactttttacattatgaatcaacctaagaaaaaaggcaagtttcctcacatctagaaatgataaatggtgtacagtcataagctagaatatgtttttataatgcttttttgttcttttagcaacacttgtaaatacaagtactcctctatttttgttctttttttgtaaactataacgtatcccgttggtgtaccagtgagttcattttactgtaaactaagaataacatacctttttaatactgaaagttgactactcatcaagaaatgtagctagattctttatgtaacacttttgaggggcagtggggacataatgggttgtggaaaatgtgttttaacatttttattttttttttattctacccgagttcattgttgtttgaaccatcctctaaagatttcctttaacctctaaatgttgtgcttttaggttgataacaaatgtaaagcactgaggagggaggaataaagcatacaagttaatttctaattttcgcaagcctgaaccatcctaatctgatagtaggatgtatggcttcttccttttcaccttgtgtgatgtttaatttgagacgatctagccataaaactagtaatcttgaattcctcttgagctggatggtgattagccattgtgaaaacagattatatggaaattgtgcatattgctaaattttaaaacatggatttatcaactgataataaaatatatcttacaagataaccacttgttttttaatgtaaaattgcacaagggcttaagtttcattgcctttcacagtttaatctgtatatgaaatggtgtagatacagtggaaatggttttccttaaaaccatctctttaaagctgcctttctggtgagtactgttttatacttttatatattataattttatcttctaaaattaactgaaataggacactttgattaaagaggtgagcactctgaatttctacatctttggatattacttgaatcaagaatattagaaaattattttaccacctggcatttcccttttaatttgctagttcacttttttctgaccttcacttaacagactataaatacaaaaactttgaacacataaattatttcattttggtgagatggaataaatgtttaaaattagtatttaagaaagttcttaaacattttttttagttggcagccaaaagatttttcttagtgctttggagacattgcataggtgtaaaattaagataccagaacttcattctgttcttgttgaagctgttgttgtggtgattcatgagcagtaagctggagttagagtggaagaagggtttaccaaaattcttcctgcagactagttgcttacagggtttctttgagaggcttaaaaatttcaaaagtattatttaagccactctaaccctgcatgaaaaattggagttagaaatactgatttctgagaccacgtataccagtgaaaattagcttctgagtaaatttctaatttatgccctgctttatttagcctcgctatatgtaacacatggattattttttccctctagtttttaactatatcctagattaaaaccagcatatgctaagaatgtttttacattctgtttcctcctgtgatctttctgaaccaataataaacagtcaactgtgatgctttttagtatgaacaatgatagttttctaaaatctgaaaatcaatacctgagtatgtgatgtggcaatgcattcttctagataagcactaaacaaagtatggaccctcaatttatgtctttaagatttaaagtgaagtaaatttctaaggaactgtgtcctttcctagcaggaataaacagtgaaaatttggtaagtatttaacttgaagtgcatgtaatagtgatgagagtaagtagccaaatttccgtaatataaggtaatgtttaaaagtgagcaataattattgcatctcttttgcgacttcatgtagatgtgattaacattttttacaaatttgcctgcataaagattaaattggaacataccttactcctttgtctggtttttttattttgtatggtgctttaaatactaattttatatttcaagctttttgcagggtagaaataagtggctgttaaagaaaatatcttcaagaaggattatttcagtgtccctttttaaaactcgatgatggctttcagtttatttaagtcttctgtttttcagctccagttaaaactgacaataggcagctatcaaaaatggaaaaaatcttgtgctctttctggaatattagaggaatcagttaataatagtaaagtggtattaacccaatacttgatttgcagtttttaaagcagtttttaaattgagagaaaaggggctgggcccagctgaggcgggtggatctcctgaggtcaggagtttgagaccagcctggccaacatagtgaaaccccgtctctactaaaaatacaaaaatcagccgggtgtggtgggacgtgcctgtaaccccagctactctggaggctgaggcaggaaaatcgcttgaacccagggggaggaggttgcagtgagccgagatggcgccgttgcactccagcttgggtgacagagcgagactccgtctcaaaaaaaaaaagaaaaaaagaaaaagtgataagatttgggagtctattccctgggatgttctattaataataaagtgataataaatgaaggttaaagtcaagtgttcaattactacaccaggaaagattgattatttctgaggaaaaggtccatttatttccaaactagtctgtagtggtttagagtaagcattattttatgaagtggtacaagattgcaaaggttagtaaagggacctgtctgtcaggtcaatcttcggtcttcacttttactggcaagggattatgtgaagagtaagtcatacaagggatatgattgtaaggaggtcctgaacaaagcatgataaatgttagtccatgtgtattattaaatggtctaaagaaaaatcatgactgatcgcataatttttaatgtaagtaaatgagctcactaagggtaattaaatactagcttttaaaatttaaagttctcacgaatattagtgcatcttgtcactttgatttgtcacctggttaaatagctggaagcttgtgcaaatgaaaaatgaaatggaagactacatttgtatatatatctgtataatttttgtttactagtaggttcagagagagatctgagatgttccttaacatgtagccatgtaattagaactcacaaggggcattgaaatgtttttctttttcagatagtctggggctatttacttattttaagtaagccaagtctaccatttgaaaaatggtgctttatttccatatctgaagcctgaagttattttttagtttgttttcatctaaaagtggaaagatttttgcttctgcgttattaagagcctctttgtttggaggagatggttatctccttcactcattaacctttgagtgcttgttatctacaaagatgaataaaatctttcatttattatttat

SEQ ID NO: 201726 - DNA, 2124 bp, Homo sapiens
  Payload ID: 19800
  Gene Name: zinc finger protein 207
  Uniprot ID: O43670
  ENST ID: ENST00000394673
  CDS Start-End: 149-1540
cggagcggggaacgaggccgtcggccattttgtgtctgcttcctgtgggacgtggtggtagccgttgggttgggaaagtgagggatttttggcctcgtttctcctgcttcttttctcctcccttttactttgccggtagaacacagttatgggtcgcaagaagaagaagcagctgaagccgtggtgctggtattgtaatagagattttgatgatgagaagatccttattcagcaccaaaaagcaaagcattttaaatgccatatatgtcacaagaaattgtatacaggacctggcttagctattcattgcatgcaggtacataaagaaacaatagatgccgtaccaaatgcaatacctggaagaacagacatagagttggaaatatatggtatggaaggtattccagaaaaagacatggatgaaagacgacgacttcttgaacagaaaacacaagaaagtcaaaaaaagaagcaacaagatgattctgatgaatatgatgatgacgactctgcagcctcaacttcatttcagccacagcctgttcaacctcagcaaggttatattcctccaatggcacagccaggactgccaccagtaccaggagcaccaggaatgcctccaggcatacctccattaatgccaggtgttcctcctctgatgccaggaatgccaccagttatgccaggcatgccacctggattgcatcatcagagaaaatacacccagtcattttgcggtgaaaacataatgatgccaatgggtggaatgatgccacctggaccaggaataccacctctgatgcctggaatgccaccaggtatgcccccacctgttccacgtcctggaattcctccaatgactcaagcacaggctgtttcagcgccaggtattcttaatagaccacctgcaccaacagcaactgtacctgccccacagcctccagttactaagcctcttttccccagtgctggacaggctcaggcagctgtccaaggacctgttggtacagatttcaaacccttaaatagtacccctgcaacaactacagaacccccaaagcctacattccctgcttatacacagtctacagcttcaacaactagtacaacaaatagtactgcagctaaaccagcggcttcaataacaagtaagcctgctacacttacaacaactagtgcaaccagtaagttgatccatccagatgaggatatatccctggaagagagaagggcacagttacctaagtatcaacgtaatcttcctcggccaggacaggcccccatcggtaatccaccagttggaccaattggaggtatgatgccaccacagccaggcatcccacagcaacaaggaatgagacccccaatgccacctcatggtcagtatggtggtcatcatcaaggcatgccaggataccttcctggtgctatgcccccgtatgggcagggaccgccaatggtgcccccttaccagggtgggcctcctcgacctccgatgggaatgagacctcctgtaatgtcgcaaggtggccgttactgatcttacttcatccagtctaataggtttggagattaaaccttttctcaacttgtgctgtttatatagccaagcttccgtcaataaggcttcattgtgactttaacaaacattatcttcccacataccaggaactattggacatttattttacatgggaaaaattatttggaataataaagcaggaacttttcctgaagttgcaatttatactgtatggcttctttttcatgtttcatctaggtttttagaagtgaagtatagtaaatttggttcgttaaattgtgaaggcgctggaattacatgaacataccaccctagtaaaggcaagttctgtaagcttacattgctatttgtaaagtttgccttcacagcatttcagatgctgttggacttcatgtccccaacctagcttggtgagggctgtaactgtttccaagtacttgtacattggaagtctgaatgtgtaacaatatttaatgtatttagagttcctcatgttgcagggtttaagaaatctgacccaccaaggtcatgtgacttttctgtactgttaaacttcattgtaataaaatgagagaaaaatt

SEQ ID NO: 201727 - DNA, 847 bp, Homo sapiens
  Payload ID: 19800
  Gene Name: zinc finger protein 207
  ENST ID: ENST00000394679
  CDS Start-End: 253-847
gggacgtggtggtagccgttgggttgggaaagtgagggatttttggcctcgtttctcctgcttcttttctcctcccttttactttgccggtagaacacagttatgggtcgcaagaagaagaagcagctgaagccgtggtgctgagattttgatgatgagaagatccttattcagcaccaaaaagcaaagcattttaaatgccatatatgtcacaagaaattgtatacaggacctggcttagctattcattgcatgcaggtacataaagaaacaatagatgccgtaccaaatgcaatacctggaagaacagacatagagttggaaatatatggtatggaaggtattccagaaaaagacatggatgaaagacgacgacttcttgaacagaaaacacaagaaagtcaaaaaaagaagcaacaagatgattctgatgaatatgatgatgacgactctgcagcctcaacttcatttcagccacagcctgttcaacctcagcaaggttatattcctccaatggcacagccaggactgccaccagtaccaggagcaccaggaatgcctccaggcatacctccattaatgccaggtgttcctcctctgatgccaggaatgccaccagttatgccaggcatgccacctggattgcatcatcagagaaaatacacccagtcattttgcggtgaaaacataatgatgccaatgggtggaatgatgccacctggaccaggaataccacctctgatgcctggaatgccaccaggtatgcccccacctgttccacgtcctggaattcctccaatgactcaagcacaggctgtttcagcgccaggtattcttaatagaccac

SEQ ID NO: 201728 - DNA, 572 bp, Homo sapiens
  Payload ID: 19800
  Gene Name: zinc finger protein 207
  ENST ID: ENST00000580759
  CDS Start-End: 294-572
ttttgtgtctgcttcctgtgggacgtggtggtagccgttgggttgggaaagtgagggatttttggcctcgtttctcctgcttcttttctcctcccttttactttgccggtagaacacagttatgggtcgcaagaagaagaagcagctgaagccgtggtgctgtattgatcaggtattgtaatagagattttgatgatgagaagatccttattcagcaccaaaaagcaaagcattttaaatgccatatatgtcacaagaaattgtatacaggacctggcttagctattcattgcatgcaggtacataaagaaacaatagatgccgtaccaaatgcaatacctggaagaacagacatagagttggaaatatatggtatggaaggtattccagaaaaagacatggatgaaagacgacgacttcttgaacagaaaacacaagaaagtcaaaaaaagaagcaacaagatgattctgatgaatatgatgatgacgactctgcagcctcaacttcatttcagccacagcctgttcaacctcagcaaggttatattcctccaatggcacagccaggactg

SEQ ID NO: 201729 - DNA, 592 bp, Homo sapiens
  Payload ID: 19800
  Gene Name: zinc finger protein 207
  ENST ID: ENST00000582165
  CDS Start-End: 306-592
gacgtggtggtagccgttgggttgggaaagtgagggatttttggcctcgtttctcctgcttcttttctcctcccttttactttgccggtagaacacagttatgggtcgcaagaagaagaagcagctgaagccgtggtgctgtgtcatcattaggctgtctttgtgccttaacagtattgatcaggtattgtaatagagattttgatgatgagaagatccttattcagcaccaaaaagcaaagcattttaaatgccatatatgtcacaagaaattgtatacaggacctggcttagctattcattgcatgcaggtacataaagaaacaatagatgccgtaccaaatgcaatacctggaagaacagacatagagttggaaatatatggtatggaaggtattccagaaaaagacatggatgaaagacgacgacttcttgaacagaaaacacaagaaagtcaaaaaaagaagcaacaagatgattctgatgaatatgatgatgacgactctgcagcctcaacttcatttcagccacagcctgttcaacctcagcaaggttatattcctccaatggcacagccaggactgccaccagt

SEQ ID NO: 201730 - DNA, 3560 bp, Homo sapiens
  Payload ID: 19800
  Gene Name: zinc finger protein 207
  ENST ID: ENST00000581531
  CDS Start-End: 1-1025
caggaatgcctccaggcatacctccattaatgccaggtgttcctcctctgatgccaggaatgccaccagttatgccaggcatgccacctggattgcatcatcagagaaaatacacccagtcattttgcggtgaaaacataatgatgccaatgggtggaatgatgccacctggaccaggaataccacctctgatgcctggaatgccaccaggtatgcccccacctgttccacgtcctggaattcctccaatgactcaagcacaggctgtttcagcgccaggtattcttaatagaccacctgcaccaacagcaactgtacctgccccacagcctccagttactaagcctcttttccccagtgctggacagatggggacacctgtcacaagctcaagtacagcttcatccaattcagaaagtctgtctgcatcttctaaagctctgtttcctagcacagcacaagctcaggcagctgtccaaggacctgttggtacagatttcaaacccttaaatagtacccctgcaacaactacagaacccccaaagcctacattccctgcttatacacagtctacagcttcaacaactagtacaacaaatagtactgcagctaaaccagcggcttcaataacaagtaagcctgctacacttacaacaactagtgcaaccagtaagttgatccatccagatgaggatatatccctggaagagagaagggcacagttacctaagtatcaacgtaatcttcctcggccaggacaggcccccatcggtaatccaccagttggaccaattggaggtatgatgccaccacagccaggcatcccacagcaacaaggaatgagacccccaatgccacctcatggtcagtatggtggtcatcatcaaggcatgccaggataccttcctggtgctatgcccccgtatgggcagggaccgccaatggtgcccccttaccagggtgggcctcctcgacctccgatgggaatgagacctcctgtaatgtcgcaaggtggccgttactgatcttacttcatccagtctaatagccctgccataggacaggctgaggctgagtctcagtgttgccctgttcagtctgaggcaaaatttcagcatttgctacttactggtagagaagaaaaatcccacagccctgccagtacaggttagtttaatctgtaagtacctgatgttcctatttttttcaaacatatccatataactcacacaaggaagaaagctgtgcggttacttaaatgttagtataactaataatagatccattggacactttaaacactcagtacttgggccaaagtagatctaggtttgctaaccccagttgtaataaaggtgtaatactgctcctttgttatctccttgtggttcaacctaagtagatacattgtacataaaaggaaaagacagtttcagttggctatgcccttgttgatagatgatatggagtccagggctttgggtccagggtcttttacttaagctatttcatggtggttctctcattcaccttttaactttttacattatgaatcaacctaagaaaaaaggcaagtttcctcacatctagaaatgataaatggtgtacagtcataagctagaatatgtttttataatgcttttttgttcttttagcaacacttgtaaatacaagtactcctctatttttgttctttttttgtaaactataacgtatcccgttggtgtaccagtgagttcattttactgtaaactaagaataacatacctttttaatactgaaagttgactactcatcaagaaatgtagctagattctttatgtaacacttttgaggggcagtggggacataatgggttgtggaaaatgtgttttaacatttttattttttttttattctacccgagttcattgttgtttgaaccatcctctaaagatttcctttaacctctaaatgttgtgcttttaggttgataacaaatgtaaagcactgaggagggaggaataaagcatacaagttaatttctaattttcgcaagcctgaaccatcctaatctgatagtaggatgtatggcttcttccttttcaccttgtgtgatgtttaatttgagacgatctagccataaaactagtaatcttgaattcctcttgagctggatggtgattagccattgtgaaaacagattatatggaaattgtgcatattgctaaattttaaaacatggatttatcaactgataataaaatatatcttacaagataaccacttgttttttaatgtaaaattgcacaagggcttaagtttcattgcctttcacagtttaatctgtatatgaaatggtgtagatacagtggaaatggttttccttaaaaccatctctttaaagctgcctttctggtgagtactgttttatacttttatatattataattttatcttctaaaattaactgaaataggacactttgattaaagaggtgagcactctgaatttctacatctttggatattacttgaatcaagaatattagaaaattattttaccacctggcatttcccttttaatttgctagttcacttttttctgaccttcacttaacagactataaatacaaaaactttgaacacataaattatttcattttggtgagatggaataaatgtttaaaattagtatttaagaaagttcttaaacattttttttagttggcagccaaaagatttttcttagtgctttggagacattgcataggtgtaaaattaagataccagaacttcattctgttcttgttgaagctgttgttgtggtgattcatgagcagtaagctggagttagagtggaagaagggtttaccaaaattcttcctgcagactagttgcttacagggtttctttgagaggcttaaaaatttcaaaagtattatttaagccactctaaccctgcatgaaaaattggagttagaaatactgatttctgagaccacgtataccagtgaaaattagcttctgagtaaatttctaatttatgccctgctttatttagcctcgctatatgtaacacatggattattttttccctctagtttttaactatatcctagattaaaaccagcatatgctaagaatgtttttacattctgtttcctcctgtgatctttctgaaccaataataaacagtcaactgtgatgctttttagtatgaacaatgatagttttctaaaatctgaaaatcaatacctgagtatgtgatgtggcaatgcattcttctagataagcactaaacaaagtatggaccctcaatttatgtctttaagatttaaagtgaagtaaatttctaaggaactgtgtcctttcctagcaggaataaacagtgaaaatttggtaagtatttaacttgaagtgcatgtaatagtgatgagagtaagtagccaaatttccgtaatataaggtaatgtttaaaagtgagcaataattattgcatctcttttgcgacttcatgtagatgtgattaacattttttacaaatttgcctgcataaagattaaattggaacatacctta

SEQ ID NO: 201731 - DNA, 580 bp, Homo sapiens
  Payload ID: 19800
  Gene Name: zinc finger protein 207
  ENST ID: ENST00000579634
  CDS Start-End: 358-580
attttgtgtctgcttcctgtgggacgtggtggtagccgttgggttgggaaagtgagggatttttggcctcgtttctcctgcttcttttctcctcccttttactttgccggtagaacacagttatgggtcgcaagaagaagaagcagctgaagccgtggtgctggtatcctttgtcggtttgaagtcgaggcagtgtcatcattaggctgtctttgtgccttaacagtattgatcaggtattgtaatagagattttgatgatgagaagatccttattcagcaccaaaaagcaaagcattttaaatgccatatatgtcacaagaaattgtatacaggacctggcttagctattcattgcatgcaggtacataaagaaacaatagatgccgtaccaaatgcaatacctggaagaacagacatagagttggaaatatatggtatggaaggtattccagaaaaagacatggatgaaagacgacgacttcttgaacagaaaacacaagaaagtcaaaaaaagaagcaacaagatgattctgatgaatatgatgatgacgactctgcagcctcaacttcatttcagc

SEQ ID NO: 201732 - DNA, 4672 bp, Homo sapiens
  Payload ID: 19800
  Gene Name: zinc finger protein 207
  ENST ID: ENST00000577908
  CDS Start-End: 107-1588
ctgtgggacgtggtggtagccgttgggttgggaaagtgagggatttttggcctcgtttctcctgcttcttttctcctcccttttactttgccggtagaacacagttatgggtcgcaagaagaagaagcagctgaagccgtggtgctggtattgtaatagagattttgatgatgagaagatccttattcagcaccaaaaagcaaagcattttaaatgccatatatgtcacaagaaattgtatacaggacctggcttagctattcattgcatgcaggtacataaagaaacaatagatgccgtaccaaatgcaatacctggaagaacagacatagagttggaaatatatggtatggaaggtattccagaaaaagacatggatgaaagacgacgacttcttgaacagaaaacacaagaaagtcaaaaaaagaagcaacaagatgattctgatgaatatgatgatgacgactctgcagcctcaacttcatttcagccacagcctgttcaacctcagcaaggttatattcctccaatggcacagccaggactgccaccagtaccaggagcaccaggaatgcctccaggcatacctccattaatgccaggtgttcctcctctgatgccaggaatgccaccagttatgccaggcatgccacctggattgcatcatcagagaaaatacacccagtcattttgcggtgaaaacataatgatgccaatgggtggaatgatgccacctggaccaggaataccacctctgatgcctggaatgccaccaggtatgcccccacctgttccacgtcctggaattcctccaatgactcaagcacaggctgtttcagcgccaggtattcttaatagaccacctgcaccaacagcaactgtacctgccccacagcctccagttactaagcctcttttccccagtgctggacagatggggacacctgtcacaagctcaagtacagcttcatccaattcagaaagtctgtctgcatcttctaaagctctgtttcctagcacagcacaagctcaggcagctgtccaaggacctgttggtacagatttcaaacccttaaatagtacccctgcaacaactacagaacccccaaagcctacattccctgcttatacacagtctacagcttcaacaactagtacaacaaatagtactgcagctaaaccagcggcttcaataacaagtaagcctgctacacttacaacaactagtgcaaccagtaagttgatccatccagatgaggatatatccctggaagagagaagggcacagttacctaagtatcaacgtaatcttcctcggccaggacaggcccccatcggtaatccaccagttggaccaattggaggtatgatgccaccacagccaggcatcccacagcaacaaggaatgagacccccaatgccacctcatggtcagtatggtggtcatcatcaaggcatgccaggataccttcctggtgctatgcccccgtatgggcagggaccgccaatggtgcccccttaccagggtgggcctcctcgacctccgatgggaatgagacctcctgtaatgtcgcaagccctgccataggacaggctgaggctgagtctcagtgttgccctgttcagtctgaggcaaaatttcagcatttgctacttactggtagagaagaaaaatcccacagccctgccagtacaggttagtttaatctgtaagtacctgatgttcctatttttttcaaacatatccatataactcacacaaggaagaaagctgtgcggttacttaaatgttagtataactaataatagatccattggacactttaaacactcagtacttgggccaaagtagatctaggtttgctaaccccagttgtaataaaggtgtaatactgctcctttgttatctccttgtggttcaacctaagtagatacattgtacataaaaggaaaagacagtttcagttggctatgcccttgttgatagatgatatggagtccagggctttgggtccagggtcttttacttaagctatttcatggtggttctctcattcaccttttaactttttacattatgaatcaacctaagaaaaaaggcaagtttcctcacatctagaaatgataaatggtgtacagtcataagctagaatatgtttttataatgcttttttgttcttttagcaacacttgtaaatacaagtactcctctatttttgttctttttttgtaaactataacgtatcccgttggtgtaccagtgagttcattttactgtaaactaagaataacatacctttttaatactgaaagttgactactcatcaagaaatgtagctagattctttatgtaacacttttgaggggcagtggggacataatgggttgtggaaaatgtgttttaacatttttattttttttttattctacccgagttcattgttgtttgaaccatcctctaaagatttcctttaacctctaaatgttgtgcttttaggttgataacaaatgtaaagcactgaggagggaggaataaagcatacaagttaatttctaattttcgcaagcctgaaccatcctaatctgatagtaggatgtatggcttcttccttttcaccttgtgtgatgtttaatttgagacgatctagccataaaactagtaatcttgaattcctcttgagctggatggtgattagccattgtgaaaacagattatatggaaattgtgcatattgctaaattttaaaacatggatttatcaactgataataaaatatatcttacaagataaccacttgttttttaatgtaaaattgcacaagggcttaagtttcattgcctttcacagtttaatctgtatatgaaatggtgtagatacagtggaaatggttttccttaaaaccatctctttaaagctgcctttctggtgagtactgttttatacttttatatattataattttatcttctaaaattaactgaaataggacactttgattaaagaggtgagcactctgaatttctacatctttggatattacttgaatcaagaatattagaaaattattttaccacctggcatttcccttttaatttgctagttcacttttttctgaccttcacttaacagactataaatacaaaaactttgaacacataaattatttcattttggtgagatggaataaatgtttaaaattagtatttaagaaagttcttaaacattttttttagttggcagccaaaagatttttcttagtgctttggagacattgcataggtgtaaaattaagataccagaacttcattctgttcttgttgaagctgttgttgtggtgattcatgagcagtaagctggagttagagtggaagaagggtttaccaaaattcttcctgcagactagttgcttacagggtttctttgagaggcttaaaaatttcaaaagtattatttaagccactctaaccctgcatgaaaaattggagttagaaatactgatttctgagaccacgtataccagtgaaaattagcttctgagtaaatttctaatttatgccctgctttatttagcctcgctatatgtaacacatggattattttttccctctagtttttaactatatcctagattaaaaccagcatatgctaagaatgtttttacattctgtttcctcctgtgatctttctgaaccaataataaacagtcaactgtgatgctttttagtatgaacaatgatagttttctaaaatctgaaaatcaatacctgagtatgtgatgtggcaatgcattcttctagataagcactaaacaaagtatggaccctcaatttatgtctttaagatttaaagtgaagtaaatttctaaggaactgtgtcctttcctagcaggaataaacagtgaaaatttggtaagtatttaacttgaagtgcatgtaatagtgatgagagtaagtagccaaatttccgtaatataaggtaatgtttaaaagtgagcaataattattgcatctcttttgcgacttcatgtagatgtgattaacattttttacaaatttgcctgcataaagattaaattggaacataccttactcctttgtctggtttttttattttgtatggtgctttaaatactaattttatatttcaagctttttgcagggtagaaataagtggctgttaaagaaaatatcttcaagaaggattatttcagtgtccctttttaaaactcgatgatggctttcagtttatttaagtcttctgtttttcagctccagttaaaactgacaataggcagctatcaaaaatggaaaaaatcttgtgctctttctggaatattagaggaatcagttaataatagtaaagtggtattaacccaatacttgatttgcagtttttaaagcagtttttaaattgagagaaaaggggctgggcccagctgaggcgggtggatctcctgaggtcaggagtttgagaccagcctggccaacatagtgaaaccccgtctctactaaaaatacaaaaatcagccgggtgtggtgggacgtgcctgtaaccccagctactctggaggctgaggcaggaaaatcgcttgaacccagggggaggaggttgcagtgagccgagatggcgccgttgcactccagcttgggtgacagagcgagactccgtctc

SEQ ID NO: 201733 - DNA, 580 bp, Homo sapiens
  Payload ID: 19800
  Gene Name: zinc finger protein 207
  ENST ID: ENST00000578918
  CDS Start-End: 443-580
aatcttcaggaagcgttctcacagggcggagtttctgttacccaactttgtaggactaaaaagtgcctatcttattaggaaaactcttactacagtgtggtattaatgctttttctggaagcgttaatattctttacattaaaattgattttatttactgttttgtacgtaaaggcggcttgttacagtactgcgtttatgtaacagttttaaaaatagcttaaatacggttacgaattttgtaatgtgattttaggaaaatctgagtagtgaggcagtgtcatcattaggctgtctttgtgccttaacagtattgatcaggtattgtaatagagattttgatgatgagaagatccttattcagcaccaaaaagcaaagcattttaaatgccatatatgtcacaagaaattgtatacaggacctggcttagctattcattgcatgcaggtacataaagaaacaatagatgccgtaccaaatgcaatacctggaagaacagacatagagttggaaatatatggtatggaaggtattccagaaaaagacatggatgaaagacgacgacttcttgaacagaaa

SEQ ID NO: 201734 - DNA, 3992 bp, Homo sapiens
  Payload ID: 19801
  Gene Name: zinc finger protein 208
  Uniprot ID: O43345
  ENST ID: ENST00000397126
  CDS Start-End: 150-3992
cctttgtctctcgctgcagccggaggtcaaggtctcgtccttactgctgtgtgtcctctgctcctagagtcccagcctctgtggccctatgacctgcaggtattgggagatccacaactaagtcgccaggaccccctggaagcctagaaatgggatcattgacatttagggatgtggccatagaattctctctggaggagtggcaatgcctggacactgcacagcagaatttatatagaaatgtgatgttagagaactacagaaacctggtcttcctgggtattgctgcctttaagccagacctgatcatttttctggaggaaggaaaagagtcctggaatatgaagagacatgagatggtggaagaatccccagttatatgttctcattttgctcaagatctttggccagagcagggcatagaagattctttccaaaaagtgatattgagaaggtatgaaaaatgtggacatgagaatttacacttaaaaattggttataccaatgtggatgagtgtaaggtgcacaaagaaggttataataaacttaaccagagtttgacaactacacagagcaaagtatttcaacgtggcaaatatgcaaatgtctttcataaatgttcaaattcaaacagacataagataaggcatactggaaagaaacatttgcaatgtaaagaatacgtcagatcattttgcatgctttcacacctatctcaacataaaagaatttatactagagagaattcctacaaatgtgaagaaggtggcaaagcttttaactggtcctcaacccttacttattataagagtgctcatactggagagaaaccctacagatgtaaagaatgtggcaaagcctttagtaagttctcaatccttactaaacataaggtaattcatactggagagaaatcctacaaatgtgaagaatgtggcaaggcttttaaccaatctgcaatccttactaaacataagataattcatactggagagaaacccaacaaatgtgaagaatgtggcaaagcctttagtaaggtctcgactcttactacacataaggcaattcatgctggagagaagccctacaaatgtaaagaatgtggcaaagccttcagtaaggtctcaacccttattacacataaggcaattcatgctggagagaagccctacaaatgtaaagaatgtggcaaagcctttagtaagttctcaatccttactaaacataaggtaattcatactggagagaaaccctacaaatgtgaagaatgcggcaaagcctataagtggccctcaacccttagttatcataagaaaattcatactggagagaaaccctacaaatgtgaagaatgtggcaaaggttttagtatgttctcaatccttactaaacatgaggtcattcatactggagagaaaccctacaaatgtgaagaatgtggcaaagctttcaactggtcctcaaaccttatggaacataagaaaattcacactggagagacaccctacaaatgtgaagaatgtggcaaaggctttagtatgttctcaatccttactaaacataaggtaattcataatggagagaaaccctacaaatgtgaagaatgtgataaggcaactcatgctggagagaaaccctacaaatgtgaagaatgtggcaaagctttcaactggtcctcaaaccttatggaacataagagaattcatactggagagaaaccctacaaatgtgaagaatgtggcaaaagcttcagtacattctcaatccttactaaacataaggtaattcatactggagagaaaccctacaaatgtgaagaatgtggcaaagcctataagtggtcctcaacccttagttatcataagaaaattcatactgtagagaaaccctacaaatgtgaagaatgtggcaaagcttttaaccaatctgcaattcttattaaacataagagaattcatactggtgagaaaccctacaaatgtgaagaatgtggcaaaacctttagtaaggtctcaacccttactacacataaggcaattcatgctggagagaagccctacaaatgtaaagaatgtggcaaaacctttattaaggtctcaacccttactacacataaggcaattcatgctggagagaagccctacaaatgtaaagaatgtggcaaagcctttagtaagttctcaatccttactaaacataaggtaattcatactggagagaaaccctacaaatgtgaagaatgtggcaaagctttcaactggtcctcaaaccttatggaacataagagaattcatactggagagaaaccctacaaatgtgaagaatgtggcaaaagctttagtacattctcagtccttactaaacataaggtaattcatactggagagaaaccctacaaatgtgaagaatgtggcaaagcctataagtggtcctcaacccttagttatcataagaaaattcatactgtagagaaaccctacaaatgtgaagaatgtggcaaagcttttaaccgatctgcaatccttattaaacataagagaattcatactgatgagaaaccctacaaatgtgaagaatgtggcaaaacctttagtaaggtctcaacccttactacacataaggcaattcatgctggagaaaagccctacaaatgtaaagaatgtggcaaagcctttagtaagttctcaatccttactaaacataaggtaattcatactggagagaaaccctacaaatgtgaagaatgtggcaaagcctataaatggccctcaacccttagttatcataagaaaattcatactggagagaaaccctacaaatgtgaagaatgtggcaaaggttttagtatgttctccatccttactaaacatgaggtaattcatactggagagaaaccctacaaatgtgaagaatgtggcaaagccttcagctggttgtcagtctttagtaaacataagaaaactcatgctggagagaaattctacaaatgtgaagcatgtggcaaagcctataagtcatcctcaacccttagttatcataagaaaattcatactgaagagaaaccttacaaatatgaagaatgtggcaaaggctttagtacattctcaatccttactaaacataaggtaattcatactggagagaaaccctacaaatgtgaagaatgtggcaaagctttcaactggtcatcaaaccttatggaacataagaaaattcacactggagagacaccctacaaatgtgaagaatgtgacaaagccttcagctggccctcaagccttactgaacataaggcaactcatgctggagaaaaaccctacaaatgtgaagaatgtggcaaagccttcagctggccctcaagacttactgaacataaggcaactcatgctggagaggaaccctacaaatgtgaagaatgtggcaaagctttcaactggtcctcaaaccttatggaacataagagaattcatactggagagaaaccctacaaatgtgaagaatgtggcaaaagctttagtacgttctcaatccttactaaacataaggtaattcatactggagagaaaccctacaaatgtgaagaatgtggcaaagcctataagtggtcctcaacccttagttatcataagaaaattcatactgtagagaaaccctacaaatgtgaagaatgtggcaaaggctttgttatgttctcaatccttgcaaaacataaggtaattcatactggagagaaactctacaaatgtgaagaatgtggcaaagcctataagtggccctcaacccttagatatcacaagaaaattcatactggagagaaaccctacaaatgtgaagaatgtggcaaagcctttagtacgttctcaatcctcactaaacataaggtaattcatactggagagaaaccctacaaatgtgaagaatgtggcaaagccttcagctggttatcagtcttcagtaaacataagaaaattcatactggagagaaactctag

SEQ ID NO: 201735 - DNA, 740 bp, Homo sapiens
  Payload ID: 19801
  Gene Name: zinc finger protein 208
  ENST ID: ENST00000599916
  CDS Start-End: 156-539
gtcggtcctttgtctctcgctgcagccggaggtcaaggtctcgtccttactgctgtgtgtcctctgctcctagagtcccagcctctgtggccctatgacctgcaggtattgggagatccacaactaagtcgccaggaccccctggaagcctagaaatgggatcattgacatttagggatgtggccatagaattctctctggaggagtggcaatgcctggacactgcacagcagaatttatatagaaatgtgatgttagagaactacagaaacctggtcttcctgggtattgctgcctttaagccagacctgatcatttttctggaggaaggaaaagagtcctggaatatgaagagacatgagatggtggaagaatccccagttatatgttctcattttgctcaagatctttggccagagcagggcatagaagattctttccaaaaagtgatattgagaagatacaagattcatcatcatgcctgtgagctgggtccaataatgaatcaccatcctacttgtggccaaatgcatatatgacagttacaactctaactgcagactgcatcggcatgtaaaatttaggtcaccagtgggctctctccatgtttgaatgtggtgattctaatggtcagcgaggtgtgcataggagagtcacaatctcatcttcaggtgggccttgtatcagcactctctctactaccttaagactgtatgacacatgggtgagctaaaaatgtt

SEQ ID NO: 201736 - DNA, 2027 bp, Homo sapiens
  Payload ID: 19801
  Gene Name: zinc finger protein 208
  ENST ID: ENST00000601773
  CDS Start-End: 150-488
cctttgtctctcgctgcagccggaggtcaaggtctcgtccttactgctgtgtgtcctctgctcctagagtcccagcctctgtggccctatgacctgcaggtattgggagatccacaactaagtcgccaggaccccctggaagcctagaaatgggatcattgacatttagggatgtggccatagaattctctctggaggagtggcaatgcctggacactgcacagcagaatttatatagaaatgtgatgttagagaactacagaaacctggtcttcctgggtattgctgcctttaagccagacctgatcatttttctggaggaaggaaaagagtcctggaatatgaagagacatgagatggtggaagaatccccagggatggtgggatccagtggaccagaatcgtcagcaccttaccatgttcactgctgtcctttcgttctgtcactaagattagtttccgagactcatcaactctttctatcatgatgtgaactgttttgcactgcgttagcgtctgcctttggtttctgctaattttctttgactttcatttttcttgtccttctctggtgtttgctttgctgctccactttgaggagtttgggcagcttcaccctcagccgctccagcagttcctccatttggctgaagctctccgttcttctgttcttggcgtctgacatttgtcagcaaggcctggtttacagggaccacggctaccgcctcctctgcggggcacctccttcacttccggagggcgccagttccagtcgtgacccagctgagcacagcaggaaccgccgcagcagccggagcgcccacgcccacggtcgcccagcccggggatgcctcggctcaaagccggggtcgcggctcagcttagtgcgcagaaatccgaggtcaaccagagcatttcccacagctggccgagccctcctcgacctgcggggccagtttctcccactggctttctgctgccacctccccttccatcagagggacgctcaggattgtgcaggggcccgtagacaccgtgaggagtccagggaagtgaggaggggctgggccgggcaggctcaagcccagcgcacggccgcacccctcacgcctgagcagagatcagccactgccaccgcggggaggacagagggacccaggatcccccagccagcctccctctgcgtcaggagaggagggaactatttccaaaatatatatagagagagagagtagaactggcatatctgacccaatcgagttttcagtttttcttttctttttcgccttttcctctcaaattatgctcgcctaaagtgagagttcatttttcattctcacgtggcaatttaattttttaatggtcacaaacttagagactaaaatttttactctattttacctaagaatgatgaggtaacatcaaacttttaatagtgctttctgaattttacagtttattaccttagatttgattctatcaactaaacaataataactaaaaaagtcttggtttgcatagcttgaccatttacaaaggggatgtatttattcatttaaatgataaatgtgtgttgagcacacacgttgtgccatacttcttgctagctttaggagataaaatggagaaaaaaaatattgctctttactcttataaaactttcagtcttgctacataaaattggccaggttgttctcgaactccccacctcgtgatctgccacctcagcctcccaaagtggtgggattacaggtatgagccaccccaccgagcctctcctagaagttttaaatcctcgatatacatgaacaatttttgtgttagttgctttgcaaggatccaatctacctaggtagaaccaatagtttagctattagtttattgactagttctgcttttccagtataattgtgtaactgatttctcattttaacctgttggctgaaaccatggatgcaatgtttaataaaaatcttgaacaccaacataattattatgtttatgacattaaaagacaaactttcagt

SEQ ID NO: 201737 - DNA, 536 bp, Homo sapiens
  Payload ID: 19801
  Gene Name: zinc finger protein 208
  ENST ID: ENST00000601993
  CDS Start-End: 422-536
cctttgtctctcgctgcagccggaggtcaaggtctcgtccttactgctgtgtgtcctctgctcctagagtcccagcctctgtggccctatgacctgcaggtattgggagatccacaactaagtcgccaggaccccctggaagcctagaaatgatggagtttcactcttgttgcccaagctggagtgcaatggcatgatctcggctaaccgcaacctctgcctcgcgggttcaagcgattctcctgcctcagcctcctgagtagctaggattacaggcatgcgccaccatgcctggctaattttgtgtttttagtggagacagggtttctccatgtttgtcaggctggtctcgaactcccgacctcaggtgatctgcctgcctcagcctcccaaagtgctaggattacaggcataagccaccatgcctggcacacaattaattctgtatgatggatcattgacatttagggatgtggccatagaattctctctggaggagtggcaatgcctggacactgcacagcagaatttatata

SEQ ID NO: 201738 - DNA, 781 bp, Homo sapiens
  Payload ID: 19801
  Gene Name: zinc finger protein 208
  ENST ID: ENST00000597040
  CDS Start-End: 316-471
ggtcaaggtctcgtccttactgctgtgtgtcctctgctcctagagtcccagcctctgtggccctatgacctgcaggtattgggagatccacaactaagtcgccaggaccccctggaagcctagaaatgggacggggtttcaccatgttggtcaggctggtctcgaactcctgatttcaagtgattcacctgcttcggcctcccaaagtgctgggattacaggggatcattgacatttagggatgtggccatagaattctctctggaggagtggcaatgcctggacactgcacagcagaatttatatagaaatgtgatgttagagaactacagaaacctggtcttcctgggtattgctgcctttaagccagacctgatcatttttctggaggaaggaaaagagtcctggaatatgaagagacatgagatggtggaagaatccccaggggcatcttcggtcttacacttttaaaatttctaagaattcttctttcccttcagtaatcttccttcaagtttacagtgacagccaaagtactgttcatggcatacaagagagtgcacaatctttttgtttgtttgtttttgtggacacacagatatctgcatgattttaagatactccatgttaaactatcttataagttctctctttccatcatctctgaaatgtgtgagagtagtagtttctgtatctttggggtttttttgttcatttttctgtacatttcatcctgtttttattactgtagtcttgaaatatagtttgaaattataaagta

SEQ ID NO: 201739 - DNA, 710 bp, Homo sapiens
  Payload ID: 19801
  Gene Name: zinc finger protein 208
  ENST ID: ENST00000599723
  CDS Start-End: 1-230
gatcattgacatttagggatgtggccatagaattctctctggaggagtggcaatgcctggacactgcacagcagaatttatatagaaatgtgatgttagagaactacagaaacctggtcttcctgggtattgctgcctttaagccagacctgatcatttttctggaggaaggaaaagagtcctggaatatgaagagacatgagatggtggaagaatccccaggtaggtgagagtgaatacagacaacatggatgagaggtcgaaagtcaaggaggaagccagtccttaaagtgattctggaagctgtgttccaaaagaagtagtttctggagagactaatttttatttttattctttaattttctctcacacaggggcatcttcggtcttacacttttaaaatttctaagaattcttctttcccttcagtaatcttccttcaagtttacagtgacagccaaagtactgttcatggcatacaagagagtgcacaatctttttgtttgtttgtttttgtggacacacagatatctgcatgattttaagatactccatgttaaactatcttataagttctctctttccatcatctctgaaatgtgtgagagtagtagtttctgtatctttggggtttttttgttcatttttctgtacatttcatcctgtttttattactgtagtcttgaaatatagtttgaaattataaagta

SEQ ID NO: 201740 - DNA, 3653 bp, Homo sapiens
  Payload ID: 19801
  Gene Name: zinc finger protein 208
  ENST ID: ENST00000609966
  CDS Start-End: 150-3653
cctttgtctctcgctgcagccggaggtcaaggtctcgtccttactgctgtgtgtcctctgctcctagagtcccagcctctgtggccctatgacctgcaggtattgggagatccacaactaagtcgccaggaccccctggaagcctagaaatgggatcattgacatttagggatgtggccatagaattctctctggaggagtggcaatgcctggacactgcacagcagaatttatatagaaatgtgatgttagagaactacagaaacctggtcttcctgggtattgctgcctttaagccagacctgatcatttttctggaggaaggaaaagagtcctggaatatgaagagacatgagatggtggaagaatccccagttatatgttctcattttgctcaagatctttggccagagcagggcatagaagattctttccaaaaagtgatattgagaaggtatgaaaaatgtggacatgagaatttacacttaaaaattggttataccaatgtggatgagtgtaaggtgcacaaagaaggttataataaacttaaccagagtttgacaactacacagagcaaagtatttcaacgtggcaaatatgcaaatgtctttcataaatgttcaaattcaaacagacataagataaggcatactggaaagaaacatttgcaatgtaaagaatacgtcagatcattttgcatgctttcacacctatctcaacataaaagaatttatactagagagaattcctacaaatgtgaagaaggtggcaaagcttttaactggtcctcaacccttacttattataagagtgctcatactggagagaaaccctacagatgtaaagaatgtggcaaagcctttagtaagttctcaatccttactaaacataaggtaattcatactggagagaaatcctacaaatgtgaagaatgtggcaaggcttttaaccaatctgcaatccttactaaacataagataattcatactggagagaaacccaacaaatgtgaagaatgtggcaaagcctttagtaaggtctcgactcttactacacataaggcaattcatgctggagagaagccctacaaatgtaaagaatgtggcaaagccttcagtaaggtctcaacccttattacacataaggcaattcatgctggagagaagccctacaaatgtaaagaatgtggcaaagcctttagtaagttctcaatccttactaaacataaggtaattcatactggagagaaaccctacaaatgtgaagaatgcggcaaagcctataagtggccctcaacccttagttatcataagaaaattcatactggagagaaaccctacaaatgtgaagaatgtggcaaaggttttagtatgttctcaatccttactaaacatgaggtcattcatactggagagaaaccctacaaatgtgaagaatgtggcaaagctttcaactggtcctcaaaccttatggaacataagaaaattcacactggagagacaccctacaaatgtgaagaatgtggcaaaggctttaagtggtcctcaacccttagttatcataagaaaattcatactgtagagaaaccctacaaatgtgaagaatgtggcaaagcttttaaccaatctgcaattcttattaaacataagagaattcatactggtgagaaaccctacaaatgtgaagaatgtggcaaaacctttagtaaggtctcaacccttactacacataaggcaattcatgctggagagaagccctacaaatgtaaagaatgtggcaaaacctttattaaggtctcaacccttactacacataaggcaattcatgctggagagaagccctacaaatgtaaagaatgtggcaaagcctttagtaagttctcaatccttactaaacataaggtaattcatactggagagaaaccctacaaatgtgaagaatgtggcaaagctttcaactggtcctcaaaccttatggaacataagagaattcatactggagagaaaccctacaaatgtgaagaatgtggcaaaagctttagtacattctcagtccttactaaacataaggtaattcatactggagagaaaccctacaaatgtgaagaatgtggcaaagcctataagtggtcctcaacccttagttatcataagaaaattcatactgtagagaaaccctacaaatgtgaagaatgtggcaaagcttttaaccgatctgcaatccttattaaacataagagaattcatactgatgagaaaccctacaaatgtgaagaatgtggcaaaacctttagtaaggtctcaacccttactacacataaggcaattcatgctggagaaaagccctacaaatgtaaagaatgtggcaaagcctttagtaagttctcaatccttactaaacataaggtaattcatactggagagaaaccctacaaatgtgaagaatgtggcaaagcctataaatggccctcaacccttagttatcataagaaaattcatactggagagaaaccctacaaatgtgaagaatgtggcaaaggttttagtatgttctccatccttactaaacatgaggtaattcatactggagagaaaccctacaaatgtgaagaatgtggcaaagccttcagctggttgtcagtctttagtaaacataagaaaactcatgctggagagaaattctacaaatgtgaagcatgtggcaaagcctataatacattctcaatccttactaaacataaggtaattcatactggagagaaaccctacaaatgtgaagaatgtggcaaagctttcaactggtcatcaaaccttatggaacataagaaaattcacactggagagacaccctacaaatgtgaagaatgtgacaaagccttcagctggccctcaagccttactgaacataaggcaactcatgctggagaaaaaccctacaaatgtgaagaatgtggcaaagccttcagctggccctcaagacttactgaacataaggcaactcatgctggagaggaaccctacaaatgtgaagaatgtggcaaagctttcaactggtcctcaaaccttatggaacataagagaattcatactggagagaaaccctacaaatgtgaagaatgtggcaaaagctttagtacgttctcaatccttactaaacataaggtaattcatactggagagaaaccctacaaatgtgaagaatgtggcaaagcctataagtggtcctcaacccttagttatcataagaaaattcatactgtagagaaaccctacaaatgtgaagaatgtggcaaaggctttgttatgttctcaatccttgcaaaacataaggtaattcatactggagagaaactctacaaatgtgaagaatgtggcaaagcctataagtggccctcaacccttagatatcacaagaaaattcatactggagagaaaccctacaaatgtgaagaatgtggcaaagcctttagtacgttctcaatcctcactaaacataaggtaattcatactggagagaaaccctacaaatgtgaagaatgtggcaaagccttcagctggttatcagtcttcagtaaacataagaaaattcatactggagttcccaaccctcctacacataagaaaattcatgctggagagaaactctacaaatga

SEQ ID NO: 201741 - DNA, 2440 bp, Homo sapiens
  Payload ID: 19802
  Gene Name: zinc finger protein 211
  Uniprot ID: Q13398
  ENST ID: ENST00000240731
  CDS Start-End: 120-1853
ctgtctgtcagccgctttggtacgctgcatcgggatcgaagtgacggaccgtgaaggcgcgagagtcaggtctgagggtcgggggcagagccgcccgcgaggccggcctggggatagcgatgctcgggttccccccgggtcgcccgcagctcccggtccagctccgcccacagactcggatggcgaccgcactgagggacccggcttcggttcccatagctacagaggtgcttttcaaacttacacagggaagtgtgacctttgaagatgtggccgtgtacttctcctgggaggaatgggatctccttgatgaggctcagaaacacctgtacttcgatgtgatgctggagaactttgcacttacgtcctccctgggttgttggtgtggagtggaacatgaggaaacaccttctgaacagagaatttctggagaaagagtgccacagttcaggacttccaaagaaggttcatcttcccagaatgccgactcctgtgaaatatgttgcctggtcttgagagatattttgcacttggctgaacaccaaggaacaaactgcgggcagaaactacacacatgtggaaaacaattctacatcagtgcaaatcttcaacagcaccagaggcagcacattacagaggcacctttcagaagttatgtggacactgcctcgtttacacagagttgcatagtccatgtgtcggagaaaccctttacctgcagggagatcaggaaagacttcctggccaacatgaggtttctccatcaagacgccactcaaacaggggagaagccaaataacagtaacaagtgtgcggtggccttttacagtggaaaaagtcatcacaactggggaaaatgcagtaaagcctttagccacatagacacacttgttcaggaccagagaatcctcactagagaaggactttttgagtgcagtaaatgtgggaaagcatgtacgcgaagatgtaacctcattcagcaccagaaagtccacagtgaagaaaggccttatgaatgcaatgaatgtggaaaattctttacctactactccagtttcattatacatcagagagttcatactggagaaaggccttatgcgtgccctgaatgtgggaaatcgtttagtcagatatacagcctcaatagccataggaaagttcacactggagaaaggccttatgaatgtggggaatgtgggaaatcttttagccaaaggtccaacctcatgcagcatcgcagagttcacactggagaaaggccttatgaatgcagcgaatgtgggaaatcttttagccaaaactttagcctgatctaccaccagagagttcacactggagaaagacctcatgagtgcaatgaatgtggaaaatcctttagccgaagctccagcctcattcaccaccggagacttcacactggagaaagaccctatgagtgcagtaaatgtgggaagtcatttaagcaaagctccagcttcagttcacatcggaaagtccacacaggggaaaggccttatgtgtgtggggaatgtgggaaatcctttagccatagctccaaccttaagaaccaccagagagttcacactggagaaagacctgttgagtgcagtgaatgtagcaaatcctttagctgtaaatctaacctcattaaacacctgagagttcacactggagaaaggccttatgagtgcagtgaatgtgggaaatcctttagccaaagttctagcctcattcaacaccgcagagttcacacgggaaaaaggccttatcagtgcagtcaatgtgggaaatcctttggctgcaaatctgtcctcattcaacaccagagagttcacattggagaaaagccttagctgtactgagaatatgcaatttccttttagtgtaattatactgaaggagtacacctgtgagagagacaagtacctgatttggaagccccaacatctaaggatatacagtgggcggattccccttaagttccaggtatgtgttacactttctaacatgccatttagaaagtgttagactttctcacctgccatttatggctcttgccgtttatgtcactgacagtttctgaggcagaagccgtatcatgtctaccacctgtgaggtccacacagtgtgtatcatttacctcctgaacctgctcaaggaagcagacctctgcttctccccatttgctagaagaaatcatgaatagtctgagtcttcctctctgacaagttagggcatggacttgacccagctttgtgccagagaacccaatatgagtgttgttggcagcttgccaagaaggactgtctttttcaagacatactggtttcatgtgacacctccatggatttttttccagcctctaagtcaccaacttgggaactgcttgtctcacgttgctttgttttttacaataataaaagcattattatttaagcta

SEQ ID NO: 201742 - DNA, 1959 bp, Homo sapiens
  Payload ID: 19802
  Gene Name: zinc finger protein 211
  Uniprot ID: Q13398
  ENST ID: ENST00000254182
  CDS Start-End: 194-1861
tcttcgcagcggtcattttggctgccctcccggaggtccgttctgtctgtcagccgctttggttcccatagctacagaggtgcttttcaaacttacacagggaagtgtgacctttgaagatgtggccgtgtacttctcctgggaggaatgggatctccttgatgaggctcagaaacacctgtacttcgatgtgatgctggagaactttgcacttacgtcctccctgggacttatatcatcctggtctcatgtagttgctcaactagggctaggggaagtgccctctgttcttcacaggatgttcatgactccagcctcagcaagatgggatcagagagggcctggcctacatgaatggcacttgggaaaaggcatgtcatcaggttgttggtgtggagtggaacatgaggaaacaccttctgaacagagaatttctggagaaagagtgccacagttcaggacttccaaagaaggttcatcttcccagaatgccgactcctgtgaaatatgttgcctggtcttgagagatattttgcacttggctgaacaccaaggaacaaactgcgggcagaaactacacacatgtggaaaacaattctacatcagtgcaaatcttcaacagcaccagaggcagcacattacagaggcacctttcagaagttatgtggacactgcctcgtttacacagagttgcatagtccatgtgtcggagaaaccctttacctgcagggagatcaggaaagacttcctggccaacatgaggtttctccatcaagacgccactcaaacaggggagaagccaaataacagtaacaagtgtgcggtggccttttacagtggaaaaagtcatcacaactggggaaaatgcagtaaagcctttagccacatagacacacttgttcaggaccagagaatcctcactagagaaggactttttgagtgcagtaaatgtgggaaagcatgtacgcgaagatgtaacctcattcagcaccagaaagtccacagtgaagaaaggccttatgaatgcaatgaatgtggaaaattctttacctactactccagtttcattatacatcagagagttcatactggagaaaggccttatgcgtgccctgaatgtgggaaatcgtttagtcagatatacagcctcaatagccataggaaagttcacactggagaaaggccttatgaatgtggggaatgtgggaaatcttttagccaaaggtccaacctcatgcagcatcgcagagttcacactggagaaaggccttatgaatgcagcgaatgtgggaaatcttttagccaaaactttagcctgatctaccaccagagagttcacactggagaaagacctcatgagtgcaatgaatgtggaaaatcctttagccgaagctccagcctcattcaccaccggagacttcacactggagaaagaccctatgagtgcagtaaatgtgggaagtcatttaagcaaagctccagcttcagttcacatcggaaagtccacacaggggaaaggccttatgtgtgtggggaatgtgggaaatcctttagccatagctccaaccttaagaaccaccagagagttcacactggagaaagacctgttgagtgcagtgaatgtagcaaatcctttagctgtaaatctaacctcattaaacacctgagagttcacactggagaaaggccttatgagtgcagtgaatgtgggaaatcctttagccaaagttctagcctcattcaacaccgcagagttcacacgggaaaaaggccttatcagtgcagtcaatgtgggaaatcctttggctgcaaatctgtcctcattcaacaccagagagttcacattggagaaaagccttagctgtactgagaatatgcaatttccttttagtgtaattatactgaaggagtacacctgtgagagagacaagtacctgatttggaagccccaacatctaa

SEQ ID NO: 201743 - DNA, 2577 bp, Homo sapiens
  Payload ID: 19802
  Gene Name: zinc finger protein 211
  Uniprot ID: Q13398
  ENST ID: ENST00000299871
  CDS Start-End: 132-2021
cggaggtccgttctgtctgtcagccgctttggtacgctgcatcgggatcgaagtgacggaccgtgaaggcgcgagagtcaggtctgagggtcgggggcagagccgcccgcgaggccggcctggggatagcgatgctcgggttccccccgggtcgcccgcagctcccggtccagctccgcccacagactcggatggcgaccgcactgagggacccggcttcggttcccatagctacagaggtgcttttcaaacttacacagggaagtgtgacctttgaagatgtggccgtgtacttctcctgggaggaatgggatctccttgatgaggctcagaaacacctgtacttcgatgtgatgctggagaactttgcacttacgtcctccctgggacttatatcatcctggtctcatgtagttgctcaactagggctaggggaagtgccctctgttcttcacaggatgttcatgactccagcctcagcaagatgggatcagagagggcctggcctacatgaatggcacttgggaaaaggcatgtcatcaggttgttggtgtggagtggaacatgaggaaacaccttctgaacagagaatttctggagaaagagtgccacagttcaggacttccaaagaaggttcatcttcccagaatgccgactcctgtgaaatatgttgcctggtcttgagagatattttgcacttggctgaacaccaaggaacaaactgcgggcagaaactacacacatgtggaaaacaattctacatcagtgcaaatcttcaacagcaccagaggcagcacattacagaggcacctttcagaagttatgtggacactgcctcgtttacacagagttgcatagtccatgtgtcggagaaaccctttacctgcagggagatcaggaaagacttcctggccaacatgaggtttctccatcaagacgccactcaaacaggggagaagccaaataacagtaacaagtgtgcggtggccttttacagtggaaaaagtcatcacaactggggaaaatgcagtaaagcctttagccacatagacacacttgttcaggaccagagaatcctcactagagaaggactttttgagtgcagtaaatgtgggaaagcatgtacgcgaagatgtaacctcattcagcaccagaaagtccacagtgaagaaaggccttatgaatgcaatgaatgtggaaaattctttacctactactccagtttcattatacatcagagagttcatactggagaaaggccttatgcgtgccctgaatgtgggaaatcgtttagtcagatatacagcctcaatagccataggaaagttcacactggagaaaggccttatgaatgtggggaatgtgggaaatcttttagccaaaggtccaacctcatgcagcatcgcagagttcacactggagaaaggccttatgaatgcagcgaatgtgggaaatcttttagccaaaactttagcctgatctaccaccagagagttcacactggagaaagacctcatgagtgcaatgaatgtggaaaatcctttagccgaagctccagcctcattcaccaccggagacttcacactggagaaagaccctatgagtgcagtaaatgtgggaagtcatttaagcaaagctccagcttcagttcacatcggaaagtccacacaggggaaaggccttatgtgtgtggggaatgtgggaaatcctttagccatagctccaaccttaagaaccaccagagagttcacactggagaaagacctgttgagtgcagtgaatgtagcaaatcctttagctgtaaatctaacctcattaaacacctgagagttcacactggagaaaggccttatgagtgcagtgaatgtgggaaatcctttagccaaagttctagcctcattcaacaccgcagagttcacacgggaaaaaggccttatcagtgcagtcaatgtgggaaatcctttggctgcaaatctgtcctcattcaacaccagagagttcacattggagaaaagccttagctgtactgagaatatgcaatttccttttagtgtaattatactgaaggagtacacctgtgagagagacaagtacctgatttggaagccccaacatctaaggatatacagtgggcggattccccttaagttccaggtatgtgttacactttctaacatgccatttagaaagtgttagactttctcacctgccatttatggctcttgccgtttatgtcactgacagtttctgaggcagaagccgtatcatgtctaccacctgtgaggtccacacagtgtgtatcatttacctcctgaacctgctcaaggaagcagacctctgcttctccccatttgctagaagaaatcatgaatagtctgagtcttcctctctgacaagttagggcatggacttgacccagctttgtgccagagaacccaatatgagtgttgttggcagcttgccaagaaggactgtctttttcaagacatactggtttcatgtgacacctccatggatttttttccagcctctaagtcaccaacttgggaactgcttgtctcacgttgctttgttttt

SEQ ID NO: 201744 - DNA, 2472 bp, Homo sapiens
  Payload ID: 19802
  Gene Name: zinc finger protein 211
  Uniprot ID: Q13398
  ENST ID: ENST00000347302
  CDS Start-End: 180-1874
agggcgggacttgtggcgtcttcgcagcggtcattttggctgccctcccggaggtccgttctgtctgtcagccgctttggtacgctgcatcgggatcgaagtgacggaccgtgaaggcgcgagagtcaggtctgagggtcgggggcagagccgcccgcgaggccggcctggggatagcgatgctcgggttccccccgggtcgcccgcagctcccggtccagctccgcccacagactcggatggcgaccgcactgagggacccggcttcgggaagtgtgacctttgaagatgtggccgtgtacttctcctgggaggaatgggatctccttgatgaggctcagaaacacctgtacttcgatgtgatgctggagaactttgcacttacgtcctccctgggttgttggtgtggagtggaacatgaggaaacaccttctgaacagagaatttctggagaaagagtgccacagttcaggacttccaaagaaggttcatcttcccagaatgccgactcctgtgaaatatgttgcctggtcttgagagatattttgcacttggctgaacaccaaggaacaaactgcgggcagaaactacacacatgtggaaaacaattctacatcagtgcaaatcttcaacagcaccagaggcagcacattacagaggcacctttcagaagttatgtggacactgcctcgtttacacagagttgcatagtccatgtgtcggagaaaccctttacctgcagggagatcaggaaagacttcctggccaacatgaggtttctccatcaagacgccactcaaacaggggagaagccaaataacagtaacaagtgtgcggtggccttttacagtggaaaaagtcatcacaactggggaaaatgcagtaaagcctttagccacatagacacacttgttcaggaccagagaatcctcactagagaaggactttttgagtgcagtaaatgtgggaaagcatgtacgcgaagatgtaacctcattcagcaccagaaagtccacagtgaagaaaggccttatgaatgcaatgaatgtggaaaattctttacctactactccagtttcattatacatcagagagttcatactggagaaaggccttatgcgtgccctgaatgtgggaaatcgtttagtcagatatacagcctcaatagccataggaaagttcacactggagaaaggccttatgaatgtggggaatgtgggaaatcttttagccaaaggtccaacctcatgcagcatcgcagagttcacactggagaaaggccttatgaatgcagcgaatgtgggaaatcttttagccaaaactttagcctgatctaccaccagagagttcacactggagaaagacctcatgagtgcaatgaatgtggaaaatcctttagccgaagctccagcctcattcaccaccggagacttcacactggagaaagaccctatgagtgcagtaaatgtgggaagtcatttaagcaaagctccagcttcagttcacatcggaaagtccacacaggggaaaggccttatgtgtgtggggaatgtgggaaatcctttagccatagctccaaccttaagaaccaccagagagttcacactggagaaagacctgttgagtgcagtgaatgtagcaaatcctttagctgtaaatctaacctcattaaacacctgagagttcacactggagaaaggccttatgagtgcagtgaatgtgggaaatcctttagccaaagttctagcctcattcaacaccgcagagttcacacgggaaaaaggccttatcagtgcagtcaatgtgggaaatcctttggctgcaaatctgtcctcattcaacaccagagagttcacattggagaaaagccttagctgtactgagaatatgcaatttccttttagtgtaattatactgaaggagtacacctgtgagagagacaagtacctgatttggaagccccaacatctaaggatatacagtgggcggattccccttaagttccaggtatgtgttacactttctaacatgccatttagaaagtgttagactttctcacctgccatttatggctcttgccgtttatgtcactgacagtttctgaggcagaagccgtatcatgtctaccacctgtgaggtccacacagtgtgtatcatttacctcctgaacctgctcaaggaagcagacctctgcttctccccatttgctagaagaaatcatgaatagtctgagtcttcctctctgacaagttagggcatggacttgacccagctttgtgccagagaacccaatatgagtgttgttggcagcttgccaagaaggactgtctttttcaagacatactggtttcatgtgacacctccatggatttttttccagcctctaagtcaccaacttgggaactgcttgtctcacgttgctttgttttttacaataataaaagcattattatttaagctacctttatcttg

SEQ ID NO: 201745 - DNA, 2239 bp, Homo sapiens
  Payload ID: 19802
  Gene Name: zinc finger protein 211
  Uniprot ID: Q13398
  ENST ID: ENST00000391703
  CDS Start-End: 142-1653
cattttggctgccctcccggaggtccgttctgtctgtcagccgctttgggaagtgtgacctttgaagatgtggccgtgtacttctcctgggaggaatgggatctccttgatgaggctcagaaacacctgtacttcgatgtgatgctggagaactttgcacttacgtcctccctgggttgttggtgtggagtggaacatgaggaaacaccttctgaacagagaatttctggagaaagagtgccacagttcaggacttccaaagaaggttcatcttcccagaatgccgactcctgtgaaatatgttgcctggtcttgagagatattttgcacttggctgaacaccaaggaacaaactgcgggcagaaactacacacatgtggaaaacaattctacatcagtgcaaatcttcaacagcaccagaggcagcacattacagaggcacctttcagaagttatgtggacactgcctcgtttacacagagttgcatagtccatgtgtcggagaaaccctttacctgcagggagatcaggaaagacttcctggccaacatgaggtttctccatcaagacgccactcaaacaggggagaagccaaataacagtaacaagtgtgcggtggccttttacagtggaaaaagtcatcacaactggggaaaatgcagtaaagcctttagccacatagacacacttgttcaggaccagagaatcctcactagagaaggactttttgagtgcagtaaatgtgggaaagcatgtacgcgaagatgtaacctcattcagcaccagaaagtccacagtgaagaaaggccttatgaatgcaatgaatgtggaaaattctttacctactactccagtttcattatacatcagagagttcatactggagaaaggccttatgcgtgccctgaatgtgggaaatcgtttagtcagatatacagcctcaatagccataggaaagttcacactggagaaaggccttatgaatgtggggaatgtgggaaatcttttagccaaaggtccaacctcatgcagcatcgcagagttcacactggagaaaggccttatgaatgcagcgaatgtgggaaatcttttagccaaaactttagcctgatctaccaccagagagttcacactggagaaagacctcatgagtgcaatgaatgtggaaaatcctttagccgaagctccagcctcattcaccaccggagacttcacactggagaaagaccctatgagtgcagtaaatgtgggaagtcatttaagcaaagctccagcttcagttcacatcggaaagtccacacaggggaaaggccttatgtgtgtggggaatgtgggaaatcctttagccatagctccaaccttaagaaccaccagagagttcacactggagaaagacctgttgagtgcagtgaatgtagcaaatcctttagctgtaaatctaacctcattaaacacctgagagttcacactggagaaaggccttatgagtgcagtgaatgtgggaaatcctttagccaaagttctagcctcattcaacaccgcagagttcacacgggaaaaaggccttatcagtgcagtcaatgtgggaaatcctttggctgcaaatctgtcctcattcaacaccagagagttcacattggagaaaagccttagctgtactgagaatatgcaatttccttttagtgtaattatactgaaggagtacacctgtgagagagacaagtacctgatttggaagccccaacatctaaggatatacagtgggcggattccccttaagttccaggtatgtgttacactttctaacatgccatttagaaagtgttagactttctcacctgccatttatggctcttgccgtttatgtcactgacagtttctgaggcagaagccgtatcatgtctaccacctgtgaggtccacacagtgtgtatcatttacctcctgaacctgctcaaggaagcagacctctgcttctccccatttgctagaagaaatcatgaatagtctgagtcttcctctctgacaagttagggcatggacttgacccagctttgtgccagagaacccaatatgagtgttgttggcagcttgccaagaaggactgtctttttcaagacatactggtttcatgtgacacctccatggatttttttccagcctctaagtcaccaacttgggaactgcttgtctcacgttgctttgttttttacaataataaaagcattattatttaagct

SEQ ID NO: 201746 - DNA, 1750 bp, Homo sapiens
  Payload ID: 19802
  Gene Name: zinc finger protein 211
  ENST ID: ENST00000407202
  CDS Start-End: 1-1705
gatctcggcttactgcaacctccacctcctgggttcaagcgattctcctgcctcagcctcccaagtagctgggactacaggcatgcgccaccacgcccagggaagtgtgacctttgaagatgtggccgtgtacttctcctgggaggaatgggatctccttgatgaggctcagaaacacctgtacttcgatgtgatgctggagaactttgcacttacgtcctccctgggttgttggtgtggagtggaacatgaggaaacaccttctgaacagagaatttctggagaaagagtgccacagttcaggacttccaaagaaggttcatcttcccagaatgccgactcctgtgaaatatgttgcctggtcttgagagatattttgcacttggctgaacaccaaggaacaaactgcgggcagaaactacacacatgtggaaaacaattctacatcagtgcaaatcttcaacagcaccagaggcagcacattacagaggcacctttcagaagttatgtggacactgcctcgtttacacagagttgcatagtccatgtgtcggagaaaccctttacctgcagggagatcaggaaagacttcctggccaacatgaggtttctccatcaagacgccactcaaacaggggagaagccaaataacagtaacaagtgtgcggtggccttttacagtggaaaaagtcatcacaactggggaaaatgcagtaaagcctttagccacatagacacacttgttcaggaccagagaatcctcactagagaaggactttttgagtgcagtaaatgtgggaaagcatgtacgcgaagatgtaacctcattcagcaccagaaagtccacagtgaagaaaggccttatgaatgcaatgaatgtggaaaattctttacctactactccagtttcattatacatcagagagttcatactggagaaaggccttatgcgtgccctgaatgtgggaaatcgtttagtcagatatacagcctcaatagccataggaaagttcacactggagaaaggccttatgaatgtggggaatgtgggaaatcttttagccaaaggtccaacctcatgcagcatcgcagagttcacactggagaaaggccttatgaatgcagcgaatgtgggaaatcttttagccaaaactttagcctgatctaccaccagagagttcacactggagaaagacctcatgagtgcaatgaatgtggaaaatcctttagccgaagctccagcctcattcaccaccggagacttcacactggagaaagaccctatgagtgcagtaaatgtgggaagtcatttaagcaaagctccagcttcagttcacatcggaaagtccacacaggggaaaggccttatgtgtgtggggaatgtgggaaatcctttagccatagctccaaccttaagaaccaccagagagttcacactggagaaagacctgttgagtgcagtgaatgtagcaaatcctttagctgtaaatctaacctcattaaacacctgagagttcacactggagaaaggccttatgagtgcagtgaatgtgggaaatcctttagccaaagttctagcctcattcaacaccgcagagttcacacgggaaaaaggccttatcagtgcagtcaatgtgggaaatcctttggctgcaaatctgtcctcattcaacaccagagagttcacattggagaaaagccttagctgtactgagaatatgcaatttccttttagtgtaattatactgaa

SEQ ID NO: 201747 - DNA, 2759 bp, Homo sapiens
  Payload ID: 19802
  Gene Name: zinc finger protein 211
  ENST ID: ENST00000540556
  CDS Start-End: 167-283
tggcgtcttcgcagcggtcattttggctgccctcccggaggtccgttctgtctgtcagccgctttggtacgctgcatcgggatcgaagtgacggaccgtgaaggcgcgagagtcaggtctgagggtcgggggcagagccgcccgcgaggccggcctggggatagcgatgctcgggttccccccgggtcgcccgcagctcccggtccagctccgcccacagactcggatggcgaccgcactgagggacccggcttcggctgttcagtggaagaaaagactttagagatggatgaggacgttgaggcagagggaggttgaatatttttccaaggccacacaactggtgagaggcagcactaaggaccgaggcgcacaggttcccatagctacagaggtgcttttcaaacttacacagggaagtgtgacctttgaagatgtggccgtgtacttctcctgggaggaatgggatctccttgatgaggctcagaaacacctgtacttcgatgtgatgctggagaactttgcacttacgtcctccctgggacttatatcatcctggtctcatgtagttgctcaactagggctaggggaagtgccctctgttcttcacaggatgttcatgactccagcctcagcaagatgggatcagagagggcctggcctacatgaatggcacttgggaaaaggcatgtcatcaggttgttggtgtggagtggaacatgaggaaacaccttctgaacagagaatttctggagaaagagtgccacagttcaggacttccaaagaaggttcatcttcccagaatgccgactcctgtgaaatatgttgcctggtcttgagagatattttgcacttggctgaacaccaaggaacaaactgcgggcagaaactacacacatgtggaaaacaattctacatcagtgcaaatcttcaacagcaccagaggcagcacattacagaggcacctttcagaagttatgtggacactgcctcgtttacacagagttgcatagtccatgtgtcggagaaaccctttacctgcagggagatcaggaaagacttcctggccaacatgaggtttctccatcaagacgccactcaaacaggggagaagccaaataacagtaacaagtgtgcggtggccttttacagtggaaaaagtcatcacaactggggaaaatgcagtaaagcctttagccacatagacacacttgttcaggaccagagaatcctcactagagaaggactttttgagtgcagtaaatgtgggaaagcatgtacgcgaagatgtaacctcattcagcaccagaaagtccacagtgaagaaaggccttatgaatgcaatgaatgtggaaaattctttacctactactccagtttcattatacatcagagagttcatactggagaaaggccttatgcgtgccctgaatgtgggaaatcgtttagtcagatatacagcctcaatagccataggaaagttcacactggagaaaggccttatgaatgtggggaatgtgggaaatcttttagccaaaggtccaacctcatgcagcatcgcagagttcacactggagaaaggccttatgaatgcagcgaatgtgggaaatcttttagccaaaactttagcctgatctaccaccagagagttcacactggagaaagacctcatgagtgcaatgaatgtggaaaatcctttagccgaagctccagcctcattcaccaccggagacttcacactggagaaagaccctatgagtgcagtaaatgtgggaagtcatttaagcaaagctccagcttcagttcacatcggaaagtccacacaggggaaaggccttatgtgtgtggggaatgtgggaaatcctttagccatagctccaaccttaagaaccaccagagagttcacactggagaaagacctgttgagtgcagtgaatgtagcaaatcctttagctgtaaatctaacctcattaaacacctgagagttcacactggagaaaggccttatgagtgcagtgaatgtgggaaatcctttagccaaagttctagcctcattcaacaccgcagagttcacacgggaaaaaggccttatcagtgcagtcaatgtgggaaatcctttggctgcaaatctgtcctcattcaacaccagagagttcacattggagaaaagccttagctgtactgagaatatgcaatttccttttagtgtaattatactgaaggagtacacctgtgagagagacaagtacctgatttggaagccccaacatctaaggatatacagtgggcggattccccttaagttccaggtatgtgttacactttctaacatgccatttagaaagtgttagactttctcacctgccatttatggctcttgccgtttatgtcactgacagtttctgaggcagaagccgtatcatgtctaccacctgtgaggtccacacagtgtgtatcatttacctcctgaacctgctcaaggaagcagacctctgcttctccccatttgctagaagaaatcatgaatagtctgagtcttcctctctgacaagttagggcatggacttgacccagctttgtgccagagaacccaatatgagtgttgttggcagcttgccaagaaggactgtctttttcaagacatactggtttcatgtgacacctccatggatttttttccagcctctaagtcaccaacttgggaactgcttgtctcacgttgctttgttttttacaataataaaagcattattatttaa

SEQ ID NO: 201748 - DNA, 2629 bp, Homo sapiens
  Payload ID: 19802
  Gene Name: zinc finger protein 211
  ENST ID: ENST00000541801
  CDS Start-End: 181-2031
cagggcgggacttgtggcgtcttcgcagcggtcattttggctgccctcccggaggtccgttctgtctgtcagccgctttggtacgctgcatcgggatcgaagtgacggaccgtgaaggcgcgagagtcaggtctgagggtcgggggcagagccgcccgcgaggccggcctggggatagcgatgctcgggttccccccgggtcgcccgcagctcccggtccagctccgcccacagactcggatggcgaccgcactgagggacccggcttcgggaagtgtgacctttgaagatgtggccgtgtacttctcctgggaggaatgggatctccttgatgaggctcagaaacacctgtacttcgatgtgatgctggagaactttgcacttacgtcctccctgggacttatatcatcctggtctcatgtagttgctcaactagggctaggggaagtgccctctgttcttcacaggatgttcatgactccagcctcagcaagatgggatcagagagggcctggcctacatgaatggcacttgggaaaaggcatgtcatcaggttgttggtgtggagtggaacatgaggaaacaccttctgaacagagaatttctggagaaagagtgccacagttcaggacttccaaagaaggttcatcttcccagaatgccgactcctgtgaaatatgttgcctggtcttgagagatattttgcacttggctgaacaccaaggaacaaactgcgggcagaaactacacacatgtggaaaacaattctacatcagtgcaaatcttcaacagcaccagaggcagcacattacagaggcacctttcagaagttatgtggacactgcctcgtttacacagagttgcatagtccatgtgtcggagaaaccctttacctgcagggagatcaggaaagacttcctggccaacatgaggtttctccatcaagacgccactcaaacaggggagaagccaaataacagtaacaagtgtgcggtggccttttacagtggaaaaagtcatcacaactggggaaaatgcagtaaagcctttagccacatagacacacttgttcaggaccagagaatcctcactagagaaggactttttgagtgcagtaaatgtgggaaagcatgtacgcgaagatgtaacctcattcagcaccagaaagtccacagtgaagaaaggccttatgaatgcaatgaatgtggaaaattctttacctactactccagtttcattatacatcagagagttcatactggagaaaggccttatgcgtgccctgaatgtgggaaatcgtttagtcagatatacagcctcaatagccataggaaagttcacactggagaaaggccttatgaatgtggggaatgtgggaaatcttttagccaaaggtccaacctcatgcagcatcgcagagttcacactggagaaaggccttatgaatgcagcgaatgtgggaaatcttttagccaaaactttagcctgatctaccaccagagagttcacactggagaaagacctcatgagtgcaatgaatgtggaaaatcctttagccgaagctccagcctcattcaccaccggagacttcacactggagaaagaccctatgagtgcagtaaatgtgggaagtcatttaagcaaagctccagcttcagttcacatcggaaagtccacacaggggaaaggccttatgtgtgtggggaatgtgggaaatcctttagccatagctccaaccttaagaaccaccagagagttcacactggagaaagacctgttgagtgcagtgaatgtagcaaatcctttagctgtaaatctaacctcattaaacacctgagagttcacactggagaaaggccttatgagtgcagtgaatgtgggaaatcctttagccaaagttctagcctcattcaacaccgcagagttcacacgggaaaaaggccttatcagtgcagtcaatgtgggaaatcctttggctgcaaatctgtcctcattcaacaccagagagttcacattggagaaaagccttagctgtactgagaatatgcaatttccttttagtgtaattatactgaaggagtacacctgtgagagagacaagtacctgatttggaagccccaacatctaaggatatacagtgggcggattccccttaagttccaggtatgtgttacactttctaacatgccatttagaaagtgttagactttctcacctgccatttatggctcttgccgtttatgtcactgacagtttctgaggcagaagccgtatcatgtctaccacctgtgaggtccacacagtgtgtatcatttacctcctgaacctgctcaaggaagcagacctctgcttctccccatttgctagaagaaatcatgaatagtctgagtcttcctctctgacaagttagggcatggacttgacccagctttgtgccagagaacccaatatgagtgttgttggcagcttgccaagaaggactgtctttttcaagacatactggtttcatgtgacacctccatggatttttttccagcctctaagtcaccaacttgggaactgcttgtctcacgttgctttgttttttacaataataaaagcattattatttaagctacctttatcttg

SEQ ID NO: 201749 - DNA, 2641 bp, Homo sapiens
  Payload ID: 19802
  Gene Name: zinc finger protein 211
  ENST ID: ENST00000535785
  CDS Start-End: 132-269
cggaggtccgttctgtctgtcagccgctttggtacgctgcatcgggatcgaagtgacggaccgtgaaggcgcgagagtcaggtctgagggtcgggggcagagccgcccgcgaggccggcctggggatagcgatgctcgggttccccccgggtcgcccgcagctcccggtccagctccgcccacagactcggatggcgaccgcactgagggacccggcttcgggccgtgggagccatagagagcttgcgcaaacgagagacaccatctgagttaaatttgaaaaatcctctgcaggctgttcagtggaagaaaagactttagagatggatgaggacgttgaggcagagggaggttgaatatttttccaaggccacacaactggtgagaggcagcactaaggaccgaggcgcacaggttcccatagctacagaggtgcttttcaaacttacacagggaagtgtgacctttgaagatgtggccgtgtacttctcctgggaggaatgggatctccttgatgaggctcagaaacacctgtacttcgatgtgatgctggagaactttgcacttacgtcctccctgggttgttggtgtggagtggaacatgaggaaacaccttctgaacagagaatttctggagaaagagtgccacagttcaggacttccaaagaaggttcatcttcccagaatgccgactcctgtgaaatatgttgcctggtcttgagagatattttgcacttggctgaacaccaaggaacaaactgcgggcagaaactacacacatgtggaaaacaattctacatcagtgcaaatcttcaacagcaccagaggcagcacattacagaggcacctttcagaagttatgtggacactgcctcgtttacacagagttgcatagtccatgtgtcggagaaaccctttacctgcagggagatcaggaaagacttcctggccaacatgaggtttctccatcaagacgccactcaaacaggggagaagccaaataacagtaacaagtgtgcggtggccttttacagtggaaaaagtcatcacaactggggaaaatgcagtaaagcctttagccacatagacacacttgttcaggaccagagaatcctcactagagaaggactttttgagtgcagtaaatgtgggaaagcatgtacgcgaagatgtaacctcattcagcaccagaaagtccacagtgaagaaaggccttatgaatgcaatgaatgtggaaaattctttacctactactccagtttcattatacatcagagagttcatactggagaaaggccttatgcgtgccctgaatgtgggaaatcgtttagtcagatatacagcctcaatagccataggaaagttcacactggagaaaggccttatgaatgtggggaatgtgggaaatcttttagccaaaggtccaacctcatgcagcatcgcagagttcacactggagaaaggccttatgaatgcagcgaatgtgggaaatcttttagccaaaactttagcctgatctaccaccagagagttcacactggagaaagacctcatgagtgcaatgaatgtggaaaatcctttagccgaagctccagcctcattcaccaccggagacttcacactggagaaagaccctatgagtgcagtaaatgtgggaagtcatttaagcaaagctccagcttcagttcacatcggaaagtccacacaggggaaaggccttatgtgtgtggggaatgtgggaaatcctttagccatagctccaaccttaagaaccaccagagagttcacactggagaaagacctgttgagtgcagtgaatgtagcaaatcctttagctgtaaatctaacctcattaaacacctgagagttcacactggagaaaggccttatgagtgcagtgaatgtgggaaatcctttagccaaagttctagcctcattcaacaccgcagagttcacacgggaaaaaggccttatcagtgcagtcaatgtgggaaatcctttggctgcaaatctgtcctcattcaacaccagagagttcacattggagaaaagccttagctgtactgagaatatgcaatttccttttagtgtaattatactgaaggagtacacctgtgagagagacaagtacctgatttggaagccccaacatctaaggatatacagtgggcggattccccttaagttccaggtatgtgttacactttctaacatgccatttagaaagtgttagactttctcacctgccatttatggctcttgccgtttatgtcactgacagtttctgaggcagaagccgtatcatgtctaccacctgtgaggtccacacagtgtgtatcatttacctcctgaacctgctcaaggaagcagacctctgcttctccccatttgctagaagaaatcatgaatagtctgagtcttcctctctgacaagttagggcatggacttgacccagctttgtgccagagaacccaatatgagtgttgttggcagcttgccaagaaggactgtctttttcaagacatactggtttcatgtgacacctccatggatttttttccagcctctaagtcaccaacttgggaactgcttgtctcacgttgctttgttttttacaataataaaagcattattatttaa

SEQ ID NO: 201750 - DNA, 2810 bp, Homo sapiens
  Payload ID: 19803
  Gene Name: zinc finger protein 212
  Uniprot ID: Q9UDV6
  ENST ID: ENST00000335870
  CDS Start-End: 129-1616
agaatgcacctggcatcaacacggcggcggcggcggcggcttccaacaggctctggggcgccgagcggacaggaacgcagcacgggggctccgaggcggggtctgggtgttgaggggcgactggagccatggcggagtcggcgcctgctcggcacaggagaaaacgacgctccacacctttaacttcttccacacttccttcacaagcaacagagaaaagctcctattttcagaccaccgagatttcactctggacggtggtggccgctattcaggctgtggagaagaagatggagtcccaggctgcccggctacagagcctggaggggcgcacggggacagccgagaagaagctggctgactgcgagaagatggccgtggagttcgggaaccagctggagggcaagtgggccgtgctggggaccctgctgcaggagtatgggctactgcagaggcggctggagaacgtggagaacctgctgcgcaacaggaacttctggatcctgcggctgcccccgggcagcaagggggaggcccccaaggtgtccaggtcactggagaatgatggcgtctgtttcaccgagcaggaatgggagaatctggaggattggcagaaggagctctacagaaacgtgatggagagtaactatgagacactggtctctctgaaggtccttggccagacagagggagaagcggagttgggtacagagatgctgggtgacttggaagaggaaggtcctggtggtgcccacccagcaggtggggtcatgatcaaacaggagctacagtatacacaggaaggccctgcggatcttcctggagagttctcatgcattgctgaagagcaggctttcctgagcccagagcagaccgaactctggggtggtcagggcagttctgtcctcttggaaacaggtcctggggactctactctagaggagcctgttggtagtagagttcctagcagcagcagaactgtgggctgcccgaagcagaaatctcataggcaggtacagctggaccaggaatgtgggcagggcctgaagctgaaaaaggacacttcccgcccctacgaatgttctgagtgtgagatcaccttccgctataagcagcagctggccacacatctgcgcagccactctgggtgggggtcttgtacacctgaggagccagaggagagccttaggcccaggccacggctgaaaccacagaccaaaaaggccaagctgcatcagtgtgatgtgtgcctgaggagcttcagctgcaaggtgagcctggtgacccatcagcgttgccacctgcaggaggggcccagtgccggccagcatgtccaagagaggttctcacccaacagcctggttgccctgcctggccacatcccttggaggaaaagccggagttccctcatctgtggttactgtggcaagagcttcagtcacccatctgacttggtgcggcaccagcgcatccacacgggtgagcggccctacagctgcactgagtgtgagaagagctttgtccagaagcagcacctcctgcagcaccagaagatccaccagcgggagcggggtgggctggccctggagcccggaaggcccaatggcctgctttaagggtgcagcccctcgcccgtctgggggatggaggggggtggcattggttcccccgaagagacactgcagtcagggactgagttcttcctgagggcagttgtttgtgattgccttcccttgtcccagtaccaagccaagcccaaaggctgtcctgaaaaccctgtggaagaagagtccaggccaggtcttcatcctgctgccaagtttgctgtttcttggcaccttcaggtctctggttttctcattcatgccaatgcttgtgggctggggttggcgttctgaccccacagggactggtggctggttccagggctcgtcccggcatttcatgtcttcccacggggttgagtcgggccataggggtgagcagctgcctggaagagttctgggaagtataaccctccattttttcttgttttataatctctttgtttaataataagtagaagaaataatttaaatgaactgcttagccctgctctgaagaaccttttttggaattagattttagttgattttttaaagaatacagcccaacacttgttttttacattttaagagttgtagaagttgttcctaacttggggactggacctaccctctaggagggagttgttaatggggctcttttagcccactgatgcttacttaggccggagagcaggggacacggtgctaggttccctcgtgcagtgcctggtgctctcaaattgtctcaaaaggaccaagaggaaaagagtcggaggggtagaccctgcagccctgttgagaagaaagattccagtgaagttgctgatggtatggctgtggtctgggacttgcggtgtctcggcatacccctctcctcttcccacctcctcctggctatgttctgcagcctcccagagtagaaaactactttgttacttaaggttgttcaccttgtaccagtggttatttgagtttgttcctattacaccaatccttacttgaggtggttcggattacagtttccaaatgcattctgggattgcctattccagagagggtacagaaaaagcacacagatggcttgtctcaggagtgttgaatgtgtgccccgctgctgtctggggggatgggagtgggctctggggtcatatgtgaacatccccttggatgatttgcggttgcttagaataaaacttgctactagcaaaagaaaaaaaaaaagtt

SEQ ID NO: 201751 - DNA, 860 bp, Homo sapiens
  Payload ID: 19803
  Gene Name: zinc finger protein 212
  ENST ID: ENST00000462724
  CDS Start-End: 86-238
caacaggctctggggcgccgagcggacaggaacgcagcacgggggctccgaggcggggtctgggtgttgaggggcgactggagccatggcggagtcggcgcctgctcgggtaaagaggcaccggcgcgctggctcgagggcgcgttggggatggcggagtcccctgccgggggcggggcttcgcggtttggacgccgccggggtcttggtttcccggggctgccgttggcgcgggtgaacgcggaccctcctcttcgcgaccccagtgctctgcccttttttccctccgcttccttctgcagcggggtcggagcctcggcgccgtgcgcccttgcccagaaacttctctgacgcttgctttaggagaaaacgacgctccacacctttaacttcttccacacttccttcacaagcaacagagaaaagctcctattttcagaccaccgagatttcactctggacggtggtggccgctattcaggctgtggagaagaagatggagtcccaggctgcccggctacagagcctggaggggcgcacggggacagccgagaagaagctggctgactgcgagaagatggccgtggagttcgggaaccagctggagggcaagtgggccgtgctggggaccctgctgcaggagtatgggctactgcagaggcggctggagaacgtggagaacctgctgcgcaacaggaacttctggatcctgcggctgcccccgggcagcaagggggaggcccccaaggtgtccaggtcactggagaatgatggcgtctgtttcaccgagcaggaatgggagaatctggaggattggcagaaggagctctacagaaacgtgatggagagtaactatgaga

SEQ ID NO: 201752 - DNA, 637 bp, Homo sapiens
  Payload ID: 19803
  Gene Name: zinc finger protein 212
  ENST ID: ENST00000486371
  CDS Start-End: 118-270
ggcatcaacacggcggcggcggcggcggcttccaacaggctctggggcgccgagcggacaggaacgcagcacgggggctccgaggcggggtctgggtgttgaggggcgactggagccatggcggagtcggcgcctgctcgggtaaagaggcaccggcgcgctggctcgagggcgcgttggggatggcggagtcccctgccgggggcggggcttcgcggtttggacgccgccggggtcttggtttcccggggctgccgttggcgcgggtgaacgcggaccctcctcttcgcgaccccagtgctctgcccttttttccctccgcttccttctgcagcggggtcggagcctcggcgccgtgcgcccttgcccagaaacttctctgacgcttgctttagcacaggagaaaacgacgctccacacctttaacttcttccacacttccttcacaagcaacagagaaaagctcctattttcagaccaccgagatttcactctggacggtggtggccgctattcaggctgtggagaagaagatggagtcccaggctgcccggctacagagcctggaggggcgcacggggacagccgagaagaagctggctgactgcgagaagatggccgtggagttcgggaacca

SEQ ID NO: 201753 - DNA, 559 bp, Homo sapiens
  Payload ID: 19803
  Gene Name: zinc finger protein 212
  ENST ID: ENST00000488917
  CDS Start-End: 1-208
ctgtttcaccgagcaggaatgggagaatctggaggattggcagaaggagctctacagaaacgtgatggagagtaactatgagacactggtctctctgaagtcttgctctattgcccaggctggagtgcagtggcacaatcttggctcactgcaacctctgcctcacaggttcaagcgattctcctgcctcagcctctcgagtagctgaaattacagaggtccttggccagacagagggagaagcggagttgggtacagagatgctgggtgacttggaagaggaaggtcctggtggtgcccacccagcaggtggggtcatgatcaaacaggagctacagtatacacaggaaggccctgcggatcttcctggagagttctcatgcattgctgaagagcaggctttcctgagcccagagcagaccgaactctggggtggtcagggcagttctgtcctcttggaaacaggtcctggggactctactctagaggagcctgttggtagtagagttcctagcagcagcagaactgtgggctgcccgaagcagaaatctcataggca

SEQ ID NO: 201754 - DNA, 581 bp, Homo sapiens
  Payload ID: 19803
  Gene Name: zinc finger protein 212
  ENST ID: ENST00000481584
  CDS Start-End: 1-581
gtatgggctactgcagaggcggctggagaacgtggagaacctgctgcgcaacaggaacttctggatcctgcggctgcccccgggcagcaagggggaggcccccaaggtgtccaggtcactggagaatgatggcgtctgtttcaccgagcaggaatgggagaatctggaggattggcagaaggagctctacagaaacgtgatggagagtaactatgagacactggtctctctgagttcaagcgattctcctgcctcagcctctcgagtagctgaaattacagaggtccttggccagacagagggagaagcggagttgggtacagagatgctgggtgacttggaagaggaaggtcctggtggtgcccacccagcaggtggggtcatgatcaaacaggagctacagtatacacaggaaggccctgcggatcttcctggagagttctcatgcattgctgaagagcaggctttcctgagcccagagcagaccgaactctggggtggtcagggcagttctgtcctcttggaaacaggtcctggggactctactctagaggagcctgttggtagtagagttcctagca

SEQ ID NO: 201755 - DNA, 3313 bp, Homo sapiens
  Payload ID: 19804
  Gene Name: zinc finger protein 213
  Uniprot ID: O14771
  ENST ID: ENST00000396878
  CDS Start-End: 476-1855
cgaggacttccggcgccgggagctcgcggcggaagtgggatctcctgggccgtagtgggcgttgtgtgtttcgggggcgggggcgggggcgggggccggggcggggacggggcctctggccgcctggctccaacatcaagcaccgggctccgagtggccgggatcagcgccccgaggcagaggccggagggcgcgcgcactgctaggaagtgctggtcccccgcgccgctctgccagcttggtcccccggcagacgcccctgtacgatcgccgctcgccccgcgggcgaggctgcggtggacagcgcggggctccggctggctcgccttcccgcctgccgtgtcctgctgagcgaccctggagtacacatccagatgccagcccagctaccacaggggatccctctgggagactgaaagtacaggttctggggcccaggttgaagccgaccaaccctgagcctcaggccaggggaatggcagcccccttggaggcccaggaccaggcccctggggagggagaagggcttctgattgtgaaagtggaagattcctcctgggaacaggaatctgcccagcatgaggatggcagggattccgaagcctgccgccagcgcttccggcaattctgctacggggatgtgcatgggcctcatgaggccttcagccagctctgggagctctgctgccgctggctgcggcccgagctgcgtaccaaggagcagatcctggagctgctggtgctggagcagttcctgacagtgctgccaggggagatccagggctgggtgcgtgagcagcacccgggaagcggtgaggaggctgtcgccttggtggaggacctacagaagcagccagtgaaagcctggcgacaggatgtgccctcggaggaggcggaacccgaggctgcaggccggggatcccaggccacggggcctcccccgacggtgggggcacggaggcggccgtctgttccccaggagcagcacagccatagcgcccagcctcctgctcttcttaaagagggtcgtcccggagagacgacggacacctgctttgtctctggggtccatggacctgtggcattgggagacatcccattctatttctcccgggaagaatggggcaccctggaccctgctcagcgggatctcttctgggacataaagcgggagaactcccggaacaccaccctgggttttgggctcaaaggccaaagtgagaagtccctgctgcaggagatggtgccggtggtgccaggccagacaggcagcgacgtgactgtgtcctggagccccgaggaggctgaggcctgggagagcgagaaccggccgagggcggccctgggcccagtggtgggcgcgcgacgggggcggccacccactcgccggcgccagttccgggacctggcagccgagaagccgcacagctgcgggcagtgtggaaagcgcttccgctggggctcggacctggcgcggcaccagcgcacgcacacgggcgagaagccacacaagtgccctgagtgcgacaagagcttccgcagctcctcggacctggtgcgccaccaaggcgtgcacacgggcgagaagcccttctcctgttccgagtgcggcaagagcttcagccgcagcgcctacctggccgaccaccagcgcatacacacgggcgagaagcctttcggctgcagcgactgcggcaagagcttctcgctgcgctcctacctgctggaccatcggcgtgtgcacaccggtgagcggcccttcggctgcggagagtgcgacaagagcttcaagcagcgcgcgcacctcatcgcgcatcagagcctgcacgccaagatggcccagcccgtggggtgagcagctggcttggccggaaacccgggggaggcccagccacggcacatcctgctttgttcaccactgggactctccttccatctgtggccacctcccgggctgtccgagggaccccagggtacctcacactcggagctcgcctgccctgcttggctctgaggacctgcccagcgctcaaagggaacggaagccttcccctcccgcccccgatcttgtcctctttcccccttctgcgcctagcgttcctcttcccctctagtttcctggagccccaacacattcctggcagggacagcagggtggcaaggactcaggtctaggtcccttcccagaagcccccgagcctcatttgactgtgtggctctttggcccccaccctgtggggtgggtccatgggtcaggcctctgccctaccaacctgtgcctttcagtgggcgtggaggactggccttggccccccagggggctgctggactttgggagagacagcccacacctgtgggaccgcgggtcttagtcacggcggcaggggctttctggccccctcccactcccgtttccaggccatgaccactctgccctgtcctggccatacggactcggcctgcctttgccctcggcctacttgccctagcatgaggctctgagagccacctgcccaccaatctggtgaggataatggtggctccagcgacaggaggccaaccctggagaccaagaacagggcgcctggctgccatcttttcctccagaggtggggctgcaccagactcagcactagcactccatcagcactagcacctcactccatcagcactagcacctcactccatcggccccggcaccctgctccatcggcactggcgccctgctccatcggcactaatgctccactcggcgccccactccatcggccccgctccatcggcactaatgccccactcggcgccccactccatcagcactaatgctccactccattggcactaacgccccaactccagcggcactaatgacccgctcctttgacattggtgccccactccatcagcactaacgccctgctccatcggcactggtgtcccactccattgtcactaacgtccggctccatcggcactaccaccccgctccatcatcactatgtccagctccgtcggcactaccaccctgctccatcatcactacgtccagctccaacggcactggtgccccattccatcggcactaacgccccgctccaccggcaccagtgcctcgctccattggcaccaacgcccagctccaccggtactggctccctgctccatcggcactaacgccctgcttcattggcactttgctgctgcctcctgagcactgccttccatgaacagggacagaccagaggccctgcaaggactccccctcagacctccaaagggcaacagaagagtattaataaacgtgaaaacttac

SEQ ID NO: 201756 - DNA, 2996 bp, Homo sapiens
  Payload ID: 19804
  Gene Name: zinc finger protein 213
  Uniprot ID: O14771
  ENST ID: ENST00000416391
  CDS Start-End: 366-1745
ggcctctggccgcctggctccaacatcaagcaccgggctccgagtggccgggatcagcgccccgaggcagaggccggagggcgcgcgcactgctaggaagtgctggtcccccgcgccgctctgccagcttggtcccccggcagacgcccctgtacgatcgccgctcgccccgcgggcgaggctgcggtggacagcgcggggctccggctggctcgccttcccgcctgccgtgtcctgctgagcgaccctggagtacacatccagatgccagcccagctaccacaggggatccctctgggagactgaaagtacaggttctggggcccaggttgaagccgaccaaccctgagcctcaggccaggggaatggcagcccccttggaggcccaggaccaggcccctggggagggagaagggcttctgattgtgaaagtggaagattcctcctgggaacaggaatctgcccagcatgaggatggcagggattccgaagcctgccgccagcgcttccggcaattctgctacggggatgtgcatgggcctcatgaggccttcagccagctctgggagctctgctgccgctggctgcggcccgagctgcgtaccaaggagcagatcctggagctgctggtgctggagcagttcctgacagtgctgccaggggagatccagggctgggtgcgtgagcagcacccgggaagcggtgaggaggctgtcgccttggtggaggacctacagaagcagccagtgaaagcctggcgacaggatgtgccctcggaggaggcggaacccgaggctgcaggccggggatcccaggccacggggcctcccccgacggtgggggcacggaggcggccgtctgttccccaggagcagcacagccatagcgcccagcctcctgctcttcttaaagagggtcgtcccggagagacgacggacacctgctttgtctctggggtccatggacctgtggcattgggagacatcccattctatttctcccgggaagaatggggcaccctggaccctgctcagcgggatctcttctgggacataaagcgggagaactcccggaacaccaccctgggttttgggctcaaaggccaaagtgagaagtccctgctgcaggagatggtgccggtggtgccaggccagacaggcagcgacgtgactgtgtcctggagccccgaggaggctgaggcctgggagagcgagaaccggccgagggcggccctgggcccagtggtgggcgcgcgacgggggcggccacccactcgccggcgccagttccgggacctggcagccgagaagccgcacagctgcgggcagtgtggaaagcgcttccgctggggctcggacctggcgcggcaccagcgcacgcacacgggcgagaagccacacaagtgccctgagtgcgacaagagcttccgcagctcctcggacctggtgcgccaccaaggcgtgcacacgggcgagaagcccttctcctgttccgagtgcggcaagagcttcagccgcagcgcctacctggccgaccaccagcgcatacacacgggcgagaagcctttcggctgcagcgactgcggcaagagcttctcgctgcgctcctacctgctggaccatcggcgtgtgcacaccggtgagcggcccttcggctgcggagagtgcgacaagagcttcaagcagcgcgcgcacctcatcgcgcatcagagcctgcacgccaagatggcccagcccgtggggtgagcagctggcttggccggaaacccgggggaggcccagccacggcacatcctgctttgttcaccactgggactctccttccatctgtggccacctcccgggctgtccgagggaccccagggtacctcacactcggagctcgcctgccctgcttggctctgaggacctgcccagcgctcaaagggaacggaagccttcccctcccgcccccgatcttgtcctctttcccccttctgcgcctagcgttcctcttcccctctagtttcctggagccccaacacattcctggcagggacagcagggtggcaaggactcaggtctaggtcccttcccagaagcccccgagcctcatttgactgtgtggctctttggcccccaccctgtggggtgggtccatgggtcaggcctctgccctaccaacctgtgcctttcagtgggcgtggaggactggccttggccccccagggggctgctggactttgggagagacagcccacacctgtgggaccgcgggtcttagtcacggcggcaggggctttctggccccctcccactcccgtttccaggccatgaccactctgccctgtcctggccatacggactcggcctgcctttgccctcggcctacttgccctagcatgaggctctgagagccacctgcccaccaatctggtgaggataatggtggctccagcgacaggaggccaaccctggagaccaagaacagggcgcctggctgccatcttttcctccagaggtggggctgcaccagactcagcactagcactccatcagcactagcacctcactccatcagcactagcacctcactccatcggccccggcaccctgctccatcggcactggcgccctgctccatcggcactaatgctccactcggcgccccactccatcggccccgctccatcggcactaatgccccactcggcgccccactccatcagcactaatgctccactccattggcactaacgccccaactccagcggcactaccaccccgctccatcatcactatgtccagctccgtcggcactaccaccctgctccatcatcactacgtccagctccaacggcactggtgccccattccatcggcactaacgccccgctccaccggcaccagtgcctcgctccattggcaccaacgcccagctccaccggtactggctccctgctccatcggcactaacgccctgcttcattggcactttgctgctgcctcctgagcact

SEQ ID NO: 201757 - DNA, 2240 bp, Homo sapiens
  Payload ID: 19804
  Gene Name: zinc finger protein 213
  Uniprot ID: O14771
  ENST ID: ENST00000576416
  CDS Start-End: 429-1808
gacggggcctctggccgcctggctccaacatcaagcaccgggctccgagtggccgggatcagcgccccgaggcagaggccggagggcgcgcgcactgctaggaagtgctggtcccccgcgccgctctgccagcttggtcccccggcagacgcccctgtacgatcgccgctcgccccgcgggcgaggctgcggtggacagcgcggggctccggctggctcgccttcccgcctgccgtgtcctgctgagcgaccctggtgagtcctggccctcttcgaggaaagtcttcttcgaagtcaccagaggatgagaatggagtacacatccagatgccagcccagctaccacaggggatccctctgggagactgaaagtacaggttctggggcccaggttgaagccgaccaaccctgagcctcaggccaggggaatggcagcccccttggaggcccaggaccaggcccctggggagggagaagggcttctgattgtgaaagtggaagattcctcctgggaacaggaatctgcccagcatgaggatggcagggattccgaagcctgccgccagcgcttccggcaattctgctacggggatgtgcatgggcctcatgaggccttcagccagctctgggagctctgctgccgctggctgcggcccgagctgcgtaccaaggagcagatcctggagctgctggtgctggagcagttcctgacagtgctgccaggggagatccagggctgggtgcgtgagcagcacccgggaagcggtgaggaggctgtcgccttggtggaggacctacagaagcagccagtgaaagcctggcgacaggatgtgccctcggaggaggcggaacccgaggctgcaggccggggatcccaggccacggggcctcccccgacggtgggggcacggaggcggccgtctgttccccaggagcagcacagccatagcgcccagcctcctgctcttcttaaagagggtcgtcccggagagacgacggacacctgctttgtctctggggtccatggacctgtggcattgggagacatcccattctatttctcccgggaagaatggggcaccctggaccctgctcagcgggatctcttctgggacataaagcgggagaactcccggaacaccaccctgggttttgggctcaaaggccaaagtgagaagtccctgctgcaggagatggtgccggtggtgccaggccagacaggcagcgacgtgactgtgtcctggagccccgaggaggctgaggcctgggagagcgagaaccggccgagggcggccctgggcccagtggtgggcgcgcgacgggggcggccacccactcgccggcgccagttccgggacctggcagccgagaagccgcacagctgcgggcagtgtggaaagcgcttccgctggggctcggacctggcgcggcaccagcgcacgcacacgggcgagaagccacacaagtgccctgagtgcgacaagagcttccgcagctcctcggacctggtgcgccaccaaggcgtgcacacgggcgagaagcccttctcctgttccgagtgcggcaagagcttcagccgcagcgcctacctggccgaccaccagcgcatacacacgggcgagaagcctttcggctgcagcgactgcggcaagagcttctcgctgcgctcctacctgctggaccatcggcgtgtgcacaccggtgagcggcccttcggctgcggagagtgcgacaagagcttcaagcagcgcgcgcacctcatcgcgcatcagagcctgcacgccaagatggcccagcccgtggggtgagcagctggcttggccggaaacccgggggaggcccagccacggcacatcctgctttgttcaccactgggactctccttccatctgtggccacctcccgggctgtccgagggaccccagggtacctcacactcggagctcgcctgccctgcttggctctgaggacctgcccagcgctcaaagggaacggaagccttcccctcccgcccccgatcttgtcctctttcccccttctgcgcctagcgttcctcttcccctctagtttcctggagccccaacacattcctggcagggacagcagggtggcaaggactcaggtctaggtcccttcccagaagcccccgagcctcatttgactgtgtggctctttggcccccaccctgtggggtgggtccatgggtcaggcctctgccctaccaacctgtgcctttcagt

SEQ ID NO: 201758 - DNA, 1368 bp, Homo sapiens
  Payload ID: 19804
  Gene Name: zinc finger protein 213
  ENST ID: ENST00000572647
  CDS Start-End: 1-549
gaagcctgccgccagcgcttccggcaattctgctacggggatgtgcatgggcctcatgaggccttcagccagctctgggagctctgctgccgctggctgcggcccgagctgcgtaccaaggagcagatcctggagctgctggtgctggagcagttcctgacagtgctgccaggggagatccagggctgggtgcgtgagcagcacccgggaagcggtgaggaggctgtcgccttggtggaggacctacagaagcagccagtgaaagcctggcgacaggatgtgccctcggaggaggcggaacccgaggctgcaggccggggatcccaggccacggggcctcccccgacggtgggggcacggaggcggccgtctgttccccaggagcagcacagccatagcgggacctgtggcattgggagacatcccattctatttctcccgggaagaatggggcaccctggaccctgctcagcgggatctcttctgggacataaagcgggagaactcccggaacaccaccctgggttttgggctcaaaggccaaagtgagaagtccctgctgcaggagatggtgccggtggtgccaggccagacaggcagcgacgtgactgtgtcctggagccccgaggaggctgaggcctgggagagcgagaaccggccgagggcggccctgggcccagtggtgggcgcgcgacgggggcggccacccactcgccggcgccagttccgggacctggcagccgagaagccgcacagctgcgggcagtgtggaaagcgcttccgctggggctcggacctggcgcggcaccagcgcacgcacacgggcgagaagccacacaagtgccctgagtgcgacaagagcttccgcagctcctcggacctggtgcgccaccaaggcgtgcacacgggcgagaagcccttctcctgttccgagtgcggcaagagcttcagccgcagcgcctacctggccgaccaccagcgcatacacacgggcgagaagcctttcggctgcagcgactgcggcaagagcttctcgctgcgctcctacctgctggaccatcggcgtgtgcacaccggtgagcggcccttcggctgcggagagtgcgacaagagcttcaagcagcgcgcgcacctcatcgcgcatcagagcctgcacgccaagatggcccagcccgtggggtgagcagctggcttggccggaaacccgggggaggcccagccacggcacatcctgctttgttcaccactgggactctccttccatctgtggccacctcccgggctgtccgagggaccccagggtacctcacactcggagctcgcctgccctgcttggctctgaggacctgcccagcgctcaaagggaac

SEQ ID NO: 201759 - DNA, 821 bp, Homo sapiens
  Payload ID: 19804
  Gene Name: zinc finger protein 213
  ENST ID: ENST00000574575
  CDS Start-End: 1-813
cagaagcagccagtgaaagcctggcgacaggatgtgccctcggaggaggcggaacccgaggctgcaggccggggatcccaggccacggggcctcccccgacggtgggggcacggaggcggccgtctgttccccaggagcagcacagccatagcggttttgggctcaaaggccaaagtgagaagtccctgctgcaggagatggtgccggtggtgccaggccagacaggcagcgacgtgactgtgtcctggagccccgaggaggctgaggcctgggagagcgagaaccggccgagggcggccctgggcccagtggtgggcgcgcgacgggggcggccacccactcgccggcgccagttccgggacctggcagccgagaagccgcacagctgcgggcagtgtggaaagcgcttccgctggggctcggacctggcgcggcaccagcgcacgcacacgggcgagaagccacacaagtgccctgagtgcgacaagagcttccgcagctcctcggacctggtgcgccaccaaggcgtgcacacgggcgagaagcccttctcctgttccgagtgcggcaagagcttcagccgcagcgcctacctggccgaccaccagcgcatacacacgggcgagaagcctttcggctgcagcgactgcggcaagagcttctcgctgcgctcctacctgctggaccatcggcgtgtgcacaccggtgagcggcccttcggctgcggagagtgcgacaagagcttcaagcagcgcgcgcacctcatcgcgcatcagagcctgcacgccaagatggcccagcccgtggggtgagcagctgg

SEQ ID NO: 201760 - DNA, 549 bp, Homo sapiens
  Payload ID: 19804
  Gene Name: zinc finger protein 213
  ENST ID: ENST00000573771
  CDS Start-End: 396-549
atttcacagagcaggcaacgcaggagctgggacgtaatcaataactagcacaggtttatattatgattcgtctgtagcggcctgccaaaggttccatataacatccctgcggcaggaactgacacttcaggccccaccgaatcagctagataacggcccacattgcagagcagccaatcaaaaccggaacatatttagatcatttggtaaacgggacactcaagcagtcctatagggaggcctatgtggggaggaactgaggtctcctgccaagagccacgagtacacatccagatgccagcccagctaccacaggggatccctctgggagactgaaagtacaggttctggggcccaggttgaagccgaccaaccctgagcctcaggccaggggaatggcagcccccttggaggcccaggaccaggcccctggggagggagaagggcttctgattgtgaaagtggaagattcctcctgggaacaggaatctgcccagcatgaggatggcagggattccgaagcctgccgccagcgcttccggcaattct

SEQ ID NO: 201761 - DNA, 3208 bp, Homo sapiens
  Payload ID: 19804
  Gene Name: zinc finger protein 213
  Uniprot ID: O14771
  ENST ID: ENST00000574902
  CDS Start-End: 373-1752
ttcctgttcattggccatcggtcatggagaaggcgggctcagtggacgaacggctttctgggagctggggaatgcttgcgtagcgtagtttcccagcgagccccgcgaggacttccggcgccgggagctcgcggcggaagtgggatctcctgggccgtagtgggcgttgtgtgtttcgggggcgggggctgcggtggacagcgcggggctccggctggctcgccttcccgcctgccgtgtcctgctgagcgaccctggagtacacatccagatgccagcccagctaccacaggggatccctctgggagactgaaagtacaggttctggggcccaggttgaagccgaccaaccctgagcctcaggccaggggaatggcagcccccttggaggcccaggaccaggcccctggggagggagaagggcttctgattgtgaaagtggaagattcctcctgggaacaggaatctgcccagcatgaggatggcagggattccgaagcctgccgccagcgcttccggcaattctgctacggggatgtgcatgggcctcatgaggccttcagccagctctgggagctctgctgccgctggctgcggcccgagctgcgtaccaaggagcagatcctggagctgctggtgctggagcagttcctgacagtgctgccaggggagatccagggctgggtgcgtgagcagcacccgggaagcggtgaggaggctgtcgccttggtggaggacctacagaagcagccagtgaaagcctggcgacaggatgtgccctcggaggaggcggaacccgaggctgcaggccggggatcccaggccacggggcctcccccgacggtgggggcacggaggcggccgtctgttccccaggagcagcacagccatagcgcccagcctcctgctcttcttaaagagggtcgtcccggagagacgacggacacctgctttgtctctggggtccatggacctgtggcattgggagacatcccattctatttctcccgggaagaatggggcaccctggaccctgctcagcgggatctcttctgggacataaagcgggagaactcccggaacaccaccctgggttttgggctcaaaggccaaagtgagaagtccctgctgcaggagatggtgccggtggtgccaggccagacaggcagcgacgtgactgtgtcctggagccccgaggaggctgaggcctgggagagcgagaaccggccgagggcggccctgggcccagtggtgggcgcgcgacgggggcggccacccactcgccggcgccagttccgggacctggcagccgagaagccgcacagctgcgggcagtgtggaaagcgcttccgctggggctcggacctggcgcggcaccagcgcacgcacacgggcgagaagccacacaagtgccctgagtgcgacaagagcttccgcagctcctcggacctggtgcgccaccaaggcgtgcacacgggcgagaagcccttctcctgttccgagtgcggcaagagcttcagccgcagcgcctacctggccgaccaccagcgcatacacacgggcgagaagcctttcggctgcagcgactgcggcaagagcttctcgctgcgctcctacctgctggaccatcggcgtgtgcacaccggtgagcggcccttcggctgcggagagtgcgacaagagcttcaagcagcgcgcgcacctcatcgcgcatcagagcctgcacgccaagatggcccagcccgtggggtgagcagctggcttggccggaaacccgggggaggcccagccacggcacatcctgctttgttcaccactgggactctccttccatctgtggccacctcccgggctgtccgagggaccccagggtacctcacactcggagctcgcctgccctgcttggctctgaggacctgcccagcgctcaaagggaacggaagccttcccctcccgcccccgatcttgtcctctttcccccttctgcgcctagcgttcctcttcccctctagtttcctggagccccaacacattcctggcagggacagcagggtggcaaggactcaggtctaggtcccttcccagaagcccccgagcctcatttgactgtgtggctctttggcccccaccctgtggggtgggtccatgggtcaggcctctgccctaccaacctgtgcctttcagtgggcgtggaggactggccttggccccccagggggctgctggactttgggagagacagcccacacctgtgggaccgcgggtcttagtcacggcggcaggggctttctggccccctcccactcccgtttccaggccatgaccactctgccctgtcctggccatacggactcggcctgcctttgccctcggcctacttgccctagcatgaggctctgagagccacctgcccaccaatctggtgaggataatggtggctccagcgacaggaggccaaccctggagaccaagaacagggcgcctggctgccatcttttcctccagaggtggggctgcaccagactcagcactagcactccatcagcactagcacctcactccatcagcactagcacctcactccatcggccccggcaccctgctccatcggcactggcgccctgctccatcggcactaatgctccactcggcgccccactccatcggccccgctccatcggcactaatgccccactcggcgccccactccatcagcactaatgctccactccattggcactaacgccccaactccagcggcactaatgacccgctcctttgacattggtgccccactccatcagcactaacgccctgctccatcggcactggtgtcccactccattgtcactaacgtccggctccatcggcactaccaccccgctccatcatcactatgtccagctccgtcggcactaccaccctgctccatcatcactacgtccagctccaacggcactggtgccccattccatcggcactaacgccccgctccaccggcaccagtgcctcgctccattggcaccaacgcccagctccaccggtactggctccctgctccatcggcactaacgccctgcttcattggcactttgctgctgcctcctgagcactgccttccatgaacagggacagaccagaggccctgcaaggactccccctcagacctccaaagggcaacagaagagtattaataaacgtgaaaactt

SEQ ID NO: 201762 - DNA, 3245 bp, Homo sapiens
  Payload ID: 19804
  Gene Name: zinc finger protein 213
  ENST ID: ENST00000576863
  CDS Start-End: 345-782
aacatcaagcaccgggctccgagtggccgggatcagcgccccgaggcagaggccggagggcgcgcgcactgctaggaagtgctggtcccccgcgccgctctgccagcttggtcccccggcagacgcccctgtacgatcgccgctcgccccgcgggcgaggctgcggtggacagcgcggggctccggctggctcgccttcccgcctgccgtgtcctgctgagcgaccctggagtacacatccagatgccagcccagctaccacaggggatccctctgggagactgaaagtacaggttctggggcccaggttgaagccgaccaaccctgagcctcaggccaggggaatggcagcccccttggaggcccaggaccaggcccctggggagggagaagggcttctgattgtgaaagtggaagattcctcctgggaacaggaatctgcccagcatgaggatggcagggattccgaagcctgccgccagcgcttccggcaattctgctacggggatgtgcatgggcctcatgaggccttcagccagctctgggagctctgctgccgctggctgcggcccgagctgcgtaccaaggagcagatcctggagctgctggtgctggagcagttcctgacagtgctgccaggggagatccagggctgggtgcgtgagcagcacccgggaagcggtgaggaggctgtcgccttggtggaggacctacagaagcagccagtgaaagcctggcgacagggagtaaactctgtctcccccggtctggtctcgggctgatgagcatgttgtggttcctgcacaggatgtgccctcggaggaggcggaacccgaggctgcaggccggggatcccaggccacggggcctcccccgacggtgggggcacggaggcggccgtctgttccccaggagcagcacagccatagcgcccagcctcctgctcttcttaaagagggtcgtcccggagagacgacggacacctgctttgtctctggggtccatggacctgtggcattgggagacatcccattctatttctcccgggaagaatggggcaccctggaccctgctcagcgggatctcttctgggacataaagcgggagaactcccggaacaccaccctgggttttgggctcaaaggccaaagtgagaagtccctgctgcaggagatggtgccggtggtgccaggccagacaggcagcgacgtgactgtgtcctggagccccgaggaggctgaggcctgggagagcgagaaccggccgagggcggccctgggcccagtggtgggcgcgcgacgggggcggccacccactcgccggcgccagttccgggacctggcagccgagaagccgcacagctgcgggcagtgtggaaagcgcttccgctggggctcggacctggcgcggcaccagcgcacgcacacgggcgagaagccacacaagtgccctgagtgcgacaagagcttccgcagctcctcggacctggtgcgccaccaaggcgtgcacacgggcgagaagcccttctcctgttccgagtgcggcaagagcttcagccgcagcgcctacctggccgaccaccagcgcatacacacgggcgagaagcctttcggctgcagcgactgcggcaagagcttctcgctgcgctcctacctgctggaccatcggcgtgtgcacaccggtgagcggcccttcggctgcggagagtgcgacaagagcttcaagcagcgcgcgcacctcatcgcgcatcagagcctgcacgccaagatggcccagcccgtggggtgagcagctggcttggccggaaacccgggggaggcccagccacggcacatcctgctttgttcaccactgggactctccttccatctgtggccacctcccgggctgtccgagggaccccagggtacctcacactcggagctcgcctgccctgcttggctctgaggacctgcccagcgctcaaagggaacggaagccttcccctcccgcccccgatcttgtcctctttcccccttctgcgcctagcgttcctcttcccctctagtttcctggagccccaacacattcctggcagggacagcagggtggcaaggactcaggtctaggtcccttcccagaagcccccgagcctcatttgactgtgtggctctttggcccccaccctgtggggtgggtccatgggtcaggcctctgccctaccaacctgtgcctttcagtgggcgtggaggactggccttggccccccagggggctgctggactttgggagagacagcccacacctgtgggaccgcgggtcttagtcacggcggcaggggctttctggccccctcccactcccgtttccaggccatgaccactctgccctgtcctggccatacggactcggcctgcctttgccctcggcctacttgccctagcatgaggctctgagagccacctgcccaccaatctggtgaggataatggtggctccagcgacaggaggccaaccctggagaccaagaacagggcgcctggctgccatcttttcctccagaggtggggctgcaccagactcagcactagcactccatcagcactagcacctcactccatcagcactagcacctcactccatcggccccggcaccctgctccatcggcactggcgccctgctccatcggcactaatgctccactcggcgccccactccatcggccccgctccatcggcactaatgccccactcggcgccccactccatcagcactaatgctccactccattggcactaacgccccaactccagcggcactaatgacccgctcctttgacattggtgccccactccatcagcactaacgccctgctccatcggcactggtgtcccactccattgtcactaacgtccggctccatcggcactaccaccccgctccatcatcactatgtccagctccgtcggcactaccaccctgctccatcatcactacgtccagctccaacggcactggtgccccattccatcggcactaacgccccgctccaccggcaccagtgcctcgctccattggcaccaacgcccagctccaccggtactggctccctgctccatcggcactaacgccctgcttcattggcactttgctgctgcctcctgagcactgccttccatgaacagggacagaccagaggccctgcaaggactccccctcagacctccaaagggcaacagaagagtattaataaacgtgaaaactta

SEQ ID NO: 201763 - DNA, 2681 bp, Homo sapiens
  Payload ID: 19805
  Gene Name: zinc finger protein 214
  Uniprot ID: Q9UL59
  ENST ID: ENST00000278314
  CDS Start-End: 317-2137
gagtgtctactccaagacctgggacttccgtttcggtccagccgggctgcggccattgtttgtgtggactgagtgttttggccatcccggtccactctcacaggctccgttaagtgacatgaactctcaggaggactgagccagaagcggacagggcaagacgagctgtgcttgaaggaagaggggcagaaaatcgagggtcagggactgagaagctactccggtttagaaaccccagagacacccgtgtagatgggtacatcacggcttctctcccacgttaagacttaataaagaaagcctgatctttgaccagatggcagtaacatttgaagatgtgactattatttttacatgggaggagtggaaattcctggattcttctcaaaaaagactctacagggaggtcatgtgggagaactacacaaatgtcatgtcagtagaaaactggaatgagagctacaaatcccaagaagaaaaattcagatacttagaatatgaaaatttttcctactggcaaggctggtggaatgctggcgcccagatgtatgagaatcagaactatggggaaactgttcaagggacagattccaaagacctcacacagcaagatcgttcccagtgtcaggaatggttaatactctccacacaagtaccagggtatgggaactatgaactgacttttgaaagcaaaagtctcaggaacttaaaatataaaaattttatgccttggcagtccttagaaacaaaaaccactcaagactatggtagagaaatctacatgagtggttcacatggttttcaagggggcagataccgtcttggcatatccaggaaaaacctctccatggaaaaagaacagaagctcatagttcagcattcttatatcccagtggaggaagcccttccacagtatgttggggtgatatgtcaagaagacctactgagagattcaatggaagaaaagtactgtggatgtaataaatgtaaaggaatttattattggaactcacggtgtgttttccacaagagaaatcaacctggagaaaacctctgtcaatgctccatctgtaaagcatgcttctctcagagatcagacttgtatagacatccaagaaaccacataggtaagaagctgtacggatgtgatgaagttgacggtaactttcatcagagctccggagttcactttcatcagagagttcacataggggaggtaccttatagctgtaatgcatgtggtaagagcttcagccagatctctagtcttcacaatcatcaaagagtccacacagaagagaaattctataaaattgagtgtgataaagacctcagtagaaattcattacttcacattcaccagagacttcacataggagagaagccttttaaatgtaatcagtgtggtaagagttttaatcggagttcagtacttcatgttcatcagagagtccacacaggagaaaaaccatataagtgtgatgagtgtggtaagggtttcagccagagctcaaatcttcgaattcatcagttagtacacacaggagagaagtcttataaatgtgaagactgtggtaaaggctttacccagcgctcaaatcttcaaattcatcagagagtgcatacaggagagaaaccttataaatgtgatgactgtggaaaggactttagtcacagctcagatcttcgcattcatcagagagtccatacaggggagaaaccctatacttgtcctgaatgtgggaagggcttcagtaagagttcaaagcttcacactcatcaaagagtacatactggagagaaaccctacaaatgtgaagagtgtggcaagggattcagtcagcgttcacatcttctcattcatcagagagtccatacaggagaaaagccctataaatgtcatgattgtggaaagggttttagtcacagttctaatcttcacattcatcagagggtccatacaggagagaagccttatcaatgtgctaagtgtggtaaaggtttcagtcatagctcagctcttcgaattcatcaaagagtccatgcaggagagaaaccttacaaatgccgtgaatattataagggatttgatcataattcacatcttcacaataatcatagaagaggaaacttataaatattgttcatttagttaacagctttaatcaaagtttacctaacctttaaaccctataaatcctgctgttaaggaaatcttataaataacacaagtaatcccaagcaacatttatagtttcccctatctcccactaagaattatttgcttcaaaaggagatctttagaaaaaaccctatatatttaaaattatagtgtatttttctttacctactataaatataatacagtcataaatatattaaacatttaaggagaaaactcttcattctatttcattctagtctttttttctgtgcattttaatgtgcatgaaattgtgtgttcaattttgtattttcactgtcttcaaaatatttacttaaattttggtttgaattgaaactggttggccaactgttaaacgacatctcttaactcccctaaaaactccctaggaagtaacagaaaagatggaaacacatagaacttaaaactcagttttggccggtagaattcaattgtttatggacaaaagccacctaataaaagataggaaagcatt

SEQ ID NO: 201764 - DNA, 2562 bp, Homo sapiens
  Payload ID: 19805
  Gene Name: zinc finger protein 214
  Uniprot ID: Q9UL59
  ENST ID: ENST00000536068
  CDS Start-End: 243-2063
gactgagccagaagcggacagggcaagacgagctgtgcttgaaggaagaggggcagaaaatcgagggtcagggactgagaagctactccggtttagaaaccccagagacacccgtgtagatgggtacatcacggcttctctcccacgttaagacttaataaaggaacctacctttgatcagcaaggaaggactggggtggcaaaggctcatgcccccattttacagcctgatctttgaccagatggcagtaacatttgaagatgtgactattatttttacatgggaggagtggaaattcctggattcttctcaaaaaagactctacagggaggtcatgtgggagaactacacaaatgtcatgtcagtagaaaactggaatgagagctacaaatcccaagaagaaaaattcagatacttagaatatgaaaatttttcctactggcaaggctggtggaatgctggcgcccagatgtatgagaatcagaactatggggaaactgttcaagggacagattccaaagacctcacacagcaagatcgttcccagtgtcaggaatggttaatactctccacacaagtaccagggtatgggaactatgaactgacttttgaaagcaaaagtctcaggaacttaaaatataaaaattttatgccttggcagtccttagaaacaaaaaccactcaagactatggtagagaaatctacatgagtggttcacatggttttcaagggggcagataccgtcttggcatatccaggaaaaacctctccatggaaaaagaacagaagctcatagttcagcattcttatatcccagtggaggaagcccttccacagtatgttggggtgatatgtcaagaagacctactgagagattcaatggaagaaaagtactgtggatgtaataaatgtaaaggaatttattattggaactcacggtgtgttttccacaagagaaatcaacctggagaaaacctctgtcaatgctccatctgtaaagcatgcttctctcagagatcagacttgtatagacatccaagaaaccacataggtaagaagctgtacggatgtgatgaagttgacggtaactttcatcagagctccggagttcactttcatcagagagttcacataggggaggtaccttatagctgtaatgcatgtggtaagagcttcagccagatctctagtcttcacaatcatcaaagagtccacacagaagagaaattctataaaattgagtgtgataaagacctcagtagaaattcattacttcacattcaccagagacttcacataggagagaagccttttaaatgtaatcagtgtggtaagagttttaatcggagttcagtacttcatgttcatcagagagtccacacaggagaaaaaccatataagtgtgatgagtgtggtaagggtttcagccagagctcaaatcttcgaattcatcagttagtacacacaggagagaagtcttataaatgtgaagactgtggtaaaggctttacccagcgctcaaatcttcaaattcatcagagagtgcatacaggagagaaaccttataaatgtgatgactgtggaaaggactttagtcacagctcagatcttcgcattcatcagagagtccatacaggggagaaaccctatacttgtcctgaatgtgggaagggcttcagtaagagttcaaagcttcacactcatcaaagagtacatactggagagaaaccctacaaatgtgaagagtgtggcaagggattcagtcagcgttcacatcttctcattcatcagagagtccatacaggagaaaagccctataaatgtcatgattgtggaaagggttttagtcacagttctaatcttcacattcatcagagggtccatacaggagagaagccttatcaatgtgctaagtgtggtaaaggtttcagtcatagctcagctcttcgaattcatcaaagagtccatgcaggagagaaaccttacaaatgccgtgaatattataagggatttgatcataattcacatcttcacaataatcatagaagaggaaacttataaatattgttcatttagttaacagctttaatcaaagtttacctaacctttaaaccctataaatcctgctgttaaggaaatcttataaataacacaagtaatcccaagcaacatttatagtttcccctatctcccactaagaattatttgcttcaaaaggagatctttagaaaaaaccctatatatttaaaattatagtgtatttttctttacctactataaatataatacagtcataaatatattaaacatttaaggagaaaactcttcattctatttcattctagtctttttttctgtgcattttaatgtgcatgaaattgtgtgttcaattttgtattttcactgtcttcaaaatatttacttaaattttggtttgaattgaaactggttggccaactgttaaacgacatctcttaactcccctaaaaactccctaggaagtaacagaaaagatggaaacacatagaacttaaaactcagttttggccggtagaattca

SEQ ID NO: 201765 - DNA, 3448 bp, Homo sapiens
  Payload ID: 19806
  Gene Name: zinc finger protein 215
  Uniprot ID: Q9UL58
  ENST ID: ENST00000278319
  CDS Start-End: 589-2142
tgcagaaagggacggggctggcaaaggcctggtctacctcaccgatccgggtcgcgggggctcctagggggttccttccacagctggtgcgcgtgcgcaagagtgcgtcgaggttgttccgcggcaatttatgaaactcggagccggcagtgagttgagggttcggcgaggtcagggattcctagttgcagcgtgattaccaacgccagctcccttcactgtccaagacagcgattccgcggctcctctgagaactggcgctttgttcatcatttgccacttaagctacttgcagtcacgtcacaccttggatctctatcatcaaaactattccacctcggaaatcttacctaaatgcagcatgccatcctgaacgtctctccctgtcctagctctgtaactgtttacattgctcaggtacctgaatattggctttgtgtctaaagtttctggaactttcctccttaccgtgaaataacttggcttaaatcacactgcatatagtacacaggtgcttagctcaagcctgagaattactgcaatctagtaaggcggatttgaactactgtgggagttctatttaggaagatgcagcctctgagcaagttgatggctatctcaaaacctcgaaacctgtctctacgtgaacaaagagaggttctgagagcagatatgtcttggcagcaggaaaccaaccccgtcgtggagacacatgactctgaggcatctcgtcaaaagttcagacatttccagtatttgaaagtgtctgggccccatgaagccctgagccaactctgggagctctgtcttcaatggctgagaccagagattcatacaaagaagcagattatagaactgttggtgctggaacaattcctggcaatcctgcctgaagaagtcaggacttgggtgaatttacaacatccaaacaacagtaaagatatggtgaccctcatagaagatgtgattgaaatgcttgaagatgaagatatgccctgcaaggactctgccctgcagatggggagcatcaaggagaaaatgaaagctggctcacgaacaggcaaaccacaggaaccagtgacattcaaagatgtggttgtggaattcagcaaggaagagtgggggcaactggactctgctgtaaagaacctgtacaggaatgtgatgctggaaaactttaggaacctgaattcattgcgtaaagcacatctactttccaaaccatttgagagccttaagttggagagtaagaaaaaaagatggataatggagaaagaaataccaaggaagactatttttgacatgaagagtatttctggagaagaatcatcccatggagtgattatgacaaggcttaccgaaagtggacacccttcttcagatgcctggaaaggtgagaattggttatataggaaccagaaaaaatgggacataaatttgccacaagaggctttcattcctgagacaatttacactgaggaggaagattttgaatgtagtgaaaataagaaaagctttgatattaattcagttagctcaatttgtgctatacaagtgggaattccttcaagaaaggggtctccaaaatgtgataagtttaaaacttacttcaaatttaatttagactcagtaggtaagcaacattcagaatatgaatatgggaatgacttgagtttgagtacagatattcgacaccaaaaaagtcatactacaatgaattcctatgaatgttatcaatgtgggaaagccttctgccgaagttcatcccttattcgacatcagatcattcacacaggagagaaaccctataaatgcagtgaatgtgggagattcttcaaccgacgtacaaaccttactaagcatcaaaaacttcatgctgaagcaaaggcctgcacaagcaataaatgtggaaaggccttcagtaaaagtgaagacagtaataatccaacactccattttggaaacaatttctatcaatgtgttaactgtggaaaatccttcaaccggagctcctctcttattcgacaccaaatgattcacacgggagagaaaccattcaaatgtaaggaatgtagtaaagccttcaacaggagttcaaaccttgttaaacatcaaaaactgcatactcgagataagtcctgaaaaaagaaaaaatgaaagattaccttcagtcagaatgcagaactcatttaacatcatgaatttatgctggataaaatctcatgaatataatgtaagaaaacatttgtcagatttttctttaaatgatatcacagaattaatgttggatagaaatatcattggatagaaatctgtttgaaggaattttcctggttttcagatgaagccataaggctttggagttaaaccacagtatcaccatacaagtatttgtttatcattattttgatatccattaccctcacctctccctagttcataaataggtctatagcatactaatatccacctgatttattgacgaagtagacattaggcaaagccaaacaatactcttggagttgatatttaataaaactcagcccttttaagaaggtcacaagaaatcattagctcatgcgaatataagagaatacttctaaggacagaaatctctgaatcaatggctaagacaacagtaacagccatttactccactcctgacaataccctttgttgtcttgctgttgaatggagactagagttgggaaagggttatcaactgcaatgggagaagtatgtattgctgttaatctatatgtattcttaaaatctgcatttgtttatagcaggtccttgaaaaatgtttttgttttgttataatgttataattgttatgatgttgatgagaaaaatatcgattcccagccagggacactgtgtggagttcgcacactctccctatgtctccgggtgctccagtttcaaaccccaaagatgtatacattaggttaattgacatatctaaattatctcagtctgagtttgtgaggaagtgtgccctgcagtggaatggctcctaatcagggtttgttcccaccattgccctgagctgctaggatgcgctctgtccacccatggccctgtactggaataacagggtaaataattatcttatctgtttttattaatccgtcttaaatgtgtatatagctcagatttattttaatgtctgatattggaagcgtttggggtctttagaagtttgatgatgttgtgaccagacatttgccttaggaacttaactcttgtttgtatccattagtctatggtaaaattggttttgttatacatcatttcacttaaagttgcagttcctaagaacctattgatgatgttcagtgcagacttactgtacctttgggaatttaggctggagagacgtccatagccttaggtatatcatttataccagacattatgaagttattaaagtctcctatactct

SEQ ID NO: 201766 - DNA, 3257 bp, Homo sapiens
  Payload ID: 19806
  Gene Name: zinc finger protein 215
  Uniprot ID: Q9UL58
  ENST ID: ENST00000414517
  CDS Start-End: 387-1940
agagtgcgtcgaggttgttccgcggcaatttatgaaactcggagccggcagtgagttgagggttcggcgaggtcagggattcctagttgcagcgtgattaccaacgccagctcccttcactgtccaagacagcgattccgcggctcctctgagaactggcgcttgtgagtgactgaacgggccactggagaggagcggtgctcacggttgctcaggtacctgaatattggctttgtgtctaaagtttctggaactttcctccttaccgtgaaataacttggcttaaatcacactgcatatagtacacaggtgcttagctcaagcctgagaattactgcaatctagtaaggcggatttgaactactgtgggagttctatttaggaagatgcagcctctgagcaagttgatggctatctcaaaacctcgaaacctgtctctacgtgaacaaagagaggttctgagagcagatatgtcttggcagcaggaaaccaaccccgtcgtggagacacatgactctgaggcatctcgtcaaaagttcagacatttccagtatttgaaagtgtctgggccccatgaagccctgagccaactctgggagctctgtcttcaatggctgagaccagagattcatacaaagaagcagattatagaactgttggtgctggaacaattcctggcaatcctgcctgaagaagtcaggacttgggtgaatttacaacatccaaacaacagtaaagatatggtgaccctcatagaagatgtgattgaaatgcttgaagatgaagatatgccctgcaaggactctgccctgcagatggggagcatcaaggagaaaatgaaagctggctcacgaacaggcaaaccacaggaaccagtgacattcaaagatgtggttgtggaattcagcaaggaagagtgggggcaactggactctgctgtaaagaacctgtacaggaatgtgatgctggaaaactttaggaacctgaattcattgcgtaaagcacatctactttccaaaccatttgagagccttaagttggagagtaagaaaaaaagatggataatggagaaagaaataccaaggaagactatttttgacatgaagagtatttctggagaagaatcatcccatggagtgattatgacaaggcttaccgaaagtggacacccttcttcagatgcctggaaaggtgagaattggttatataggaaccagaaaaaatgggacataaatttgccacaagaggctttcattcctgagacaatttacactgaggaggaagattttgaatgtagtgaaaataagaaaagctttgatattaattcagttagctcaatttgtgctatacaagtgggaattccttcaagaaaggggtctccaaaatgtgataagtttaaaacttacttcaaatttaatttagactcagtaggtaagcaacattcagaatatgaatatgggaatgacttgagtttgagtacagatattcgacaccaaaaaagtcatactacaatgaattcctatgaatgttatcaatgtgggaaagccttctgccgaagttcatcccttattcgacatcagatcattcacacaggagagaaaccctataaatgcagtgaatgtgggagattcttcaaccgacgtacaaaccttactaagcatcaaaaacttcatgctgaagcaaaggcctgcacaagcaataaatgtggaaaggccttcagtaaaagtgaagacagtaataatccaacactccattttggaaacaatttctatcaatgtgttaactgtggaaaatccttcaaccggagctcctctcttattcgacaccaaatgattcacacgggagagaaaccattcaaatgtaaggaatgtagtaaagccttcaacaggagttcaaaccttgttaaacatcaaaaactgcatactcgagataagtcctgaaaaaagaaaaaatgaaagattaccttcagtcagaatgcagaactcatttaacatcatgaatttatgctggataaaatctcatgaatataatgtaagaaaacatttgtcagatttttctttaaatgatatcacagaattaatgttggatagaaatatcattggatagaaatctgtttgaaggaattttcctggttttcagatgaagccataaggctttggagttaaaccacagtatcaccatacaagtatttgtttatcattattttgatatccattaccctcacctctccctagttcataaataggtctatagcatactaatatccacctgatttattgacgaagtagacattaggcaaagccaaacaatactcttggagttgatatttaataaaactcagcccttttaagaaggtcacaagaaatcattagctcatgcgaatataagagaatacttctaaggacagaaatctctgaatcaatggctaagacaacagtaacagccatttactccactcctgacaataccctttgttgtcttgctgttgaatggagactagagttgggaaagggttatcaactgcaatgggagaagtatgtattgctgttaatctatatgtattcttaaaatctgcatttgtttatagcaggtccttgaaaaatgtttttgttttgttataatgttataattgttatgatgttgatgagaaaaatatcgattcccagccagggacactgtgtggagttcgcacactctccctatgtctccgggtgctccagtttcaaaccccaaagatgtatacattaggttaattgacatatctaaattatctcagtctgagtttgtgaggaagtgtgccctgcagtggaatggctcctaatcagggtttgttcccaccattgccctgagctgctaggatgcgctctgtccacccatggccctgtactggaataacagggtaaataattatcttatctgtttttattaatccgtcttaaatgtgtatatagctcagatttattttaatgtctgatattggaagcgtttggggtctttagaagtttgatgatgttgtgaccagacatttgccttaggaacttaactcttgtttgtatccattagtctatggtaaaattggttttgttatacatcatttcacttaaagttgcagttcctaagaacctattgatgatgttcagtgcagacttactgtacctttgggaatttaggctggagagacgtccatagccttaggtatatcatttataccagacattatgaagttattaaagtctcctatactctgtacaccagaa

SEQ ID NO: 201767 - DNA, 1396 bp, Homo sapiens
  Payload ID: 19806
  Gene Name: zinc finger protein 215
  Uniprot ID: Q9UL58
  ENST ID: ENST00000529903
  CDS Start-End: 88-1002
tagtacacaggtgcttagctcaagcctgagaattactgcaatctagtaaggcggatttgaactactgtgggagttctatttaggaagatgcagcctctgagcaagttgatggctatctcaaaacctcgaaacctgtctctacgtgaacaaagagaggttctgagagcagatatgtcttggcagcaggaaaccaaccccgtcgtggagacacatgactctgaggcatctcgtcaaaagttcagacatttccagtatttgaaagtgtctgggccccatgaagccctgagccaactctgggagctctgtcttcaatggctgagaccagagattcatacaaagaagcagattatagaactgttggtgctggaacaattcctggcaatcctgcctgaagaagtcaggacttgggtgaatttacaacatccaaacaacagtaaagatatggtgaccctcatagaagatgtgattgaaatgcttgaagatgaagatatgccctgcaaggactctgccctgcagatggggagcatcaaggagaaaatgaaagctggctcacgaacaggcaaaccacaggaaccagtgacattcaaagatgtggttgtggaattcagcaaggaagagtgggggcaactggactctgctgtaaagaacctgtacaggaatgtgatgctggaaaactttaggaacctgaattcattgcgtaaagcacatctactttccaaaccatttgagagccttaagttggagagtaagaaaaaaagatggataatggagaaagaaataccaaggaagactatttttgacatgaagagtatttctggagaagaatcatcccatggagtgattatgacaaggcttaccgaaagtggacacccttcttcagatgcctggaaagatggagtttccctcttgttgcccaggctggagtataatgatgcagtctcggctcactgcaacctccacctctgggttcaagtgattctcctgcctcagcctcctgagtagctgggattagaggcacccaccaccatgcctagctaattttttgtgtttctagtagaaatggggtttcaccatgttggccaggctggtcttgaactcctgacctcaagtgatccgcccacctcagcctcctaaagtgctgggatgacaggcgtgagccaccacgcccagctgtcccttaacatttgaaatgtgtatatcacctcatttagctattctgtttctagaaacttatttttacaaagaaaattcacaaatgcacacgaaaatgtatgcatgaagatacttgtcacagcgttggttgtaataatatggaattaggtcaaatatttatcagtaaaagactaagtcatattgtgcatatactgaaatatgtgataaacctaaatttactgac

SEQ ID NO: 201768 - DNA, 1503 bp, Homo sapiens
  Payload ID: 19806
  Gene Name: zinc finger protein 215
  Uniprot ID: Q9UL58
  ENST ID: ENST00000610573
  CDS Start-End: 589-1503
tgcagaaagggacggggctggcaaaggcctggtctacctcaccgatccgggtcgcgggggctcctagggggttccttccacagctggtgcgcgtgcgcaagagtgcgtcgaggttgttccgcggcaatttatgaaactcggagccggcagtgagttgagggttcggcgaggtcagggattcctagttgcagcgtgattaccaacgccagctcccttcactgtccaagacagcgattccgcggctcctctgagaactggcgctttgttcatcatttgccacttaagctacttgcagtcacgtcacaccttggatctctatcatcaaaactattccacctcggaaatcttacctaaatgcagcatgccatcctgaacgtctctccctgtcctagctctgtaactgtttacattgctcaggtacctgaatattggctttgtgtctaaagtttctggaactttcctccttaccgtgaaataacttggcttaaatcacactgcatatagtacacaggtgcttagctcaagcctgagaattactgcaatctagtaaggcggatttgaactactgtgggagttctatttaggaagatgcagcctctgagcaagttgatggctatctcaaaacctcgaaacctgtctctacgtgaacaaagagaggttctgagagcagatatgtcttggcagcaggaaaccaaccccgtcgtggagacacatgactctgaggcatctcgtcaaaagttcagacatttccagtatttgaaagtgtctgggccccatgaagccctgagccaactctgggagctctgtcttcaatggctgagaccagagattcatacaaagaagcagattatagaactgttggtgctggaacaattcctggcaatcctgcctgaagaagtcaggacttgggtgaatttacaacatccaaacaacagtaaagatatggtgaccctcatagaagatgtgattgaaatgcttgaagatgaagatatgccctgcaaggactctgccctgcagatggggagcatcaaggagaaaatgaaagctggctcacgaacaggcaaaccacaggaaccagtgacattcaaagatgtggttgtggaattcagcaaggaagagtgggggcaactggactctgctgtaaagaacctgtacaggaatgtgatgctggaaaactttaggaacctgaattcattgcgtaaagcacatctactttccaaaccatttgagagccttaagttggagagtaagaaaaaaagatggataatggagaaagaaataccaaggaagactatttttgacatgaagagtatttctggagaagaatcatcccatggagtgattatgacaaggcttaccgaaagtggacacccttcttcagatgcctggaaagatggagtttccctcttgttgcccaggctggagtataatgatgcagtctcggctcactgcaacctccacctctgggttcaagtgattctcctgcctcagcctcctgagtag

SEQ ID NO: 201769 - DNA, 5633 bp, Homo sapiens
  Payload ID: 19807
  Gene Name: zinc finger protein 217
  Uniprot ID: O75362
  ENST ID: ENST00000302342
  CDS Start-End: 272-3418
gacaaagagaactaatgctttgtgctgattcatatttgaatcgaggcattgggaaccctgtatgccttgtttgtggaaagaaccagtgacaccatcactgagcttcctaaaagttcgaagaagttagaggactatacactttcttttgaacttttataataaatatttgctctggtttttggaacccagggctgttagaggggtgagtgacaagtcttacaagtggccttattccaactccagaaattgcccaacggaactttgagattatatgcaatcgaaagtgacaggaaacatgccaactcaatccctcttaatgtacatggatgggccagaagtgattggcagctctcttggcagtccgatggagatggaggatgccttgtcaatgaaagggaccgctgttgttccattccgagctacacaagaaaaaaatgtcatccaaatcgaggggtatatgcccttggattgcatgttctgcagccagaccttcacacattcagaagaccttaataaacatgtcttaatgcaacaccggcctaccctctgtgaaccagcagttcttcgggttgaagcagagtatctcagtccgcttgataaaagtcaagtgcgaacagaacctcccaaggaaaagaattgcaaggaaaatgaatttagctgtgaggtatgtgggcagacatttagagtcgcttttgatgttgagatccacatgagaacacacaaagattctttcacttacgggtgtaacatgtgcggaagaagattcaaggagccttggtttcttaaaaatcacatgcggacacataatggcaaatcgggggccagaagcaaactgcagcaaggcttggagagtagtccagcaacgatcaacgaggtcgtccaggtgcacgcggccgagagcatctcctctccttacaaaatctgcatggtttgtggcttcctatttccaaataaagaaagtctaattgagcaccgcaaggtgcacaccaaaaaaactgctttcggtaccagcagcgcgcagacagactctccacaaggaggaatgccgtcctcgagggaggacttcctgcagttgttcaacttgagaccaaaatctcaccctgaaacggggaagaagcctgtcagatgcatccctcagctcgatccgttcaccaccttccaggcttggcagctggctaccaaaggaaaagttgccatttgccaagaagtgaaggaatcggggcaagaagggagcaccgacaacgacgattcgagttccgagaaggagcttggagaaacaaataagggcagttgtgcaggcctctcgcaagagaaagagaagtgcaaacactcccacggcgaagcgccctccgtggacgcggatcccaagttacccagtagcaaggagaagcccactcactgctccgagtgcggcaaagctttcagaacctaccaccagctggtcttgcactccagggtccacaagaaggaccggagggccggcgcggagtcgcccaccatgtctgtggacgggaggcagccggggacgtgttctcctgacctcgccgcccctctggatgaaaatggagccgtggatcgaggggaaggtggttctgaagacggatctgaggatgggcttcccgaaggaatccatctggataaaaatgatgatggaggaaaaataaaacatcttacatcttcaagagagtgtagttattgtggaaagtttttccgttcaaattattacctcaatattcatctcagaacgcatacaggtgaaaaaccatacaaatgtgaattttgtgaatatgctgcagcccagaagacatctctgaggtatcacttggagagacatcacaaggaaaaacaaaccgatgttgctgctgaagtcaagaacgatggtaaaaatcaggacactgaagatgcactattaaccgctgacagtgcgcaaaccaaaaatttgaaaagattttttgatggtgccaaagatgttacaggcagtccacctgcaaagcagcttaaggagatgccttctgtttttcagaatgttctgggcagcgctgtcctctcaccagcacacaaagatactcaggatttccataaaaatgcagctgatgacagtgctgataaagtgaataaaaaccctacccctgcttacctggacctgttaaaaaagagatcagcagttgaaactcaggcaaataacctcatctgtagaaccaaggcggatgttactcctcctccggatggcagtaccacccataaccttgaagttagccccaaagagaagcaaacggagaccgcagctgactgcagatacaggccaagtgtggattgtcacgaaaaacctttaaatttatccgtgggggctcttcacaattgcccggcaatttctttgagtaaaagtttgattccaagtatcacctgtccattttgtaccttcaagacattttatccagaagttttaatgatgcaccagagactggagcataaatacaatcctgacgttcataaaaactgtcgaaacaagtccttgcttagaagtcgacgtaccggatgcccgccagcgttgctgggaaaagatgtgcctcccctctctagtttctgtaaacccaagcccaagtctgctttcccggcgcagtccaaatccctgccatctgcgaaggggaagcagagccctcctgggccaggcaaggcccctctgacttcagggatagactctagcactttagccccaagtaacctgaagtcccacagaccacagcagaatgtgggggtccaaggggccgccaccaggcaacagcaatctgagatgtttcctaaaaccagtgtttcccctgcaccggataagacaaaaagacccgagacaaaattgaaacctcttccagtagctccttctcagcccaccctcggcagcagtaacatcaatggttccatcgactaccccgccaagaacgacagcccgtgggcacctccgggaagagactatttctgtaatcggagtgccagcaatactgcagcagaatttggtgagccccttccaaaaagactgaagtccagcgtggttgcccttgacgttgaccagcccggggccaattacagaagaggctatgaccttcccaagtaccatatggtcagaggcatcacatcactgttaccgcaggactgtgtgtatccgtcgcaggcgctgcctcccaaaccaaggttcctgagctccagcgaggtcgattctccaaatgtgctgactgttcagaagccctatggtggctccgggccactttacacttgtgtgcctgctggtagtccagcatccagctcgacgttagaaggaaaaaggcctgtgtcatatcaacacttatctaacagcatggcacaaaagagaaactatgagaattttattgggaatgcacattatcgaccaaatgacaaaaaaacttgattcactaattagggggaaaaaaggtcttggtggatgtcagtgcttactccccatgaaattaaattttacttcatcctttgagaagcgaatggtgaaagctactgaaataagctgtgattgtactgtacataaaacatatgaggaatctgcaaggaacactacagttgtgtaaagttgttctgttaacttttgtaccaaatagcaatacaaactagttggaacagttggaacttacatacatggggactggaaatctctattttgtccctgaataatatttttcttagaattgaccaaataagaagtggaatttttgcatacttgagcgctgctgaaaagaaatcatttgggttgggtggggcgggatgggggaaaagtatataatgcttgcacctcaggtaaaaatctgtaaatatctaagttgtaaacctgcttgttcaaatactgtgtgtattccttttctctaatgcagctcatcacttggagcagtttctgctattgtgctctttcatttaaaatgtatgtttttttttttttaaactgtcaatgattttgtattatgttgaatccacccaaatctattgttgtcttaaaattgttaatggaagtattgaccctctatgatatgtgctgcagatatcgaggtcagccattcggaagctggcagcattttatcgcaactttgagcatctcagatggggaaggcaccttcttcctcgcctctccagattgtcctggaacctccaggatccttgactgagggcgttgggatggcttgtaggatttttaagagagtgtgtctacagacaagcattttctctgtagagcagccacacgttgtataaacataaactgtatgtgcagttatttaaatttgtttctgtcaaattaatcatttttgttggacgattcagtggcgggggggttttgcctaaattagtatataaaaacaaaaatgctaaattatatctgtgaattgcaggtattggggaacagttttaagggaaattttggggggaacattttaggtttgtatttggtagtcttaatgtatctggcatttgggtgaactgtggacatactagagttgattatagacacattgattttgaataaggaactgctggccgagcccgctgggagtctagaaagagaaaatctgtttctagacctcagttattttcccatttttggttgttttgaagcagtaacatttttctcagtgcacatgcaatttgggttttagagaagatggccaccagctggcttcctagatattttaaacttttgttctttaatatgctgtccatggctgagtttattagtacatgggcttagtgaccacaaaatattttattaagaaactgtttcaaaaataaatttgcactgttcatttttctggcctcgctgttctccatagagcaagggtaatcctagaaaaaattttttttttttaaattatgcaacgtaagatgtcctccttgatagaagtcttagctcctgtgttacaagggagaactcatttgagatcagtctgttggcattgcaatgaagtgctttgtatcaggaaagtgtacactattgaccttttttcctgttcacaagctgagccatatgtacataatctagattttgttttcatagttttgcacttttatagcctatttttgaagattaacacatttgcaagatgattgactcaatctttgcctaatccaatgagtgttacagagagcttgctgtgactagaaccataaatcttaaagggggtatgtgataatagagggctggaatttaaacctgtatttaaaaaaaagaatcaccaaatctatttgaaaacaagtcgatttgtattatgctggaattttttgggctttcagatttctctttttaaccacatttctgaatgtataaaaataccaattattttcctacagccctttgtacttcaaaatatgtttttgtgtccatcagtattaactattggtatactactggttttatatttttttttctttgagacaacagtacatataatagaggtacaattcgttggatttttgtttatgtatttatttcattccagtttgatttattttaattgttgatacttaagttgtcgaacagtagacattacttgttttatttatgatatatttcagcttaaagttatgttattatatgtggaagtgtaaatatagatttggtgttttgc

SEQ ID NO: 201770 - DNA, 5796 bp, Homo sapiens
  Payload ID: 19807
  Gene Name: zinc finger protein 217
  Uniprot ID: O75362
  ENST ID: ENST00000371471
  CDS Start-End: 427-3573
attcaaacccggccggcccgagtggtgtcagctcagtcccggccgccgccgcgcgaggaaatggccgaggagccggagccgcagggtttggaaatcccttgtctccaggttgctgggattgacttcttgctcaattgaaacactcattcaatggagacaaagagaactaatgctttgtgctgattcatatttgaatcgaggcattgggaaccctgtatgccttgtttgtggaaagaaccagtgacaccatcactgagcttcctaaaagttcgaagaagttagaggactatacactttcttttgaacttttataataaatatttgctctggtttttggaacccagggctgttagaggggtgagtgacaagtcttacaagtggccttattccaactccagaaattgcccaacggaactttgagattatatgcaatcgaaagtgacaggaaacatgccaactcaatccctcttaatgtacatggatgggccagaagtgattggcagctctcttggcagtccgatggagatggaggatgccttgtcaatgaaagggaccgctgttgttccattccgagctacacaagaaaaaaatgtcatccaaatcgaggggtatatgcccttggattgcatgttctgcagccagaccttcacacattcagaagaccttaataaacatgtcttaatgcaacaccggcctaccctctgtgaaccagcagttcttcgggttgaagcagagtatctcagtccgcttgataaaagtcaagtgcgaacagaacctcccaaggaaaagaattgcaaggaaaatgaatttagctgtgaggtatgtgggcagacatttagagtcgcttttgatgttgagatccacatgagaacacacaaagattctttcacttacgggtgtaacatgtgcggaagaagattcaaggagccttggtttcttaaaaatcacatgcggacacataatggcaaatcgggggccagaagcaaactgcagcaaggcttggagagtagtccagcaacgatcaacgaggtcgtccaggtgcacgcggccgagagcatctcctctccttacaaaatctgcatggtttgtggcttcctatttccaaataaagaaagtctaattgagcaccgcaaggtgcacaccaaaaaaactgctttcggtaccagcagcgcgcagacagactctccacaaggaggaatgccgtcctcgagggaggacttcctgcagttgttcaacttgagaccaaaatctcaccctgaaacggggaagaagcctgtcagatgcatccctcagctcgatccgttcaccaccttccaggcttggcagctggctaccaaaggaaaagttgccatttgccaagaagtgaaggaatcggggcaagaagggagcaccgacaacgacgattcgagttccgagaaggagcttggagaaacaaataagggcagttgtgcaggcctctcgcaagagaaagagaagtgcaaacactcccacggcgaagcgccctccgtggacgcggatcccaagttacccagtagcaaggagaagcccactcactgctccgagtgcggcaaagctttcagaacctaccaccagctggtcttgcactccagggtccacaagaaggaccggagggccggcgcggagtcgcccaccatgtctgtggacgggaggcagccggggacgtgttctcctgacctcgccgcccctctggatgaaaatggagccgtggatcgaggggaaggtggttctgaagacggatctgaggatgggcttcccgaaggaatccatctggataaaaatgatgatggaggaaaaataaaacatcttacatcttcaagagagtgtagttattgtggaaagtttttccgttcaaattattacctcaatattcatctcagaacgcatacaggtgaaaaaccatacaaatgtgaattttgtgaatatgctgcagcccagaagacatctctgaggtatcacttggagagacatcacaaggaaaaacaaaccgatgttgctgctgaagtcaagaacgatggtaaaaatcaggacactgaagatgcactattaaccgctgacagtgcgcaaaccaaaaatttgaaaagattttttgatggtgccaaagatgttacaggcagtccacctgcaaagcagcttaaggagatgccttctgtttttcagaatgttctgggcagcgctgtcctctcaccagcacacaaagatactcaggatttccataaaaatgcagctgatgacagtgctgataaagtgaataaaaaccctacccctgcttacctggacctgttaaaaaagagatcagcagttgaaactcaggcaaataacctcatctgtagaaccaaggcggatgttactcctcctccggatggcagtaccacccataaccttgaagttagccccaaagagaagcaaacggagaccgcagctgactgcagatacaggccaagtgtggattgtcacgaaaaacctttaaatttatccgtgggggctcttcacaattgcccggcaatttctttgagtaaaagtttgattccaagtatcacctgtccattttgtaccttcaagacattttatccagaagttttaatgatgcaccagagactggagcataaatacaatcctgacgttcataaaaactgtcgaaacaagtccttgcttagaagtcgacgtaccggatgcccgccagcgttgctgggaaaagatgtgcctcccctctctagtttctgtaaacccaagcccaagtctgctttcccggcgcagtccaaatccctgccatctgcgaaggggaagcagagccctcctgggccaggcaaggcccctctgacttcagggatagactctagcactttagccccaagtaacctgaagtcccacagaccacagcagaatgtgggggtccaaggggccgccaccaggcaacagcaatctgagatgtttcctaaaaccagtgtttcccctgcaccggataagacaaaaagacccgagacaaaattgaaacctcttccagtagctccttctcagcccaccctcggcagcagtaacatcaatggttccatcgactaccccgccaagaacgacagcccgtgggcacctccgggaagagactatttctgtaatcggagtgccagcaatactgcagcagaatttggtgagccccttccaaaaagactgaagtccagcgtggttgcccttgacgttgaccagcccggggccaattacagaagaggctatgaccttcccaagtaccatatggtcagaggcatcacatcactgttaccgcaggactgtgtgtatccgtcgcaggcgctgcctcccaaaccaaggttcctgagctccagcgaggtcgattctccaaatgtgctgactgttcagaagccctatggtggctccgggccactttacacttgtgtgcctgctggtagtccagcatccagctcgacgttagaaggaaaaaggcctgtgtcatatcaacacttatctaacagcatggcacaaaagagaaactatgagaattttattgggaatgcacattatcgaccaaatgacaaaaaaacttgattcactaattagggggaaaaaaggtcttggtggatgtcagtgcttactccccatgaaattaaattttacttcatcctttgagaagcgaatggtgaaagctactgaaataagctgtgattgtactgtacataaaacatatgaggaatctgcaaggaacactacagttgtgtaaagttgttctgttaacttttgtaccaaatagcaatacaaactagttggaacagttggaacttacatacatggggactggaaatctctattttgtccctgaataatatttttcttagaattgaccaaataagaagtggaatttttgcatacttgagcgctgctgaaaagaaatcatttgggttgggtggggcgggatgggggaaaagtatataatgcttgcacctcaggtaaaaatctgtaaatatctaagttgtaaacctgcttgttcaaatactgtgtgtattccttttctctaatgcagctcatcacttggagcagtttctgctattgtgctctttcatttaaaatgtatgtttttttttttttaaactgtcaatgattttgtattatgttgaatccacccaaatctattgttgtcttaaaattgttaatggaagtattgaccctctatgatatgtgctgcagatatcgaggtcagccattcggaagctggcagcattttatcgcaactttgagcatctcagatggggaaggcaccttcttcctcgcctctccagattgtcctggaacctccaggatccttgactgagggcgttgggatggcttgtaggatttttaagagagtgtgtctacagacaagcattttctctgtagagcagccacacgttgtataaacataaactgtatgtgcagttatttaaatttgtttctgtcaaattaatcatttttgttggacgattcagtggcgggggggttttgcctaaattagtatataaaaacaaaaatgctaaattatatctgtgaattgcaggtattggggaacagttttaagggaaattttggggggaacattttaggtttgtatttggtagtcttaatgtatctggcatttgggtgaactgtggacatactagagttgattatagacacattgattttgaataaggaactgctggccgagcccgctgggagtctagaaagagaaaatctgtttctagacctcagttattttcccatttttggttgttttgaagcagtaacatttttctcagtgcacatgcaatttgggttttagagaagatggccaccagctggcttcctagatattttaaacttttgttctttaatatgctgtccatggctgagtttattagtacatgggcttagtgaccacaaaatattttattaagaaactgtttcaaaaataaatttgcactgttcatttttctggcctcgctgttctccatagagcaagggtaatcctagaaaaaattttttttttttaaattatgcaacgtaagatgtcctccttgatagaagtcttagctcctgtgttacaagggagaactcatttgagatcagtctgttggcattgcaatgaagtgctttgtatcaggaaagtgtacactattgaccttttttcctgttcacaagctgagccatatgtacataatctagattttgttttcatagttttgcacttttatagcctatttttgaagattaacacatttgcaagatgattgactcaatctttgcctaatccaatgagtgttacagagagcttgctgtgactagaaccataaatcttaaagggggtatgtgataatagagggctggaatttaaacctgtatttaaaaaaaagaatcaccaaatctatttgaaaacaagtcgatttgtattatgctggaattttttgggctttcagatttctctttttaaccacatttctgaatgtataaaaataccaattattttcctacagccctttgtacttcaaaatatgtttttgtgtccatcagtattaactattggtatactactggttttatatttttttttctttgagacaacagtacatataatagaggtacaattcgttggatttttgtttatgtatttatttcattccagtttgatttattttaattgttgatacttaagttgtcgaacagtagacattacttgttttatttatgatatatttcagcttaaagttatgttattatatgtggaagtgtaaatatagatttggtgttttgcaatcttga

SEQ ID NO: 201771 - DNA, 746 bp, Homo sapiens
  Payload ID: 19807
  Gene Name: zinc finger protein 217
  ENST ID: ENST00000437222
  CDS Start-End: 1-450
ggtgagccccttccaaaaagactgaagtccagcgtggttgcccttgacgttgaccagcccggggccaattacagaagaggctatgaccttcccaagtaccatatggtcagaggcatcacatcactgttaccgcaggactgtgtgtatccgtcgcaggcgctgcctcccaaaccaaggttcctgagctccagcgaggtcgattctccaaatgtgctgactgttcagaagccctatggtggctccgggccactttacacttgtgtgcctgctggtagtccagcatccagctcgacgttagaaggtcttggtggatgtcagtgcttactccccatgaaattaaattttacttcatcctttgagaagcgaatggtgaaagctactgaaataagctgtgattgtactgtacataaaacatatgaggaatctgcaaggaacactacagttgtgtaaagttgttctgttaacttttgtaccaaatagcaatacaaactagttggaacagttggaacttacatacatggggactggaaatctctattttgtccctgaataatatttttcttagaattgaccaaataagaagtggaatttttgcatacttgagcgctgctgaaaagaaatcatttgggttgggtggggcgggatgggggaaaagtatataatgcttgcacctcaggtaaaaatctgtaaatatctaagttgtaaacctgcttgttcaaatactgtgtgtattccttttctctaat

SEQ ID NO: 201772 - DNA, 779 bp, Homo sapiens
  Payload ID: 19807
  Gene Name: zinc finger protein 217
  ENST ID: ENST00000431687
  CDS Start-End: 495-779
accgttttaaggcttcatggtgatgagggcatttaaccctcgggacacgcccattctgcaggcctggctcgacctccactttggagaagatgctccaggaacactgaagggcaggtcgtccccgaccttctatgaggattgcccagctcaagggtttggaaatcccttgtctccaggttgctgggattgacttcttgctcaattgaaacactcattcaatggagacaaagagaactaatgctttgtgctgattcatatttgaatcgaggcattgggaaccctgtatgccttgtttgtggaaagaaccagtgacaccatcactgagcttcctaaaagttcgaagaagttagaggactatacactttcttttgaacttttataataaatatttgctctggtttttggaacccagggctgttagaggggtgagtgacaagtcttacaagtggccttattccaactccagaaattgcccaacggaactttgagattatatgcaatcgaaagtgacaggaaacatgccaactcaatccctcttaatgtacatggatgggccagaagtgattggcagctctcttggcagtccgatggagatggaggatgccttgtcaatgaaagggaccgctgttgttccattccgagctacacaagaaaaaaatgtcatccaaatcgaggggtatatgcccttggattgcatgttctgcagccagaccttcacacattcagaagaccttaataaacatgtcttaatgcaacaccggcctaccctctgtgaacca

SEQ ID NO: 201773 - DNA, 3071 bp, Homo sapiens
  Payload ID: 19808
  Gene Name: zinc finger protein 219
  Uniprot ID: Q9P2Y4
  ENST ID: ENST00000360947
  CDS Start-End: 413-2581
gcaccccgcccctggcggccgcctctcgcggctcccggggtccccagctccctgtccccggagccagagcccggctcccgcgcggctcccagccccgccgcgccgccccccgcatgctaatggccgggccgcctcccgccgcacacaatgcgggccagggccgggggcgggggaccggggagggggcgggggccgggccgggggcgggggggccggggcccggcgcatctcccccggccccacgtaacgctgacgcccgcgccgccggcccgccgcccgccgccgccgccgccgccgccgcccgctccgccgccgcccgcccggggctcctccacagcacctgttgccttcattagcagcttttcctcctcttccctgcacttcccagaaccaaagaatgtgaagggggtccatggagggctcacgtccccgcgccccgagcggccacttagcgccgtcgccgccggctttcgacggcgagctggatctgcagcgatactccaacgggccagccgtgagcgcagggtcgctcgggatgggagcggtgagctggtctgagagtcgtgcaggcgaacggcgcttcccctgccctgtatgcgggaagcgcttccgcttcaactctatccttgctttgcacctgcgggcgcacccaggagcccaggccttccagtgccctcactgcggccaccgcgcggcgcagcgggctctgctgcgctcgcacctgcgcacacaccagcccgagcgcccacgtagtcctgctgcacgcctgttgctggagttggaagagcgcgcgctactacgcgaggcccgactggggagagcccgaagctcagggggcatgcaggccacccctgccactgagggtctggcgcggccccaggctccttcatcgtccgccttccgttgcccctactgcaaaggcaagtttcgcacctcggcggagcgcgaacgccacctgcacatcctgcataggccctggaagtgcggcctgtgcagtttcggctccagccaggaggaggagctgctgcaccacagcctgacggcccacggggctcccgagcgtcccctggcggccacctccgctgcgcctccgcctcagcctcagcctcagcctccaccccagcccgaacccagatcagtcccccagccggagccggagccggagcccgaacgtgaggcaaccccgaccccagctcctgccgctcccgaggagcccccagcgcctccggagttccgctgccaagtgtgcggccagagctttacacagtcttggtttctcaagggccacatgcgtaagcacaaggcctccttcgatcatgcgtgtccggtgtgcggccgctgcttcaaggagccctggttccttaagaaccacatgaaggtgcacgccagcaagctgggcccactgcgtgccccggggcctgcctccgggcctgcccgcgccccccagcctcctgacctcggcctgctggcctatgagccgttgggcccagcgctcctcttggccccggctcccaccccggccgagcgccgtgagcccccgagcctcttgggctacctgagcctgcgagctggcgagggccggcccaacggcgagggtgctgagcccggtcccggccgcagcttcggaggcttccgcccgctgtcctctgctctcccggcccgggctcgccggcaccgtgcggaggagcctgaggaagaagaggaggtggtggaggccgaggaggaaacctgggcccggggcaggtcgctgggctctctggcttccctgcacccgcgcccgggtgagggaccggggcactctgcctctgctgctggggcccaggcaagatcgaccgccacgcaggaagagaatgggctgttggttggagggacccggcctgaagggggccggggcgccaccggcaaggattgtcctttctgcggaaaatctttccgctcagcacatcacctcaaagtgcatctgcgagtgcacacaggcgagcggccctacaagtgtccgcactgcgactacgcgggcacccagtccggctcgctcaagtatcacctacagcgccaccaccgggagcagaggagcggggccggccccgggccacccccggagccaccgcctccttcccagcggggttcggccccgcaatctggagccaagccgtctccgcagcctgcgacctgggtggagggcgcctcaagtccccggcctccttctagcggtgctgggccggggtcccgtcggaagcccgccagccctgggaggaccctgcgcaacgggcgaggcggtgaggccgaacccctggacctgtccttgcgggcagggccgggaggcgaggccgggcctgggggtgccctccaccgctgcctcttctgcccgttcgccactggagccccagagctcatggccttgcaccttcaagtgcaccacagccgccgggctaggggccgccggccaccccaggctgacgcgtccccgccctatgcccgagtaccatcaggagagacccctcccagtccttcgcaggaaggggaggagggctccgggctgtccagacccggagaggcagggctgggggggcaagaacggtagtgggccctcaggggcgattagcttagtgagcttaccccgccggagcgggggagcgctagaggtagttgggtagagaagccagcagggggcagcgtgggacccatatcccagccccaggcggaccagaggtggaaggcgcggcgggcgtaggagggtgggctggcggtacccacccagcccaagggagtcacagtgccttagaagtggcagaggtgagggtcaaagaacggggtccctgggctggcagagaaggtttgtgtccctgttgaggagccactctgccagtctttgctggtccataggcgtgagagtttatttttgtacaaggggtgagggtggggggcactgtacccttctagccccatcaggggccctgtagacgtcgctatttttggtacgattcctgtcatccctattgcagagtcgtgtccccaataaacaggtgtcttgaggcacagggccctgtgtctgtctgcctacctatgtcctg

SEQ ID NO: 201774 - DNA, 2918 bp, Homo sapiens
  Payload ID: 19808
  Gene Name: zinc finger protein 219
  Uniprot ID: Q9P2Y4
  ENST ID: ENST00000451119
  CDS Start-End: 296-2464
ccactcttccaaggtgtcacaaacagaaaagagctgcagcggacgccactgcaatgtcaaggcaaggcagccaggctgcgctctatcctcactggtgcctggccctggctaggccgggagaagcagcattctctagggaaagaagccttctcaagtgggaacaaaaatgagtgtgaggcgaacagccatcccgggcactatgtgaatttgggctccacagcacctgttgccttcattagcagcttttcctcctcttccctgcacttcccagaaccaaagaatgtgaagggggtccatggagggctcacgtccccgcgccccgagcggccacttagcgccgtcgccgccggctttcgacggcgagctggatctgcagcgatactccaacgggccagccgtgagcgcagggtcgctcgggatgggagcggtgagctggtctgagagtcgtgcaggcgaacggcgcttcccctgccctgtatgcgggaagcgcttccgcttcaactctatccttgctttgcacctgcgggcgcacccaggagcccaggccttccagtgccctcactgcggccaccgcgcggcgcagcgggctctgctgcgctcgcacctgcgcacacaccagcccgagcgcccacgtagtcctgctgcacgcctgttgctggagttggaagagcgcgcgctactacgcgaggcccgactggggagagcccgaagctcagggggcatgcaggccacccctgccactgagggtctggcgcggccccaggctccttcatcgtccgccttccgttgcccctactgcaaaggcaagtttcgcacctcggcggagcgcgaacgccacctgcacatcctgcataggccctggaagtgcggcctgtgcagtttcggctccagccaggaggaggagctgctgcaccacagcctgacggcccacggggctcccgagcgtcccctggcggccacctccgctgcgcctccgcctcagcctcagcctcagcctccaccccagcccgaacccagatcagtcccccagccggagccggagccggagcccgaacgtgaggcaaccccgaccccagctcctgccgctcccgaggagcccccagcgcctccggagttccgctgccaagtgtgcggccagagctttacacagtcttggtttctcaagggccacatgcgtaagcacaaggcctccttcgatcatgcgtgtccggtgtgcggccgctgcttcaaggagccctggttccttaagaaccacatgaaggtgcacgccagcaagctgggcccactgcgtgccccggggcctgcctccgggcctgcccgcgccccccagcctcctgacctcggcctgctggcctatgagccgttgggcccagcgctcctcttggccccggctcccaccccggccgagcgccgtgagcccccgagcctcttgggctacctgagcctgcgagctggcgagggccggcccaacggcgagggtgctgagcccggtcccggccgcagcttcggaggcttccgcccgctgtcctctgctctcccggcccgggctcgccggcaccgtgcggaggagcctgaggaagaagaggaggtggtggaggccgaggaggaaacctgggcccggggcaggtcgctgggctctctggcttccctgcacccgcgcccgggtgagggaccggggcactctgcctctgctgctggggcccaggcaagatcgaccgccacgcaggaagagaatgggctgttggttggagggacccggcctgaagggggccggggcgccaccggcaaggattgtcctttctgcggaaaatctttccgctcagcacatcacctcaaagtgcatctgcgagtgcacacaggcgagcggccctacaagtgtccgcactgcgactacgcgggcacccagtccggctcgctcaagtatcacctacagcgccaccaccgggagcagaggagcggggccggccccgggccacccccggagccaccgcctccttcccagcggggttcggccccgcaatctggagccaagccgtctccgcagcctgcgacctgggtggagggcgcctcaagtccccggcctccttctagcggtgctgggccggggtcccgtcggaagcccgccagccctgggaggaccctgcgcaacgggcgaggcggtgaggccgaacccctggacctgtccttgcgggcagggccgggaggcgaggccgggcctgggggtgccctccaccgctgcctcttctgcccgttcgccactggagccccagagctcatggccttgcaccttcaagtgcaccacagccgccgggctaggggccgccggccaccccaggctgacgcgtccccgccctatgcccgagtaccatcaggagagacccctcccagtccttcgcaggaaggggaggagggctccgggctgtccagacccggagaggcagggctgggggggcaagaacggtagtgggccctcaggggcgattagcttagtgagcttaccccgccggagcgggggagcgctagaggtagttgggtagagaagccagcagggggcagcgtgggacccatatcccagccccaggcggaccagaggtggaaggcgcggcgggcgtaggagggtgggctggcggtacccacccagcccaagggagtcacagtgccttagaagtggcagaggtgagggtcaaagaacggggtccctgggctggcagagaaggtttgtgtccctgttgaggagccactctgccagtctttgctggtccataggcgtgagagtttatttttgtacaaggggtgagggtggggggcactgtacccttctagccccatcaggggccctgtagacgtcgctatttttggtacgattcctgtcatccctattgcagagtcgtgtccccaataaacaggtgtcttgaggc

SEQ ID NO: 201775 - DNA, 2908 bp, Homo sapiens
  Payload ID: 19808
  Gene Name: zinc finger protein 219
  Uniprot ID: Q9P2Y4
  ENST ID: ENST00000421093
  CDS Start-End: 288-2456
atcaagaacggaaaggaccgaagagtaactttaataatgtttcttatacggccgacattaactatctctataatcgcccctcctcctcccccaaaagagagacagaaattgtaagggagaggctttgagataaaaccccaggaagaacttcccgagtctgtgcatgttggggcagaaagagcggcagagccaactccttccctgctccacagcacctgttgccttcattagcagcttttcctcctcttccctgcacttcccagaaccaaagaatgtgaagggggtccatggagggctcacgtccccgcgccccgagcggccacttagcgccgtcgccgccggctttcgacggcgagctggatctgcagcgatactccaacgggccagccgtgagcgcagggtcgctcgggatgggagcggtgagctggtctgagagtcgtgcaggcgaacggcgcttcccctgccctgtatgcgggaagcgcttccgcttcaactctatccttgctttgcacctgcgggcgcacccaggagcccaggccttccagtgccctcactgcggccaccgcgcggcgcagcgggctctgctgcgctcgcacctgcgcacacaccagcccgagcgcccacgtagtcctgctgcacgcctgttgctggagttggaagagcgcgcgctactacgcgaggcccgactggggagagcccgaagctcagggggcatgcaggccacccctgccactgagggtctggcgcggccccaggctccttcatcgtccgccttccgttgcccctactgcaaaggcaagtttcgcacctcggcggagcgcgaacgccacctgcacatcctgcataggccctggaagtgcggcctgtgcagtttcggctccagccaggaggaggagctgctgcaccacagcctgacggcccacggggctcccgagcgtcccctggcggccacctccgctgcgcctccgcctcagcctcagcctcagcctccaccccagcccgaacccagatcagtcccccagccggagccggagccggagcccgaacgtgaggcaaccccgaccccagctcctgccgctcccgaggagcccccagcgcctccggagttccgctgccaagtgtgcggccagagctttacacagtcttggtttctcaagggccacatgcgtaagcacaaggcctccttcgatcatgcgtgtccggtgtgcggccgctgcttcaaggagccctggttccttaagaaccacatgaaggtgcacgccagcaagctgggcccactgcgtgccccggggcctgcctccgggcctgcccgcgccccccagcctcctgacctcggcctgctggcctatgagccgttgggcccagcgctcctcttggccccggctcccaccccggccgagcgccgtgagcccccgagcctcttgggctacctgagcctgcgagctggcgagggccggcccaacggcgagggtgctgagcccggtcccggccgcagcttcggaggcttccgcccgctgtcctctgctctcccggcccgggctcgccggcaccgtgcggaggagcctgaggaagaagaggaggtggtggaggccgaggaggaaacctgggcccggggcaggtcgctgggctctctggcttccctgcacccgcgcccgggtgagggaccggggcactctgcctctgctgctggggcccaggcaagatcgaccgccacgcaggaagagaatgggctgttggttggagggacccggcctgaagggggccggggcgccaccggcaaggattgtcctttctgcggaaaatctttccgctcagcacatcacctcaaagtgcatctgcgagtgcacacaggcgagcggccctacaagtgtccgcactgcgactacgcgggcacccagtccggctcgctcaagtatcacctacagcgccaccaccgggagcagaggagcggggccggccccgggccacccccggagccaccgcctccttcccagcggggttcggccccgcaatctggagccaagccgtctccgcagcctgcgacctgggtggagggcgcctcaagtccccggcctccttctagcggtgctgggccggggtcccgtcggaagcccgccagccctgggaggaccctgcgcaacgggcgaggcggtgaggccgaacccctggacctgtccttgcgggcagggccgggaggcgaggccgggcctgggggtgccctccaccgctgcctcttctgcccgttcgccactggagccccagagctcatggccttgcaccttcaagtgcaccacagccgccgggctaggggccgccggccaccccaggctgacgcgtccccgccctatgcccgagtaccatcaggagagacccctcccagtccttcgcaggaaggggaggagggctccgggctgtccagacccggagaggcagggctgggggggcaagaacggtagtgggccctcaggggcgattagcttagtgagcttaccccgccggagcgggggagcgctagaggtagttgggtagagaagccagcagggggcagcgtgggacccatatcccagccccaggcggaccagaggtggaaggcgcggcgggcgtaggagggtgggctggcggtacccacccagcccaagggagtcacagtgccttagaagtggcagaggtgagggtcaaagaacggggtccctgggctggcagagaaggtttgtgtccctgttgaggagccactctgccagtctttgctggtccataggcgtgagagtttatttttgtacaaggggtgagggtggggggcactgtacccttctagccccatcaggggccctgtagacgtcgctatttttggtacgattcctgtcatccctattgcagagtcgtgtccccaataaacaggtgtcttgag

SEQ ID NO: 201776 - DNA, 546 bp, Homo sapiens
  Payload ID: 19808
  Gene Name: zinc finger protein 219
  ENST ID: ENST00000556174
  CDS Start-End: 214-546
gtgcatgttggggcagaaagagcggcagagccaactccttccctggtcttccagaactttcaaaatcaaaatcggggttgcgttaggacatgcctctgggataagattccccatggtgggatggcagcagctccacagcacctgttgccttcattagcagcttttcctcctcttccctgcacttcccagaaccaaagaatgtgaagggggtccatggagggctcacgtccccgcgccccgagcggccacttagcgccgtcgccgccggctttcgacggcgagctggatctgcagcgatactccaacgggccagccgtgagcgcagggtcgctcgggatgggagcggtgagctggtctgagagtcgtgcaggcgaacggcgcttcccctgccctgtatgcgggaagcgcttccgcttcaactctatccttgctttgcacctgcgggcgcacccaggagcccaggccttccagtgccctcactgcggccaccgcgcggcgcagcgggctctgctgcgctcgcacctgcgcacacaccagcccgagcgc

SEQ ID NO: 201777 - DNA, 798 bp, Homo sapiens
  Payload ID: 19808
  Gene Name: zinc finger protein 219
  ENST ID: ENST00000555270
  CDS Start-End: 165-798
cctgcagagaggaggaaagcctgcctcggaacagccctggacaaaggggctcagatgccccatcatactgcaggctccaagctccacagcacctgttgccttcattagcagcttttcctcctcttccctgcacttcccagaaccaaagaatgtgaagggggtccatggagggctcacgtccccgcgccccgagcggccacttagcgccgtcgccgccggctttcgacggcgagctggatctgcagcgatactccaacgggccagccgtgagcgcagggtcgctcgggatgggagcggtgagctggtctgagagtcgtgcaggcgaacggcgcttcccctgccctgtatgcgggaagcgcttccgcttcaactctatccttgctttgcacctgcgggcgcacccaggagcccaggccttccagtgccctcactgcggccaccgcgcggcgcagcgggctctgctgcgctcgcacctgcgcacacaccagcccgagcgcccacgtagtcctgctgcacgcctgttgctggagttggaagagcgcgcgctactacgcgaggcccgactggggagagcccgaagctcagggggcatgcaggccacccctgccactgagggtctggcgcggccccaggctccttcatcgtccgccttccgttgcccctactgcaaaggcaagtttcgcacctcggcggagcgcgaacgccacctgcacatcctgcataggccctggaagtgcggcctgtgcagtttcggctccagccaggaggaggagctgctgcaccacagcctgacggccc

SEQ ID NO: 201778 - DNA, 560 bp, Homo sapiens
  Payload ID: 19808
  Gene Name: zinc finger protein 219
  ENST ID: ENST00000553296
  CDS Start-End: 238-560
tttgagtatagcagccccttcgtgcctcaagaagcaagtagggagaatggattggttttgggaatacagaatgctgagagtctgggggtagggagtgactttactgctgaaaactagggctcatcttttcctccaaatctgtctcttgctttagctccacagcacctgttgccttcattagcagcttttcctcctcttccctgcacttcccagaaccaaagaatgtgaagggggtccatggagggctcacgtccccgcgccccgagcggccacttagcgccgtcgccgccggctttcgacggcgagctggatctgcagcgatactccaacgggccagccgtgagcgcagggtcgctcgggatgggagcggtgagctggtctgagagtcgtgcaggcgaacggcgcttcccctgccctgtatgcgggaagcgcttccgcttcaactctatccttgctttgcacctgcgggcgcacccaggagcccaggccttccagtgccctcactgcggccaccgcgcggcgcagcgggctctgctgcgctcgcacctgcgcacacacca

SEQ ID NO: 201779 - DNA, 545 bp, Homo sapiens
  Payload ID: 19808
  Gene Name: zinc finger protein 219
  ENST ID: ENST00000554478
  CDS Start-End: 72-545
aaaagagagacagaaattgtaagggagaggctttgagataaaaccccaggaagaacttcccgagtctgtgcatgttggggcagaaagagcggcagagccaactccttccctgctccacagcacctgttgccttcattagcagcttttcctcctcttccctgcacttcccagaaccaaagaatgtgaagggggtccatggagatctttctccacagggctcacgtccccgcgccccgagcggccacttagcgccgtcgccgccggctttcgacggcgagctggatctgcagcgatactccaacgggccagccgtgagcgcagggtcgctcgggatgggagcggtgagctggtctgagagtcgtgcaggcgaacggcgcttcccctgccctgtatgcgggaagcgcttccgcttcaactctatccttgctttgcacctgcgggcgcacccaggagcccaggccttccagtgccctcactgcggccaccgcgcggcgcagcgggctctgctgcgctcgcacctgcgcacacaccagcccgagcgccca

SEQ ID NO: 201780 - DNA, 654 bp, Homo sapiens
  Payload ID: 19808
  Gene Name: zinc finger protein 219
  ENST ID: ENST00000555697
  CDS Start-End: 561-654
tgcagggtccgggatttggagtggatgggattatgaaaggtggacagaaaagaaaagtgcgatgaggcaaatgtgaagctgtatggggaggtgacaggaagagaggatatggatgcaagggagaaagcagcttttcagggtggtgaggtgaggatatattctcgtccaggtgtatcttcccctaacagggaaggaacgaaaaaagggcctgctttgagtgaaaactgaaggcactcccggacttcctattggactcgaaggatcccagcaagcttctgagtttggtggggtgggatgcaggaatgtctggagagcattctctcagggtggaaggagagcagcacgtgtctgttcccgctgtcccaccctctcatttgctcctgtgctggccaccgtgggaccattctccaaaccaggaacctcttccaactcagagaagccctgaaaaccagagacaggtgtgagcaaattgtagagctccacagcacctgttgccttcattagcagcttttcctcctcttccctgcacttcccagaaccaaagaatgtgaagggggtccatggagggctcacgtccccgcgccccgagcggccacttagcgccgtcgccgccggctttcgacggcgagctggatctgcagcgatactccaacg

SEQ ID NO: 201781 - DNA, 567 bp, Homo sapiens
  Payload ID: 19808
  Gene Name: zinc finger protein 219
  ENST ID: ENST00000554923
  CDS Start-End: 132-567
agtgtaatcctcctcttgtgtgagggagcctctcccctgcagagaggaggaaagcctgcctcggaacagccctggacaaaggggctcagatgccccatcatactgcaggctccaaggtttgaaacaaggggatgaatcctatacgctccacagcacctgttgccttcattagcagcttttcctcctcttccctgcacttcccagaaccaaagaatgtgaagggggtccatggagatctttctccacagggctcacgtccccgcgccccgagcggccacttagcgccgtcgccgccggctttcgacggcgagctggatctgcagcgatactccaacgggccagccgtgagcgcagggtcgctcgggatgggagcggtgagctggtctgagagtcgtgcaggcgaacggcgcttcccctgccctgtatgcgggaagcgcttccgcttcaactctatccttgctttgcacctgcgggcgcacccaggagcccaggccttccagtgccctcactgcggccaccgcgcggcgcagcgggctctgctgcgctcgcacctgcgcacacaccagc

SEQ ID NO: 201782 - DNA, 576 bp, Homo sapiens
  Payload ID: 19808
  Gene Name: zinc finger protein 219
  ENST ID: ENST00000553980
  CDS Start-End: 406-576
ataatcgcccctcctcctcccccaaaagagagacagaaattgtaagggagaggctttgagataaaaccccaggaagaacttcccgagtctgtgcatgttggggcagaaagagcggcagagccaactccttccctgctccacagcacctgttgccttcattagcagcttttcctcctcttccctgcacttcccagaaccaaagaatgtgaagggggtccatggagaagttaactccttggccctgacatctcgattcccatacacctccccccaccccatcttcccgagggctcacgtccccgcgccccgagcggccacttagcgccgtcgccgccggctttcgacggcgagctggatctgcagcgatactccaacgggccagccgtgagcgcagggtcgctcgggatgggagcggtgagctggtctgagagtcgtgcaggcgaacggcgcttcccctgccctgtatgcgggaagcgcttccgcttcaactctatccttgctttgcacctgcgggcgcacccaggagcccaggccttccagtgccctcactgcggccaccgcgcggcgcagcgggct

SEQ ID NO: 201783 - DNA, 2551 bp, Homo sapiens
  Payload ID: 19809
  Gene Name: zinc finger protein 22
  Uniprot ID: P17026
  ENST ID: ENST00000298299
  CDS Start-End: 594-1268
gaaatcagactttggagccacaaagaaccattccaattctgggtcgtccgcttacacacggtgaacggagcacatttcttctctgagccttggttcctttcctgtaaatggagtataaccactcccatcttgcaggagctttttggtgataattaaggtgacttcgtgaaaagtaccagggtctcaaaaatctcaaaatttgtggaaagtatgcagtttctaggttggagaggctagagtttggtttcaaaagcctcgaccacacacaggggcggttacagctcttgaggtcccgggggtcacaggacgccttccgagttggggggaggagaaaacaaaaccacaggaagaaacgaacaacgctttcgggtgggcccgggaccatagagggtcgctccgccactttcctagagcgaccgcggcggcgccagagcgcggcgaggccctcacttccggcggcgcgggaggcgcccagcgagccagagtggtggctggtcccgcgcgaaaattctgagctgtacacctctaggaaatgaaacactagttcagaagaagcctgtaaactctcttacaaatacatttggttattcaccatgaggttagcaaagcctaaagcgggtatttctcggagctcaagccaaggaaaggcctatgagaacaagcgcaaaacaggccggcagcggcagaagtggggcatgactattcgatttgactcaagcttcagtagactcagaagaagcttggatgacaaaccctataaatgtactgaatgtgaaaagagtttcagtcagagttcaactctttttcaacaccagaagatccatactggaaagaaatcccataaatgtgctgattgtgggaaaagtttctttcagagttctaatctcattcagcatcgacggatccatacgggggaaaagccctacaaatgtgatgagtgtggagaaagcttcaaacagagctcaaatctcattcagcaccagagaattcatactggagaaaaaccctatcagtgtgatgagtgtggccggtgtttcagccagagctcccaccttattcaacatcagagaacccacactggggagaaaccctaccagtgcagtgaatgtggcaaatgtttcagtcagagctctcatctgaggcagcacatgaaggtgcataaagaagagaagcctcgtaaaacccggggcaaaaatatcagggtgaagactcacttaccctcttggaaagctggtacaggaaggaagtctgtggctggtctccgttaagtatagggctttttgacagctttttgagacctcttaagaaaaaataaaaagtaaaaaatgaaaggaatcttttttagaaatagagatgctttatagtagatcacttaaatactggatcttttgctagtgtgaaaacattgggaatttaatgacattattgagctgaaagaaattacatgagtccagctaccctcatttcttttttatgtgacatggagcacaaagaactgaaaatatgttttgagggagcatgacatccttgacctcatttgaaattacttccattttcaaaaaccatcatgttttgtagatacattttgagaaaaaccatcatgttttgaggatacatttgtgaaagtgcaggcatgccaatgactactcagttttaggactttctgtggaagaaaaaagggagaagaaatcaattccactacttttgaagttctgcaacagatgagattttgtttgtaaagttttgtagtatattaaccattggtttatcactctagattcaacatattaaaatgtattcaagctcacagatttttaatcagtaaggcctatctatattagttgtcttttatttcttctccttgtggacagttgttaatgaaaggagtaaggatttccctttttttgttttgtttgttttgttttttttaaccaaattcttagagatactatagaatccaaatgagaactgaattggacctcaagtcttctattcctactaatagagttctttgtgatggtaactgctgtgtcgtttgttttccacaagttgggatggattcatgtcgatacatccccatgcccttgacctcttctggcattctcctgtgctctgacaaactgagccagccttttagatctacatgaataaacaaactattttaccaagaaaaatctcagcttgcttactgcttaattaaaaacctacaatttacacacctccctgccttcaagactgtgagctttggatagccctgcttaaatgtttgtcaacaacaagagtcgtaatgtgtcagtacattgtagctcctttgaaatttaactctttctgtgttacatgaattgttttaaggagtccggcaaacatgtttcttcacttccatgagaatggtgccaagtgtcagactctaatgagccctcagctcaggttttaatttctattgaatgctaacattcttctgattttttggtatcttttataatcatatcggtttctgctgtattaatgacaattattcatgaaaataaaaaatgaaatattttgtatacta

SEQ ID NO: 201784 - DNA, 2535 bp, Homo sapiens
  Payload ID: 19810
  Gene Name: zinc finger protein 221
  ENST ID: ENST00000251269
  CDS Start-End: 329-2182
gcgggagctacggctgcgggagttaccctttattctgtgatattttgagctgttctgcgtctcgcaggcccttctgaatttcctggacctactctcggaaccctcaacgagctagcgatagatttagaggaaaggaagcaccgtcggaaagcaaagggatttctggaagcttgaacttaagagtgataacttagggtacctggcaaaagaaatttctgagcagcaaagcattcaagaagtggcctggctgcctcactgcttcaaacagcctacaattatatatgggagcaaaaaaatgacttaaagttggaatttatatttaaaaggcatgatttcaccttcacttgaactgcttcattcaggactctgcaaattccctgaagtagaaggaaaaatgaccacattcaaagaggcagtgacattcaaggatgtggctgtggtcttcactgaggaggagctggggctgctggaccctgcccagaggaagctgtaccgagatgtgatgctagagaacttcaggaacctgctctcagtagggaatcaaccattccaccaagatactttccacttcttagggaaggaaaagttttggaagatgaagacaacaagccaaagagaagggaattcaggaggcaagatccaaattgagatggagactgttccagaagcaggaccacatgaagagtggtcctgtcagcaaatatgggaacaaattgcaagtgacctaaccaggtctcaaaactccataaggaacagctctcagttcttcaaagaaggtgatgtcccctgccagattgaggcaagactatctataagtcacgtgcaacagaaaccttaccgttgtaatgaatgtaaacagtccttcagtgatgtttctgtctttgatcttcatcaacaatcacactcaggagagaaatctcatacatgtggtgagtgtggaaaaagcttctgttacagcccagcccttcatattcatcagagagtccatatgggagaaaaatgctataagtgtgatgtgtgtggtaaggaatttaatcagagctcacatctgcaaactcatcagagagtccatactggagagaaaccattcaaatgtgggcaatgtgggaaaggcttccatagtagatcagcacttaatgttcattgcaaattgcacacaggagagaaaccttataattgtgaggaatgtgggaaagccttcattcatgattcacagcttcaagaacatcagagaatccatactggggagaagccattcaaatgtgatatatgtggtaagagcttccgtgttagatcaagacttaataggcattccatggttcacacaggagaaaaaccattcagatgtgatacatgtggcaagaactttcgtcagagatcagcacttaatagtcattccatggtccacatagaagagaagccatacaaatgtgagcaatgtggaaaaggcttcatttgtaggcgagatttttgtaagcatcagatggtccacacaggagagaaaccatataattgtaaagaatgtgggaagaccttcagatggtcctcatgtcttttgaaccatcagcaagtccacagtggacaaaaatccttcaaatgtgaagaatgtgggaagggattttatacaaattcacgacgatcttcccatcagagatcccacaatggagaaaagccatataactgtgaggagtgtggtaaggactataaaaggaggttggatcttgagtttcaccagagggtccacacgggtgagagaccctataattgtaaggaatgtggcaagagctttggctgggcctcctgtcttttgaaacatcagagactccacagtggggaaaaacctttcaaatgtgaagagtgtggaaagagatttactcagagttcacaacttcattcccatcagacatgccatactggagaaaagctatacaaatgtgagcagtgtgagaaggggtacaacagtaaatttaatcttgacatgcaccagagggtccacgggggagagcgaccctataattgtaaggaatgtggaaagagctttggctgggcttcatgtcttttgaaacatcagagactccacagtggagaaaagccattgaaatctggagtgtgggaagagatctactcagaattcacagcttcatttacatcagtaagtctatgtgggagaaaagccatataaatgtgagaagtgtgggaagggctttggctgggcctcaactcatctgacccatcaattctccacagcagagaaaaaccattcaaatatgagaactgtgggaagagctttgtacatagatcatatcttttttttttttttttgagacagagtctcactctttcacccaggcctgactgcagtggcgctatctcagctcactgcaagctccgcctcccaggttcacgccattctcctgcctcagcctcccgagtagctgggactacaggtgcccgccaccacacccagctaattttttgtatttttagtagagacggggtttcaccgtgttagccaggatggtctcgatctcctga

SEQ ID NO: 201785 - DNA, 581 bp, Homo sapiens
  Payload ID: 19810
  Gene Name: zinc finger protein 221
  ENST ID: ENST00000591168
  CDS Start-End: 191-581
agtccagacgctctgtggagtcgcgggagctacggctgcgggagttaccctttattctgtgatattttgagctgttctgcgtctcgcaggcccttctgaatttcctggacctactctcggaaccctcaacgagctagcgatagatttagaggaaaggaagcaccgtcggaaagcaaaggtttggaagggcatgatttcaccttcacttgaactgcttcattcaggactctgcaaattccctgaagtagaaggaaaaatgaccacattcaaagaggcagtgacattcaaggatgtggctgtggtcttcactgaggaggagctggggctgctggaccctgcccagaggaagctgtaccgagatgtgatgctagagaacttcaggaacctgctctcagtagggaatcaaccattccaccaagatactttccacttcttagggaaggaaaagttttggaagatgaagacaacaagccaaagagaagggaattcaggaggcaagatccaaattgagatggagactgttccagaagcaggaccacatgaagagtggtcctgtcagcaaatatgggaacaaattgcaa

SEQ ID NO: 201786 - DNA, 2034 bp, Homo sapiens
  Payload ID: 19810
  Gene Name: zinc finger protein 221
  ENST ID: ENST00000587682
  CDS Start-End: 181-2034
agtccagacgctctgtggagtcgcgggagctacggctgcgggagttaccctttattctgtgatattttgagctgttctgcgtctcgcaggcccttctgaatttcctggacctactctcggaaccctcaacgagctagcgatagatttagaggaaaggaagcaccgtcggaaagcaaaggcatgatttcaccttcacttgaactgcttcattcaggactctgcaaattccctgaagtagaaggaaaaatgaccacattcaaagaggcagtgacattcaaggatgtggctgtggtcttcactgaggaggagctggggctgctggaccctgcccagaggaagctgtaccgagatgtgatgctagagaacttcaggaacctgctctcagtagggaatcaaccattccaccaagatactttccacttcttagggaaggaaaagttttggaagatgaagacaacaagccaaagagaagggaattcaggaggcaagatccaaattgagatggagactgttccagaagcaggaccacatgaagagtggtcctgtcagcaaatatgggaacaaattgcaagtgacctaaccaggtctcaaaactccataaggaacagctctcagttcttcaaagaaggtgatgtcccctgccagattgaggcaagactatctataagtcacgtgcaacagaaaccttaccgttgtaatgaatgtaaacagtccttcagtgatgtttctgtctttgatcttcatcaacaatcacactcaggagagaaatctcatacatgtggtgagtgtggaaaaagcttctgttacagcccagcccttcatattcatcagagagtccatatgggagaaaaatgctataagtgtgatgtgtgtggtaaggaatttaatcagagctcacatctgcaaactcatcagagagtccatactggagagaaaccattcaaatgtgggcaatgtgggaaaggcttccatagtagatcagcacttaatgttcattgcaaattgcacacaggagagaaaccttataattgtgaggaatgtgggaaagccttcattcatgattcacagcttcaagaacatcagagaatccatactggggagaagccattcaaatgtgatatatgtggtaagagcttccgtgttagatcaagacttaataggcattccatggttcacacaggagaaaaaccattcagatgtgatacatgtggcaagaactttcgtcagagatcagcacttaatagtcattccatggtccacatagaagagaagccatacaaatgtgagcaatgtggaaaaggcttcatttgtaggcgagatttttgtaagcatcagatggtccacacaggagagaaaccatataattgtaaagaatgtgggaagaccttcagatggtcctcatgtcttttgaaccatcagcaagtccacagtggacaaaaatccttcaaatgtgaagaatgtgggaagggattttatacaaattcacgacgatcttcccatcagagatcccacaatggagaaaagccatataactgtgaggagtgtggtaaggactataaaaggaggttggatcttgagtttcaccagagggtccacacgggtgagagaccctataattgtaaggaatgtggcaagagctttggctgggcctcctgtcttttgaaacatcagagactccacagtggggaaaaacctttcaaatgtgaagagtgtggaaagagatttactcagagttcacaacttcattcccatcagacatgccatactggagaaaagctatacaaatgtgagcagtgtgagaaggggtacaacagtaaatttaatcttgacatgcaccagagggtccacgggggagagcgaccctataattgtaaggaatgtggaaagagctttggctgggcttcatgtcttttgaaacatcagagactccacagtggagaaaagccattgaaatctggagtgtgggaagagatctactcagaattcacagcttcatttacatcagtaagtctatgtgggagaaaagccatataa

SEQ ID NO: 201787 - DNA, 2329 bp, Homo sapiens
  Payload ID: 19810
  Gene Name: zinc finger protein 221
  ENST ID: ENST00000592350
  CDS Start-End: 232-2085
ggctgcctcactgcttcaaacagcctacaattatatatgggagcaaaaaaatgacttaaagttggaatttatatttaaaaggttcagattatgcattgttggtgtggataccacagaagtgttgaagtgtcataacaggggccaaatgatgtctgtttttcccttcattggagatctcaactttgttcacttggccaagatgatatctttcagatttttccactgaaaggcatgatttcaccttcacttgaactgcttcattcaggactctgcaaattccctgaagtagaaggaaaaatgaccacattcaaagaggcagtgacattcaaggatgtggctgtggtcttcactgaggaggagctggggctgctggaccctgcccagaggaagctgtaccgagatgtgatgctagagaacttcaggaacctgctctcagtagggaatcaaccattccaccaagatactttccacttcttagggaaggaaaagttttggaagatgaagacaacaagccaaagagaagggaattcaggaggcaagatccaaattgagatggagactgttccagaagcaggaccacatgaagagtggtcctgtcagcaaatatgggaacaaattgcaagtgacctaaccaggtctcaaaactccataaggaacagctctcagttcttcaaagaaggtgatgtcccctgccagattgaggcaagactatctataagtcacgtgcaacagaaaccttaccgttgtaatgaatgtaaacagtccttcagtgatgtttctgtctttgatcttcatcaacaatcacactcaggagagaaatctcatacatgtggtgagtgtggaaaaagcttctgttacagcccagcccttcatattcatcagagagtccatatgggagaaaaatgctataagtgtgatgtgtgtggtaaggaatttaatcagagctcacatctgcaaactcatcagagagtccatactggagagaaaccattcaaatgtgggcaatgtgggaaaggcttccatagtagatcagcacttaatgttcattgcaaattgcacacaggagagaaaccttataattgtgaggaatgtgggaaagccttcattcatgattcacagcttcaagaacatcagagaatccatactggggagaagccattcaaatgtgatatatgtggtaagagcttccgtgttagatcaagacttaataggcattccatggttcacacaggagaaaaaccattcagatgtgatacatgtggcaagaactttcgtcagagatcagcacttaatagtcattccatggtccacatagaagagaagccatacaaatgtgagcaatgtggaaaaggcttcatttgtaggcgagatttttgtaagcatcagatggtccacacaggagagaaaccatataattgtaaagaatgtgggaagaccttcagatggtcctcatgtcttttgaaccatcagcaagtccacagtggacaaaaatccttcaaatgtgaagaatgtgggaagggattttatacaaattcacgacgatcttcccatcagagatcccacaatggagaaaagccatataactgtgaggagtgtggtaaggactataaaaggaggttggatcttgagtttcaccagagggtccacacgggtgagagaccctataattgtaaggaatgtggcaagagctttggctgggcctcctgtcttttgaaacatcagagactccacagtggggaaaaacctttcaaatgtgaagagtgtggaaagagatttactcagagttcacaacttcattcccatcagacatgccatactggagaaaagctatacaaatgtgagcagtgtgagaaggggtacaacagtaaatttaatcttgacatgcaccagagggtccacgggggagagcgaccctataattgtaaggaatgtggaaagagctttggctgggcttcatgtcttttgaaacatcagagactccacagtggagaaaagccattgaaatctggagtgtgggaagagatctactcagaattcacagcttcatttacatcagtaagtctatgtgggagaaaagccatataaatgtgagaagtgtgggaagggctttggctgggcctcaactcatctgacccatcaattctccacagcagagaaaaaccattcaaatatgagaactgtgggaagagctttgtacatagatcatatcttttttttttttttttgagacagagtctcactctttcacccaggcctgactgcagtggcgctatctcagctcactgcaagctccgcctcccaggttcacgccattctcctgcctcagcct

SEQ ID NO: 201788 - DNA, 2102 bp, Homo sapiens
  Payload ID: 19810
  Gene Name: zinc finger protein 221
  ENST ID: ENST00000622072
  CDS Start-End: 5-1858
aggcatgatttcaccttcacttgaactgcttcattcaggactctgcaaattccctgaagtagaaggaaaaatgaccacattcaaagaggcagtgacattcaaggatgtggctgtggtcttcactgaggaggagctggggctgctggaccctgcccagaggaagctgtaccgagatgtgatgctagagaacttcaggaacctgctctcagtagggaatcaaccattccaccaagatactttccacttcttagggaaggaaaagttttggaagatgaagacaacaagccaaagagaagggaattcaggaggcaagatccaaattgagatggagactgttccagaagcaggaccacatgaagagtggtcctgtcagcaaatatgggaacaaattgcaagtgacctaaccaggtctcaaaactccataaggaacagctctcagttcttcaaagaaggtgatgtcccctgccagattgaggcaagactatctataagtcacgtgcaacagaaaccttaccgttgtaatgaatgtaaacagtccttcagtgatgtttctgtctttgatcttcatcaacaatcacactcaggagagaaatctcatacatgtggtgagtgtggaaaaagcttctgttacagcccagcccttcatattcatcagagagtccatatgggagaaaaatgctataagtgtgatgtgtgtggtaaggaatttaatcagagctcacatctgcaaactcatcagagagtccatactggagagaaaccattcaaatgtgggcaatgtgggaaaggcttccatagtagatcagcacttaatgttcattgcaaattgcacacaggagagaaaccttataattgtgaggaatgtgggaaagccttcattcatgattcacagcttcaagaacatcagagaatccatactggggagaagccattcaaatgtgatatatgtggtaagagcttccgtgttagatcaagacttaataggcattccatggttcacacaggagaaaaaccattcagatgtgatacatgtggcaagaactttcgtcagagatcagcacttaatagtcattccatggtccacatagaagagaagccatacaaatgtgagcaatgtggaaaaggcttcatttgtaggcgagatttttgtaagcatcagatggtccacacaggagagaaaccatataattgtaaagaatgtgggaagaccttcagatggtcctcatgtcttttgaaccatcagcaagtccacagtggacaaaaatccttcaaatgtgaagaatgtgggaagggattttatacaaattcacgacgatcttcccatcagagatcccacaatggagaaaagccatataactgtgaggagtgtggtaaggactataaaaggaggttggatcttgagtttcaccagagggtccacacgggtgagagaccctataattgtaaggaatgtggcaagagctttggctgggcctcctgtcttttgaaacatcagagactccacagtggggaaaaacctttcaaatgtgaagagtgtggaaagagatttactcagagttcacaacttcattcccatcagacatgccatactggagaaaagctatacaaatgtgagcagtgtgagaaggggtacaacagtaaatttaatcttgacatgcaccagagggtccacgggggagagcgaccctataattgtaaggaatgtggaaagagctttggctgggcttcatgtcttttgaaacatcagagactccacagtggagaaaagccattgaaatctggagtgtgggaagagatctactcagaattcacagcttcatttacatcagtaagtctatgtgggagaaaagccatataaatgtgagaagtgtgggaagggctttggctgggcctcaactcatctgacccatcaattctccacagcagagaaaaaccattcaaatatgagaactgtgggaagagctttgtacatagatcatatcttttttttttttttttgagacagagtctcactctttcacccaggcctgactgcagtggcgctatctcagctcactgcaagctccgcctcccaggttcacgccattctcctgcctcagcct

SEQ ID NO: 201789 - DNA, 1598 bp, Homo sapiens
  Payload ID: 19811
  Gene Name: zinc finger protein 222
  Uniprot ID: Q9UK12
  ENST ID: ENST00000187879
  CDS Start-End: 163-1518
gtagtttgagtcatttccacatcttgcgagtccttccgaacgagtctcctttccttggggctcgcaaccacccaatgatcgattcaggagaaaagaagcctgggcggagagcagagcccgacctttctaaaagagctgcaggaagggacttcttggctactgatggcaaagctctacgaggcagtgaccttcaaggatgtggctgtgatcttcactgaggaggagctggggctgctggaccctgcccagaggaagctgtaccgagatgtgatgcttgagaacttcaggaacctgctctcagtgggaggcaagatccaaactgagatggagactgttccagaagcaggaacacatgaagaattttcctgcaagcaaatttgggaacaaattgcaagtgacttaaccaggtctcaagataccaccataagtaactctcagttatttgaacaagatgacaacccctcccagattaaagcaagactatctacagttcacacaagagaaaaacctttccagggtgaaaattgtaaacagttcttcagtgatgtttccttctttgatcttcctcagcagttatattcaggagagaagtctcatacctgtgatgagtgtggaaaaagcttctgttacatctcagcccttcatattcatcagagggtccacatgggagtgaaatgctataagtgtgatgtgtgtggtaaggaatttagtcagagctcacgtctgcaaactcatcaaagagtccacactggagagaaaccattcaaatgtgagcagtgtgggaaaggcttcagatgtagatcagcacttaaagttcattgcaaattacacatgagagagaaaccttataattgtgagaaatgtgggaaggctttcatgcacaatttccagcttcagaaacatcacagaattcatactggggagaagccattcaaatgtgaaatatgtggtaagagcttctgtcttaggtcaagtcttaataggcattgcatggtccacacagcagagaaactgtacaaatctgaaaagtatggaagaggtttcattgataggctagatttgcataagcatcagatgattcatatgggacagaaaccatataattgtaaagaatgtgggaagagcttcaaatggtcctcatatcttttggtccatcaacgagtccacactggagaaaagccatacaaatgtgaggagtgtgggaagggctacattagtaagtcaggtcttgacttccaccatagaacccacacgggagagagatcttataactgtgataactgcgggaagagctttagacatgcttctagtattttgaatcataagaaactccactgccaaagaaagccattgaaatgtgaagactgtggaaagaggcttgtatgccggtcatactgtaaagaccaacaaagagaccacagtggagaaaacccatccaaatgtgaggactgtgggaagcgctacaagaggcgcttgaatctggatataattttatcattatttttaaatgacatataagttatacatatttatggagtgtgaaatttgatacatgtatataatgtgtgctgattaaatcagtttaatttcacctgaaa

SEQ ID NO: 201790 - DNA, 1595 bp, Homo sapiens
  Payload ID: 19811
  Gene Name: zinc finger protein 222
  Uniprot ID: Q9UK12
  ENST ID: ENST00000391960
  CDS Start-End: 38-1513
gaacgagtctcctttccttggggctcgcaaccacccaatgatcgattcaggagaaaagaagcctgggcggagagcagaggaggcagtgaccttcaaggatgtggctgtgatcttcactgaggaggagctggggctgctggaccctgcccagaggaagctgtaccgagatgtgatgcttgagaacttcaggaacctgctctcagtggggcatcaaccattccatggagatactttccacttcctaagggaagaaaagttttgggtgatggggacaacaagccaaagagaagggaatttgggaggcaagatccaaactgagatggagactgttccagaagcaggaacacatgaagaattttcctgcaagcaaatttgggaacaaattgcaagtgacttaaccaggtctcaagataccaccataagtaactctcagttatttgaacaagatgacaacccctcccagattaaagcaagactatctacagttcacacaagagaaaaacctttccagggtgaaaattgtaaacagttcttcagtgatgtttccttctttgatcttcctcagcagttatattcaggagagaagtctcatacctgtgatgagtgtggaaaaagcttctgttacatctcagcccttcatattcatcagagggtccacatgggagtgaaatgctataagtgtgatgtgtgtggtaaggaatttagtcagagctcacgtctgcaaactcatcaaagagtccacactggagagaaaccattcaaatgtgagcagtgtgggaaaggcttcagatgtagatcagcacttaaagttcattgcaaattacacatgagagagaaaccttataattgtgagaaatgtgggaaggctttcatgcacaatttccagcttcagaaacatcacagaattcatactggggagaagccattcaaatgtgaaatatgtggtaagagcttctgtcttaggtcaagtcttaataggcattgcatggtccacacagcagagaaactgtacaaatctgaaaagtatggaagaggtttcattgataggctagatttgcataagcatcagatgattcatatgggacagaaaccatataattgtaaagaatgtgggaagagcttcaaatggtcctcatatcttttggtccatcaacgagtccacactggagaaaagccatacaaatgtgaggagtgtgggaagggctacattagtaagtcaggtcttgacttccaccatagaacccacacgggagagagatcttataactgtgataactgcgggaagagctttagacatgcttctagtattttgaatcataagaaactccactgccaaagaaagccattgaaatgtgaagactgtggaaagaggcttgtatgccggtcatactgtaaagaccaacaaagagaccacagtggagaaaacccatccaaatgtgaggactgtgggaagcgctacaagaggcgcttgaatctggatataattttatcattatttttaaatgacatataagttatacatatttatggagtgtgaaatttgatacatgtatataatgtgtgctgattaaatcagtttaatttcacctgaaaca

SEQ ID NO: 201791 - DNA, 537 bp, Homo sapiens
  Payload ID: 19811
  Gene Name: zinc finger protein 222
  ENST ID: ENST00000587846
  CDS Start-End: 96-368
gttgctatttcatttaccacagtagtttgagtcatttccacatcttgcgagtccttccgaacgagtctcctttccttggggctcgcaaccacccaatgatcgattcaggagaaaagaagcctgggcggagagcagaggaggcagtgaccttcaaggatgtggctgtgatcttcactgaggaggagctggggctgctggaccctgcccagaggaagctgtaccgagatgtgatgcttgagaacttcaggaacctgctctcagtggggcatcaaccattccatggagatactttccacttcctaagggaagaaaagttttgggtgatggggacaacaagccaaagagaagggaatttgggtcccttgtgatagtattcatcactcctggatgattcaggatgaccctcccactttctgcttagctggctagtgacctcaatggcatctgtagctttaatctcccttgctgtggaacataacgtgttcataggttctgaggactggatgtagacatctttcaggaatgattattttctct

SEQ ID NO: 201792 - DNA, 2418 bp, Homo sapiens
  Payload ID: 19812
  Gene Name: zinc finger protein 223
  Uniprot ID: Q9UK11
  ENST ID: ENST00000434772
  CDS Start-End: 256-1704
gcgcagagaggacacttccggtctcctagtctgaggttcctgctttaatgaccggggtagtttgagccatttctgcgtcttgcaggacattttgaacgaaccccctttgcttgaggctcgcaaccacccgatgatcgatgatcgtctcaggggaaaagaagccttggcgaagagcagaggtttagaggcacaattctgctttccctggaactgtgtcattcaggactctgcaaattccctaaagtaggaggaaaaatgaccatgtccaaggaggcagtgaccttcaaggatgtggcagtggtcttcactgaggaggagctggggctgctggaccttgcccagaggaagctgtatcgagatgtgatgctggagaacttcaggaacctgctgtcagtggggcatcaaccattccaccgagatactttccactttctaagggaggaaaagttttggatgatggatatagcaacccaaagggaagggaattcaggaggcaagatccaacctgagatgaagacttttccagaagcaggaccacatgaagggtggtcctgccagcagatctgggaagaaattgcaagtgatttaaccaggcctcaagactctaccataaagagctctcagttctttgaacagggtgatgcccactcccaggttgaggaaggactatctataatgcacacaggacagaaaccttccaattgtgggaagtgtaaacaatccttcagtgatatgtccatctttgatcttcctcagcaaatacgctcagcagagaagtctcattcctgtgatgagtgtggaaaaagcttctgttacatctcagcgcttcatattcatcagagagtccacctgggagagaaactctttaagtgtgacgtgtgtggtaaggaattcagtcagagtttacatctgcaaactcatcagagagtccatactggagagaaacctttcaaatgtgaacaatgtgggagaggcttcagatgtagatcagcacttacagttcattgcaaattacacatgggagagaaacattataattgtgaggcatgtgggagggccttcattcatgatttccagcttcagaaacatcagagaattcacacaggggagaagccattcaaatgtgagatatgtagtgtgagcttccgtcttaggtcaagtcttaataggcattgtgtggtccacacaggaaagaaaccaaacagcactggggaatatggaaaaggcttcattcgtaggctggatttgtgtaagcatcagacgatccacacaggagagaaaccatataattgtaaagaatgtgggaagagcttcagacggtcctcctatcttttgatccatcagcgagtccacactggagaaaagccatacaaatgtgacaagtgtgggaagagctacattactaagtcaggtcttgacttgcaccatagagcccacacaggagagagaccttataactgtgatgactgtgggaagagctttagacaggcctcaagtattttgaatcataagagactccattgccgaaaaaaaccattcaaatgtgaggattgtggaaagaagcttgtataccggtcataccgtaaagaccaacaaaaaaaccacagtggagaaaatccatccaaatgtgaagactgtgggaagcgctacaagaggcgcttgaatcttgatataattttatcattatttttaaatgacacgtaagtgttgtacatatttatggggtacagtgtgatatttaaatatatgtatatgatgtataatgatcaaatcagtgtaattagcacatttatcacctcaattatctcttttttgtgttgagaaaattaaaaattcattgttccagcagtttgaaaataaattgttgtcgatgatagtcacctttagtgctgcagaacagcagaacttcttcctcttatctacctgtacttttgcatccattagccaacctttggccatcccacctatcccttacccttccctgcctctagagccactgttctcactacttctaagaaatcagctttttaagcttccccatgtgattgaggacagtttgaagttagtgtttcagccatagctcagcataccccagtggtcgtgggactgtcagagcagagaatgctgcagggtttctaacagaagtttgacaattagttattattcaggagacaggtcttagtataagagtttgttcacacactttcaaaacactaatgatgaacatgtcaaaattgatgaccactagaatgtcagccacatgtgtctttgtatttttgctgcatccttacattgcttgagtctggaagattgaggctgcactgacctatggtagtgctactgcactccagccagggcaacagagtgagaccctgtctccaaaaaaaaaaattaaataaatacctttctttgtttcta

SEQ ID NO: 201793 - DNA, 541 bp, Homo sapiens
  Payload ID: 19812
  Gene Name: zinc finger protein 223
  ENST ID: ENST00000585552
  CDS Start-End: 224-493
gaggttcctgctttaatgaccggggtagtttgagccatttctgcgtcttgcaggacattttgaacgaaccccctttgcttgaggctcgcaaccacccgatgatcgatgatcgtctcaggggaaaagaagccttggcgaagagcagaggtttagaggcacaattctgctttccctggaactgtgtcattcaggactctgcaaattccctaaagtaggaggaaaaatgaccatgtccaaggaggcagtgaccttcaaggatgtggcagtggtcttcactgaggaggagctggggctgctggaccttgcccagaggaagctgtatcgagatgtgatgctggagaacttcaggaacctgctgtcagtggggcatcaaccattccaccgagatactttccactttctaagggaggaaaagttttggatgatggatatagcaacccaaagggaagggaattcaggtaagaagcacgcaactgtgtgtccttgtttgtgacttccatctgttttacttctgtgcacgtccaactccattaccttcttc

SEQ ID NO: 201794 - DNA, 850 bp, Homo sapiens
  Payload ID: 19812
  Gene Name: zinc finger protein 223
  ENST ID: ENST00000591850
  CDS Start-End: 185-850
tttccatttttcctcttggcctcctcaatgttccttctctcccagtaaccattggtagtgagattgaggttgcatatgtttgatgctgtaggaggcagtgaccttcaaggatgtggcagtggtcttcactgaggaggagctggggctgctggaccttgcccagaggaagctgtatcgagatgtgatgctggagaacttcaggaacctgctgtcagtggggcatcaaccattccaccgagatactttccactttctaagggaggaaaagttttggatgatggatatagcaacccaaagggaagggaattcaggaggcaagatccaacctgagatgaagacttttccagaagcaggaccacatgaagggtggtcctgccagcagatctgggaagaaattgcaagtgatttaaccaggcctcaagactctaccataaagagctctcagttctttgaacagggtgatgcccactcccaggttgaggaaggactatctataatgcacacaggacagaaaccttccaattgtgggaagtgtaaacaatccttcagtgatatgtccatctttgatcttcctcagcaaatacgctcagcagagaagtctcattcctgtgatgagtgtggaaaaagcttctgttacatctcagcgcttcatattcatcagagagtccacctgggagagaaactctttaagtgtgacgtgtgtggtaaggaattcagtcagagtttacatctgcaaactcatcagagagtccatactggagagaaacctttcaaatgtgaacaatgtgggagaggcttcagatgtagatcagcacttacagttcattgcaaattacacatgggagagaaa

SEQ ID NO: 201795 - DNA, 895 bp, Homo sapiens
  Payload ID: 19812
  Gene Name: zinc finger protein 223
  ENST ID: ENST00000593088
  CDS Start-End: 203-481
ggggtagtttgagccatttctgcgtcttgcaggacattttgaacgaaccccctttgcttgaggctcgcaaccacccgatgatcgatgatcgtctcaggggaaaagaagccttggcgaagagcagaggtttagaggcacaattctgctttccctggaactgtgtcattcaggactctgcaaattccctaaagtaggaggaaaaatgaccatgtccaaggaggcagtgaccttcaaggatgtggcagtggtcttcactgaggaggagctggggctgctggaccttgcccagaggaagctgtatcgagatgtgatgctggagaacttcaggaacctgctgtcagtggggcatcaaccattccaccgagatactttccactttctaagggaggaaaagttttggatgatggatatagcaacccaaagggaagggaattcaggagggagtgtgcaagcgagcaagtgcaggaaccggagcaaatgaatgctggaattggctggtcgctcctctctggcgagagcaggctctgttatgcacgccccacagcagtgtccaagcatgttacaacccatgctgtttcagctctgccatctggggatggccaagtgccaatcagctcagtggagcatcagggtagcagcccctgccctcttggcacctgggttcttgtccagcatccaggaagaaccaggtcacatgaactgtgtgaaaggtgatgaacgcagaagactttattgagtggaggcaagatccaacctgagatgaagacttttccagaagcaggaccacatgaagggtggtcctgccagcagatctgggaagaaattgcaagtgatttaaccaggcctcaagactctaccataaagagctctcagttctttgaacagggtgatgccc

SEQ ID NO: 201796 - DNA, 3980 bp, Homo sapiens
  Payload ID: 19813
  Gene Name: zinc finger protein 224
  Uniprot ID: Q9NZL3
  ENST ID: ENST00000336976
  CDS Start-End: 255-2378
ggttgctgcagtttttccgcgatagtttggggcagttccgcgcgttgcaggcccttctgaatttcctggacctacgcattggatcctcaaagaactgctgaataccactagaaacatacctgtaaccagagacagctgattatagctttctgcagcaaggaagcccacgtaccaggggctgtcttggcacaattctgctttcccaggaactgcatcactcaggactctgcaagtttccagaagtaagagggaaaatgaccacgttcaaggaggcaatgaccttcaaggacgtggctgtggtcttcactgaggaagagctggggctgctggaccttgctcagaggaagctgtatcgagatgtgatgctggagaacttcaggaacctgctctcagtgggacatcaagcattccacagggatactttccacttcctaagggaagaaaagatttggatgatgaagacagcaatccaaagggaagggaattcaggagacaagatccaaactgagatggagactgtttcagaagcaggaacacatcaagagtggtccttccagcaaatctgggaaaaaattgcaagtgatttaaccaggtctcaagacttgatgataaatagctctcagttctccaaagaaggtgatttcccctgccagactgaggcaggactatctgtaattcacacaagacagaaatcttcccagggcaatggatataaaccatccttcagtgatgtctcccactttgattttcatcaacaattacactcaggagagaaatctcatacgtgtgatgagtgtggaaagaacttttgttacatctcagcccttcgtattcatcagagagtccacatgggagagaaatgctataagtgtgacgtgtgtggtaaggaattcagtcagagttcacatctgcaaactcatcagagagtccacactggagagaaaccgttcaaatgtgtggaatgtgggaaaggcttcagtcgtagatcagcacttaatgttcatcataaattacacacaggagagaaaccttataattgtgaggaatgcgggaaggccttcattcacgattcccagcttcaagaacatcagagaatccatacgggggagaagccattcaaatgtgatatatgtggtaagagcttctgtggtagatcaagacttaataggcattccatggttcacacggcagagaaaccattccgatgtgatacgtgtgataagagctttcgtcagagatcagcacttaatagtcatcgcatgatccacacaggagagaaaccatacaaatgtgaggagtgtggaaaaggctttatttgtaggcgagatctttatacgcatcatatggtccacacgggagaaaagccatataattgtaaagagtgtgggaagagcttcagatgggcctcgtgtcttttgaaacatcagcgagtccacagtggagaaaaaccattcaaatgtgaagaatgtgggaaaggattttacacaaattcacaatgctattcccaccagagatcccatagtggagaaaaaccatacaaatgtgtggagtgtgggaagggctacaaaaggaggttggatcttgactttcaccagcgcgtccatacaggagagaaactgtataattgtaaggaatgtgggaagagctttagtcgggccccatgtcttttgaaacatgagagactccacagtggagaaaaaccattccaatgtgaagagtgtgggaagagatttactcaaaattcacatcttcattcccatcagagagttcacactggagaaaagccatacaaatgtgagaagtgtggaaagggctacaatagtaagtttaatcttgatatgcaccagaaggtccacacaggagagagaccatacaattgtaaggaatgtgggaagagttttggctgggcctcgtgtcttttgaaacatcagagactgcacagtggagaaaaaccattcaaatgtgaagagtgtgggaaaagatttactcagaattcacagcttcattctcatcaaagagtgcacactggagaaaagccatacaaatgtgatgagtgtgggaagggcttcagctggtcctcaactcgtctgacccatcagagacgccacagcagagaaacacctctcaaatgtgagcagcatgggaagaacattgtacagaattcattctctaaagtgcaagaaaaagttcacagtgtagaaaagccatacaaatgtgaggactgtgggaagggctacaacaggcgcttgaatcttgatatgcatcagagggtccacatgggagagaaaacatggaagtgtagggagtgtgatatgtgctttagtcaggcctcaagccttcgacttcatcagaatgttcatgttggagaaaaaccttagtgatgtgatggtgcaataaagtcttcactcagtcttcatgaatgcagtctcatctgaaagttcacaaaggagagacacattaaaatatgaggcacatagtaagcacttccctttgagtattttatctctgaatccatgctggtgataaatttcacccattcttggaagagggaaaacatttgtttaagataacatcagtgcttcagccatagctcagcatgccccagtagtctcaggaccaccataatggagaatccttgtaaatggtgcaataaagcttcattcagaagtttgataattacagctatcattcaggagacaggccttagaaagagtaagagttcatgaatttaccagactaatggtggacatgtccaaattgatgtccactagaatgtaaactacatgtgtctttgctgctaagtcgtcacagccttaacattgattagcactttgtatgtgttcagtacttgtttgttaaatcaatgaaaggataaaacatatgtatggatttggatacaattttgtgtatccaaaaagggaagcctgcaaaaaataattctgggaaacatgagttgaaatgcagagtaaactcagtactgcaatccatagcaatattttgcatattattattttttcttttaaatttttttcttgatcagatttatcatattcattgaacattattttattgcacttggctcctggcttccccccatcctgtgctctgaagtcagagtattatttgtggctctatgaaatgtccattgcttgtatacggtataaatttaattatcttttgtagtttttctcacagtatagactgaaaaggtttggttaattttgcaataacagaccactgcatatttcacaattaagtgttttcaacagtattaaggcaagatttacagtaacacttttaaagtgccagatgtacattgacagaaattttcttagtcaatcctagattgatcatgatttgtgatttctatgcaggccttggtatgattgccttttaattgctgtacaatttcttttttttttttaacttctctggtataaaatattctaaatttgaatgacagcttttgtcaaccttcttatccaatattcttccaccaacgctatgaaacaggaagagaaaatggagtttggtaatttcatcaaatatattcattattgggggcaggagtaacatttaaatcctcctctttattgctggcagtaaaaatatgtcttttggagagcagaacatgccagaatgtataaggtgcaactgtttgatatgaaaaccataggataggaaactatgcctatgacactaaaactccaaaaagtagaagaccacattgatgatgtcactgcattttaaaatggaaagaacaagtgttcaagaacaggaatttgtgtgaattgcatttattcctataataatatgaactcaatgagatgatgacatagacacaataacaaaaggagaaaaacaatgtggctttttttagccttcataacctaatcaaataaatatctttgtgtgttttatgttcttttgagtgtttacatactgtgtaaatgaatatttttactgatctttgctggcaa

SEQ ID NO: 201797 - DNA, 547 bp, Homo sapiens
  Payload ID: 19813
  Gene Name: zinc finger protein 224
  ENST ID: ENST00000589680
  CDS Start-End: 350-547
aagtggagtccaaacattcggtggagtcgcggacacttccgctcggggactgaggttgctgcagtttttccgcgatagtttggggcagttccgcgcgttgcaggcccttctgaatttcctggacctacgcattggatcctcaaagaactggtgatcgaattaggggaaaaggggcctcgtcggagagtagagctgaataccactagaaacatacctgtaaccagagacagctgattatagctttctgcagcaaggaagcccacgtaccaggggctgtcttggcacaattctgctttcccaggaactgcatcactcaggactctgcaagtttccagaagtaagagggaaaatgaccacgttcaaggaggcaatgaccttcaaggacgtggctgtggtcttcactgaggaagagctggggctgctggaccttgctcagaggaagctgtatcgagatgtgatgctggagaacttcaggaacctgctctcagtgggacatcaagcattccacagggatactttccacttcctaagggaagaaaagatttgg

SEQ ID NO: 201798 - DNA, 614 bp, Homo sapiens
  Payload ID: 19813
  Gene Name: zinc finger protein 224
  ENST ID: ENST00000589870
  CDS Start-End: 455-614
tttacaaatttttataatttttttcttaatatttcccccttatgtgtttaactatggaaatttccaaatgctgacagactaaactagtgaattatcatgttatatcatactcattaatctcattattgttattatttttcctatgactgtttcctaaaattataaaactttttattttcatgtcatttgaaacctatagaaaagttgcaaaagtagcctaagaaattcttatttactctttacccacgtttgccaagtgtttacatttttcctgtttgttttgttgatgaccatcagctgaataccactagaaacatacctgtaaccagagacagctgattatagctttctgcagcaaggaagcccacgtaccaggggctgtcttggcacaattctgctttcccaggaactgcatcactcaggactctgcaagtttccagaagtaagagggaaaatgaccacgttcaaggaggcaatgaccttcaaggacgtggctgtggtcttcactgaggaagagctggggctgctggaccttgctcagaggaagctgtatcgagatgtgatgctggagaacttcaggaacctgctctcagtgggacatcaagcattccaca

SEQ ID NO: 201799 - DNA, 538 bp, Homo sapiens
  Payload ID: 19813
  Gene Name: zinc finger protein 224
  ENST ID: ENST00000591511
  CDS Start-End: 166-538
agtcatgtgccaattcacaatacacatccctgttggtgggtggcatccctggccaccttttcatgtctctttttctgcctttcctggcactttgcaggcacaattctgctttcccaggaactgcatcactcaggactctgcaagtttccagaagtaagagggaaaatgaccacgttcaaggaggcaatgaccttcaaggacgtggctgtggtcttcactgaggaagagctggggctgctggaccttgctcagaggaagctgtatcgagatgtgatgctggagaacttcaggaacctgctctcagtgggacatcaagcattccacagggatactttccacttcctaagggaagaaaagatttggatgatgaagacagcaatccaaagggaagggaattcaggagacaagatccaaactgagatggagactgtttcagaagcaggaacacatcaagagtggtccttccagcaaatctgggaaaaaattgcaagtgatttaaccaggtctcaagacttgatgataaatagctctcagttct

SEQ ID NO: 201800 - DNA, 4482 bp, Homo sapiens
  Payload ID: 19814
  Gene Name: zinc finger protein 225
  Uniprot ID: Q9UK10
  ENST ID: ENST00000262894
  CDS Start-End: 281-2401
agtttgtctcaggaattctgggaagtggagtccagacactcagtggagtagcgggccacttccgctccgttactgtgaggttgctgcagttttgtccctggtagtttgggtcagttccgcgagacccttctgaatttcctggacctacgcattggatccttaacgaactggtgatcgaattaggggaaaagaaacctcgtcggagagcagaggcaggattctgctttcccttggactgtatcactcaggactctgaatattccctgaaataggaggaaaaatgaccacgttgaaggaggcagtgaccttcaaggacgtggctgtggtcttcactgaggaagagctgaggctgctggaccttgcccagaggaaactgtaccgagaagtgatgctggagaacttcaggaacctgctctcagtggggcatcaatcactccacagagatactttccacttcctaaaggaagaaaagttttggatgatggagacagcaacccaaagagaagggaatttaggaggcaagatccaaatggagatggagactgtttcagaatcaggaacacatgaaggcttgttcagtcatcaaacctgggaacaaatttcaagtgacttaaccaggtttcaagactccatggtaaacagctttcagttctccaaacaagatgatatgccctgccaggttgatgcaggactatctataattcacgtaagacagaaaccttctgagggtaggacgtgtaaaaagtcctttagtgatgtctccgtccttgatcttcatcaacaactacagtcaagagagaagtctcatacatgtgatgaatgtggaaagagtttctgttatagctcagctcttcgtattcatcagagagttcacatgggggagaaactctataattgtgatgtgtgtggtaaggaattcaatcagagctcacatctgcaaattcatcagagaatccacactggagagaaaccattcaaatgtgagcagtgtgggaaaggctttagtcgtagatcaggactttatgttcatcgtaaattacacacaggagtgaaacctcatatttgtgagaaatgtgggaaggccttcattcatgattcccagcttcaggaacatcaaagaatccatactggggagaagccattcaaatgtgatatatgttgtaagagcttccgtagtagagcaaatcttaataggcattccatggttcacatgcgagagaaaccattcagatgtgatacatgtggtaagagctttggtctgaaatcagcacttaatagtcatcgcatggtccacacaggagagaaacggtacaaatgtgaggaatgtggaaaacgcttcatttataggcaagatctttataagcatcagatagaccacacaggggagaagccatataattgtaaagaatgtggaaagagcttcagatgggcctcaggtctttcaagacatgtgcgagtccacagtggagagacaacattcaaatgtgaagaatgtgggaagggattttatacaaattcacaacgttattctcaccagagagcgcacagtggagaaaagccatatagatgtgaggagtgtgggaagggctacaaaaggaggttggatcttgactttcatcagagggtccacagaggagagaaaccctataattgtaaggaatgtgggaagagctttggctgggcctcgtgtcttttgaatcatcagagaatccacagtggagaaaaaccatttaaatgtgaagaatgtgggaaaagatttactcagaattcacaactttatacccatcgtagagtccacagtggagaaaaaccattcaaatgtgaagagtgtgggaaaagatttactcagaattcacaactttattctcatcgcagagtccacactggagtaaagccatacaaatgtgaagagtgtgggaagggcttcaacagtaagtttaatcttgacatgcaccagagggtccacaccggagagagaccttataattgtaaagaatgtgggaagagctttagccgggcctcaagtattttgaatcataagagactccatggtgatgaaaagccattcaaatgtgaagagtgtgggaagagatttactgagaattcacagcttcattcccatcagagggttcacactggggaaaagccatacaaatgtgagaagtgtggaaagagcttcagatgggcctcaactcatctaacccatcagagactccacagtagagaaaaactacttcaatgtgaggactgtgggaagagcattgtgcacagttcatgccttaaagaccaacaaagagaccaaagtggagagaaaacatctaaatgtgaggactgtgggaagcgctacaagaggcgcttgaatcttgatacgcttttgtcattatttttaaatgacacataactgttgtactcatttatggggtacagtgtgatagttaatgcaagtatacaatgtgtaatgatcaaatcagtgtaattaacatacctatcacctcaaacatttatcatttatttatgttgggaacccttaaaattcactgtcctagctatttgaaaataatacgttgttaattactgtcaccctgtagtggtgtaaaacactagaacttattcctcctacctgcctgtatttctgtattcattaaccaacctttggctaccaccctgcctcctcacctctaagaactactattctactctctacttctatgaagttaactttttgagcttccacatatgtgtgagaacatgtggtatgtatctttctgtgcctggcatatatcacttaatataatgccctgtaagtctcattcactttgctgtgagtgatagaattttgttgtttttcatggctaaatagtactctgatgtgtatatttgccccattttctttattcattcatccagtggacacttaggttgattacataccttggcctatttcttggctatcgtgaatggtgctgcaataaacatgggggggtggagataacactttaacatactgatttccttttctttggatatgtaccaagtatcatataatagtatgacatgactcaaaattaaggaataagattgtggaaattggttttcaaaaaaaaattctctagtttgaatatagagaaaaattggtgagtgtcttcagctgtcctcatacataatgcatgtgagctcgctttaagcataagtgaaggagtggaaaaatcctggagatagaaatcaaggggtatacatgtggatgtaaaaaatcaacaaagattcttttaagaaaaggtgtgtatgggtagggaacaatagcatgacagcagtgcggcctctaacagtctggaaccagttaggacaaagagcaggattgagcgccattccattcatagacaccgtggtgatattttgagtacattaggttaaaaggctttcttcagcaaaatctatctctagagatagatttgatttttataatcaaatctactagagatagatttgatttttataatcaaatctaccagagatagatttgatttttataatcaaatctactagagatagatttgatttttataatcaaatctactagagatagatttgatttttatacttaatgttctagactgtatcttttcaggatgctaggtactttatgaagatccatgctgtctcaatttgcatagtgggttggaggtccctaagacaatctctccagattctatgatttgctaagaggactcagaatatagttgtactcatgactatattatagtgacaggatacaaataatcagcaaagggaaaaggttcttgtataatatctggagggaatcagatgtaaatttgtaaagatcctttgtgcatggagtaacaggtctcaattcctccagtattgaattgtgactgtacttgtgaaatgtctacaatggaaattaattatcaacccgtaccaaaggttcttattggaactaatcatgtaggtaccatccctctggtacatatcaagattctagactccaagaaggggagcaagtgttcagaataacttgaaccatgcctaccagttatggaatggtggcaaccctctcaaactccgtgtttcctaacaccagctaaaggccagtcttataagcagtcctttctaagatttgcagtctcaggcctgttatattaactttttgtgcacatagtactagaaaactgttggctcagtcttctttttgttttgtgtgttttggtttttaactgtcaccgataccagaatagctcatctccaaggtaactgtaacagaacactcagcagattaaacagaaaatacttgcttattataattattaaaagtttggtagggtctatgtctgctctctggtgtgtcctggatcatcaacttggttacaacatggtgttaacatgtgggactgattgtgtttcttgttaatatttctgtttctcccaaccacgctgaatattaaatacctagttctatatctagta

SEQ ID NO: 201801 - DNA, 552 bp, Homo sapiens
  Payload ID: 19814
  Gene Name: zinc finger protein 225
  ENST ID: ENST00000589155
  CDS Start-End: 186-552
atgcaaataggcttcccagttgattggcccatcttgccagcttcttactgtgcacgtggctgacaaagagaagggaagatggagccgccatctttaacatgattggcacaactgctggcaggattctgctttcccttggactgtatcactcaggactctgaatattccctgaaataggaggaaaaatgaccacgttgaaggaggcagtgaccttcaaggacgtggctgtggtcttcactgaggaagagctgaggctgctggaccttgcccagaggaaactgtaccgagaagtgatgctggagaacttcaggaacctgctctcagtggggcatcaatcactccacagagatactttccacttcctaaaggaagaaaagttttggatgatggagacagcaacccaaagagaagggaatttaggaggcaagatccaaatggagatggagactgtttcagaatcaggaacacatgaaggcttgttcagtcatcaaacctgggaacaaatttcaagtgacttaaccaggtttcaagactccatggtaaacagctttc

SEQ ID NO: 201802 - DNA, 2538 bp, Homo sapiens
  Payload ID: 19814
  Gene Name: zinc finger protein 225
  ENST ID: ENST00000592780
  CDS Start-End: 222-497
ttccgctccgttactgtgaggttgctgcagttttgtccctggtagtttgggtcagttccgcgagacccttctgaatttcctggacctacgcattggatccttaacgaactggtgatcgaattaggggaaaagaaacctcgtcggagagcagaggcaggattctgctttcccttggactgtatcactcaggactctgaatattccctgaaataggaggaaaaatgaccacgttgaaggaggcagtgaccttcaaggacgtggctgtggtcttcactgaggaagagctgaggctgctggaccttgcccagaggaaactgtaccgagaagtgatgctggagaacttcaggaacctgctctcagtggggcatcaatcactccacagagatactttccacttcctaaaggaagaaaagttttggatgatggagacagcaacccaaagagaagggaatttaggtccagcctttcagattcccatcaaaactgaaggtttctgatccttttctatttcaggaggcaagatccaaatggagatggagactgtttcagaatcaggaacacatgaaggcttgttcagtcatcaaacctgggaacaaatttcaagtgacttaaccaggtttcaagactccatggtaaacagctttcagttctccaaacaagatgatatgccctgccaggttgatgcaggactatctataattcacgtaagacagaaaccttctgagggtaggacgtgtaaaaagtcctttagtgatgtctccgtccttgatcttcatcaacaactacagtcaagagagaagtctcatacatgtgatgaatgtggaaagagtttctgttatagctcagctcttcgtattcatcagagagttcacatgggggagaaactctataattgtgatgtgtgtggtaaggaattcaatcagagctcacatctgcaaattcatcagagaatccacactggagagaaaccattcaaatgtgagcagtgtgggaaaggctttagtcgtagatcaggactttatgttcatcgtaaattacacacaggagtgaaacctcatatttgtgagaaatgtgggaaggccttcattcatgattcccagcttcaggaacatcaaagaatccatactggggagaagccattcaaatgtgatatatgttgtaagagcttccgtagtagagcaaatcttaataggcattccatggttcacatgcgagagaaaccattcagatgtgatacatgtggtaagagctttggtctgaaatcagcacttaatagtcatcgcatggtccacacaggagagaaacggtacaaatgtgaggaatgtggaaaacgcttcatttataggcaagatctttataagcatcagatagaccacacaggggagaagccatataattgtaaagaatgtggaaagagcttcagatgggcctcaggtctttcaagacatgtgcgagtccacagtggagagacaacattcaaatgtgaagaatgtgggaagggattttatacaaattcacaacgttattctcaccagagagcgcacagtggagaaaagccatatagatgtgaggagtgtgggaagggctacaaaaggaggttggatcttgactttcatcagagggtccacagaggagagaaaccctataattgtaaggaatgtgggaagagctttggctgggcctcgtgtcttttgaatcatcagagaatccacagtggagaaaaaccatttaaatgtgaagaatgtgggaaaagatttactcagaattcacaactttatacccatcgtagagtccacagtggagaaaaaccattcaaatgtgaagagtgtgggaaaagatttactcagaattcacaactttattctcatcgcagagtccacactggagtaaagccatacaaatgtgaagagtgtgggaagggcttcaacagtaagtttaatcttgacatgcaccagagggtccacaccggagagagaccttataattgtaaagaatgtgggaagagctttagccgggcctcaagtattttgaatcataagagactccatggtgatgaaaagccattcaaatgtgaagagtgtgggaagagatttactgagaattcacagcttcattcccatcagagggttcacactggggaaaagccatacaaatgtgagaagtgtggaaagagcttcagatgggcctcaactcatctaacccatcagagactccacagtagagaaaaactacttcaatgtgaggactgtgggaagagcattgtgcacagttcatgccttaaagaccaacaaagagaccaaagtggagagaaaacatctaaatgtgaggactgtgggaagcgctacaagaggcgcttgaatcttgatacgcttttgtcattatttttaaatgacacataactgttgtactcatttatggggtacagtgtgatagttaatgcaagtatacaatgtgtaatgatcaaatcagtgtaattaacatacctatcacctcaaacatttatcatttatttatgttgggaacccttaaaattcactg

SEQ ID NO: 201803 - DNA, 541 bp, Homo sapiens
  Payload ID: 19814
  Gene Name: zinc finger protein 225
  ENST ID: ENST00000588926
  CDS Start-End: 389-541
acttccgctccgttactgtgaggttgctgcagttttgtccctggtagtttgggtcagttccgcgagacccttctgaatttcctggacctacgcattggatccttaacgaactggtgatcgaattaggggaaaagaaacctcgtcggagagcagaggaaggcgagggttgcatccacttccaggaggggagaggagcatttaacttttatggggcacggcgaccacggtcagagtgtttcacagccttctccttacccagcccgacctttccaaaagagctgcagggagggacttcttggcttctgagggcaaagctctacgcaggattctgctttcccttggactgtatcactcaggactctgaatattccctgaaataggaggaaaaatgaccacgttgaaggaggcagtgaccttcaaggacgtggctgtggtcttcactgaggaagagctgaggctgctggaccttgcccagaggaaactgtaccgagaagtgatgctggagaacttcaggaacctgctctcagtggggcatcaatca

SEQ ID NO: 201804 - DNA, 2404 bp, Homo sapiens
  Payload ID: 19814
  Gene Name: zinc finger protein 225
  Uniprot ID: Q9UK10
  ENST ID: ENST00000590612
  CDS Start-End: 284-2404
taatttccaaataagattccattgtatggataggccacaatttgtctatccatgtacgcataggagggagtttgttggtgtgcagttttgggttactatgaatgatgctgttgggaacattcatgtgttaatttacaatacacattcgtgttggtggatggcatccctggccacactttcatgtctctttttctgccttccctggtactttccaggcaggattctgctttcccttggactgtatcactcaggactctgaatattccctgaaataggaggaaaaatgaccacgttgaaggaggcagtgaccttcaaggacgtggctgtggtcttcactgaggaagagctgaggctgctggaccttgcccagaggaaactgtaccgagaagtgatgctggagaacttcaggaacctgctctcagtggggcatcaatcactccacagagatactttccacttcctaaaggaagaaaagttttggatgatggagacagcaacccaaagagaagggaatttaggaggcaagatccaaatggagatggagactgtttcagaatcaggaacacatgaaggcttgttcagtcatcaaacctgggaacaaatttcaagtgacttaaccaggtttcaagactccatggtaaacagctttcagttctccaaacaagatgatatgccctgccaggttgatgcaggactatctataattcacgtaagacagaaaccttctgagggtaggacgtgtaaaaagtcctttagtgatgtctccgtccttgatcttcatcaacaactacagtcaagagagaagtctcatacatgtgatgaatgtggaaagagtttctgttatagctcagctcttcgtattcatcagagagttcacatgggggagaaactctataattgtgatgtgtgtggtaaggaattcaatcagagctcacatctgcaaattcatcagagaatccacactggagagaaaccattcaaatgtgagcagtgtgggaaaggctttagtcgtagatcaggactttatgttcatcgtaaattacacacaggagtgaaacctcatatttgtgagaaatgtgggaaggccttcattcatgattcccagcttcaggaacatcaaagaatccatactggggagaagccattcaaatgtgatatatgttgtaagagcttccgtagtagagcaaatcttaataggcattccatggttcacatgcgagagaaaccattcagatgtgatacatgtggtaagagctttggtctgaaatcagcacttaatagtcatcgcatggtccacacaggagagaaacggtacaaatgtgaggaatgtggaaaacgcttcatttataggcaagatctttataagcatcagatagaccacacaggggagaagccatataattgtaaagaatgtggaaagagcttcagatgggcctcaggtctttcaagacatgtgcgagtccacagtggagagacaacattcaaatgtgaagaatgtgggaagggattttatacaaattcacaacgttattctcaccagagagcgcacagtggagaaaagccatatagatgtgaggagtgtgggaagggctacaaaaggaggttggatcttgactttcatcagagggtccacagaggagagaaaccctataattgtaaggaatgtgggaagagctttggctgggcctcgtgtcttttgaatcatcagagaatccacagtggagaaaaaccatttaaatgtgaagaatgtgggaaaagatttactcagaattcacaactttatacccatcgtagagtccacagtggagaaaaaccattcaaatgtgaagagtgtgggaaaagatttactcagaattcacaactttattctcatcgcagagtccacactggagtaaagccatacaaatgtgaagagtgtgggaagggcttcaacagtaagtttaatcttgacatgcaccagagggtccacaccggagagagaccttataattgtaaagaatgtgggaagagctttagccgggcctcaagtattttgaatcataagagactccatggtgatgaaaagccattcaaatgtgaagagtgtgggaagagatttactgagaattcacagcttcattcccatcagagggttcacactggggaaaagccatacaaatgtgagaagtgtggaaagagcttcagatgggcctcaactcatctaacccatcagagactccacagtagagaaaaactacttcaatgtgaggactgtgggaagagcattgtgcacagttcatgccttaaagaccaacaaagagaccaaagtggagagaaaacatctaaatgtgaggactgtgggaagcgctacaagaggcgcttgaatcttgatacgcttttgtcattatttttaaatgacacataa

SEQ ID NO: 201805 - DNA, 817 bp, Homo sapiens
  Payload ID: 19815
  Gene Name: zinc finger protein 226
  Uniprot ID: Q9NYT6
  ENST ID: ENST00000300823
  CDS Start-End: 137-421
gacgtagcagccatcttttccctggctttggtgattcagccctgacttctcaaaaagcactgcacagaggaggaggcagcagaaccccatttcagcttcttaggactctgcacttccccagaaggaagaattaaaaatgaatatgttcaaggaagcagtgaccttcaaggacgtggctgtggccttcacggaggaggaattggggctgctgggccctgcccagaggaagctgtaccgagatgtgatggtggagaactttaggaacctgctgtcagtggggcatccacccttcaaacaagatgtatcacctatagaaagaaatgagcagctttggataatgacgacagcaacccgaagacagggaaatttagataccttacttgtaaaagctcttttgctctatgacctggctcaaacttaaacttggatttgaagttagaagaaatgttggaagtcatttatatatgaagaaatgttggaaggactcatatatgcatacattccttgagtgactatgaatgactgccgggcagtaacttctgggctgtggttgtaaactgtgagcactacaaaatgtttttccttattgataccatattatggtaggaaagacatggaataaaaaatttagatagtatgtcagtagttgtgtttttaaatgggtttcattagtgcttagcaattgggagcttggtggaccatctcttggttttggaccatctcttggtttctgtcagtatgtaaaccagaaacttcaaatgtgtcacaaaagatgagcagaactatcccgaggttcattaaagtcttttactctgtc

SEQ ID NO: 201806 - DNA, 2565 bp, Homo sapiens
  Payload ID: 19815
  Gene Name: zinc finger protein 226
  Uniprot ID: Q9NYT6
  ENST ID: ENST00000337433
  CDS Start-End: 145-2556
aggaagacgacgtagcagccatcttttccctggctttggtgattcagccctgacttctcaaaaagcactgcacagaggaggaggcagcagaaccccatttcagcttcttaggactctgcacttccccagaaggaagaattaaaaatgaatatgttcaaggaagcagtgaccttcaaggacgtggctgtggccttcacggaggaggaattggggctgctgggccctgcccagaggaagctgtaccgagatgtgatggtggagaactttaggaacctgctgtcagtggggcatccacccttcaaacaagatgtatcacctatagaaagaaatgagcagctttggataatgacgacagcaacccgaagacagggaaatttaggagagaaaaatcaaagtaagttaattactgttcaagacagagaatcagaagaagagctttcttgttggcaaatctggcaacaaattgcaaatgacttaaccaggtgtcaagactccatgatcaataattctcagtgtcacaaacaaggtgatttcccttaccaggtagggacagaactgtctattcaaatttctgaagatgagaactatatagtaaataaagcagatggtcccaataatactgggaatccagagtttcctatcttgagaacccaggattcttggaggaaaacattcctgactgagtcacagagattgaacagagatcagcaaatttccataaaaaataaattatgtcaatgtaagaagggtgttgatcccatcggttggatttcacatcatgatggtcatagagtacacaaaagtgaaaaatcttatagacccaatgattatgaaaaagacaacatgaagattttgacatttgatcacaatagcatgattcacacaggacagaaatcgtaccagtgtaatgagtgtaaaaaacccttcagtgatctctccagctttgatcttcatcagcagttacaatcaggagagaagtctcttacatgtgttgagcgtggaaaaggcttctgttacagcccagttcttcctgttcatcagaaagtacatgtgggagaaaaacttaagtgtgatgagtgtggtaaggaattcagtcagggcgctcatctacagacccatcagaaagtccacgtgatagagaaaccatacaaatgtaagcaatgtgggaaaggtttcagtcgtagatcagcacttaatgttcattgcaaggtccacacggcagagaaaccttataattgtgaggagtgtgggagggccttcagtcaggcctctcatcttcaggaccatcagagactccacactggggagaagccattcaaatgtgatgcatgtggtaagagcttcagtcggaattcacatcttcaatcccatcaaagagttcatacaggagagaaaccatacaaatgtgaggagtgtggtaagggcttcatttgtagctcaaatctttacattcatcagagagtccacacaggagaaaaaccctataaatgtgaggaatgtggtaaaggctttagtcggccttcaagtcttcaggcccatcagggagttcacactggagagaagtcatacatatgtactgtatgtgggaaaggctttactctgagttcaaatcttcaagcccatcagagagtccacactggagagaagccatacaaatgcaatgagtgtgggaagagcttcaggaggaattcccattatcaagttcatctagtggtccacacaggagagaaaccctataaatgtgagatatgtgggaagggcttcagtcaaagttcgtatcttcaaatccatcagaaggcccacagtatagagaaaccttttaagtgtgaggagtgtgggcagggtttcaatcagagctcacgacttcagattcaccagctgatccatacgggtgagaaaccatacaaatgtgaagagtgtggcaagggatttagtcgtagagcagatcttaaaattcactgtaggatccacacaggagagaaaccatataattgtgaggagtgtgggaaggtcttcaggcaggcctcaaatcttttggcccatcagagagtccacagtggagaaaaaccattcaaatgtgaagaatgtgggaagagtttcggtcggagtgcacatcttcaagcccatcaaaaagtccacactggagataagccatacaaatgtgatgagtgtgggaagggcttcaagtggagcttgaaccttgacatgcatcagagggtgcacacaggagaaaaaccatataaatgtggggagtgtggtaagtacttcagtcaggcctcaagtcttcaacttcatcagagtgtccacacaggagagaaaccatacaaatgtgatgtgtgtggtaaagtcttcagtcggtcttcacaactacagtctcatcagcgagttcacactggggagaaaccttataaatgtgagatatgtggtaagagcttcagttggcgatcaaatcttacagttcatcacagaatccatgttggtgataaatcctataaaagtaataggggtggtaagaacatcagagaatccacacaggaaaaaaaatctataaaatgattctttgtg

SEQ ID NO: 201807 - DNA, 2605 bp, Homo sapiens
  Payload ID: 19815
  Gene Name: zinc finger protein 226
  Uniprot ID: Q9NYT6
  ENST ID: ENST00000454662
  CDS Start-End: 181-2592
caaacttccccgaaatgcacttgtggtcagcagctagcggtcttttgtttggggaaaaaaaggagtagcggctaagagcggagccctgacttctcaaaaagcactgcacagaggaggaggcagcagaaccccatttcagcttcttaggactctgcacttccccagaaggaagaattaaaaatgaatatgttcaaggaagcagtgaccttcaaggacgtggctgtggccttcacggaggaggaattggggctgctgggccctgcccagaggaagctgtaccgagatgtgatggtggagaactttaggaacctgctgtcagtggggcatccacccttcaaacaagatgtatcacctatagaaagaaatgagcagctttggataatgacgacagcaacccgaagacagggaaatttaggagagaaaaatcaaagtaagttaattactgttcaagacagagaatcagaagaagagctttcttgttggcaaatctggcaacaaattgcaaatgacttaaccaggtgtcaagactccatgatcaataattctcagtgtcacaaacaaggtgatttcccttaccaggtagggacagaactgtctattcaaatttctgaagatgagaactatatagtaaataaagcagatggtcccaataatactgggaatccagagtttcctatcttgagaacccaggattcttggaggaaaacattcctgactgagtcacagagattgaacagagatcagcaaatttccataaaaaataaattatgtcaatgtaagaagggtgttgatcccatcggttggatttcacatcatgatggtcatagagtacacaaaagtgaaaaatcttatagacccaatgattatgaaaaagacaacatgaagattttgacatttgatcacaatagcatgattcacacaggacagaaatcgtaccagtgtaatgagtgtaaaaaacccttcagtgatctctccagctttgatcttcatcagcagttacaatcaggagagaagtctcttacatgtgttgagcgtggaaaaggcttctgttacagcccagttcttcctgttcatcagaaagtacatgtgggagaaaaacttaagtgtgatgagtgtggtaaggaattcagtcagggcgctcatctacagacccatcagaaagtccacgtgatagagaaaccatacaaatgtaagcaatgtgggaaaggtttcagtcgtagatcagcacttaatgttcattgcaaggtccacacggcagagaaaccttataattgtgaggagtgtgggagggccttcagtcaggcctctcatcttcaggaccatcagagactccacactggggagaagccattcaaatgtgatgcatgtggtaagagcttcagtcggaattcacatcttcaatcccatcaaagagttcatacaggagagaaaccatacaaatgtgaggagtgtggtaagggcttcatttgtagctcaaatctttacattcatcagagagtccacacaggagaaaaaccctataaatgtgaggaatgtggtaaaggctttagtcggccttcaagtcttcaggcccatcagggagttcacactggagagaagtcatacatatgtactgtatgtgggaaaggctttactctgagttcaaatcttcaagcccatcagagagtccacactggagagaagccatacaaatgcaatgagtgtgggaagagcttcaggaggaattcccattatcaagttcatctagtggtccacacaggagagaaaccctataaatgtgagatatgtgggaagggcttcagtcaaagttcgtatcttcaaatccatcagaaggcccacagtatagagaaaccttttaagtgtgaggagtgtgggcagggtttcaatcagagctcacgacttcagattcaccagctgatccatacgggtgagaaaccatacaaatgtgaagagtgtggcaagggatttagtcgtagagcagatcttaaaattcactgtaggatccacacaggagagaaaccatataattgtgaggagtgtgggaaggtcttcaggcaggcctcaaatcttttggcccatcagagagtccacagtggagaaaaaccattcaaatgtgaagaatgtgggaagagtttcggtcggagtgcacatcttcaagcccatcaaaaagtccacactggagataagccatacaaatgtgatgagtgtgggaagggcttcaagtggagcttgaaccttgacatgcatcagagggtgcacacaggagaaaaaccatataaatgtggggagtgtggtaagtacttcagtcaggcctcaagtcttcaacttcatcagagtgtccacacaggagagaaaccatacaaatgtgatgtgtgtggtaaagtcttcagtcggtcttcacaactacagtctcatcagcgagttcacactggggagaaaccttataaatgtgagatatgtggtaagagcttcagttggcgatcaaatcttacagttcatcacagaatccatgttggtgataaatcctataaaagtaataggggtggtaagaacatcagagaatccacacaggaaaaaaaatctataaaatgattctttgtgaaga

SEQ ID NO: 201808 - DNA, 716 bp, Homo sapiens
  Payload ID: 19815
  Gene Name: zinc finger protein 226
  Uniprot ID: Q9NYT6
  ENST ID: ENST00000413984
  CDS Start-End: 307-591
cgacgtagcagccatcttttccctggctttggtgattcagaaactcccgttctgtggcgaaattctgtgagtccatgaagctggattgtccctgacctcttttgaggaaggagagggttgcttctaactggtcctgggagatgccactgtgatgtatccgggatgaagacacaatcctggttacttcatagcctgtttttcttccccagccctgacttctcaaaaagcactgcacagaggaggaggcagcagaaccccatttcagcttcttaggactctgcacttccccagaaggaagaattaaaaatgaatatgttcaaggaagcagtgaccttcaaggacgtggctgtggccttcacggaggaggaattggggctgctgggccctgcccagaggaagctgtaccgagatgtgatggtggagaactttaggaacctgctgtcagtggggcatccacccttcaaacaagatgtatcacctatagaaagaaatgagcagctttggataatgacgacagcaacccgaagacagggaaatttagataccttacttgtaaaagctcttttgctctatgacctggctcaaacttaaacttggatttgaagttagaagaaatgttggaagtcatttatatatgaagaaatgttggaaggactcatatatgcatacattccttgagtgactatgaatgactgccgggcagtaacttctgggct

SEQ ID NO: 201809 - DNA, 641 bp, Homo sapiens
  Payload ID: 19815
  Gene Name: zinc finger protein 226
  ENST ID: ENST00000588795
  CDS Start-End: 125-394
atcttttccctggctttggtgattcagccctgacttctcaaaaagcactgcacagaggaggaggcagcagaaccccatttcagcttcttaggactctgcacttccccagaaggaagaattaaaaatgaatatgttcaaggaagcagtgaccttcaaggacgtggctgtggccttcacggaggaggaattggggctgctgggccctgcccagaggaagctgtaccgagatgtgatggtggagaactttaggaacctgctgtcagtggggcatccacccttcaaacaagatgtatcacctatagaaagaaatgagcagctttggataatgacgacagcaacccgaagacagggaaatttaggtaaaaaccaaacagttatgagttcttatagttaactgtccatctgctttgcttcttcttagccttgttgccatcacctggtccaaattgccaactgtctttcctggattattgcaacaccctttgtactgcttgccctgctcccacccctctcctcttacattctgttctttaagtggcaaagtgagtttttgttaccttgtgtcagactatgttgttcttctgctcaaaattctctgtgacttattttacatagagtaaaatccacttaatgtggctgac

SEQ ID NO: 201810 - DNA, 579 bp, Homo sapiens
  Payload ID: 19815
  Gene Name: zinc finger protein 226
  ENST ID: ENST00000585678
  CDS Start-End: 238-579
gtagcagccatcttttccctggctttggtgattcagccctgacttctcaaaaagcactgcacagaggaggaggcagcagaaccccatttcagcttcttaggactctgcacttccccagaaggaagaattaaaaatgaatatgttcaagcagtgaccttcaaggacgtggctgtggccttcacggaggaggaattggggctgctgggccctgcccagaggaagctgtaccgagatgtgatggtggagaactttaggaacctgctgtcagtggggcatccacccttcaaacaagatgtatcacctatagaaagaaatgagcagctttggataatgacgacagcaacccgaagacagggaaatttaggagagaaaaatcaaagtaagttaattactgttcaagacagagaatcagaagaagagctttcttgttggcaaatctggcaacaaattgcaaatgacttaaccaggtgtcaagactccatgatcaataattctcagtgtcacaaacaaggtgatttcccttaccaggtagggacagaactgtctattcaaatttctgaagatgagaactatatagta

SEQ ID NO: 201811 - DNA, 2788 bp, Homo sapiens
  Payload ID: 19815
  Gene Name: zinc finger protein 226
  Uniprot ID: Q9NYT6
  ENST ID: ENST00000590089
  CDS Start-End: 368-2779
ggaacctttcaaacttccccgaaatgcacttgtggtcagcagctagcggtcttttgtttggggaaaaaaaggagtagcggctaagagcggagccctgacttctcaaaaagcactgcacagaggaggaggcagcagaaccccatgggctgttttgggagagggactgagtacagtgcaacactactcaaactgtggttcacaaagcagcaacattggcatcacccaggtagaaaggctcattcttgagccctaccgaaggccttctgatttagcatttttgcagataggacccagaaatctgcatttcaacaagatcccaagttcagcttcttaggactctgcacttccccagaaggaagaattaaaaatgaatatgttcaaggaagcagtgaccttcaaggacgtggctgtggccttcacggaggaggaattggggctgctgggccctgcccagaggaagctgtaccgagatgtgatggtggagaactttaggaacctgctgtcagtggggcatccacccttcaaacaagatgtatcacctatagaaagaaatgagcagctttggataatgacgacagcaacccgaagacagggaaatttaggagagaaaaatcaaagtaagttaattactgttcaagacagagaatcagaagaagagctttcttgttggcaaatctggcaacaaattgcaaatgacttaaccaggtgtcaagactccatgatcaataattctcagtgtcacaaacaaggtgatttcccttaccaggtagggacagaactgtctattcaaatttctgaagatgagaactatatagtaaataaagcagatggtcccaataatactgggaatccagagtttcctatcttgagaacccaggattcttggaggaaaacattcctgactgagtcacagagattgaacagagatcagcaaatttccataaaaaataaattatgtcaatgtaagaagggtgttgatcccatcggttggatttcacatcatgatggtcatagagtacacaaaagtgaaaaatcttatagacccaatgattatgaaaaagacaacatgaagattttgacatttgatcacaatagcatgattcacacaggacagaaatcgtaccagtgtaatgagtgtaaaaaacccttcagtgatctctccagctttgatcttcatcagcagttacaatcaggagagaagtctcttacatgtgttgagcgtggaaaaggcttctgttacagcccagttcttcctgttcatcagaaagtacatgtgggagaaaaacttaagtgtgatgagtgtggtaaggaattcagtcagggcgctcatctacagacccatcagaaagtccacgtgatagagaaaccatacaaatgtaagcaatgtgggaaaggtttcagtcgtagatcagcacttaatgttcattgcaaggtccacacggcagagaaaccttataattgtgaggagtgtgggagggccttcagtcaggcctctcatcttcaggaccatcagagactccacactggggagaagccattcaaatgtgatgcatgtggtaagagcttcagtcggaattcacatcttcaatcccatcaaagagttcatacaggagagaaaccatacaaatgtgaggagtgtggtaagggcttcatttgtagctcaaatctttacattcatcagagagtccacacaggagaaaaaccctataaatgtgaggaatgtggtaaaggctttagtcggccttcaagtcttcaggcccatcagggagttcacactggagagaagtcatacatatgtactgtatgtgggaaaggctttactctgagttcaaatcttcaagcccatcagagagtccacactggagagaagccatacaaatgcaatgagtgtgggaagagcttcaggaggaattcccattatcaagttcatctagtggtccacacaggagagaaaccctataaatgtgagatatgtgggaagggcttcagtcaaagttcgtatcttcaaatccatcagaaggcccacagtatagagaaaccttttaagtgtgaggagtgtgggcagggtttcaatcagagctcacgacttcagattcaccagctgatccatacgggtgagaaaccatacaaatgtgaagagtgtggcaagggatttagtcgtagagcagatcttaaaattcactgtaggatccacacaggagagaaaccatataattgtgaggagtgtgggaaggtcttcaggcaggcctcaaatcttttggcccatcagagagtccacagtggagaaaaaccattcaaatgtgaagaatgtgggaagagtttcggtcggagtgcacatcttcaagcccatcaaaaagtccacactggagataagccatacaaatgtgatgagtgtgggaagggcttcaagtggagcttgaaccttgacatgcatcagagggtgcacacaggagaaaaaccatataaatgtggggagtgtggtaagtacttcagtcaggcctcaagtcttcaacttcatcagagtgtccacacaggagagaaaccatacaaatgtgatgtgtgtggtaaagtcttcagtcggtcttcacaactacagtctcatcagcgagttcacactggggagaaaccttataaatgtgagatatgtggtaagagcttcagttggcgatcaaatcttacagttcatcacagaatccatgttggtgataaatcctataaaagtaataggggtggtaagaacatcagagaatccacacaggaaaaaaaatctataaaatgattctttgtg

SEQ ID NO: 201812 - DNA, 5972 bp, Homo sapiens
  Payload ID: 19815
  Gene Name: zinc finger protein 226
  ENST ID: ENST00000588883
  CDS Start-End: 309-578
gacgacgtagcagccatcttttccctggctttggtgattcagaaactcccgttctgtggcgaaattctgtgagtccatgaagctggattgtccctgacctcttttgaggaaggagagggttgcttctaactggtcctgggagatgccactgtgatgtatccgggatgaagacacaatcctggttacttcatagcctgtttttcttccccagccctgacttctcaaaaagcactgcacagaggaggaggcagcagaaccccatttcagcttcttaggactctgcacttccccagaaggaagaattaaaaatgaatatgttcaaggaagcagtgaccttcaaggacgtggctgtggccttcacggaggaggaattggggctgctgggccctgcccagaggaagctgtaccgagatgtgatggtggagaactttaggaacctgctgtcagtggggcatccacccttcaaacaagatgtatcacctatagaaagaaatgagcagctttggataatgacgacagcaacccgaagacagggaaatttaggtaaaaaccaaacagttatgagttcttatagttaactgtccatctgctttgcttcttcttagccttgttgccatcacctggtccaaattgccaactgtctttcctggattattgcaacaccctttgtactgcttgccctgctcccacccctctcctcttacattctgttctttaagtggcaaagtgagtttttgttaccttgtgtcagactatgttgttcttctgctcaaaattctctgtgacttattttacatagagtaaaatccacttaatgtggctgacagagtcttacacggtgtgcttttcatcccccactacctctctaaatatatcttctatactctctttctgtgaattccagccacattgtcctccctcttgcttttcagacctatcaaggatgcttctgcctcacaaccctgtgtgttcttccctctgcctgaaataatcttttacctataatccttctggtcccttcttcattcatttctttgctcagttttagtattataagaaaggcctcggccgggcacggtggcttgcgcctgtaatcccagcacttcgcgaggctgaggtgggcagatcaatcatgaggtcaggagatcgagaccaacctggctaacacggtgaaaccctgtctctactaaaaatacaaaaaatcagctgggcgtggtggtgggtgcctgtagtcccagctactcggcaggctgaggcagaatggtgtgaacccaggaggcagaggttgcagtgagctgagatcgtgccactgcactccagcctgggcgatagagcgagactgtctcaagaaaaaaaaaaagaaaggcctcctctgaccaccctattaaaaatacattctctccatttactctctgtgcactgccttatattgtgtgtaagcactgattatcacctcatatatgtttttgtttagtgacgtttgtctcctcactggagtgtaatctccaggagtggaggaatgttatctatttgcttctgtctcctcagtgcttagaatagtcctagtatatggcagagacactataaatattagttgaataaatgagttaatggaaatctgtcttccatggaggtaactaataggtggtgaacaaatcagcataaataagggatattgcaaaatattttttgtcttctaatgaattcctaacctaattctaatttctctttgtgtgtgtgtgtgtgtgtgtgtgtgtttgcatgtgtttgcctgtctgtacaagttgacccatatcttggggaacctatagtgtcatagttgtaaccaaactgaataacatgctttgtttatgactttctttgagcatttgtagcagagcatattcattcggggagggaatattttacaataaggacttttatttctatttcttaggtattcccccatagaagggaataaaattcgatttccttatccattatatcaggaaagaaaaagtaaaactaaaaaccaggacatgagcattagcctttccctcaaaatgtttgcacagttgcatcccatttgcttcttccaaagtccacattcataaaaagaaatggatcttacattgttgcctctcaaacatttatatcgtgtaggcttatatgtatgtctttagaaggccttttatgtaatgacaccattactgcttgtgattattctgatatgatactttatctgtttttttttcctaaatatcacaagctattaaatttatttcacaattgactagtagaccactttgtcaatttggaaaacattcttgttaaagacaaacatatctacatccagaaactttctataccttgctttcaaagagacagcattctttgctagccttccaattttgactcagtgcaaaagccttagaaggatccagtgcataggtcttcatgctttcctttcaccccaagtgattatcaactttgatttttctcttcagcaataactcacttggtgtacccctacctcaggtacagcttttcaactttgcagcaaaactgtactttctagttctttttgtatttcagataccttacttgtaaaagctcttttgctctatgacctggctcaaacttaaacttggatttgaagttagaagaaatgttggaagtcatttatatatgaagaaatgttggaaggactcatatatgcatacattccttgagtgactatgaatgactgccgggcagtaacttctgggctgtggttgtaaactgtgagcactacaaaatgtttttccttattgataccatattatggtaggaaagacatggaataaaaaatttagatagtatgtcagtagttgtgtttttaaatgggtttcattagtgcttagcaattgggagcttggtggaccatctcttggttttggaccatctcttggtttctgtcagtatgtaaaccagaaacttcaaatgtgtcacaaaagatgagcagaactatcccgaggttcattaaagtcttttactctgtcctcagtgtgaaatcttaaatctttgaacaaaaaaattcactatctctctgaatcctttgtccttacaggagagaaaaatcaaagtaagttaattactgttcaagacagagaatcagaagaagagctttcttgttggcaaatctggcaacaaattgcaaatgacttaaccaggtgtcaagactccatgatcaataattctcagtgtcacaaacaaggtgatttcccttaccaggtagggacagaactgtctattcaaatttctgaagatgagaactatatagtaaataaagcagatggtcccaataatactgggaatccagagtttcctatcttgagaacccaggattcttggaggaaaacattcctgactgagtcacagagattgaacagagatcagcaaatttccataaaaaataaattatgtcaatgtaagaagggtgttgatcccatcggttggatttcacatcatgatggtcatagagtacacaaaagtgaaaaatcttatagacccaatgattatgaaaaagacaacatgaagattttgacatttgatcacaatagcatgattcacacaggacagaaatcgtaccagtgtaatgagtgtaaaaaacccttcagtgatctctccagctttgatcttcatcagcagttacaatcaggagagaagtctcttacatgtgttgagcgtggaaaaggcttctgttacagcccagttcttcctgttcatcagaaagtacatgtgggagaaaaacttaagtgtgatgagtgtggtaaggaattcagtcagggcgctcatctacagacccatcagaaagtccacgtgatagagaaaccatacaaatgtaagcaatgtgggaaaggtttcagtcgtagatcagcacttaatgttcattgcaaggtccacacggcagagaaaccttataattgtgaggagtgtgggagggccttcagtcaggcctctcatcttcaggaccatcagagactccacactggggagaagccattcaaatgtgatgcatgtggtaagagcttcagtcggaattcacatcttcaatcccatcaaagagttcatacaggagagaaaccatacaaatgtgaggagtgtggtaagggcttcatttgtagctcaaatctttacattcatcagagagtccacacaggagaaaaaccctataaatgtgaggaatgtggtaaaggctttagtcggccttcaagtcttcaggcccatcagggagttcacactggagagaagtcatacatatgtactgtatgtgggaaaggctttactctgagttcaaatcttcaagcccatcagagagtccacactggagagaagccatacaaatgcaatgagtgtgggaagagcttcaggaggaattcccattatcaagttcatctagtggtccacacaggagagaaaccctataaatgtgagatatgtgggaagggcttcagtcaaagttcgtatcttcaaatccatcagaaggcccacagtatagagaaaccttttaagtgtgaggagtgtgggcagggtttcaatcagagctcacgacttcagattcaccagctgatccatacgggtgagaaaccatacaaatgtgaagagtgtggcaagggatttagtcgtagagcagatcttaaaattcactgtaggatccacacaggagagaaaccatataattgtgaggagtgtgggaaggtcttcaggcaggcctcaaatcttttggcccatcagagagtccacagtggagaaaaaccattcaaatgtgaagaatgtgggaagagtttcggtcggagtgcacatcttcaagcccatcaaaaagtccacactggagataagccatacaaatgtgatgagtgtgggaagggcttcaagtggagcttgaaccttgacatgcatcagagggtgcacacaggagaaaaaccatataaatgtggggagtgtggtaagtacttcagtcaggcctcaagtcttcaacttcatcagagtgtccacacaggagagaaaccatacaaatgtgatgtgtgtggtaaagtcttcagtcggtcttcacaactacagtctcatcagcgagttcacactggggagaaaccttataaatgtgagatatgtggtaagagcttcagttggcgatcaaatcttacagttcatcacagaatccatgttggtgataaatcctataaaagtaataggggtggtaagaacatcagagaatccacacaggaaaaaaaatctataaaatgattctttgtgaagactcgtgtcatttgaattcttccagttatcaagtctcaaagtcagtgtttcagccgtagctcctcatgtcccagtggtccaaagacaacaaaacaatctttatgattagcatagcaagggcttctttagtcagaaccttgacctttataaaatgttacttagaagaggggtgttaagagtgaaatttttctcaggccttttataaaagtatcatggtggacatgccaaaattaagtgtccactagaatgttaactccataaagacagaaactttgttcactactgaatctacataatcttaccattgccatatacttcacaggtgctcaatatttgttaataggtcctttttgaaaattatgttgagatcacctgcagaatatcatgaatttgtaaacaggaaacctgaaagtagccttaataagattaagtcgggagaccattgaaatgtagaaaaccactcaatactgaactccccaatgttaatttggcattgtcttgtgattagatcctgtcctcctttagcctcactaatcaagttgggtcctatcttcccagatgtctagttttctactggttttataccatatagattcaattatcttttgtaacagataattgtgttcatcttgtaataactggacactacatactacacttattttttcaacactgttaaggcaggggtttaagtg

SEQ ID NO: 201813 - DNA, 524 bp, Homo sapiens
  Payload ID: 19815
  Gene Name: zinc finger protein 226
  ENST ID: ENST00000586286
  CDS Start-End: 308-524
ggaagacgacgtagcagccatcttttccctggctttggtgattcagaaactcccgttctgtggcgaaattctgtgagtccatgaagctggattgtccctgacctcttttgaggaaggagagggttgcttctaactggtcctgggagatgccactgtgatgtatccgggatgaagacacaatcctggttacttcatagcctgtttttcttccccagccctgacttctcaaaaagcactgcacagaggaggaggcagcagaaccccatcttcttaggactctgcacttccccagaaggaagaattaaaaatgaatatgttcaaggaagcagtgaccttcaaggacgtggctgtggccttcacggaggaggaattggggctgctgggccctgcccagaggaagctgtaccgagatgtgatggtggagaactttaggaacctgctgtcagtggggcatccacccttcaaacaagatgtatcacctatagaaagaaatgagcagctttggataatgacgacagcaaccc

SEQ ID NO: 201814 - DNA, 515 bp, Homo sapiens
  Payload ID: 19815
  Gene Name: zinc finger protein 226
  ENST ID: ENST00000585560
  CDS Start-End: 318-515
gacgacgtagcagccatcttttccctggctttggtgattcagccctgacttctcaaaaagcactgcacagaggaggaggcagcagaaccccatgggctgttttgggagagggactgagtacagtgcaacactactcaaactgtggttcacaaagcagcaacattggcatcacccaggtagaaaggctcattcttgagccctaccgaaggccttctgatttagcatttttgcagataggacccagaaatctgcatttcaacaagatcccaagttcagcttcttaggactctgcacttccccagaaggaagaattaaaaatgaatatgttcaaggaagcagtgaccttcaaggacgtggctgtggccttcacggaggaggaattggggctgctgggccctgcccagaggaagctgtaccgagatgtgatggtggagaactttaggaacctgctgtcagtggggcatccacccttcaaacaagatgtatcacctatagaaagaaatgagcagctttgg

SEQ ID NO: 201815 - DNA, 576 bp, Homo sapiens
  Payload ID: 19815
  Gene Name: zinc finger protein 226
  ENST ID: ENST00000586914
  CDS Start-End: 309-576
gacgacgtagcagccatcttttccctggctttggtgattcagaaactcccgttctgtggcgaaattctgtgagtccatgaagctggattgtccctgacctcttttgaggaaggagagggttgcttctaactggtcctgggagatgccactgtgatgtatccgggatgaagacacaatcctggttacttcatagcctgtttttcttccccagccctgacttctcaaaaagcactgcacagaggaggaggcagcagaaccccatttcagcttcttaggactctgcacttccccagaaggaagaattaaaaatgaatatgttcaaggaagcagtgaccttcaaggacgtggctgtggccttcacggaggaggaattggggctgctgggccctgcccagaggaagctgtaccgagatgtgatggtggagaactttaggaacctgctgtcagtggggcatccacccttcaaacaagatgtatcacctatagaaagaaatgagcagctttggataatgacgacagcaacccgaagacagggaaatttaggagagaaaaatcaaagtaagttaattactgttc

SEQ ID NO: 201816 - DNA, 567 bp, Homo sapiens
  Payload ID: 19815
  Gene Name: zinc finger protein 226
  ENST ID: ENST00000588127
  CDS Start-End: 151-567
atcttttccctggctttggtgattcagaaactcccgttctgtggcgaaattctccctgacttctcaaaaagcactgcacagaggaggaggcagcagaaccccatttcagcttcttaggactctgcacttccccagaaggaagaattaaaaatgaatatgttcaaggaagcagtgaccttcaaggacgtggctgtggccttcacggaggaggaattggggctgctgggccctgcccagaggaagctgtaccgagatgtgatggtggagaactttaggaacctgctgtcagtggggcatccacccttcaaacaagatgtatcacctatagaaagaaatgagcagctttggataatgacgacagcaacccgaagacagggaaatttaggagagaaaaatcaaagtaagttaattactgttcaagacagagaatcagaagaagagctttcttgttggcaaatctggcaacaaattgcaaatgacttaaccaggtgtcaagactccatgatcaataattctcagtgtcacaaacaaggtgatttcccttaccaggtagggacagaactgtct

SEQ ID NO: 201817 - DNA, 447 bp, Homo sapiens
  Payload ID: 19815
  Gene Name: zinc finger protein 226
  Uniprot ID: Q9NYT6
  ENST ID: ENST00000588742
  CDS Start-End: 163-447
gacgtagcagccatcttttccctggctttggtgattcagaaactcccgttctgtggcgaaattctccctgacttctcaaaaagcactgcacagaggaggaggcagcagaaccccatttcagcttcttaggactctgcacttccccagaaggaagaattaaaaatgaatatgttcaaggaagcagtgaccttcaaggacgtggctgtggccttcacggaggaggaattggggctgctgggccctgcccagaggaagctgtaccgagatgtgatggtggagaactttaggaacctgctgtcagtggggcatccacccttcaaacaagatgtatcacctatagaaagaaatgagcagctttggataatgacgacagcaacccgaagacagggaaatttagataccttacttgtaaaagctcttttgctctatgacctggctcaaacttaa

SEQ ID NO: 201818 - DNA, 530 bp, Homo sapiens
  Payload ID: 19815
  Gene Name: zinc finger protein 226
  ENST ID: ENST00000590467
  CDS Start-End: 349-530
agccatcttttccctggctttggtgattcagccctgacttctcaaaaagcactgcacagaggaggaggcagcagaaccccatgggctgttttgggagagggactgagtacagtgcaacactactcaaactgtggttcacaaagcagcaacattggcatcacccaggtagaaaggctcattcttgagccctaccgaaggccttctgatttagcatttttgcagataggacccagaaatctgcatttcaacaagatcccaagcttgctgcatccaaggagcccacacatgcatggggtgtcttgttcagcttcttaggactctgcacttccccagaaggaagaattaaaaatgaatatgttcaaggaagcagtgaccttcaaggacgtggctgtggccttcacggaggaggaattggggctgctgggccctgcccagaggaagctgtaccgagatgtgatggtggagaactttaggaacctgctgtcagtggggcatccacccttcaaacaagatgtatcacctatagaaag

SEQ ID NO: 201819 - DNA, 656 bp, Homo sapiens
  Payload ID: 19815
  Gene Name: zinc finger protein 226
  ENST ID: ENST00000589160
  CDS Start-End: 183-452
gcacttccgcccaggaagacgacgtagcagccatcttttccctggctttggtgattcagaaactcccgttctgtggcgaaattctccctgacttctcaaaaagcactgcacagaggaggaggcagcagaaccccatttcagcttcttaggactctgcacttccccagaaggaagaattaaaaatgaatatgttcaaggaagcagtgaccttcaaggacgtggctgtggccttcacggaggaggaattggggctgctgggccctgcccagaggaagctgtaccgagatgtgatggtggagaactttaggaacctgctgtcagtggggcatccacccttcaaacaagatgtatcacctatagaaagaaatgagcagctttggataatgacgacagcaacccgaagacagggaaatttaggtaaaaaccaaacagttatgagttcttatagttaactgtccatctgctttgcttcttcttagccttgttgccatcacctggtccaaattgccaactgtctttcctggattattgcaacaccctttgtactgcttgccctgctcccacccctctcctcttacattctgttctttaagtggcaaagtgagtttttgttaccttgtgtcagactatgttgttcttctgctcaaaattctctg

SEQ ID NO: 201820 - DNA, 616 bp, Homo sapiens
  Payload ID: 19815
  Gene Name: zinc finger protein 226
  ENST ID: ENST00000590524
  CDS Start-End: 158-616
gccctgacttctcaaaaagcactgcacagaggaggaggcagcagaaccccatttgcaaataaataagatacctgactgtgttgtaagagctttctaccttccagcaatccgatgagcttcttaggactctgcacttccccagaaggaagaattaaaaatgaatatgttcaaggaagcagtgaccttcaaggacgtggctgtggccttcacggaggaggaattggggctgctgggccctgcccagaggaagctgtaccgagatgtgatggtggagaactttaggaacctgctgtcagtggggcatccacccttcaaacaagatgtatcacctatagaaagaaatgagcagctttggataatgacgacagcaacccgaagacagggaaatttaggagagaaaaatcaaagtaagttaattactgttcaagacagagaatcagaagaagagctttcttgttggcaaatctggcaacaaattgcaaatgacttaaccaggtgtcaagactccatgatcaataattctcagtgtcacaaacaaggtgatttcccttaccaggtagggacagaactgtctattcaaatttctgaagatgagaactatatagtaaataaagca

SEQ ID NO: 201821 - DNA, 560 bp, Homo sapiens
  Payload ID: 19815
  Gene Name: zinc finger protein 226
  ENST ID: ENST00000586203
  CDS Start-End: 479-560
agcagccatcttttccctggctttggtgattcagaaactcccgttctgtggcgaaattctgtgagtccatgaagctggattgtccctgacctcttttgaggaaggagagggttgcttctaactggtcctgggagatgccactgtgatgtatccgggatgaagacacaatcctggttacttcatagcctgtttttcttccccagccctgacttctcaaaaagcactgcacagaggaggaggcagcagaaccccatgggctgttttgggagagggactgagtacagtgcaacactactcaaactgtggttcacaaagcagcaacattggcatcacccaggtagaaaggctcattcttgagccctaccgaaggccttctgatttagcatttttgcagataggacccagaaatctgcatttcaacaagatcccaagttcagcttcttaggactctgcacttccccagaaggaagaattaaaaatgaatatgttcaaggaagcagtgaccttcaaggacgtggctgtggccttcacggaggaggaattggggctgctgggccctg

SEQ ID NO: 201822 - DNA, 548 bp, Homo sapiens
  Payload ID: 19815
  Gene Name: zinc finger protein 226
  ENST ID: ENST00000590578
  CDS Start-End: 168-548
gatactcgcaggcacttccgcccaggaagacgacgtagcagccatcttttccctggctttggtgattcagccctgacttctcaaaaagcactgcacagaggaggaggcagcagaaccccatttcagcttcttaggactctgcacttccccagaaggaagaattaaaaatgaatatgttcaaggaagcagtgaccttcaaggacgtggctgtggccttcacggaggaggaattggggctgctgggccctgcccagaggaagctgtaccgagatgtgatggtggagaactttaggaacctgctgtcagtggggcatccacccttcaaacaagatgtatcacctatagaaagaaatgagcagctttggataatgacgacagcaacccgaagacagggaaatttaggagagaaaaatcaaagtaagttaattactgttcaagacagagaatcagaagaagagctttcttgttggcaaatctggcaacaaattgcaaatgacttaaccaggtgtcaagactccatgatcaataattctcagtgtcacaaacaa

SEQ ID NO: 201823 - DNA, 3043 bp, Homo sapiens
  Payload ID: 19816
  Gene Name: zinc finger protein 227
  Uniprot ID: Q86WZ6
  ENST ID: ENST00000313040
  CDS Start-End: 206-2605
acttccgccccggaaagcgaggccgccaccatcttttgggtccgggaggattgagtcatcgggctccaatgcgtggggatgtttaccgccgtttatccgggatagagactccatcgtgctgacagcatccttttattcaccgcctccgaatttgcaaagaggaggaaggagggacttcttggcttctcccagcatagccccagttatgccatctcagaactatgaccttccccagaagaagcaggagaaaatgaccaagtttcaggaggctgtgacattcaaggatgtggctgtggtcttctccagggaggaactgcgactgctcgatcttacccagaggaagctgtaccgagatgtcatggtggagaacttcaagaacctggttgcagtggggcatcttcccttccaaccagatatggtatcccaattggaagcagaagaaaagctttggatgatggaaacagaaacccaaagaagcagcaagcatcaaaataagatggaaacactccaaaaatttgcattaaaatacctttcaaatcaagagctgtcctgctggcaaatctggaaacaggttgcaagtgaattaaccaggtgtcttcaggggaagagttcccagttattacaaggtgactctattcaggtttctgaaaatgagaacaatataatgaaccctaaaggagatagctctatttatattgaaaatcaagagtttccattttggagaacccagcattcttgcgggaatacatatctgagtgagtcacagattcagagtagaggtaagcaaattgatgtgaaaaataacctgcaaatacatgaagacttcatgaagaaatcaccatttcatgagcatattaaaactgacacagaaccaaaaccctgcaaaggtaatgaatatggcaaaatcattagtgatggctccaatcagaaattacccttaggagagaaaccccatccatgtggtgagtgtggaaggggcttcagttatagcccaaggcttccccttcatccgaatgttcatacaggagaaaaatgcttcagtcaaagctcacatctgcgaactcatcagagaattcacccaggagagaaactcaatagatgtcatgaatctggtgattgcttcaataagagctcttttcattcttatcaatctaatcatacaggagagaagtcttatagatgcgacagttgcggcaagggattcagtagcagcacgggtcttatcattcattacagaactcatactggagagaaaccctataaatgcgaggaatgtggtaaatgctttagtcaaagttcaaattttcagtgccatcagagagtccacactgaagaaaaaccatacaaatgcgaagagtgtggtaagggcttcggttggagtgttaatctccgtgttcaccagagggtccacaggggtgagaagccctataaatgtgaggaatgtggtaagggcttcactcaggctgcacattttcacatccatcagagagtccacactggagagaaaccctacaagtgtgatgtgtgtggtaagggcttcagccacaattcaccattaatatgccatcggagagtccacacaggagagaagccatacaagtgtgaggcgtgtgggaaaggctttacccgtaatacagatctgcatattcatttcagagttcacacgggagagaaaccctataaatgtaaggagtgtggtaagggcttcagtcaggcttcaaatcttcaagtccatcagaatgtccacactggggagaaacgattcaagtgtgaaacgtgtgggaagggcttcagtcagtcctcaaagcttcaaacccatcagcgagtccacactggagagaaaccatatagatgtgatgtgtgtggtaaggacttcagttatagttcaaatcttaaactacaccaagtaattcacactggagaaaaaccatataaatgtgaggaatgtgggaagggcttcagttggagatcaaatcttcatgcacatcaaagagttcactcaggagaaaaaccctataaatgtgagcagtgtgataagagcttcagtcaggccatagattttcgggtacatcagagagtccatactggagagaagccatacaaatgtggtgtctgtggtaagggcttcagtcagtcctctggtcttcaatcccatcagagagtccacacgggggaaaagccatacaaatgtgatgtgtgtggaaagggctttagatacagttcgcagtttatataccatcagagaggccacactggagaaaaaccttacaaatgtgaagagtgtgggaaaggctttggtaggagcttgaatcttcgccatcatcagagggtccacacgggagagaaaccccatatatgtgaggagtgtggtaaggccttcagtctcccctcaaatcttcgagtccacctgggtgttcacaccagggaaaaactctttaaatgtgaagagtgtggtaaaggcttcagtcagagtgcacgtcttgaagcccatcagagagtccacactggagaaaaaccatacaaatgtgacatatgtgataaggacttccgtcaccgttcacgtcttacatatcatcagaaagtccatactggtaaaaagctttagaaatgagaaatgtgttaccaacttttgtctgaatgcacatcttcaagtttttggctagtccatgctggtggtaaaccctgtaaaactactgagagtggaagggggtttgttcacacttggaatctttctaacaaatccatcaagatgataacacagaaccatgaacaggaatagaactcgtatttaggggagaaatagggctggtggctctcttggtaagatctagttaatataaatgatcacctttcattgtgaatatatgcctgaagataatgtgtggaaggatatttgccatatgctaactggttttttggccagggagagttttgggttattatcccttttctttaattttcattttatacttacagtgatcattattttcataaaagctgtaaagctatgaaaaatgaataaaattactaaaaattttctgta

SEQ ID NO: 201824 - DNA, 2993 bp, Homo sapiens
  Payload ID: 19816
  Gene Name: zinc finger protein 227
  Uniprot ID: Q86WZ6
  ENST ID: ENST00000391961
  CDS Start-End: 310-2556
aggcagagccacttccgccccggaaagcgaggccgccaccatcttttgggtccgggagaaggattgagtcatcgggctccaatgcgtggggatgtttaccgccgtttatccgggatagagactccatcgtgctgacagcatccttttattcaccgcctccgaatttgcaaagaggaggaaggagggacttcttggcttctcccagcatagccccaggaggctgtgacattcaaggatgtggctgtggtcttctccagggaggaactgcgactgctcgatcttacccagaggaagctgtaccgagatgtcatggtggagaacttcaagaacctggttgcagtggggcatcttcccttccaaccagatatggtatcccaattggaagcagaagaaaagctttggatgatggaaacagaaacccaaagaagcagcaagcatcaaaataagatggaaacactccaaaaatttgcattaaaatacctttcaaatcaagagctgtcctgctggcaaatctggaaacaggttgcaagtgaattaaccaggtgtcttcaggggaagagttcccagttattacaaggtgactctattcaggtttctgaaaatgagaacaatataatgaaccctaaaggagatagctctatttatattgaaaatcaagagtttccattttggagaacccagcattcttgcgggaatacatatctgagtgagtcacagattcagagtagaggtaagcaaattgatgtgaaaaataacctgcaaatacatgaagacttcatgaagaaatcaccatttcatgagcatattaaaactgacacagaaccaaaaccctgcaaaggtaatgaatatggcaaaatcattagtgatggctccaatcagaaattacccttaggagagaaaccccatccatgtggtgagtgtggaaggggcttcagttatagcccaaggcttccccttcatccgaatgttcatacaggagaaaaatgcttcagtcaaagctcacatctgcgaactcatcagagaattcacccaggagagaaactcaatagatgtcatgaatctggtgattgcttcaataagagctcttttcattcttatcaatctaatcatacaggagagaagtcttatagatgcgacagttgcggcaagggattcagtagcagcacgggtcttatcattcattacagaactcatactggagagaaaccctataaatgcgaggaatgtggtaaatgctttagtcaaagttcaaattttcagtgccatcagagagtccacactgaagaaaaaccatacaaatgcgaagagtgtggtaagggcttcggttggagtgttaatctccgtgttcaccagagggtccacaggggtgagaagccctataaatgtgaggaatgtggtaagggcttcactcaggctgcacattttcacatccatcagagagtccacactggagagaaaccctacaagtgtgatgtgtgtggtaagggcttcagccacaattcaccattaatatgccatcggagagtccacacaggagagaagccatacaagtgtgaggcgtgtgggaaaggctttacccgtaatacagatctgcatattcatttcagagttcacacgggagagaaaccctataaatgtaaggagtgtggtaagggcttcagtcaggcttcaaatcttcaagtccatcagaatgtccacactggggagaaacgattcaagtgtgaaacgtgtgggaagggcttcagtcagtcctcaaagcttcaaacccatcagcgagtccacactggagagaaaccatatagatgtgatgtgtgtggtaaggacttcagttatagttcaaatcttaaactacaccaagtaattcacactggagaaaaaccatataaatgtgaggaatgtgggaagggcttcagttggagatcaaatcttcatgcacatcaaagagttcactcaggagaaaaaccctataaatgtgagcagtgtgataagagcttcagtcaggccatagattttcgggtacatcagagagtccatactggagagaagccatacaaatgtggtgtctgtggtaagggcttcagtcagtcctctggtcttcaatcccatcagagagtccacacgggggaaaagccatacaaatgtgatgtgtgtggaaagggctttagatacagttcgcagtttatataccatcagagaggccacactggagaaaaaccttacaaatgtgaagagtgtgggaaaggctttggtaggagcttgaatcttcgccatcatcagagggtccacacgggagagaaaccccatatatgtgaggagtgtggtaaggccttcagtctcccctcaaatcttcgagtccacctgggtgttcacaccagggaaaaactctttaaatgtgaagagtgtggtaaaggcttcagtcagagtgcacgtcttgaagcccatcagagagtccacactggagaaaaaccatacaaatgtgacatatgtgataaggacttccgtcaccgttcacgtcttacatatcatcagaaagtccatactggtaaaaagctttagaaatgagaaatgtgttaccaacttttgtctgaatgcacatcttcaagtttttggctagtccatgctggtggtaaaccctgtaaaactactgagagtggaagggggtttgttcacacttggaatctttctaacaaatccatcaagatgataacacagaaccatgaacaggaatagaactcgtatttaggggagaaatagggctggtggctctcttggtaagatctagttaatataaatgatcacctttcattgtgaatatatgcctgaagataatgtgtggaaggatatttgccatatgctaactggttttttggccagggagagttttgggttattatcccttttctttaattttcattttatacttacagtgatcattattttcataaaagctgtaaagctatgaaaaatgaataaaattactaaaaattttctgt

SEQ ID NO: 201825 - DNA, 545 bp, Homo sapiens
  Payload ID: 19816
  Gene Name: zinc finger protein 227
  ENST ID: ENST00000586048
  CDS Start-End: 299-545
cttttcagcctgtgcttgggaataggcgctccccagccatcagtcttgggatggagaggtcgcggccgcggcggaggccgagaggccgagggcgggaagtttgctctcctcccgcacttggcaagcagcgccgctagttctgattgagtcatcgggctccaatgcgtggggatgtttaccgccgtttatccgggatagagactccatcgtgctgacagcatccttttattcaccgcctccgaatttgcaaagaggaggaaggagggacttcttggcttctcccagcatagccccagttatgccatctcagaactatgaccttccccagaagaagcaggagaaaatgaccaagtttcaggaggctgtgacattcaaggatgtggctgtggtcttctccagggaggaactgcgactgctcgatcttacccagaggaagctgtaccgagatgtcatggtggagaacttcaagaacctggttgcagtggggcatcttcccttccaaccagatatggtatcccaattggaagcagaagaaaagctttgga

SEQ ID NO: 201826 - DNA, 584 bp, Homo sapiens
  Payload ID: 19816
  Gene Name: zinc finger protein 227
  ENST ID: ENST00000588219
  CDS Start-End: 297-584
acttccgccccggaaagcgaggccgccaccatcttttgggtccgggaggattgagtcatcgggctccaatgcgtggggatgtttaccgccgtttatccgggatagagactccatcgtgctgacagcatccttttattcaccgcctccgaatttgcaaagaggaggaaggagggacttcttggcttctcccagcatagccccaggaggctgtgacattcaaggatgtggctgtggtcttctccagggaggaactgcgactgctcgatcttacccagaggaagctgtaccgagatgtcatggtggagaacttcaagaacctggttgcagtgggcagcaagcatcaaaataagatggaaacactccaaaaatttgcattaaaatacctttcaaatcaagagctgtcctgctggcaaatctggaaacaggttgcaagtgaattaaccaggtgtcttcaggggaagagttcccagttattacaaggtgactctattcaggtttctgaaaatgagaacaatataatgaaccctaaaggagatagctctatttatattgaaaatcaagagtttccattttggagaacccag

SEQ ID NO: 201827 - DNA, 504 bp, Homo sapiens
  Payload ID: 19816
  Gene Name: zinc finger protein 227
  ENST ID: ENST00000589707
  CDS Start-End: 270-383
accatcttttgggtccgggaggattgagtcatcgggctccaatgcgtggggatgtttaccgccgtttatccgggatagagactccatcgtgctgacagcatccttttattcaccgcctccgaatttgcaaagaggaggaaggagggacttcttggcttctcccagcatagccccaggaggctgtgacattcaaggatgtggctgtggtcttctccagggaggaactgcgactgctcgatcttacccagaggaagctgtaccgagatgtcatggtggagaacttcaagaacctggttgcagtgggtgaggacaggcactctctgaccctgaacttcagttcccttgagaatctctttgctctcaggcagcaagcatcaaaataagatggaaacactccaaaaatttgcattaaaatacctttcaaatcaagagctgtcctgctggcaaatctggaaacaggttgcaagtgaattaaccaggtgtcttcaggggaagagttcccag

SEQ ID NO: 201828 - DNA, 838 bp, Homo sapiens
  Payload ID: 19816
  Gene Name: zinc finger protein 227
  ENST ID: ENST00000588394
  CDS Start-End: 194-838
ttttgggtccgggagatcttttttttttttaagaaggattgagtcatcgggctccaatgcgtggggatgtttaccgccgtttatccgggatagagactccatcgtgctgacagcatccttttattcaccgcctccgaatttgcaaagaggaggaaggagggacttcttggcttctcccagcatagccccagttatgccatctcagaactatgaccttccccagaagaagcaggagaaaatgaccaagtttcaggaggctgtgacattcaaggatgtggctgtggtcttctccagggaggaactgcgactgctcgatcttacccagaggaagctgtaccgagatgtcatggtggagaacttcaagaacctggttgcagtgggcagcaagcatcaaaataagatggaaacactccaaaaatttgcattaaaatacctttcaaatcaagagctgtcctgctggcaaatctggaaacaggttgcaagtgaattaaccaggtgtcttcaggggaagagttcccagttattacaaggtgactctattcaggtttctgaaaatgagaacaatataatgaaccctaaaggagatagctctatttatattgaaaatcaagagtttccattttggagaacccagcattcttgcgggaatacatatctgagtgagtcacagattcagagtagaggtaagcaaattgatgtgaaaaataacctgcaaatacatgaagacttcatgaagaaatcaccatttcatgagcatattaaaactgacacagaaccaaaaccctgcaaaggtaatgaatatggcaaaatcattagtgatggctccaatcagaaatta

SEQ ID NO: 201829 - DNA, 569 bp, Homo sapiens
  Payload ID: 19816
  Gene Name: zinc finger protein 227
  ENST ID: ENST00000586228
  CDS Start-End: 206-454
acttccgccccggaaagcgaggccgccaccatcttttgggtccgggaggattgagtcatcgggctccaatgcgtggggatgtttaccgccgtttatccgggatagagactccatcgtgctgacagcatccttttattcaccgcctccgaatttgcaaagaggaggaaggagggacttcttggcttctcccagcatagccccagttatgccatctcagaactatgaccttccccagaagaagcaggagaaaatgaccaagtttcagggaggaactgcgactgctcgatcttacccagaggaagctgtaccgagatgtcatggtggagaacttcaagaacctggttgcagtggggcatcttcccttccaaccagatatggtatcccaattggaagcagaagaaaagctttggatgatggaaacagaaacccaaagaagcagcaagcatcaaaataagatggaaacactccaaaaatttgcattaaaatacctttcaaatcaagagctgtcctgctggcaaatctggaaacaggttgcaagtgaattaaccaggtgtcttcaggggaagagt

SEQ ID NO: 201830 - DNA, 2943 bp, Homo sapiens
  Payload ID: 19816
  Gene Name: zinc finger protein 227
  Uniprot ID: Q86WZ6
  ENST ID: ENST00000589005
  CDS Start-End: 260-2506
gggtccgggaggattgagtcatcgggctccaatgcgtggggatgtttaccgccgtttatccgggatagagactccatcgtgctgacagcatccttttattcaccgcctccgaatttgcaaagaggaggaaggagggacttcttggcttctcccagcatagccccaggaggctgtgacattcaaggatgtggctgtggtcttctccagggaggaactgcgactgctcgatcttacccagaggaagctgtaccgagatgtcatggtggagaacttcaagaacctggttgcagtggggcatcttcccttccaaccagatatggtatcccaattggaagcagaagaaaagctttggatgatggaaacagaaacccaaagaagcagcaagcatcaaaataagatggaaacactccaaaaatttgcattaaaatacctttcaaatcaagagctgtcctgctggcaaatctggaaacaggttgcaagtgaattaaccaggtgtcttcaggggaagagttcccagttattacaaggtgactctattcaggtttctgaaaatgagaacaatataatgaaccctaaaggagatagctctatttatattgaaaatcaagagtttccattttggagaacccagcattcttgcgggaatacatatctgagtgagtcacagattcagagtagaggtaagcaaattgatgtgaaaaataacctgcaaatacatgaagacttcatgaagaaatcaccatttcatgagcatattaaaactgacacagaaccaaaaccctgcaaaggtaatgaatatggcaaaatcattagtgatggctccaatcagaaattacccttaggagagaaaccccatccatgtggtgagtgtggaaggggcttcagttatagcccaaggcttccccttcatccgaatgttcatacaggagaaaaatgcttcagtcaaagctcacatctgcgaactcatcagagaattcacccaggagagaaactcaatagatgtcatgaatctggtgattgcttcaataagagctcttttcattcttatcaatctaatcatacaggagagaagtcttatagatgcgacagttgcggcaagggattcagtagcagcacgggtcttatcattcattacagaactcatactggagagaaaccctataaatgcgaggaatgtggtaaatgctttagtcaaagttcaaattttcagtgccatcagagagtccacactgaagaaaaaccatacaaatgcgaagagtgtggtaagggcttcggttggagtgttaatctccgtgttcaccagagggtccacaggggtgagaagccctataaatgtgaggaatgtggtaagggcttcactcaggctgcacattttcacatccatcagagagtccacactggagagaaaccctacaagtgtgatgtgtgtggtaagggcttcagccacaattcaccattaatatgccatcggagagtccacacaggagagaagccatacaagtgtgaggcgtgtgggaaaggctttacccgtaatacagatctgcatattcatttcagagttcacacgggagagaaaccctataaatgtaaggagtgtggtaagggcttcagtcaggcttcaaatcttcaagtccatcagaatgtccacactggggagaaacgattcaagtgtgaaacgtgtgggaagggcttcagtcagtcctcaaagcttcaaacccatcagcgagtccacactggagagaaaccatatagatgtgatgtgtgtggtaaggacttcagttatagttcaaatcttaaactacaccaagtaattcacactggagaaaaaccatataaatgtgaggaatgtgggaagggcttcagttggagatcaaatcttcatgcacatcaaagagttcactcaggagaaaaaccctataaatgtgagcagtgtgataagagcttcagtcaggccatagattttcgggtacatcagagagtccatactggagagaagccatacaaatgtggtgtctgtggtaagggcttcagtcagtcctctggtcttcaatcccatcagagagtccacacgggggaaaagccatacaaatgtgatgtgtgtggaaagggctttagatacagttcgcagtttatataccatcagagaggccacactggagaaaaaccttacaaatgtgaagagtgtgggaaaggctttggtaggagcttgaatcttcgccatcatcagagggtccacacgggagagaaaccccatatatgtgaggagtgtggtaaggccttcagtctcccctcaaatcttcgagtccacctgggtgttcacaccagggaaaaactctttaaatgtgaagagtgtggtaaaggcttcagtcagagtgcacgtcttgaagcccatcagagagtccacactggagaaaaaccatacaaatgtgacatatgtgataaggacttccgtcaccgttcacgtcttacatatcatcagaaagtccatactggtaaaaagctttagaaatgagaaatgtgttaccaacttttgtctgaatgcacatcttcaagtttttggctagtccatgctggtggtaaaccctgtaaaactactgagagtggaagggggtttgttcacacttggaatctttctaacaaatccatcaagatgataacacagaaccatgaacaggaatagaactcgtatttaggggagaaatagggctggtggctctcttggtaagatctagttaatataaatgatcacctttcattgtgaatatatgcctgaagataatgtgtggaaggatatttgccatatgctaactggttttttggccagggagagttttgggttattatcccttttctttaattttcattttatacttacagtgatcattattttcataaaagctgtaaagctatgaaaaatgaataaaattactaaaaattttctgt

SEQ ID NO: 201831 - DNA, 3055 bp, Homo sapiens
  Payload ID: 19816
  Gene Name: zinc finger protein 227
  Uniprot ID: Q86WZ6
  ENST ID: ENST00000621083
  CDS Start-End: 219-2618
aggcagagccacttccgccccggaaagcgaggccgccaccatcttttgggtccgggagaaggattgagtcatcgggctccaatgcgtggggatgtttaccgccgtttatccgggatagagactccatcgtgctgacagcatccttttattcaccgcctccgaatttgcaaagaggaggaaggagggacttcttggcttctcccagcatagccccagttatgccatctcagaactatgaccttccccagaagaagcaggagaaaatgaccaagtttcaggaggctgtgacattcaaggatgtggctgtggtcttctccagggaggaactgcgactgctcgatcttacccagaggaagctgtaccgagatgtcatggtggagaacttcaagaacctggttgcagtggggcatcttcccttccaaccagatatggtatcccaattggaagcagaagaaaagctttggatgatggaaacagaaacccaaagaagcagcaagcatcaaaataagatggaaacactccaaaaatttgcattaaaatacctttcaaatcaagagctgtcctgctggcaaatctggaaacaggttgcaagtgaattaaccaggtgtcttcaggggaagagttcccagttattacaaggtgactctattcaggtttctgaaaatgagaacaatataatgaaccctaaaggagatagctctatttatattgaaaatcaagagtttccattttggagaacccagcattcttgcgggaatacatatctgagtgagtcacagattcagagtagaggtaagcaaattgatgtgaaaaataacctgcaaatacatgaagacttcatgaagaaatcaccatttcatgagcatattaaaactgacacagaaccaaaaccctgcaaaggtaatgaatatggcaaaatcattagtgatggctccaatcagaaattacccttaggagagaaaccccatccatgtggtgagtgtggaaggggcttcagttatagcccaaggcttccccttcatccgaatgttcatacaggagaaaaatgcttcagtcaaagctcacatctgcgaactcatcagagaattcacccaggagagaaactcaatagatgtcatgaatctggtgattgcttcaataagagctcttttcattcttatcaatctaatcatacaggagagaagtcttatagatgcgacagttgcggcaagggattcagtagcagcacgggtcttatcattcattacagaactcatactggagagaaaccctataaatgcgaggaatgtggtaaatgctttagtcaaagttcaaattttcagtgccatcagagagtccacactgaagaaaaaccatacaaatgcgaagagtgtggtaagggcttcggttggagtgttaatctccgtgttcaccagagggtccacaggggtgagaagccctataaatgtgaggaatgtggtaagggcttcactcaggctgcacattttcacatccatcagagagtccacactggagagaaaccctacaagtgtgatgtgtgtggtaagggcttcagccacaattcaccattaatatgccatcggagagtccacacaggagagaagccatacaagtgtgaggcgtgtgggaaaggctttacccgtaatacagatctgcatattcatttcagagttcacacgggagagaaaccctataaatgtaaggagtgtggtaagggcttcagtcaggcttcaaatcttcaagtccatcagaatgtccacactggggagaaacgattcaagtgtgaaacgtgtgggaagggcttcagtcagtcctcaaagcttcaaacccatcagcgagtccacactggagagaaaccatatagatgtgatgtgtgtggtaaggacttcagttatagttcaaatcttaaactacaccaagtaattcacactggagaaaaaccatataaatgtgaggaatgtgggaagggcttcagttggagatcaaatcttcatgcacatcaaagagttcactcaggagaaaaaccctataaatgtgagcagtgtgataagagcttcagtcaggccatagattttcgggtacatcagagagtccatactggagagaagccatacaaatgtggtgtctgtggtaagggcttcagtcagtcctctggtcttcaatcccatcagagagtccacacgggggaaaagccatacaaatgtgatgtgtgtggaaagggctttagatacagttcgcagtttatataccatcagagaggccacactggagaaaaaccttacaaatgtgaagagtgtgggaaaggctttggtaggagcttgaatcttcgccatcatcagagggtccacacgggagagaaaccccatatatgtgaggagtgtggtaaggccttcagtctcccctcaaatcttcgagtccacctgggtgttcacaccagggaaaaactctttaaatgtgaagagtgtggtaaaggcttcagtcagagtgcacgtcttgaagcccatcagagagtccacactggagaaaaaccatacaaatgtgacatatgtgataaggacttccgtcaccgttcacgtcttacatatcatcagaaagtccatactggtaaaaagctttagaaatgagaaatgtgttaccaacttttgtctgaatgcacatcttcaagtttttggctagtccatgctggtggtaaaccctgtaaaactactgagagtggaagggggtttgttcacacttggaatctttctaacaaatccatcaagatgataacacagaaccatgaacaggaatagaactcgtatttaggggagaaatagggctggtggctctcttggtaagatctagttaatataaatgatcacctttcattgtgaatatatgcctgaagataatgtgtggaaggatatttgccatatgctaactggttttttggccagggagagttttgggttattatcccttttctttaattttcattttatacttacagtgatcattattttcataaaagctgtaaagctatgaaaaatgaataaaattactaaaaattttctgt

SEQ ID NO: 201832 - DNA, 525 bp, Homo sapiens
  Payload ID: 19817
  Gene Name: zinc finger protein 229
  ENST ID: ENST00000592308
  CDS Start-End: 489-525
ttcttaggcagtggtgaggcgtcttagagacgtgcatctccatgcggttgtactgtcaggccatgggaattaggatcggctctataggaccagtgtgaagggacaacgtgcggcggagggtcgaagcccacggatttccatgagctcggcctggcttccttcttggaattgttcgtttctcggagataattgtataaaagaaggagaaataaccccacatctcttgacactagagctccaggtcccctgaccatgggaagcagtcgcgctctggacagtaaaggtggagacaggaacttgtcagagcttggagagtttccggaatgaaaaaggcctggatcttctgcgtctccagcttaggaaaaccagagaataaatacagttgctgctgctcgcagagaacctagcagaagagaccatggagactttgacctcaagctcttcattctcaagcctcagccatttcccaagatagggaggagaagatcatgtctcaggagccattgagcttcaaggacgtggctg

SEQ ID NO: 201833 - DNA, 4835 bp, Homo sapiens
  Payload ID: 19817
  Gene Name: zinc finger protein 229
  ENST ID: ENST00000613197
  CDS Start-End: 324-2783
gcatttacgacaccatcgcccctaggatcggactgcgctgcggagggttctgggaaaggcttccttcttggaattgttcgtttctcggagataattgtataaaagaaggagaaataaccccacatctcttgacactagagctccaggtcccctgaccatgggaagcagtcgcgctctggacagtaaaggtggagacaggaacttgtcagagcttggagagtttccggaatgaaaaaggcctggatcttctgcgtctccagcttaggaaaaccagagaataaatacagttgctgctgctcgcagagaacctagcagaagagaccatggagactttgacctcaaggcatgagaaaagagctcttcattctcaagcctcagccatttcccaagatagggaggagaagatcatgtctcaggagccattgagcttcaaggacgtggctgtggtcttcactgaggaggagctagagctgctggactctacccagaggcagctgtaccaagatgtgatgcaggagaatttcaggaacctactctcagtgggagacaagaatggaaaggatacggagtatattcaagatgaagaattaaggttcttttcacacaaagagctctcctcatgcaaaatctgggaagaggtggcaggtgaattacctgggagccaagactgtagagtaaatctgcaaggaaaagacttccagttctcagaagatgctgctccccatcaagggtgggaaggagcatctacgccgtgttttccaattgagaatttcctggacagtctacaaggggatgggcttatcggtctagaaaatcaacagtttccagcctggagagctataagaccaatccccattcaaggatcttgggcaaaagcgtttgtgaaccagttaggggatgttcaagaaagatgtaaaaatctcgacacagaagacacagtatataaatgtaactgggatgatgacagcttttgctggatatcttgtcatgttgatcacagattccctgaaatagacaagccgtgtggttgcaataaatgcagaaaagactgcattaaaaactctgtacttcatcgcattaaccctggagagaatggcttgaaaagtaacgaatacagaaatggcttcagggacgatgcagaccttcccccgcatccaagagtacctttgaaagagaaactctgtcaatatgatgagtttagtgagggcttgaggcacagtgcccatcttaacagacatcaaagagttcccacaggagagaaatctgttaagagtcttgagcgtggtcggggcgtcagacagaacacgcacatacgtaaccaccccagagcccctgtgggagacatgccctatagatgtgatgtctgtggaaaggggttcaggtataaatcggttcttcttattcatcaaggggtgcacacaggaaggagaccctataaatgtgaggagtgtgggaaggcatttggtcgaagttcaaacctgcttgtccatcagagggtccacactggagagaaaccatataaatgcagcgagtgtgggaagggcttcagttacagctcagtgcttcaagtccatcagaggctgcacacaggggagaagccctacacctgcagcgagtgtggcaaaggcttctgtgccaagtctgcactgcacaaacaccagcacattcaccctggagaaaagccctacagctgtggcgagtgtggaaagggattcagctgcagctcccacctcagcagtcatcagaagacacacaccggcgagaggccctaccagtgtgacaagtgtggcaaaggtttcagtcacaactcgtaccttcaagctcaccagagagttcacatggggcagcatctgtacaaatgtaacgtgtgtggtaagagtttcagttacagctcagggcttctcatgcatcagagactgcacacaggagagaaaccctacaaatgcgagtgcgggaagagctttggccggagctccgacctccacatccatcagagggtccacacaggagagaaaccctataaatgcagtgagtgtgggaagggcttccggcggaattcagaccttcacagccaccagagggtccacacgggagagaggccctacgtgtgtgacgtgtgtgggaagggtttcatctacagctccgacctccttatccatcagagggtccacactggagagaaaccctataaatgtgctgagtgtggcaaaggcttcagttacagctcagggcttctcattcaccagagagtccacacaggcgagaaaccttacagatgccaagagtgcggaaagggctttaggtgcacatcaagccttcacaaacatcagcgagtccacacgggaaaaaagccctatacgtgtgatcagtgtggcaagggattcagttatggctctaatcttcgcacccaccagaggttgcacacaggagagaaaccctacacttgttgtgaatgtgggaagggtttcagatatggctcaggtctccttagtcataagagagtgcacactggcgagaagccatacagatgccacgtgtgtgggaagggctatagtcagagctcacatcttcaaggtcatcagagggtccacactggtgagaaaccctataaatgtgaggagtgtgggaagggctttggccgcaactcctgtcttcatgttcatcagagagtccacactggagagaagccctatacgtgtggtgtgtgtgggaaaggcttcagttatacctcaggtctgcggaaccaccaaagagtgcatttaggcgagaacccttataagtagatgtacatagaggattccatctgggactcagagctttctatccatctgagagccaacacaggagaaaaaccataggaaagtgacatgtaggagggctataggagaaactgatgattttacattttctagtctgcataggaagggaacacctggatgtgtgataaataggttagcacttcagttacaaacttcagtctttaagagtctgttgtgcagcggagtaggctttaaagaaacagtgcagcagtggtttcagtaataatcctcacttccatcagaatctgcctgggagggagcttttacaatgtacaagtggtgagaatgtttccaaggtgctaattatggacatagattctttgtgtgggttgatagctaccaatgggacagtgtagaaacaagtttccacctttctaaaaccagtttggtacatatctttttaaagatcgctttataaaaacaaaaagataacattaacatttattgaaacaagtcactctgagaagaccaggaacaaagttctcttggcagatctgggtgatgtgtgtgtctcacatttttatcatgtttttatgactgttttatcttgcaggtaagctttacagctttcagaggagttgtagtacactacagaaatatgtcttctttccaggttcaaaaagcaaaatctgattggcattgcattgaattattaattaaataaatttattaattggcattgcattgaatttataggttaattttgaaagaatgtggcgtctttgaaatgctgattttttttcactttaaaaaaatgactttttttttaccactgatagtatttcatatggtccctcagtaatatttcttagagatggttaaaaataggttctgagtcatcttaagcatatttctaggaatttgttttattgctgtcatgaatataatggttttgctccagttcatttcatagtttaacatatcaaatattaggtatcttaaaaatcacaaatgctatttcaccctgcaggttagcagtattaaaatagaatcatcaaatcccccatcagtgggggcgggggggggggttgtagaaacagtctgatatggtttggctcttgtccccacccaaatctcatctcaattttaatccccacgtgtcagaggagggccttggtgggagatgattggatcacgagggcagatttctcccttgctgttctcatgatagtgagttctcatgagagctgatggttttaaggtgtagcccttcctcgctgtctctctcctgtccccttgtgaagaaggtccttatttctcttttgcgttctgccatgactaagttttcggaggcctccccagccatgtggaactgtgtgtgagttaaacctctttcctttgcaaattacctagtctcaggtagttctttatagcagtgcaaaaatggacgtaataagtcttatgtacttattggtgagagagaaaatccgtgcattgttttcaaaagaattcattaacgtatcaattcaatttctataacctttgaagtggcagtaaatatgtagtaattgatacttgggagatagttgcccacttgggcaaaaacgcatgcagaaggtggagtttttaaatttaaaacatttttaaaatagcaaatgttaatattccagtttccattggtaggaaattttttagataagttcaggcatatgtatgcaatggaaagccactagaaatcttcaggcacacagataatgacaatgcaggttgctcatgaagtatttagtgaaccaggagagttttagaacaacaattatagcatgaccccattttgttagtatgtttttctgtgtgtatgtttagagcaacagagaaaaaaagatgtgggagaggacatataactacttatctctagtggtgggattctgaatgtataatacatatgttgtacttttatgtattttactttgtaacaaagtatctttcagttttataataacagtagagctattttttataaattagcctgatggaacaatcccttatgattaaagattcatgttgtaacctctataa

SEQ ID NO: 201834 - DNA, 4507 bp, Homo sapiens
  Payload ID: 19817
  Gene Name: zinc finger protein 229
  Uniprot ID: Q9UJW7
  ENST ID: ENST00000614049
  CDS Start-End: 435-2912
gcgtcaccttgattgcttcttaggcagtggtgaggcgtcttagagacgtgcatctccatgcggttgtactgtcaggccatgggaattaggatcggctctataggaccagtgtgaagggacaacgtgcggcggagggtcgaagcccacggatttccatgagctcggcctggcttccttcttggaattgttcgtttctcggagataattgtataaaagaaggagaaataaccccacatctcttgacactagagctccaggtcccctgaccatgggaagcagtcgcgctctggacagtaaaggtggagacaggaacttgtcagagcttggagagtttccggaatgaaaaaggcctggatcttctgcgtctccagcttaggaaaaccagagaataaatacagttgctgctgctcgcagagaacctagcagaagagaccatggagactttgacctcaaggcatgagaaaagagctcttcattctcaagcctcagccatttcccaagatagggaggagaagatcatgtctcaggagccattgagcttcaaggacgtggctgtggtcttcactgaggaggagctagagctgctggactctacccagaggcagctgtaccaagatgtgatgcaggagaatttcaggaacctactctcagtgggtgagaggaatcctctgggagacaagaatggaaaggatacggagtatattcaagatgaagaattaaggttcttttcacacaaagagctctcctcatgcaaaatctgggaagaggtggcaggtgaattacctgggagccaagactgtagagtaaatctgcaaggaaaagacttccagttctcagaagatgctgctccccatcaagggtgggaaggagcatctacgccgtgttttccaattgagaatttcctggacagtctacaaggggatgggcttatcggtctagaaaatcaacagtttccagcctggagagctataagaccaatccccattcaaggatcttgggcaaaagcgtttgtgaaccagttaggggatgttcaagaaagatgtaaaaatctcgacacagaagacacagtatataaatgtaactgggatgatgacagcttttgctggatatcttgtcatgttgatcacagattccctgaaatagacaagccgtgtggttgcaataaatgcagaaaagactgcattaaaaactctgtacttcatcgcattaaccctggagagaatggcttgaaaagtaacgaatacagaaatggcttcagggacgatgcagaccttcccccgcatccaagagtacctttgaaagagaaactctgtcaatatgatgagtttagtgagggcttgaggcacagtgcccatcttaacagacatcaaagagttcccacaggagagaaatctgttaagagtcttgagcgtggtcggggcgtcagacagaacacgcacatacgtaaccaccccagagcccctgtgggagacatgccctatagatgtgatgtctgtggaaaggggttcaggtataaatcggttcttcttattcatcaaggggtgcacacaggaaggagaccctataaatgtgaggagtgtgggaaggcatttggtcgaagttcaaacctgcttgtccatcagagggtccacactggagagaaaccatataaatgcagcgagtgtgggaagggcttcagttacagctcagtgcttcaagtccatcagaggctgcacacaggggagaagccctacacctgcagcgagtgtggcaaaggcttctgtgccaagtctgcactgcacaaacaccagcacattcaccctggagaaaagccctacagctgtggcgagtgtggaaagggattcagctgcagctcccacctcagcagtcatcagaagacacacaccggcgagaggccctaccagtgtgacaagtgtggcaaaggtttcagtcacaactcgtaccttcaagctcaccagagagttcacatggggcagcatctgtacaaatgtaacgtgtgtggtaagagtttcagttacagctcagggcttctcatgcatcagagactgcacacaggagagaaaccctacaaatgcgagtgcgggaagagctttggccggagctccgacctccacatccatcagagggtccacacaggagagaaaccctataaatgcagtgagtgtgggaagggcttccggcggaattcagaccttcacagccaccagagggtccacacgggagagaggccctacgtgtgtgacgtgtgtgggaagggtttcatctacagctccgacctccttatccatcagagggtccacactggagagaaaccctataaatgtgctgagtgtggcaaaggcttcagttacagctcagggcttctcattcaccagagagtccacacaggcgagaaaccttacagatgccaagagtgcggaaagggctttaggtgcacatcaagccttcacaaacatcagcgagtccacacgggaaaaaagccctatacgtgtgatcagtgtggcaagggattcagttatggctctaatcttcgcacccaccagaggttgcacacaggagagaaaccctacacttgttgtgaatgtgggaagggtttcagatatggctcaggtctccttagtcataagagagtgcacactggcgagaagccatacagatgccacgtgtgtgggaagggctatagtcagagctcacatcttcaaggtcatcagagggtccacactggtgagaaaccctataaatgtgaggagtgtgggaagggctttggccgcaactcctgtcttcatgttcatcagagagtccacactggagagaagccctatacgtgtggtgtgtgtgggaaaggcttcagttatacctcaggtctgcggaaccaccaaagagtgcatttaggcgagaacccttataagtagatgtacatagaggattccatctgggactcagagctttctatccatctgagagccaacacaggagaaaaaccataggaaagtgacatgtaggagggctataggagaaactgatgattttacattttctagtctgcataggaagggaacacctggatgtgtgataaataggttagcacttcagttacaaacttcagtctttaagagtctgttgtgcagcggagtaggctttaaagaaacagtgcagcagtggtttcagtaataatcctcacttccatcagaatctgcctgggagggagcttttacaatgtacaagtggtgagaatgtttccaaggtgctaattatggacatagattctttgtgtgggttgatagctaccaatgggacagtgtagaaacaagtttccacctttctaaaaccagtttggtacatatctttttaaagatcgctttataaaaacaaaaagataacattaacatttattgaaacaagtcactctgagaagaccaggaacaaagttctcttggcagatctgggtgatgtgtgtgtctcacatttttatcatgtttttatgactgttttatcttgcaggtaagctttacagctttcagaggagttgtagtacactacagaaatatgtcttctttccaggttcaaaaagcaaaatctgattggcattgcattgaattattaattaaataaatttattaattggcattgcattgaatttataggttaattttgaaagaatgtggcgtctttgaaatgctgattttttttcactttaaaaaaatgactttttttttaccactgatagtatttcatatggtccctcagtaatatttcttagagatggttaaaaataggttctgagtcatcttaagcatatttctaggaatttgttttattgctgtcatgaatataatggttttgctccagttcatttcatagtttaacatatcaaatattaggtatcttaaaaatcacaaatgctatttcaccctgcaggttagcagtattaaaatagaatcatcaaatcccccatcagtgggggcgggggggggggttgtagaaacagtctgatatggtttggctcttgtccccacccaaatctcatctcaattttaatccccacgtgtcagaggagggccttggtgggagatgattggatcacgagggcagatttctcccttgctgttctcatgatagtgagttctcatgagagctgatggttttaaggtgtagcccttcctcgctgtctctctcctgtccccttgtgaagaaggtccttatttctcttttgcgttctgccatgactaagttttcggaggcctccccagccatgtggaactgtgtgtgagttaaacctctttcctttgcaaattacctagtctcaggtagttctttatagcagtgcaaaaatggacgtaataagtcttatgtacttattggtgagagagaaaatccgtgcattgttttcaaaagaattcattaacgtatcaattcaatttctataacctttgaagtggcagtaaatatgtagtaattgatacttgggagatagttgcccacttgggcaaaaacgcatgcagaaggt

SEQ ID NO: 201835 - DNA, 5384 bp, Homo sapiens
  Payload ID: 19817
  Gene Name: zinc finger protein 229
  ENST ID: ENST00000620012
  CDS Start-End: 404-655
gaggcgtcttagagacgtgcatctccatgcggttgtactgtcaggccatgggaattaggatcggctctataggaccagtgtgaagggacaacgtgcggcggagggtcgaagcccacggatttccatgagctcggcctggcttccttcttggaattgttcgtttctcggagataattgtataaaagaaggagaaataaccccacatctcttgacactagagctccaggtcccctgaccatgggaagcagtcgcgctctggacagtaaaggtggagacaggaacttgtcagagcttggagagtttccggaatgaaaaaggcctggatcttctgcgtctccagcttaggaaaaccagagaataaatacagttgctgctgctcgcagagaacctagcagaagagaccatggagactttgacctcaaggcatgagaaaagagctcttcattctcaagcctcagccatttcccaagatagggaggagaagatcatgtctcaggagccattgagcttcaaggacgtggctgtggtcttcactgaggaggagctagagctgctggactctacccagaggcagctgtaccaagatgtgatgcaggagaatttcaggaacctactctcagtgggtgagaggaatcctctgggtaattggaactgaacttcttggagtgttcttgttcctggagagaagatatttttggcttttttacacaggttaaatcctatttttatagaactcttagtttcagctgctgtaaaaaattgccagactgagtggcatataaacaacagaagtttatttctggaaggcacagtctgagatcagggtgccagcatagttgggttctggtgaggaccctctgtcagggtgcagatagctgacttccttttgtgtcctcacgtagcagagaagagctctctgggcatctgttttctaaggacactaatttctttcctgggggttccacctccatgacttaattacctccggaagacccaccacctcctaatggtatcacgttgggatttaggatttcaacataggaatttttgaagactggggtaacagatggagaaactccaagaaatgcatctccaggagacaagaatggaaaggatacggagtatattcaagatgaagaattaaggttcttttcacacaaagagctctcctcatgcaaaatctgggaagaggtggcaggtgaattacctgggagccaagactgtagagtaaatctgcaaggaaaagacttccagttctcagaagatgctgctccccatcaagggtgggaaggagcatctacgccgtgttttccaattgagaatttcctggacagtctacaaggggatgggcttatcggtctagaaaatcaacagtttccagcctggagagctataagaccaatccccattcaaggatcttgggcaaaagcgtttgtgaaccagttaggggatgttcaagaaagatgtaaaaatctcgacacagaagacacagtatataaatgtaactgggatgatgacagcttttgctggatatcttgtcatgttgatcacagattccctgaaatagacaagccgtgtggttgcaataaatgcagaaaagactgcattaaaaactctgtacttcatcgcattaaccctggagagaatggcttgaaaagtaacgaatacagaaatggcttcagggacgatgcagaccttcccccgcatccaagagtacctttgaaagagaaactctgtcaatatgatgagtttagtgagggcttgaggcacagtgcccatcttaacagacatcaaagagttcccacaggagagaaatctgttaagagtcttgagcgtggtcggggcgtcagacagaacacgcacatacgtaaccaccccagagcccctgtgggagacatgccctatagatgtgatgtctgtggaaaggggttcaggtataaatcggttcttcttattcatcaaggggtgcacacaggaaggagaccctataaatgtgaggagtgtgggaaggcatttggtcgaagttcaaacctgcttgtccatcagagggtccacactggagagaaaccatataaatgcagcgagtgtgggaagggcttcagttacagctcagtgcttcaagtccatcagaggctgcacacaggggagaagccctacacctgcagcgagtgtggcaaaggcttctgtgccaagtctgcactgcacaaacaccagcacattcaccctggagaaaagccctacagctgtggcgagtgtggaaagggattcagctgcagctcccacctcagcagtcatcagaagacacacaccggcgagaggccctaccagtgtgacaagtgtggcaaaggtttcagtcacaactcgtaccttcaagctcaccagagagttcacatggggcagcatctgtacaaatgtaacgtgtgtggtaagagtttcagttacagctcagggcttctcatgcatcagagactgcacacaggagagaaaccctacaaatgcgagtgcgggaagagctttggccggagctccgacctccacatccatcagagggtccacacaggagagaaaccctataaatgcagtgagtgtgggaagggcttccggcggaattcagaccttcacagccaccagagggtccacacgggagagaggccctacgtgtgtgacgtgtgtgggaagggtttcatctacagctccgacctccttatccatcagagggtccacactggagagaaaccctataaatgtgctgagtgtggcaaaggcttcagttacagctcagggcttctcattcaccagagagtccacacaggcgagaaaccttacagatgccaagagtgcggaaagggctttaggtgcacatcaagccttcacaaacatcagcgagtccacacgggaaaaaagccctatacgtgtgatcagtgtggcaagggattcagttatggctctaatcttcgcacccaccagaggttgcacacaggagagaaaccctacacttgttgtgaatgtgggaagggtttcagatatggctcaggtctccttagtcataagagagtgcacactggcgagaagccatacagatgccacgtgtgtgggaagggctatagtcagagctcacatcttcaaggtcatcagagggtccacactggtgagaaaccctataaatgtgaggagtgtgggaagggctttggccgcaactcctgtcttcatgttcatcagagagtccacactggagagaagccctatacgtgtggtgtgtgtgggaaaggcttcagttatacctcaggtctgcggaaccaccaaagagtgcatttaggcgagaacccttataagtagatgtacatagaggattccatctgggactcagagctttctatccatctgagagccaacacaggagaaaaaccataggaaagtgacatgtaggagggctataggagaaactgatgattttacattttctagtctgcataggaagggaacacctggatgtgtgataaataggttagcacttcagttacaaacttcagtctttaagagtctgttgtgcagcggagtaggctttaaagaaacagtgcagcagtggtttcagtaataatcctcacttccatcagaatctgcctgggagggagcttttacaatgtacaagtggtgagaatgtttccaaggtgctaattatggacatagattctttgtgtgggttgatagctaccaatgggacagtgtagaaacaagtttccacctttctaaaaccagtttggtacatatctttttaaagatcgctttataaaaacaaaaagataacattaacatttattgaaacaagtcactctgagaagaccaggaacaaagttctcttggcagatctgggtgatgtgtgtgtctcacatttttatcatgtttttatgactgttttatcttgcaggtaagctttacagctttcagaggagttgtagtacactacagaaatatgtcttctttccaggttcaaaaagcaaaatctgattggcattgcattgaattattaattaaataaatttattaattggcattgcattgaatttataggttaattttgaaagaatgtggcgtctttgaaatgctgattttttttcactttaaaaaaatgactttttttttaccactgatagtatttcatatggtccctcagtaatatttcttagagatggttaaaaataggttctgagtcatcttaagcatatttctaggaatttgttttattgctgtcatgaatataatggttttgctccagttcatttcatagtttaacatatcaaatattaggtatcttaaaaatcacaaatgctatttcaccctgcaggttagcagtattaaaatagaatcatcaaatcccccatcagtgggggcgggggggggggttgtagaaacagtctgatatggtttggctcttgtccccacccaaatctcatctcaattttaatccccacgtgtcagaggagggccttggtgggagatgattggatcacgagggcagatttctcccttgctgttctcatgatagtgagttctcatgagagctgatggttttaaggtgtagcccttcctcgctgtctctctcctgtccccttgtgaagaaggtccttatttctcttttgcgttctgccatgactaagttttcggaggcctccccagccatgtggaactgtgtgtgagttaaacctctttcctttgcaaattacctagtctcaggtagttctttatagcagtgcaaaaatggacgtaataagtcttatgtacttattggtgagagagaaaatccgtgcattgttttcaaaagaattcattaacgtatcaattcaatttctataacctttgaagtggcagtaaatatgtagtaattgatacttgggagatagttgcccacttgggcaaaaacgcatgcagaaggtggagtttttaaatttaaaacatttttaaaatagcaaatgttaatattccagtttccattggtaggaaattttttagataagttcaggcatatgtatgcaatggaaagccactagaaatcttcaggcacacagataatgacaatgcaggttgctcatgaagtatttagtgaaccaggagagttttagaacaacaattatagcatgaccccattttgttagtatgtttttctgtgtgtatgtttagagcaacagagaaaaaaagatgtgggagaggacatataactacttatctctagtggtgggattctgaatgtataatacatatgttgtacttttatgtattttactttgtaacaaagtatctttcagttttataataacagtagagctattttttataaattagcctgatggaacaatcccttatgattaaagattcatgttgtaacctct

SEQ ID NO: 201836 - DNA, 3186 bp, Homo sapiens
  Payload ID: 19818
  Gene Name: zinc finger protein 23
  Uniprot ID: P17027
  ENST ID: ENST00000357254
  CDS Start-End: 759-2690
ggcactcagacaacgtctatgtgtaaaggcgaccaccttattaggtctcctgcagcagccaagaccaaacacattgaagtatgtgtttttaaacgacagatgacggtcctcttttttttctctttcattacacttaaggcataacattagtttttaatatgtaggtgtgtatgttatgtatgattttctaggccattatatatgaatatcaggtcaggagaataagatggacattacaaactatttgttagaaaaagggggcattgggtgtgacagcgcgccatccactggtccatttccaagactcccacacgtggctgcacctgcagcttcacctccccgggctgggtccccgcttggctctgattcttacctgccccattccccaggggtaacagtcaccgtgggccagacccgagctagccgacagggatgcggccacagctggccgggcgtgaccaccaccgaggcgcagcgaccttgctcctagagaggcccggccgcctggtgacgcacttccggcagcgccggggagcagtccgctacggagctccagcccttctctgagacggggaccaggggatggcagccatgcacctgacagcctggccccagggcctgagctatggaattggccctagggcagcaggaacctattgtttcagaagtcggtgacctttgaggacgtggctgtgtacttcacccaggcggaatgggatggcctgtcccctgcacagaggaccctgtacagggatgtgatgctggagaattatgggaatgtggcctccctgggatttccacttctcaaacctgctgtgatctcacaactggagggaggaagtgagctggggggctcatctccactggctgcaggaacaggcctccagggcctccagactgatattcagactgacaatgatttgacaaaggaaatgtatgaaggaaaagagaatgtatcatttgaacttcaaagagacttttcccaggaaacagacttttcagaagcctctcttctagagaaacaacaggaagtccactcagcaggaaatataaagaaggagaagagcaacaccattgatggaacagtgaaagatgagacaagccccgtggaggagtgtttttttagtcaaagttcaaactcatatcagtgtcataccatcactggagagcagccctctgggtgtacaggattggggaaatccatcagctttgatacaaaactcgtgaagcatgaaataattaattctgaggaaagacctttcaaatgtgaagaattagtagagccctttaggtgtgactctcaacttattcaacatcaagagaacaacactgaggaaaagccttatcagtgttcggagtgtggcaaagctttcagcattaatgagaaattaatttggcatcagagacttcacagtggggagaaacccttcaaatgtgtggagtgtgggaaaagcttcagctacagttcccattatatcacacatcagacaatccacagtggggagaagccctatcagtgtaagatgtgtgggaaggccttcagtgttaatggaagcctaagtaggcatcagagaatccatacgggagagaagccctatcagtgcaaggaatgtggaaatggcttcagctgtagttctgcatatattacacatcagagagtccacactggagagaaaccttacgagtgtaatgactgtgggaaagcgttcaatgttaatgcaaaattaattcaacatcagagaatccatactggagagaaaccttatgaatgtaatgaatgtggaaaaggcttcaggtgcagctcccagcttaggcagcatcagagcatccacacaggagaaaagccctatcagtgtaaagagtgtggaaaaggcttcaataataatacaaaactcattcagcatcagagaatccacacaggtgagaaaccctatgaatgcactgaatgtggaaaagccttcagtgtcaaagggaagttaatccaacaccagagaattcacacaggcgagaaaccctatgagtgtaatgaatgcgggaaagccttcagatgtaactcccaatttcggcagcatctgagaattcacactggggagaagccctatgagtgtaatgagtgtggaaaggccttcagcgttaatgggaaactaatgcggcatcagagaattcacactggggagaaaccttttgaatgtaatgagtgtgggagatgctttacttctaaaagaaacctacttgatcatcaccgaatccatactggagaaaagccctatcaatgtaaggaatgtgggaaagccttcagtatcaatgccaaactaactaggcatcagaggatacatactggggagaaacctttcaaatgtatggaatgtgagaaagcattcagctgtagttctaactatattgtgcaccagagaatccatacaggagagaaaccctttcagtgtaaggagtgtggaaaagccttccatgttaatgcccatttaattcggcatcagagaagccacactggggagaaacccttcagatgtgtggaatgtggcaaaggcttcagctttagttctgactacattatacatcagacagtccacacttggaagaaaccctatatgtgtagtgtgtgtgggaaagcattcaggtttagcttccagctcagtcagcatcagagtgtccatagtgaaggaaaatcctaataatgagaaagatatagaaaactcttaaggttaatgccaaaatggatcaagtatcatcagattcatccattgaaaaacctccaagagggcatgaatatggcagagtcttcatatggaaacagtttttattctattcagtttaaatcaggaaaggatgaccagttaaagagaaacatccaaaaatagctttgttttgtaccaacaggaattagaaaatataatgaaaagatttcgttcccagcagcatcaagaaaagtagattttctagaaataaacagttatggaggacttgtatggagaaatttaagtcttcactgagggccactttacaaaggaaatttgaataaatggagagagagagaagccttgttgttggataggaaaacccgtactaaagatactctacctacattaatttatttgtttaatttttgacaacaagcatgtattacttttgaaaagatgaaaaataaagatttatttaaaaaaggaaaaa

SEQ ID NO: 201837 - DNA, 2692 bp, Homo sapiens
  Payload ID: 19818
  Gene Name: zinc finger protein 23
  ENST ID: ENST00000358700
  CDS Start-End: 161-412
agctccagcccttctctgagacggggaccaggggatggcagccatgcacctgacagcctggccccagaagtcggtgacctttgaggacgtggctgtgtacttcacccaggcggaatgggatggcctgtcccctgcacagaggaccctgtacagggatgtgatgctggagaattatgggaatgtggcctccctgggatttccacttctcaaacctgctgtgatctcacaactggagggaggaagtgagctggggggctcatctccactggctgcaggaacaggcctccagggcctccagactgatggagtctcgctctgtcgcccaaactggagtgcagtggcaagaacttggctcaccgcaacttccgtttcccgggttcgagcaattctcctgcctcatcctcccgagtagctggaactacaggcacatattcagactgacaatgatttgacaaaggaaatgtatgaaggaaaagagaatgtatcatttgaacttcaaagagacttttcccaggaaacagacttttcagaagcctctcttctagagaaacaacaggaagtccactcagcaggaaatataaagaaggagaagagcaacaccattgatggaacagtgaaagatgagacaagccccgtggaggagtgtttttttagtcaaagttcaaactcatatcagtgtcataccatcactggagagcagccctctgggtgtacaggattggggaaatccatcagctttgatacaaaactcgtgaagcatgaaataattaattctgaggaaagacctttcaaatgtgaagaattagtagagccctttaggtgtgactctcaacttattcaacatcaagagaacaacactgaggaaaagccttatcagtgttcggagtgtggcaaagctttcagcattaatgagaaattaatttggcatcagagacttcacagtggggagaaacccttcaaatgtgtggagtgtgggaaaagcttcagctacagttcccattatatcacacatcagacaatccacagtggggagaagccctatcagtgtaagatgtgtgggaaggccttcagtgttaatggaagcctaagtaggcatcagagaatccatacgggagagaagccctatcagtgcaaggaatgtggaaatggcttcagctgtagttctgcatatattacacatcagagagtccacactggagagaaaccttacgagtgtaatgactgtgggaaagcgttcaatgttaatgcaaaattaattcaacatcagagaatccatactggagagaaaccttatgaatgtaatgaatgtggaaaaggcttcaggtgcagctcccagcttaggcagcatcagagcatccacacaggagaaaagccctatcagtgtaaagagtgtggaaaaggcttcaataataatacaaaactcattcagcatcagagaatccacacaggtgagaaaccctatgaatgcactgaatgtggaaaagccttcagtgtcaaagggaagttaatccaacaccagagaattcacacaggcgagaaaccctatgagtgtaatgaatgcgggaaagccttcagatgtaactcccaatttcggcagcatctgagaattcacactggggagaagccctatgagtgtaatgagtgtggaaaggccttcagcgttaatgggaaactaatgcggcatcagagaattcacactggggagaaaccttttgaatgtaatgagtgtgggagatgctttacttctaaaagaaacctacttgatcatcaccgaatccatactggagaaaagccctatcaatgtaaggaatgtgggaaagccttcagtatcaatgccaaactaactaggcatcagaggatacatactggggagaaacctttcaaatgtatggaatgtgagaaagcattcagctgtagttctaactatattgtgcaccagagaatccatacaggagagaaaccctttcagtgtaaggagtgtggaaaagccttccatgttaatgcccatttaattcggcatcagagaagccacactggggagaaacccttcagatgtgtggaatgtggcaaaggcttcagctttagttctgactacattatacatcagacagtccacacttggaagaaaccctatatgtgtagtgtgtgtgggaaagcattcaggtttagcttccagctcagtcagcatcagagtgtccatagtgaaggaaaatcctaataatgagaaagatatagaaaactcttaaggttaatgccaaaatggatcaagtatcatcagattcatccattgaaaaacctccaagagggcatgaatatggcagagtcttcatatggaaacagtttttattctattcagtttaaatcaggaaaggatgaccagttaaagagaaacatccaaaaatagctttgttttgtaccaacaggaattagaaaatataatgaaaagatttcgttcccagcagcatcaagaaaagtagattttctagaaataaacagttatggaggacttgtatggagaaatttaagtcttcactgagggccactttacaaaggaaatttgaataaatggagagagagagaagccttgttgttggataggaaaacccgtactaaagatactctacctacattaatttatttgtttaatttttgacaacaagcatgtattacttttgaaaagatgaaaaataaa

SEQ ID NO: 201838 - DNA, 3242 bp, Homo sapiens
  Payload ID: 19818
  Gene Name: zinc finger protein 23
  Uniprot ID: P17027
  ENST ID: ENST00000393539
  CDS Start-End: 815-2746
cggaggtgagtgcagggctccgggcgctgtgtgccgtgccctgtcccccaggctctgggtccggttgagacgcactcccaccctgggtgctgcagggtctcccgtggcctacgctgccaggaggcccaggctgggagagggagcagggcggcggcccggggtgctcttccgcgctcctcgactccagctttggtctttgtggctcaatagcttgcgcccattggaaggggaaacgcacgttgctgtcccagccacgaggccctgagcatttagcacttggtcgacgggggaagatgtgtcggtgcagctaaaagatggaatatttgcgggcgtgaagcggcccgaggtgataccacaagtcttttgacatgctgaggtctggcaggaacattaacctatgtgcatcccgagtatggaccgtgtgctcccaggctcctgacatagggtcatgaattagggccgagtgggagcgcagagcccctcccagtcacccggcagcagaagcagcccggcttttggaggacattgtctcctggagcagtgtcagtcccaaaagctccagcccttctctgagacggggaccaggggatggcagccatgcacctgacagcctggccccagggacttcacggatcccctgaagctcatccatggacttccatggactacagggcctgagctatggaattggccctagggcagcaggaacctattgtttcagaagtcggtgacctttgaggacgtggctgtgtacttcacccaggcggaatgggatggcctgtcccctgcacagaggaccctgtacagggatgtgatgctggagaattatgggaatgtggcctccctgggatttccacttctcaaacctgctgtgatctcacaactggagggaggaagtgagctggggggctcatctccactggctgcaggaacaggcctccagggcctccagactgatattcagactgacaatgatttgacaaaggaaatgtatgaaggaaaagagaatgtatcatttgaacttcaaagagacttttcccaggaaacagacttttcagaagcctctcttctagagaaacaacaggaagtccactcagcaggaaatataaagaaggagaagagcaacaccattgatggaacagtgaaagatgagacaagccccgtggaggagtgtttttttagtcaaagttcaaactcatatcagtgtcataccatcactggagagcagccctctgggtgtacaggattggggaaatccatcagctttgatacaaaactcgtgaagcatgaaataattaattctgaggaaagacctttcaaatgtgaagaattagtagagccctttaggtgtgactctcaacttattcaacatcaagagaacaacactgaggaaaagccttatcagtgttcggagtgtggcaaagctttcagcattaatgagaaattaatttggcatcagagacttcacagtggggagaaacccttcaaatgtgtggagtgtgggaaaagcttcagctacagttcccattatatcacacatcagacaatccacagtggggagaagccctatcagtgtaagatgtgtgggaaggccttcagtgttaatggaagcctaagtaggcatcagagaatccatacgggagagaagccctatcagtgcaaggaatgtggaaatggcttcagctgtagttctgcatatattacacatcagagagtccacactggagagaaaccttacgagtgtaatgactgtgggaaagcgttcaatgttaatgcaaaattaattcaacatcagagaatccatactggagagaaaccttatgaatgtaatgaatgtggaaaaggcttcaggtgcagctcccagcttaggcagcatcagagcatccacacaggagaaaagccctatcagtgtaaagagtgtggaaaaggcttcaataataatacaaaactcattcagcatcagagaatccacacaggtgagaaaccctatgaatgcactgaatgtggaaaagccttcagtgtcaaagggaagttaatccaacaccagagaattcacacaggcgagaaaccctatgagtgtaatgaatgcgggaaagccttcagatgtaactcccaatttcggcagcatctgagaattcacactggggagaagccctatgagtgtaatgagtgtggaaaggccttcagcgttaatgggaaactaatgcggcatcagagaattcacactggggagaaaccttttgaatgtaatgagtgtgggagatgctttacttctaaaagaaacctacttgatcatcaccgaatccatactggagaaaagccctatcaatgtaaggaatgtgggaaagccttcagtatcaatgccaaactaactaggcatcagaggatacatactggggagaaacctttcaaatgtatggaatgtgagaaagcattcagctgtagttctaactatattgtgcaccagagaatccatacaggagagaaaccctttcagtgtaaggagtgtggaaaagccttccatgttaatgcccatttaattcggcatcagagaagccacactggggagaaacccttcagatgtgtggaatgtggcaaaggcttcagctttagttctgactacattatacatcagacagtccacacttggaagaaaccctatatgtgtagtgtgtgtgggaaagcattcaggtttagcttccagctcagtcagcatcagagtgtccatagtgaaggaaaatcctaataatgagaaagatatagaaaactcttaaggttaatgccaaaatggatcaagtatcatcagattcatccattgaaaaacctccaagagggcatgaatatggcagagtcttcatatggaaacagtttttattctattcagtttaaatcaggaaaggatgaccagttaaagagaaacatccaaaaatagctttgttttgtaccaacaggaattagaaaatataatgaaaagatttcgttcccagcagcatcaagaaaagtagattttctagaaataaacagttatggaggacttgtatggagaaatttaagtcttcactgagggccactttacaaaggaaatttgaataaatggagagagagagaagccttgttgttggataggaaaacccgtactaaagatactctacctacattaatttatttgtttaatttttgacaacaagcatgtattacttttgaaaagatgaaaaataaagatttatttaaaaaaggaaaaa

SEQ ID NO: 201839 - DNA, 1932 bp, Homo sapiens
  Payload ID: 19818
  Gene Name: zinc finger protein 23
  Uniprot ID: P17027
  ENST ID: ENST00000428724
  CDS Start-End: 1-1932
atgctggagaattatgggaatgtggcctccctgggatttccacttctcaaacctgctgtgatctcacaactggagggaggaagtgagctggggggctcatctccactggctgcaggaacaggcctccagggcctccagactgatattcagactgacaatgatttgacaaaggaaatgtatgaaggaaaagagaatgtatcatttgaacttcaaagagacttttcccaggaaacagacttttcagaagcctctcttctagagaaacaacaggaagtccactcagcaggaaatataaagaaggagaagagcaacaccattgatggaacagtgaaagatgagacaagccccgtggaggagtgtttttttagtcaaagttcaaactcatatcagtgtcataccatcactggagagcagccctctgggtgtacaggattggggaaatccatcagctttgatacaaaactcgtgaagcatgaaataattaattctgaggaaagacctttcaaatgtgaagaattagtagagccctttaggtgtgactctcaacttattcaacatcaagagaacaacactgaggaaaagccttatcagtgttcggagtgtggcaaagctttcagcattaatgagaaattaatttggcatcagagacttcacagtggggagaaacccttcaaatgtgtggagtgtgggaaaagcttcagctacagttcccattatatcacacatcagacaatccacagtggggagaagccctatcagtgtaagatgtgtgggaaggccttcagtgttaatggaagcctaagtaggcatcagagaatccatacgggagagaagccctatcagtgcaaggaatgtggaaatggcttcagctgtagttctgcatatattacacatcagagagtccacactggagagaaaccttacgagtgtaatgactgtgggaaagcgttcaatgttaatgcaaaattaattcaacatcagagaatccatactggagagaaaccttatgaatgtaatgaatgtggaaaaggcttcaggtgcagctcccagcttaggcagcatcagagcatccacacaggagaaaagccctatcagtgtaaagagtgtggaaaaggcttcaataataatacaaaactcattcagcatcagagaatccacacaggtgagaaaccctatgaatgcactgaatgtggaaaagccttcagtgtcaaagggaagttaatccaacaccagagaattcacacaggcgagaaaccctatgagtgtaatgaatgcgggaaagccttcagatgtaactcccaatttcggcagcatctgagaattcacactggggagaagccctatgagtgtaatgagtgtggaaaggccttcagcgttaatgggaaactaatgcggcatcagagaattcacactggggagaaaccttttgaatgtaatgagtgtgggagatgctttacttctaaaagaaacctacttgatcatcaccgaatccatactggagaaaagccctatcaatgtaaggaatgtgggaaagccttcagtatcaatgccaaactaactaggcatcagaggatacatactggggagaaacctttcaaatgtatggaatgtgagaaagcattcagctgtagttctaactatattgtgcaccagagaatccatacaggagagaaaccctttcagtgtaaggagtgtggaaaagccttccatgttaatgcccatttaattcggcatcagagaagccacactggggagaaacccttcagatgtgtggaatgtggcaaaggcttcagctttagttctgactacattatacatcagacagtccacacttggaagaaaccctatatgtgtagtgtgtgtgggaaagcattcaggtttagcttccagctcagtcagcatcagagtgtccatagtgaaggaaaatcctaa

SEQ ID NO: 201840 - DNA, 555 bp, Homo sapiens
  Payload ID: 19818
  Gene Name: zinc finger protein 23
  ENST ID: ENST00000565718
  CDS Start-End: 245-555
acttccggcagcgccggggagcagtccgctacggagctccagcccttctctgagacggggaccaggggatggcagccatgcacctgacagcctggccccagggcctgagctatggaattggccctagggcagcaggaacctattgtttcagaagtcggtgacctttgaggacgtggctgtgtacttcacccaggcggaatgggatggcctgtcccctgcacagaggaccctgtacagggatgtgatgctggagaattatgggaatgtggcctccctgggatttccacttctcaaacctgctgtgatctcacaactggagggaggaatagatattcagactgacaatgatttgacaaaggaaatgtatgaaggaaaagagaatgtatcatttgaacttcaaagagacttttcccaggaaacagacttttcagaagcctctcttctagagaaacaacaggaagtccactcagcaggaaatataaagaaggagaagagcaacaccattgatggaacagtgaaagatgagacaagccccgtggaggagtgtttttttag

SEQ ID NO: 201841 - DNA, 558 bp, Homo sapiens
  Payload ID: 19818
  Gene Name: zinc finger protein 23
  ENST ID: ENST00000567340
  CDS Start-End: 478-558
aacattgctactagcgttgtggataggagccaggatcctgcaatgtacaggacagtcctgcccactgaaaaaatgttcacactttcaaatgtcttgctgaacattcaggggtaacagtcaccgtgggccagacccgagctagccgacagggatgcggccacagctggccgggcgtgaccaccaccgaggcgcagcgaccttgctcctagagaggcccggccgcctggtgacgcacttccggcagcgccggggagcagtccgctacggagctccagcccttctctgagacggggaccaggggatggcagccatgcacctgacagcctggccccagggcctgagctatggaattggccctagggcagcaggaacctattgtttcagaagtcggtgacctttgaggacgtggctgtgtacttcacccaggcggaatgggatggcctgtcccctgcacagaggaccctgtacagggatgtgatgctggagaattatgggaatgtggcctccctgggatttccacttctcaaacctgctgtgatctcacaactggagggagga

SEQ ID NO: 201842 - DNA, 2799 bp, Homo sapiens
  Payload ID: 19818
  Gene Name: zinc finger protein 23
  ENST ID: ENST00000497160
  CDS Start-End: 246-497
cacttccggcagcgccggggagcagtccgctacggagctccagcccttctctgagacggggaccaggggatggcagccatgcacctgacagcctggccccagggacttcacggatcccctgaagctcatccatggacttccatggactacagaagtcggtgacctttgaggacgtggctgtgtacttcacccaggcggaatgggatggcctgtcccctgcacagaggaccctgtacagggatgtgatgctggagaattatgggaatgtggcctccctgggatttccacttctcaaacctgctgtgatctcacaactggagggaggaagtgagctggggggctcatctccactggctgcaggaacaggcctccagggcctccagactgatggagtctcgctctgtcgcccaaactggagtgcagtggcaagaacttggctcaccgcaacttccgtttcccgggttcgagcaattctcctgcctcatcctcccgagtagctggaactacaggcacatattcagactgacaatgatttgacaaaggaaatgtatgaaggaaaagagaatgtatcatttgaacttcaaagagacttttcccaggaaacagacttttcagaagcctctcttctagagaaacaacaggaagtccactcagcaggaaatataaagaaggagaagagcaacaccattgatggaacagtgaaagatgagacaagccccgtggaggagtgtttttttagtcaaagttcaaactcatatcagtgtcataccatcactggagagcagccctctgggtgtacaggattggggaaatccatcagctttgatacaaaactcgtgaagcatgaaataattaattctgaggaaagacctttcaaatgtgaagaattagtagagccctttaggtgtgactctcaacttattcaacatcaagagaacaacactgaggaaaagccttatcagtgttcggagtgtggcaaagctttcagcattaatgagaaattaatttggcatcagagacttcacagtggggagaaacccttcaaatgtgtggagtgtgggaaaagcttcagctacagttcccattatatcacacatcagacaatccacagtggggagaagccctatcagtgtaagatgtgtgggaaggccttcagtgttaatggaagcctaagtaggcatcagagaatccatacgggagagaagccctatcagtgcaaggaatgtggaaatggcttcagctgtagttctgcatatattacacatcagagagtccacactggagagaaaccttacgagtgtaatgactgtgggaaagcgttcaatgttaatgcaaaattaattcaacatcagagaatccatactggagagaaaccttatgaatgtaatgaatgtggaaaaggcttcaggtgcagctcccagcttaggcagcatcagagcatccacacaggagaaaagccctatcagtgtaaagagtgtggaaaaggcttcaataataatacaaaactcattcagcatcagagaatccacacaggtgagaaaccctatgaatgcactgaatgtggaaaagccttcagtgtcaaagggaagttaatccaacaccagagaattcacacaggcgagaaaccctatgagtgtaatgaatgcgggaaagccttcagatgtaactcccaatttcggcagcatctgagaattcacactggggagaagccctatgagtgtaatgagtgtggaaaggccttcagcgttaatgggaaactaatgcggcatcagagaattcacactggggagaaaccttttgaatgtaatgagtgtgggagatgctttacttctaaaagaaacctacttgatcatcaccgaatccatactggagaaaagccctatcaatgtaaggaatgtgggaaagccttcagtatcaatgccaaactaactaggcatcagaggatacatactggggagaaacctttcaaatgtatggaatgtgagaaagcattcagctgtagttctaactatattgtgcaccagagaatccatacaggagagaaaccctttcagtgtaaggagtgtggaaaagccttccatgttaatgcccatttaattcggcatcagagaagccacactggggagaaacccttcagatgtgtggaatgtggcaaaggcttcagctttagttctgactacattatacatcagacagtccacacttggaagaaaccctatatgtgtagtgtgtgtgggaaagcattcaggtttagcttccagctcagtcagcatcagagtgtccatagtgaaggaaaatcctaataatgagaaagatatagaaaactcttaaggttaatgccaaaatggatcaagtatcatcagattcatccattgaaaaacctccaagagggcatgaatatggcagagtcttcatatggaaacagtttttattctattcagtttaaatcaggaaaggatgaccagttaaagagaaacatccaaaaatagctttgttttgtaccaacaggaattagaaaatataatgaaaagatttcgttcccagcagcatcaagaaaagtagattttctagaaataaacagttatggaggacttgtatggagaaatttaagtcttcactgagggccactttacaaaggaaatttgaataaatggagagagagagaagccttgttgttggataggaaaacccgtactaaagatactctacctacattaatttatttgtttaatttttgacaacaagcatgtattacttttgaaaagatgaaaaataaagatttatttaaaaaaggaaaaa

SEQ ID NO: 201843 - DNA, 3020 bp, Homo sapiens
  Payload ID: 19818
  Gene Name: zinc finger protein 23
  Uniprot ID: P17027
  ENST ID: ENST00000564528
  CDS Start-End: 767-2524
ggttactgaggggatctctggtaatcctttactgagtgagaaccccagagctgttcctaatctagacttagaggttactggcaggggcaaatgccaagccttttgtaggcctatataggactttgcttggaactggtatgcactgttgatccaacccatgaaagctatgttttggaaacactggaatccagttgcttcctgttccacagtggcatcttcagttgccccctcatcttacctgtcttgagtcttttcaaggatctcagtgtactctggattatttcaggccaaggtcaaaaagtggtatccctttgggcagaatctccctgcttgccctgcatgaggtctcctaggcctacagtctgggccctaaccaggctctcccacacgttcccaagccttcacccccaacccccacatttgcctcccaaagcccttggaagtctccaaggtctctttagtccttcctaagccccacagtactttcccgtagtcctgaggcttgggacctcctggggttcttaccttccctccccattgctgagacagtctgagaagaggcttaggaatttgtctgtgggagtttattcatctgtctctcctatttacctctcccaaaccaggatttccacttctcaaacctgctgtgatctcacaactggagggaggaagtgagctggggggctcatctccactggctgcaggaacaggcctccagggcctccagactgtagatattcagactgacaatgatttgacaaaggaaatgtatgaaggaaaagagaatgtatcatttgaacttcaaagagacttttcccaggaaacagacttttcagaagcctctcttctagagaaacaacaggaagtccactcagcaggaaatataaagaaggagaagagcaacaccattgatggaacagtgaaagatgagacaagccccgtggaggagtgtttttttagtcaaagttcaaactcatatcagtgtcataccatcactggagagcagccctctgggtgtacaggattggggaaatccatcagctttgatacaaaactcgtgaagcatgaaataattaattctgaggaaagacctttcaaatgtgaagaattagtagagccctttaggtgtgactctcaacttattcaacatcaagagaacaacactgaggaaaagccttatcagtgttcggagtgtggcaaagctttcagcattaatgagaaattaatttggcatcagagacttcacagtggggagaaacccttcaaatgtgtggagtgtgggaaaagcttcagctacagttcccattatatcacacatcagacaatccacagtggggagaagccctatcagtgtaagatgtgtgggaaggccttcagtgttaatggaagcctaagtaggcatcagagaatccatacgggagagaagccctatcagtgcaaggaatgtggaaatggcttcagctgtagttctgcatatattacacatcagagagtccacactggagagaaaccttacgagtgtaatgactgtgggaaagcgttcaatgttaatgcaaaattaattcaacatcagagaatccatactggagagaaaccttatgaatgtaatgaatgtggaaaaggcttcaggtgcagctcccagcttaggcagcatcagagcatccacacaggagaaaagccctatcagtgtaaagagtgtggaaaaggcttcaataataatacaaaactcattcagcatcagagaatccacacaggtgagaaaccctatgaatgcactgaatgtggaaaagccttcagtgtcaaagggaagttaatccaacaccagagaattcacacaggcgagaaaccctatgagtgtaatgaatgcgggaaagccttcagatgtaactcccaatttcggcagcatctgagaattcacactggggagaagccctatgagtgtaatgagtgtggaaaggccttcagcgttaatgggaaactaatgcggcatcagagaattcacactggggagaaaccttttgaatgtaatgagtgtgggagatgctttacttctaaaagaaacctacttgatcatcaccgaatccatactggagaaaagccctatcaatgtaaggaatgtgggaaagccttcagtatcaatgccaaactaactaggcatcagaggatacatactggggagaaacctttcaaatgtatggaatgtgagaaagcattcagctgtagttctaactatattgtgcaccagagaatccatacaggagagaaaccctttcagtgtaaggagtgtggaaaagccttccatgttaatgcccatttaattcggcatcagagaagccacactggggagaaacccttcagatgtgtggaatgtggcaaaggcttcagctttagttctgactacattatacatcagacagtccacacttggaagaaaccctatatgtgtagtgtgtgtgggaaagcattcaggtttagcttccagctcagtcagcatcagagtgtccatagtgaaggaaaatcctaataatgagaaagatatagaaaactcttaaggttaatgccaaaatggatcaagtatcatcagattcatccattgaaaaacctccaagagggcatgaatatggcagagtcttcatatggaaacagtttttattctattcagtttaaatcaggaaaggatgaccagttaaagagaaacatccaaaaatagctttgttttgtaccaacaggaattagaaaatataatgaaaagatttcgttcccagcagcatcaagaaaagtagattttctagaaataaacagttatggaggacttgtatggagaaatttaagtcttcactgagggccactttacaaaggaaatttgaataaatggagagagagagaagccttgttgttggataggaaaacccgtactaaagatactctacctacattaatttatttgtttaatttttgacaacaagcatgtattacttttgaaaagatgaaaaataaagatttatttaaaaaaggaaaaa

SEQ ID NO: 201844 - DNA, 4115 bp, Homo sapiens
  Payload ID: 19819
  Gene Name: zinc finger protein 230
  Uniprot ID: Q9UIE0
  ENST ID: ENST00000429154
  CDS Start-End: 229-1653
acttccggtgtgtgagcctgcggttgctacataaccgcgtagtttgagccatttctgcgtctggcgggtccttctgaacttgtcaccttcgcttggggtcgcaacgacccgatgatcgatgatccaagcaagggaaaagaagccttggcggagagcggaggcacaattccaccttcctttgtgctccattactcaagacactgaagactccaaaaagtagtaggaaaaatgaccacattcaaggaggcagtgaccttcaaggatgtggctgtgttcttcactgaggaggaactggggctactggaccctgcccagaggaagctgtaccaagacgtgatgcttgagaacttcacgaacctgctgtcagtggggcatcaaccattccaccctttccacttcctaagggaagaaaagttttggatgatggagacagcaacccaaagagaaggaaattcaggcggcaagactattgcggaagcaggaccacatgaagactgcccttgccagcaaatctgggaacaaactgcaagtgacttaacccagtctcaagactccatcataaataattctcacttctttgaacaaggtgatgtcccctcccaggttgaggcaggactatctataattcatacaggacagaaaccttcacagaatgggaagtgtaaacagtccttcagtgatgttgccatctttgatcctcctcagcagttccactcaggagagaagtctcatacatgcaatgagtgtggaaaaagcttctgttacatctcagctcttcgtattcaccagagagttcacttgagagagaaactctctaagtgtgacatgcgtggtaaggaattcagtcagagctcatgtctgcaaactcgtgagagagtccacactggagagaaaccattcaaatgtgagcaatgtgggaaaggcttcagatgtagagcgatacttcaagttcactgcaaattacacacaggagagaaaccttatatttgtgagaaatgtgggagggccttcattcacgatttccagcttcagaaacatcagataattcatactggggagaagccgttcaaatgtgaaatatgtggtaagagcttctgccttaggtcaagtcttaataggcattgcatggtccacacagcagagaaactgtacaaatctgaggagtgtggaaaaggcttcactgatagcctagatttgcataagcatcagataattcacacaggacagaaaccgtacaattgtaaagaatgtgggaagagcttcagatggtcctcatatcttttgatccatcagcgaatccacagtggagaaaaaccatacagatgtgaggagtgtgggaagggctacattagtaagtcaggtcttaacttgcaccagagggtccatactggagagagaccttataattgtaaggaatgtgggaagagctttagccgggcttcaagtattttgaatcataagaaactccactgccggaaaaaacccttcaaatgtgaggattgtggaaagaggcttgtacaccggtctttctgtaaagaccaacaaggagaccacaatggagaaaactcatccaaatgtgaggactgtgggaagcgctacaagaggcgcttgaatctggatataattttatcattatttttaaatgatatgtaagttgtacatatatatgggatatggtatgaaattttaatatgtgtatataatacgtaatgatcaaattgatgtaattagtgtattaccttaaacaattaacatttctttgttttgggaaaattcaaaatccattgttctagcgatttgaaaagaaacaataaattattgttgattatagtcacctttggtgctttagaacactagaatgtatttctcctatctagcagtacttatgtatcttgttacccaatctttggctatctcacctaacccctacacttccctgcttctagaaccactgttttactcactaattctatgaaatcaacttttttagcttccatatgtgtgtgaggacagttagtatttatcttaccttgcttagcttatattgtttaacatgtcctccaaagctcatctatgttgccacaaatgacacaattttgttttctttttatgcccaaagagtattctattgtgtatatatgccaccttttcttcatttatctattgatggacacataggtgggttccatatcttaactattgtgaagaatagtgctccaatgaacatggtagtgtagatatctgatccacatactgatttcctttgctttggatatactcaatagtgggattgctagatcactcgaatcttatgcctcagaggcttgacacaagagcaaaactatggaagtgtggctagggtgatatggcttcataccacctcaggcctcaagtcctcaactgcaccagagtgtccacgttggacagaatccttagtaatgaggtgtgtgataaagtctctgctcagttgtctataatctcatttgagagttcacaaaggggcaaaacattaaaaagaggcatatggtaagcacttcagtgtgtgtttatatcataatttatcacagtccatactgataatatatttcatccaggcttgtaggacagaaaacatttgtttaagttaaattcagtgtttcaccatagctcagcattctcccatcatcctaggaccatcgtagtagagaactcttgtaaattgtgcagtagggttgcaaacagaacttacgcttgtcattcaggagacaggccttagaataagagtttgttcacacatttacaaaaccctaatgatgaacatgtcaaaagtggtgaccactagaatgtcaactacaggtaccttgttttctgcatcctcaggaccttaacactgattagcacttacatgtttagtatgtgttaaatgactcaaaaggagaaaatatgatattttaaaattgcatctaggagagaaaatctacaaaaaataattcagggacacgagttaaaatgcagaatacactcagttctgcaatccaaagcattattttgggtaatcttaccctgttgcacttggctgctggcttcccctcatcctctgttctgaagtttactactagtggctttgtctaatgctccattggttgcatacaatataaattcaacaatcatttgtaactcttctcacactacaggctgaaaatggtttgttaacttgtcaataacagtccactgcatatatcacaattacatttttttcaacagtgttaaggcaaaatttatagtaatactttttacgtggcagatgtagttacgttggaaaaaacttccttagttctgaattctcatgattgcttctgtatttccatgcaggccttgatataatggccttctaattgtggtagcatttattttatcaaacaactcaggtagaagctatgccaatttgacaatttttggaaacctaacctaatattctcttcctatctctatgaaataccaagagaaacctatcggagtttggtaatttcatgaaatgtatccatgattggggtaggagtgacatttacatgctcttctttattgttggcagtaaaaataagtcttttgtaagcagtgtatatcagaatgtataaggtacaagtgttttacctggaaatgatgggataggaaattatgattatgatgttaaaactgtgaaaagtagaaaaccacatggatgatatcaccccattttaaaatggaataagtattcaacaagaatttgtgtgaaatgcatttattcctataacataagaccaataaaatgagggaaccagacatacagtaaaaggagaaaaacataatgtgagctttgtgaaatctgactgtaaccttcataacataatcaaatatctttgtgtgtttctgggactttttaatgtgtatatacgtaatttgtgaacaactattctttcctctggcaatgaatatttgctggtatttttccattttataattttatgcattttttctcagtgaacatcagttttatcaaagcagtaaatttagtgcaataaatttgcaaacttattaacgttaatcacttacctaccaggactcagaatctcagaataaaattgctctatattgtcata

SEQ ID NO: 201845 - DNA, 4085 bp, Homo sapiens
  Payload ID: 19819
  Gene Name: zinc finger protein 230
  ENST ID: ENST00000585568
  CDS Start-End: 201-365
acataaccgcgtagtttgagccatttctgcgtctggcgggtccttctgaacttgtcaccttcgcttggggtcgcaacgacccgatgatcgatgatccaagcaagggaaaagaagccttggcggagagcggaggcacaattccaccttcctttgtgctccattactcaagacactgaagactccaaaaagtagtaggaaaaatgaccacattcaaggaggcagtgaccttcaaggatgtggctgtgttcttcactgaggaggaactggggctactggaccctgcccagaggaagctgtaccaagacgtgatgcttgagaacttcacgaacctgctgtcagtgggtgagcacaggcaccctctgtaatggtacatcaggcctcaggagtggctttgtatcctagagtattcaagtttgtggcatcaaccattccaccctttccacttcctaagggaagaaaagttttggatgatggagacagcaacccaaagagaaggaaattcaggcggcaagactattgcggaagcaggaccacatgaagactgcccttgccagcaaatctgggaacaaactgcaagtgacttaacccagtctcaagactccatcataaataattctcacttctttgaacaaggtgatgtcccctcccaggttgaggcaggactatctataattcatacaggacagaaaccttcacagaatgggaagtgtaaacagtccttcagtgatgttgccatctttgatcctcctcagcagttccactcaggagagaagtctcatacatgcaatgagtgtggaaaaagcttctgttacatctcagctcttcgtattcaccagagagttcacttgagagagaaactctctaagtgtgacatgcgtggtaaggaattcagtcagagctcatgtctgcaaactcgtgagagagtccacactggagagaaaccattcaaatgtgagcaatgtgggaaaggcttcagatgtagagcgatacttcaagttcactgcaaattacacacaggagagaaaccttatatttgtgagaaatgtgggagggccttcattcacgatttccagcttcagaaacatcagataattcatactggggagaagccgttcaaatgtgaaatatgtggtaagagcttctgccttaggtcaagtcttaataggcattgcatggtccacacagcagagaaactgtacaaatctgaggagtgtggaaaaggcttcactgatagcctagatttgcataagcatcagataattcacacaggacagaaaccgtacaattgtaaagaatgtgggaagagcttcagatggtcctcatatcttttgatccatcagcgaatccacagtggagaaaaaccatacagatgtgaggagtgtgggaagggctacattagtaagtcaggtcttaacttgcaccagagggtccatactggagagagaccttataattgtaaggaatgtgggaagagctttagccgggcttcaagtattttgaatcataagaaactccactgccggaaaaaacccttcaaatgtgaggattgtggaaagaggcttgtacaccggtctttctgtaaagaccaacaaggagaccacaatggagaaaactcatccaaatgtgaggactgtgggaagcgctacaagaggcgcttgaatctggatataattttatcattatttttaaatgatatgtaagttgtacatatatatgggatatggtatgaaattttaatatgtgtatataatacgtaatgatcaaattgatgtaattagtgtattaccttaaacaattaacatttctttgttttgggaaaattcaaaatccattgttctagcgatttgaaaagaaacaataaattattgttgattatagtcacctttggtgctttagaacactagaatgtatttctcctatctagcagtacttatgtatcttgttacccaatctttggctatctcacctaacccctacacttccctgcttctagaaccactgttttactcactaattctatgaaatcaacttttttagcttccatatgtgtgtgaggacagttagtatttatcttaccttgcttagcttatattgtttaacatgtcctccaaagctcatctatgttgccacaaatgacacaattttgttttctttttatgcccaaagagtattctattgtgtatatatgccaccttttcttcatttatctattgatggacacataggtgggttccatatcttaactattgtgaagaatagtgctccaatgaacatggtagtgtagatatctgatccacatactgatttcctttgctttggatatactcaatagtgggattgctagatcactcgaatcttatgcctcagaggcttgacacaagagcaaaactatggaagtgtggctagggtgatatggcttcataccacctcaggcctcaagtcctcaactgcaccagagtgtccacgttggacagaatccttagtaatgaggtgtgtgataaagtctctgctcagttgtctataatctcatttgagagttcacaaaggggcaaaacattaaaaagaggcatatggtaagcacttcagtgtgtgtttatatcataatttatcacagtccatactgataatatatttcatccaggcttgtaggacagaaaacatttgtttaagttaaattcagtgtttcaccatagctcagcattctcccatcatcctaggaccatcgtagtagagaactcttgtaaattgtgcagtagggttgcaaacagaacttacgcttgtcattcaggagacaggccttagaataagagtttgttcacacatttacaaaaccctaatgatgaacatgtcaaaagtggtgaccactagaatgtcaactacaggtaccttgttttctgcatcctcaggaccttaacactgattagcacttacatgtttagtatgtgttaaatgactcaaaaggagaaaatatgatattttaaaattgcatctaggagagaaaatctacaaaaaataattcagggacacgagttaaaatgcagaatacactcagttctgcaatccaaagcattattttgggtaatcttaccctgttgcacttggctgctggcttcccctcatcctctgttctgaagtttactactagtggctttgtctaatgctccattggttgcatacaatataaattcaacaatcatttgtaactcttctcacactacaggctgaaaatggtttgttaacttgtcaataacagtccactgcatatatcacaattacatttttttcaacagtgttaaggcaaaatttatagtaatactttttacgtggcagatgtagttacgttggaaaaaacttccttagttctgaattctcatgattgcttctgtatttccatgcaggccttgatataatggccttctaattgtggtagcatttattttatcaaacaactcaggtagaagctatgccaatttgacaatttttggaaacctaacctaatattctcttcctatctctatgaaataccaagagaaacctatcggagtttggtaatttcatgaaatgtatccatgattggggtaggagtgacatttacatgctcttctttattgttggcagtaaaaataagtcttttgtaagcagtgtatatcagaatgtataaggtacaagtgttttacctggaaatgatgggataggaaattatgattatgatgttaaaactgtgaaaagtagaaaaccacatggatgatatcaccccattttaaaatggaataagtattcaacaagaatttgtgtgaaatgcatttattcctataacataagaccaataaaatgagggaaccagacatacagtaaaaggagaaaaacataatgtgagctttgtgaaatctgactgtaaccttcataacataatcaaatatctttgtgtgtttctgggactttttaatgtgtatatacgtaatttgtgaacaactattctttcctctggcaatgaatatttgctggtatttttccattttataattttatgcattttttctcagtgaacatcagttttatcaaagcagtaaatttagtgcaataaa

SEQ ID NO: 201846 - DNA, 579 bp, Homo sapiens
  Payload ID: 19819
  Gene Name: zinc finger protein 230
  ENST ID: ENST00000585632
  CDS Start-End: 199-462
ataaccgcgtagtttgagccatttctgcgtctggcgggtccttctgaacttgtcaccttcgcttggggtcgcaacgacccgatgatcgatgatccaagcaagggaaaagaagccttggcggagagcggaggcacaattccaccttcctttgtgctccattactcaagacactgaagactccaaaaagtagtaggaaaaatgaccacattcaaggaggcagtgaccttcaaggatgtggctgtgttcttcactgaggaggaactggggctactggaccctgcccagaggaagctgtaccaagacgtgatgcttgagaacttcacgaacctgctgtcagtggggcatcaaccattccaccctttccacttcctaagggaagaaaagttttggatgatggagacagcaacccaaagagaaggaaattcaggtaagaagcaagcaactgtgtgtccttgtacatgactttctttcccatttgttttacttctgaccatgcccacttatatcaccctgatctaaattgcccaatctctttcctggtttattacaacccctttctggctggtggtcctgttccct

SEQ ID NO: 201847 - DNA, 600 bp, Homo sapiens
  Payload ID: 19819
  Gene Name: zinc finger protein 230
  ENST ID: ENST00000585491
  CDS Start-End: 380-600
tataaatggaatcatctaatccatggattttggtgactggcttctttctcttatgatgtttccaaggtttgtgcatgttgtagcatgggttggtacttcattccttttaatttccaaattagattccattatatggatatgccatgatttttctatccatttacccagaggaaggcattttggttgtgcacagttttggggttagtatgaataatgctgctgtgatcattcataatacatgtgcttgttgctacacagcctccccagccaccatttcatgtctctcttttgctgtctctggcattttccaggcacaattccaccttcctttgtgctccattactcaagacactgaagactccaaaaagtagtaggaaaaatgaccacattcaaggaggcagtgaccttcaaggatgtggctgtgttcttcactgaggaggaactggggctactggaccctgcccagaggaagctgtaccaagacgtgatgcttgagaacttcacgaacctgctgtcagtggggcatcaaccattccaccctttccacttcctaagggaagaaaagttttggatgatggagacagcaacccaaagagaagg

SEQ ID NO: 201848 - DNA, 2179 bp, Homo sapiens
  Payload ID: 19820
  Gene Name: zinc finger protein 232
  Uniprot ID: Q9UNY5
  ENST ID: ENST00000250076
  CDS Start-End: 656-1990
cgacgacaaggatggggcccatctcttcggagcctaaggatccagcccaggtccagccctgcgcagccgcccaccaagctgccagaagacgagccggacgcccaaggctacgagaggacgattgcagaattgtacaggctagtggttggggaatattttttcgtggaagggaccgtcttccttagctgtggccctctcatcaggtctgggaagaggtaattggaaaatagaactcatggagaagtgttaccacaggccatggacaaggccagaatttccctgacatctgtccgccagcaccgcccttcaggtacaattccacaagagaccccccaaacttgatgaagtcacccgcttacaagggctcactctccacctgcgcaaggactgcaattcccaggggcctccagggcacccggccgctccagtccagtcgtgcaggcggcgcgctctttctcgctccgctcaagtccaggaaccggttcccgggctcccagcctctcggcagcgcccacgcgcctgggccaaagtccgcgaacggaagccggcggcgaggaggattctgggagttggaggccgaggctgcgacctgcgcaggcgcaaacctgcccctggggtgagggctgtaagtggcgcgattcgcggcagcgccccgatggaacctcctggtcctgtgagggggcccttgcaagattccagctggtatgagccttctgcagagctagtgcagactaggatggctgtatcactaacagcagctgaaactctggcccttcagggtacacagggacaagagaagatgatgatgatgggaccaaaggaagaggaacagtcttgtgagtatgagaccaggctacctgggaaccactctaccagtcaagagatcttccgccaacgcttcaggcatctccgctaccaggagactcctggtccccgggaggccttgagccaactacgagtactctgctgtgagtggctgaggccagagaaacacacgaaggagcagatcctggagttcctggtgctggaacaattcttgaccatcctgcctgaggagctccaatcctgggtgcggggacatcaccctaagagtggagaggaggctgtgactgtgctggaggatttagagaaaggacttgaaccagagccgcaggtcccaggccctgcacatggacctgcacaggaagagccatgggagaagaaggaatctctgggagcagcccaggaagcactgagcatccagctccagcctaaggagacccagcctttcccaaagagtgaacaggtatatttacattttctgtcagttgttacagaagatggcccagagcccaaggacaaaggatcattgccacaaccacccattactgaagtggaatcacaggtgttctcagaaaaacttgctactgacacctctacatttgaagctacctctgagggtaccttagaactgcagcagagaaatcccaaagcggagagactgaggtggtcccctgcccaggaggaaagtttcaggcagatggttgtcatccataaggaaattcccacagggaagaaagaccatgaatgtagtgaatgtggtaaaaccttcatttataactcacatcttgttgtccaccagagagttcattctggagagaaaccctataagtgtagtgactgtgggaaaactttcaaacagagctcaaacctcggtcagcatcagagaattcatacaggagagaaacccttcgaatgtaatgaatgtgggaaggccttcagatggggtgctcatcttgttcagcatcagaggattcactcaggagagaagccctatgagtgtaatgagtgtgggaaggcctttagtcaaagctcatatctaagtcagcatcggagaattcacagtggagagaaaccttttatatgtaaagaatgtgggaaagcttatggatggtgctcagagctcattagacatcggagagttcatgccagaaaagagccttcccattgaattgaaggggagaacgtctccagacagaattctacatcggtctaatctactttaggactggatcccataaaagttataagttccttaagatttttcctgtgtctttcttgattttggaaaaactgtttacttagttctgcctgtagatcatcccttcatgtcctctgatgaagatactgatattaatta

SEQ ID NO: 201849 - DNA, 2384 bp, Homo sapiens
  Payload ID: 19820
  Gene Name: zinc finger protein 232
  ENST ID: ENST00000570486
  CDS Start-End: 670-822
gacggcgcccgcgacgacgacaaggatggggcccatctcttcggagcctaaggatccagcccaggtccagccctgcgcagccgcccaccaagctgccagaagacgagccggacgcccaaggctacgagaggacgattgcagaattgtacaggctagtggttggggaatattttttcgtggaagggaccgtcttccttagctgtggccctctcatcaggtctgggaagaggtaattggaaaatagaactcatggagaagtgttaccacaggccatggacaaggccagaatttccctgacatctgtccgccagcaccgcccttcaggtacaattccacaagagaccccccaaacttgatgaagtcacccgcttacaagggctcactctccacctgcgcaaggactgcaattcccaggggcctccagggcacccggccgctccagtccagtcgtgcaggcggcgcgctctttctcgctccgctcaagtccaggaaccggttcccgggctcccagcctctcggcagcgcccacgcgcctgggccaaagtccgcgaacggaagccggcggcgaggaggattctgggagttggaggccgaggctgcgacctgcgcaggcgcaaacctgcccctggggtgagggctgtaagtggcgcgattcgcggcagcgccccgatggaacctcctggtcctgtgagctgcaagatagaaagcaacatatgcccccaggtggcctccctcaccctggcaatggaaacgaacagccgagcttcaccggacaagactagaaatcgttcctccacccacccagagacaaagcatatttgacttcttcctctactggggcccttgcaagattccagctggtatgagccttctgcagagctagtgcagactaggatggctgtatcactaacagcagctgaaactctggcccttcagggtacacagggacaagagaagatgatgatgatgggaccaaaggaagaggaacagtcttgtgagtatgagaccaggctacctgggaaccactctaccagtcaagagatcttccgccaacgcttcaggcatctccgctaccaggagactcctggtccccgggaggccttgagccaactacgagtactctgctgtgagtggctgaggccagagaaacacacgaaggagcagatcctggagttcctggtgctggaacaattcttgaccatcctgcctgaggagctccaatcctgggtgcggggacatcaccctaagagtggagaggaggctgtgactgtgctggaggatttagagaaaggacttgaaccagagccgcaggtgggaagggggatttggtctgttatgggagccagattgatgaccttcaggctggaccgaggggcagctgtagggggaggtgccaagttcaaacctctcttgggccaggtagagcagttagtatgtgtttctgtgtctgtcttttctgccctcgagccctgaatgagaaagagactctagctcctcttcttcccttgtgctgactctgaggaggctctctaaagtctccttggaagctttggtccaaggagggtcacatctgcaagtgtccaggcaggggacagaaaccacactagtaatttgaagaaaatttaaactgagtggtgcctgatcacctccaggtcccaggccctgcacatggacctgcacaggaagagccatgggagaagaaggaatctctgggagcagcccaggaagcactgagcatccagctccagcctaaggagacccagcctttcccaaagagtgaacaggtatatttacattttctgtcagttgttacagaagatggcccagagcccaaggacaaaggatcattgccacaaccacccattactgaagtggaatcacaggtgttctcagaaaaacttgctactgacacctctacatttgaagctacctctgagggtaccttagaactgcagcagagaaatcccaaagcggagagactgaggtggtcccctgcccaggaggaaagtttcaggcagatggttgtcatccataaggaaattcccacagggaagaaagaccatgaatgtagtgaatgtggtaaaaccttcatttataactcacatcttgttgtccaccagagagttcattctggagagaaaccctataagtgtagtgactgtgggaaaactttcaaacagagctcaaacctcggtcagcatcagagaattcatacaggagagaaacccttcgaatgtaatgaatgtgggaaggccttcagatggggtgctcatcttgttcagcatcagaggattcactcaggagagaagccctatgagtgtaatgagtgtgggaaggcctttagtcaaagctcatatctaagtcagcatcggagaattcacagt

SEQ ID NO: 201850 - DNA, 581 bp, Homo sapiens
  Payload ID: 19820
  Gene Name: zinc finger protein 232
  ENST ID: ENST00000571076
  CDS Start-End: 20-172
gattcgcggcagcgccccgatggaacctcctggtcctgtgagctgcaagatagaaagcaacatatgcccccaggtggcctccctcaccctggcaatggaaacgaacagccgagcttcaccggacaagactagaaatcgttcctccacccacccagagacaaagcatatttgacttcttcctctactggtacacagggacaagagaagatgatgatgatgggaccaaaggaagaggaacagtcttgtgagtatgagaccaggctacctgggaaccactctaccagtcaagagatcttccgccaacgcttcaggcatctccgctaccaggagactcctggtccccgggaggccttgagccaactacgagtactctgctgtgagtggctgaggccagagaaacacacgaaggagcagatcctggagttcctggtgctggaacaattcttgaccatcctgcctgaggagctccaatcctgggtgcggggacatcaccctaagagtggagaggaggctgtgactgtgctggaggatttagagaaaggacttgaaccagagccgcaggtcccaggccctgcacatgg

SEQ ID NO: 201851 - DNA, 1553 bp, Homo sapiens
  Payload ID: 19820
  Gene Name: zinc finger protein 232
  ENST ID: ENST00000573015
  CDS Start-End: 24-176
gcgcgattcgcggcagcgccccgatggaacctcctggtcctgtgagctgcaagatagaaagcaacatatgcccccaggtggcctccctcaccctggcaatggaaacgaacagccgagcttcaccggacaagactagaaatcgttcctccacccacccagagacaaagcatatttgacttcttcctctactggggcccttgcaagattccagctggtatgagccttctgcagagctagtgcagactaggatggctgtatcactaacagcagctgaaactctggcccttcagggtacacagggacaagagaagatgatgatgatgggaccaaaggaagaggaacagtcttgtgagtatgagaccaggctacctgggaaccactctaccagtcaagagatcttccgccaacgcttcaggcatctccgctaccaggagactcctggtccccgggaggccttgagccaactacgagtactctgctgtgagtggctgaggccagagaaacacacgaaggagcagatcctggagttcctggtgctggaacaattcttgaccatcctgcctgaggagctccaatcctgggtgcggggacatcaccctaagagtggagaggaggctgtgactgtgctggaggatttagagaaaggacttgaaccagagccgcaggtcccaggccctgcacatggacctgcacaggaagagccatgggagaagaaggaatctctgggagcagcccaggaagcactgagcatccagctccagcctaaggagacccagcctttcccaaagagtgaacaggtatatttacattttctgtcagttgttacagaagatggcccagagcccaaggacaaaggatcattgccacaaccacccattactgaagtggaatcacaggtgttctcagaaaaacttgctactgacacctctacatttgaagctacctctgagggtaccttagaactgcagcagagaaatcccaaagcggagagactgaggtggtcccctgcccaggaggaaagtttcaggcagatggttgtcatccataaggaaattcccacagggaagaaagaccatgaatgtagtgaatgtggtaaaaccttcatttataactcacatcttgttgtccaccagagagttcattctggagagaaaccctataagtgtagtgactgtgggaaaactttcaaacagagctcaaacctcggtcagcatcagagaattcatacaggagagaaacccttcgaatgtaatgaatgtgggaaggccttcagatggggtgctcatcttgttcagcatcagaggattcactcaggagagaagccctatgagtgtaatgagtgtgggaaggcctttagtcaaagctcatatctaagtcagcatcggagaattcacagtggagagaaaccttttatatgtaaagaatgtgggaaagcttatggatggtgctcagagctcattagacatcggagagttcatgccagaaaagagccttcccattgaattgaaggggagaacgtctccagacagaattctacatcggtctaatctact

SEQ ID NO: 201852 - DNA, 1610 bp, Homo sapiens
  Payload ID: 19820
  Gene Name: zinc finger protein 232
  ENST ID: ENST00000575898
  CDS Start-End: 20-1327
gattcgcggcagcgccccgatggaacctcctggtcctgtgagggggcccttgcaagattccagctggtatgagccttctgcagagctagtgcagactaggatggctgtatcactaacagcagctgaaactctggcccttcagggtacacagggacaagagaagatgatgatgatgggaccaaaggaagaggaacagtcttgtgagtatgagaccaggctacctgggaaccactctaccagtcaagagatcttccgccaacgcttcaggcatctccgctaccaggagactcctggtccccgggaggccttgagccaactacgagtactctgctgtgagtggctgaggccagagaaacacacgaaggagcagatcctggagttcctggtgctggaacaattcttgaccatcctgcctgaggagctccaatcctgggtgcggggacatcaccctaagagtggagaggaggctgtgactgtgctggaggatttagagaaaggacttgaaccagagccgcaggtcccaggccctgcacatggacctgcacaggaagagccatgggagaagaaggaatctctgggagcagcccaggaagcactgagcatccagctccagcctaaggagacccagcctttcccaaagagtgttgttacagaagatggcccagagcccaaggacaaaggatcattgccacaaccacccattactgaagtggaatcacaggtgttctcagaaaaacttgctactgacacctctacatttgaagctacctctgagggtaccttagaactgcagcagagaaatcccaaagcggagagactgaggtggtcccctgcccaggaggaaagtttcaggcagatggttgtcatccataaggaaattcccacagggaagaaagaccatgaatgtagtgaatgtggtaaaaccttcatttataactcacatcttgttgtccaccagagagttcattctggagagaaaccctataagtgtagtgactgtgggaaaactttcaaacagagctcaaacctcggtcagcatcagagaattcatacaggagagaaacccttcgaatgtaatgaatgtgggaaggccttcagatggggtgctcatcttgttcagcatcagaggattcactcaggagagaagccctatgagtgtaatgagtgtgggaaggcctttagtcaaagctcatatctaagtcagcatcggagaattcacagtggagagaaaccttttatatgtaaagaatgtgggaaagcttatggatggtgctcagagctcattagacatcggagagttcatgccagaaaagagccttcccattgaattgaaggggagaacgtctccagacagaattctacatcggtctaatctactttaggactggatcccataaaagttataagttccttaagatttttcctgtgtctttcttgattttggaaaaactgtttacttagttctgcctgtagatcatcccttcatgtcctctgatgaagatactgatattaattaggatgctttggatgcaagtagtagccaagttgttttgcttctttccagcatgatctgcctagtttgcccaccaataatgtctacctcattagaa

SEQ ID NO: 201853 - DNA, 2784 bp, Homo sapiens
  Payload ID: 19821
  Gene Name: zinc finger protein 233
  Uniprot ID: A6NK53
  ENST ID: ENST00000391958
  CDS Start-End: 128-2140
ctatcccctctgggaggtgagtcagcgcggaacctctgcatctacggcgagctttcctggcctgggcgttggactcgcagttctgccttcccaggaccctgcccttccccagaaggagcaggagaaaatgaccaagtttcaggagatggtgacattcaaggatgtggctgtggtcttcaccagggaggagctggggttgctggaccttgcccagagaaagctgtaccaagatgtgatgctggagaacttcaggaacctgctgtcagtgggctatcaacccttcaaactagatgtgatattacagttgggaaaagaagacaagcttcggatgatggagacagaaatccaaggagatgggtgttcaggacacaagaatcaaaatgagatagatacccttcaagaagtaagattaagattcctttcatatgaagaccttatatgctggcaaatatgggaacaatttacaagtaaattaaccagtaatcaagacctaataataaatcttcaaggcaagaggtccaagttgctaaaacaaggtgattccccctgtcaggtgtggacaggagaatctagtcaggtctctgaagatgagaactatgtaataaagctacaaggggagagttcaaatagcataaaaaatcaagagcttccattgaggaccacctgggatttctggaggaaaatgtatctgagagaaccacagaattatcagagtaggtgtcagcaaattgatgtaaaaaataagctctgtaaatgtgatcattgtgttaggcaaagaattgctcatcaacatgatgatcatggagtacacaaaagagagaaagcttttagccacaataattgtggaaaagactgtgtgaaggaatcatcccagcatagcataatccaatcaggagagcaaacctctgatgaaaatggaaaaggcttaagtgttggctctaatcttgaacttcaccagcaactacacttaagagacaagcctcatgtaaatgttgagtacgggaagggcataggttacagctcagggcttcccaggcatcagtgtttccacataggagagaaatgctataggaatggtgacagtggtgagggcttcagtcagggctcacatctgcaacctcatcagagagtcagcacaggagagaacctctacagatgtcaggtatatgcccggagctccaaccagaactcctgtcttccctctcatgagcttactcacccaggagagaagttgtgtacatgtggcaggtgtgggaagggcttccatcatagcttagattttgacattcactgtgtagacagtgctggagagagagcctgtaaatgtgatgtatatgataaaggcttcagtcagacatcacaacttcaagcccatcagagaggtcactctagagacaagacatacaaatgggaagtaagtgacaggatatttaataggaattctggtcttcaccagagagttcacactggagagaaaccatataaatgtgaggtatgtgataagggcttcagtaaggcctcaaatcttcaagcccatcagagaatccacactggagagaaaccctacaaatgtgatgtgtgtgataagaacttcagccgtaattcccaccttcaggcccatcagagagtccatacaggagagaaaccctacaaatgtgacacatgtgggaaggacttcagtcagatctctcatcttcaggcccatcagagagttcacaaaggagagaagccatacaaatgtgagacatgtgggaagggctttagtcagagttcgcatctccaagaccatcagcaagtccatactggagagaatccctacaaatgtgatgtgtgtgggaaaggcttcagttggagttcacatcttcaagcccatcagagagtccacacaggagagaaaccatacaaatgtgaagaatgtaggaaaggcttcatctggaactcatatcttcatgttcatcagaggatccacacgggagagaaaccctataaatgtggcatgtgtggtaagagcttcagtcagacttcacatcttcaagcccatcagagagtccatactggagagaaaccatacaaatgttttgtgtgtggtaagggctttagtaagagttcgttgtcttcagattcatcagagagtccatgatggtgatgaatctattaatcatgatgagtgtgataggggtgctcttcaagacttagacttcccattttcctcagaaaatccacacagcacagaatatttataaaatgtcatgttttaagaattcatgagctgagtttttatagttatctgaattccattgaagaaaacctatttttgtatgaatatgaccagtttcaagcagagcccaaaatgtcacagttgtcaagagaacacacaacagagaaaccctataaagaatgatacaatatgtttcaatcagaaccttcacatccaataagcaatatgcaggagtgaagccttcaaaatgataagtaaggtcagaatttagcaaaagtataatgagggacatgacaaaatctgtgtccactagaatctaagctccatgcaggaacattgtttactgctgcatgatcgtgaccttgaacaagtacctaagaaatagtggcttccctggaattgtttaacttgataggaaaaatctatcatatataggacatatatttgaatattttagtgagctcagccccaattcgtcattataattgtactgggaaaaggattcttgcaagaagccttaaaatgaattcaaggaaatgacatttaattaaaacacataaaaccaa

SEQ ID NO: 201854 - DNA, 528 bp, Homo sapiens
  Payload ID: 19821
  Gene Name: zinc finger protein 233
  ENST ID: ENST00000588489
  CDS Start-End: 181-528
gggcgaagcagccgtcatctatcccctctgggaggtgagtcagcgcggaacctctgcatctacggcgagctttcctggcctgggcgttggactcgcaggtgcctgccctcgctctcagtgaagggaagtcgcagagggcggggacgacggtttgcttgccctttgtttttagggcggtgcatgggtctccaagttgggaatggctcctggtcgcacgtttggtttgaaggtctcccgggcgctcaagttccctcgccttccccaccttccacacgctctgctgtcttctggcaatataatcttgttctgccttcccaggaccctgcccttccccagaaggagcaggagaaaatgaccaagtttcaggagatggtgacattcaaggatgtggctgtggtcttcaccagggaggagctggggttgctggaccttgcccagagaaagctgtaccaagatgtgatgctggagaacttcaggaacctgctgtcagtgggctatcaacccttcaaactagatgtgatattacag

SEQ ID NO: 201855 - DNA, 1120 bp, Homo sapiens
  Payload ID: 19821
  Gene Name: zinc finger protein 233
  ENST ID: ENST00000589522
  CDS Start-End: 49-300
gttctgccttcccaggaccctgcccttccccagaaggagcaggagaaaatgaccaagtttcaggagatggtgacattcaaggatgtggctgtggtcttcaccagggaggagctggggttgctggaccttgcccagagaaagctgtaccaagatgtgatgctggagaacttcaggaacctgctgtcagtgggctatcaacccttcaaactagatgtgatattacagttgggaaaagaagacaagcttcggatgatggagacagaaatccaaggagatgggtgttcaggtctcactctgtgacctaggctgaagtggtggtgcaatcatggtacactgcagcctcgacctcccaggctcaatcgatcttctcacctcagcctcctgagtagctgggatgggactacaggcacttgccactatgctggactaattttaaaactatgtatatatacatgtttttttttttttggtagagatgaggtctcaccatattacccaggttggtctcaaactcctgagctcaagcaatcctcccacttcagcctcccaaagtgttaggattacaggcatgagccactgtgcccggcatacatgtatttctttctacctgaagccttttgctcttctgtctgcctgggatgttcttacctcatacatcctcttggctcccagcctacttcctttatgtctggtcagatgtcatctcatcacagaaacctgcttttttttttcttttagacggagtcttgctctgtcgccaggctggagtgctatggcgcgatcttggctcactgcaacctctgactccctggaaaactgctttgactaccctgtttaaaatacctatccttggctgggcgtgatggctcatccctgtaatctcagcactttgagaggccaaggtggcaggatcactcgaggccaggagtttaagaccagcctggacaacacagtgagaccgcacctctataaaaaaatttaaaaaattagctcacagctataactgtgccactgcactgtagcctgggcgacagagcaagaccctgtctcaaaaatacatacatacatacatacatacatacatacatacatttaattaaattaaatacccatctcttta

SEQ ID NO: 201856 - DNA, 574 bp, Homo sapiens
  Payload ID: 19821
  Gene Name: zinc finger protein 233
  ENST ID: ENST00000590668
  CDS Start-End: 87-574
gtgtacttccgctgcaggagggcgaagcagccgtcatctatcccctctgggaggaccctgcccttccccagaaggagcaggagaaaatgaccaagtttcaggagatggtgacattcaaggatgtggctgtggtcttcaccagggaggagctggggttgctggaccttgcccagagaaagctgtaccaagatgtgatgctggagaacttcaggaacctgctgtcagtgggctatcaacccttcaaactagatgtgatattacagttgggaaaagaagacaagcttcggatgatggagacagaaatccaaggagatgggtgttcaggacacaagaatcaaaatgagatagatacccttcaagaagtaagattaagattcctttcatatgaagaccttatatgctggcaaatatgggaacaatttacaagtaaattaaccagtaatcaagacctaataataaatcttcaaggcaagaggtccaagttgctaaaacaaggtgattccccctgtcaggtgtggacaggagaatctagtcaggtctctgaagatgagaactatgtaataaagctacaagg

SEQ ID NO: 201857 - DNA, 2938 bp, Homo sapiens
  Payload ID: 19821
  Gene Name: zinc finger protein 233
  ENST ID: ENST00000592581
  CDS Start-End: 107-529
aaccttgtgtacttccgctgcaggagggcgaagcagccgtcatctatcccctctgggagttctgccttcccaggaccctgcccttccccagaaggagcaggagaaaatgaccaagtttcaggagatggtgacattcaaggatgtggctgtggtcttcaccagggaggagctggggttgctggaccttgcccagagaaagctgtaccaagatgtgatgctggagaacttcaggaacctgctgtcagtgggctatcaacccttcaaactagatgtgatattacagttgggaaaagaagacaagcttcggatgatggagacagaaatccaaggagatgggtgttcaggtgagaaccatggagctctgagtctttgcggggtacagcctagtcctctcctcctcaccacctcctcagccaccagcctggcccaagaccccagaattcatcgccctggtttactgcagcagcttgcacatgaccttcctccttctacctccctccagtccattctccacatagccagatcatgacacaagaatcaaaatgagatagatacccttcaagaagtaagattaagattcctttcatatgaagaccttatatgctggcaaatatgggaacaatttacaagtaaattaaccagtaatcaagacctaataataaatcttcaaggcaagaggtccaagttgctaaaacaaggtgattccccctgtcaggtgtggacaggagaatctagtcaggtctctgaagatgagaactatgtaataaagctacaaggggagagttcaaatagcataaaaaatcaagagcttccattgaggaccacctgggatttctggaggaaaatgtatctgagagaaccacagaattatcagagtaggtgtcagcaaattgatgtaaaaaataagctctgtaaatgtgatcattgtgttaggcaaagaattgctcatcaacatgatgatcatggagtacacaaaagagagaaagcttttagccacaataattgtggaaaagactgtgtgaaggaatcatcccagcatagcataatccaatcaggagagcaaacctctgatgaaaatggaaaaggcttaagtgttggctctaatcttgaacttcaccagcaactacacttaagagacaagcctcatgtaaatgttgagtacgggaagggcataggttacagctcagggcttcccaggcatcagtgtttccacataggagagaaatgctataggaatggtgacagtggtgagggcttcagtcagggctcacatctgcaacctcatcagagagtcagcacaggagagaacctctacagatgtcaggtatatgcccggagctccaaccagaactcctgtcttccctctcatgagcttactcacccaggagagaagttgtgtacatgtggcaggtgtgggaagggcttccatcatagcttagattttgacattcactgtgtagacagtgctggagagagagcctgtaaatgtgatgtatatgataaaggcttcagtcagacatcacaacttcaagcccatcagagaggtcactctagagacaagacatacaaatgggaagtaagtgacaggatatttaataggaattctggtcttcaccagagagttcacactggagagaaaccatataaatgtgaggtatgtgataagggcttcagtaaggcctcaaatcttcaagcccatcagagaatccacactggagagaaaccctacaaatgtgatgtgtgtgataagaacttcagccgtaattcccaccttcaggcccatcagagagtccatacaggagagaaaccctacaaatgtgacacatgtgggaaggacttcagtcagatctctcatcttcaggcccatcagagagttcacaaaggagagaagccatacaaatgtgagacatgtgggaagggctttagtcagagttcgcatctccaagaccatcagcaagtccatactggagagaatccctacaaatgtgatgtgtgtgggaaaggcttcagttggagttcacatcttcaagcccatcagagagtccacacaggagagaaaccatacaaatgtgaagaatgtaggaaaggcttcatctggaactcatatcttcatgttcatcagaggatccacacgggagagaaaccctataaatgtggcatgtgtggtaagagcttcagtcagacttcacatcttcaagcccatcagagagtccatactggagagaaaccatacaaatgttttgtgtgtggtaagggctttagtaagagttcgttgtcttcagattcatcagagagtccatgatggtgatgaatctattaatcatgatgagtgtgataggggtgctcttcaagacttagacttcccattttcctcagaaaatccacacagcacagaatatttataaaatgtcatgttttaagaattcatgagctgagtttttatagttatctgaattccattgaagaaaacctatttttgtatgaatatgaccagtttcaagcagagcccaaaatgtcacagttgtcaagagaacacacaacagagaaaccctataaagaatgatacaatatgtttcaatcagaaccttcacatccaataagcaatatgcaggagtgaagccttcaaaatgataagtaaggtcagaatttagcaaaagtataatgagggacatgacaaaatctgtgtccactagaatctaagctccatgcaggaacattgtttactgctgcatgatcgtgaccttgaacaagtacctaagaaatagtggcttccctggaattgtttaacttgataggaaaaatctatcatatataggacatatatttgaatattttagtgagctcagccccaattcgtcattataattgtactgggaaaaggattcttgcaagaagccttaaaatgaattcaaggaaatgacatttaattaaaacacat

SEQ ID NO: 201858 - DNA, 4551 bp, Homo sapiens
  Payload ID: 19822
  Gene Name: zinc finger protein 234
  Uniprot ID: Q14588
  ENST ID: ENST00000426739
  CDS Start-End: 259-2361
acattccacggtagtttcttccagttccgcgactcgcgggcccctcctaatgtcagggacttaagattggggctcgctgggacctggtggtccggttatgggaaaagaagcctcgtgggagagcagagcctgaaaaaggactgcgcggactgacttcttggctactgaaagcaaagctccactgttccaggcacgattctgccttctctcaaatggcataactcaggactctgcaaattcccagaaacaggaggaaaaatgaccacattcaaggagggactgaccttcaaggatgtggctgtggtcttcactgaggaggagctggggctgctggaccctgtccagaggaatctgtaccaagatgtgatgctggagaacttcaggaacctgctgtcagtggggcatcaccccttcaaacatgatgtattccttttagaaaaggaaaaaaagcttgatataatgaagacagcaactcaaagaaaagggaaatcagcagacaagatccaaagtgaggtggagactgttccagaagcaggacgacatgaagagctttactgggggcaaatctggaaacagattgcaagtgatttaatcaagtatgaagactctatgataagtatttctcggttccccagacaaggtgatttgtcctgccaggttagggcaggactatatacaactcacacaggacagaaattttaccaatgtgatgagtacaaaaaatccttcactgatgtcttcaactttgatcttcatcaacagttacactcaggagagaagtctcatacatgtgatgagtgtggaaaaagcttctgttacatctcagcccttcatattcatcaaagagtccacatgggagagaaatgctataagtgtgacgtgtgtggtaaggaatttagtcagagctcacatcttcaaactcatcagagagtccacactgtagagaaaccattcaaatgtgtggaatgtgggaaaggcttcagtcgtagatcaacacttactgtacattgcaaattacactcaggagagaaaccttacaattgtgaggaatgtggaagggccttcatacatgcttcccatcttcaggaacatcagagaattcatactggggagaaaccattcaaatgtgatacatgtggtaagaacttccgtcgtagatcagcacttaataatcattgcatggtccacacaggagagaaaccatacaaatgtgaggactgtggtaagtgtttcacttgtagctcaaaccttcgtatccatcaaagggtccacacaggagagaaaccttacaagtgtgaagaatgtggtaagtgctttattcagccttcacaatttcaggcccatcggagaatccacactggagagaaaccatacgtatgtaaagtgtgtggtaagggtttcatttacagttcaagttttcaggcccatcagggagtccacactggagagaagccatacaaatgcaatgagtgtgggaagagcttcagaatgaaaattcattatcaagtgcatctggtagtccacacaggggaaaaaccctataaatgtgaagtatgtggtaaagccttccgtcagagttcatatcttaaaatccatctgaaagcacatagtgtacagaaaccttttaagtgtgaagagtgtgggcagggcttcaatcagagctcacgacttcagattcaccagctgatccataccggtgagaaaccatacaaatgtgaagagtgcggaaagggatttagtcgtagagcagatcttaaaattcattgtaggatccacacaggggagaaaccatataattgtgaggagtgtgggaaggtcttcagtcaggcctcgcatcttctaacccatcagagagttcacagtggggaaaaaccatttaaatgtgaagagtgtgggaagagcttcagtcggagtgcacaccttcaagcccatcaaaaagtccacactggagaaaagccatacaaatgtggggagtgtggaaagggcttcaagtggagcttgaaccttgacatgcatcagagggtgcacacaggagaaaaaccctatacatgtggggagtgtgggaagcacttcagtcaggcctcaagtctccaacttcatcagagtgtccacacaggagagaaaccatacaaatgtgatgtatgtggtaaagtcttcagtcggtcttcacaattacagtatcataggcgagttcacactggggaaaaaccttacaaatgtgagatatgtggtaagaggttcagctggcgatcaaatcttgtaagtcatcacaaaattcatgctgctggtacattttatgaaaatgatgagaatagtaagaacatcagagagttgtcagagggaggaagttctacaaggtgattaaaaaaaaaaaaacagaactcatgtacaacctgaatgcttgtaattagatttcataggagggaaaaattttctttatcaacctctttgaatttatttgatttgtaacgctccacatttccacctagacttttttttgttttttattttttgttttgaaacagaatctcgctctgttgcccatgctggatgcagtggtgctatctcagctcactgtaacctccacttcccgggttcaagtgattctcctgcctcagtggattacaggtgcacaccaccacgcctggctaatttttgtatttttagtagagatggagtttcaccatactggccaggctggtctcaaactcctgacctcatgtgatccacccacctcggcctcccaaagtgctgggattacaggcatgagccaccgcccctggcctccatctagactttgaaatgattgccttctaattacagtagcattctcttatttaaaatatttgttttatttaagtcagtgtttaagcaatagctcagcatatcccagtggtccagtgaccacacagctgagaacccttgttaagtggtacagtaaagcattctgtcaaaactttgacatttatgacatgttacctaggaaataggacttagaaaatgagtttgacctgggctttaaaaaagtatactgatgaaggtgccagaattgatgtccattagactgtaagctccatgggggcaggaactttgctaccgaatctatacaaccttaacattgactagtgcttgtaggtgtgctcaatacttgtttgttaactgaatcaaaaggagtaaatgcacaatatttgaacattgtatccaaaggaagaaacctgcgaaataaaattatttgcagaaatgaacatttgttgaaatgcagaaaaccactggatactgcagcctacaatattaatatgatattactcttttacagttgacacctgtcctctctgtagtctcttctctcaaatttggttcttattgagagcctgtctagtttcccaaaggttttataaaacataagttgaagtacctttatttttaattttatttttgagacaggacctcgctctgtcaccgaggctggagtgcagtggcataatcatggctcactgcagcctcgtcctcccaggctccatccatctgcccatctctccctctgagtagctgggaccacgggcacgtgccaccacacccagctaatttttgtatgtttggtagagaaagggtttcaccacattgcccaggctggtcttgaacacctgagctcaagcaatccaacctccttggcctcccagtgttaaattacaggcgtaagccaccacacccggccaagttgaagtatattttgtgatttttctgacagtgcagactgaaaaaaatttaattaacctgacaagagtttactgaatatcacacaattgagtttttaatccattaatgttaaggcaggggtttactctaacacttttaaagtgtcagaagtagttgccaatgccaaatttttatcagcccccttgaatttatttgatttctgactttccacatttccatccagactttgacatgattgccgtctaataactgtagcattctcttattaaaacttctggctgggtgtggtggctcatgcctgtaaccccagcactttaggaggccaaggcaggtgaatcacctgaggtcaggacttagagaccagcctgaccaacatggtgaaaccccatctctactaaatacaaaaattagctgggcatggtggcaggcgcctgtaatcccagctactcaggaggctgaggcaggaggattgcttgaacccgggaggcggaagttgcagtgagccgagactgcgccattgcactccagcttgggtgacagagcaagactccgtctcaaaaaaaaaaaaaaaaacttctgaggtaggggctgtaccatatttttgccccacacccattaagcgaataccaaaaacaacttgtggaaatttgataattttatcaaatttattatttgggcaggattggcatttaccatgcttttccctattgctggcagtaaaacatgggtttaaggaagagtgtttttcagaatttacactgtatatctctgatttggaagttatataattggaatttatgattatgagattaaaataccaaaaagactaagtaa

SEQ ID NO: 201859 - DNA, 2292 bp, Homo sapiens
  Payload ID: 19822
  Gene Name: zinc finger protein 234
  Uniprot ID: Q14588
  ENST ID: ENST00000592437
  CDS Start-End: 190-2292
ggagtcgcgggcacttccgctccagggaagagggggcgattgtcacggcacattccacgcctgaaaaaggactgcgcggactgacttcttggctactgaaagcaaagctccactgttccaggcacgattctgccttctctcaaatggcataactcaggactctgcaaattcccagaaacaggaggaaaaatgaccacattcaaggagggactgaccttcaaggatgtggctgtggtcttcactgaggaggagctggggctgctggaccctgtccagaggaatctgtaccaagatgtgatgctggagaacttcaggaacctgctgtcagtggggcatcaccccttcaaacatgatgtattccttttagaaaaggaaaaaaagcttgatataatgaagacagcaactcaaagaaaagggaaatcagcagacaagatccaaagtgaggtggagactgttccagaagcaggacgacatgaagagctttactgggggcaaatctggaaacagattgcaagtgatttaatcaagtatgaagactctatgataagtatttctcggttccccagacaaggtgatttgtcctgccaggttagggcaggactatatacaactcacacaggacagaaattttaccaatgtgatgagtacaaaaaatccttcactgatgtcttcaactttgatcttcatcaacagttacactcaggagagaagtctcatacatgtgatgagtgtggaaaaagcttctgttacatctcagcccttcatattcatcaaagagtccacatgggagagaaatgctataagtgtgacgtgtgtggtaaggaatttagtcagagctcacatcttcaaactcatcagagagtccacactgtagagaaaccattcaaatgtgtggaatgtgggaaaggcttcagtcgtagatcaacacttactgtacattgcaaattacactcaggagagaaaccttacaattgtgaggaatgtggaagggccttcatacatgcttcccatcttcaggaacatcagagaattcatactggggagaaaccattcaaatgtgatacatgtggtaagaacttccgtcgtagatcagcacttaataatcattgcatggtccacacaggagagaaaccatacaaatgtgaggactgtggtaagtgtttcacttgtagctcaaaccttcgtatccatcaaagggtccacacaggagagaaaccttacaagtgtgaagaatgtggtaagtgctttattcagccttcacaatttcaggcccatcggagaatccacactggagagaaaccatacgtatgtaaagtgtgtggtaagggtttcatttacagttcaagttttcaggcccatcagggagtccacactggagagaagccatacaaatgcaatgagtgtgggaagagcttcagaatgaaaattcattatcaagtgcatctggtagtccacacaggggaaaaaccctataaatgtgaagtatgtggtaaagccttccgtcagagttcatatcttaaaatccatctgaaagcacatagtgtacagaaaccttttaagtgtgaagagtgtgggcagggcttcaatcagagctcacgacttcagattcaccagctgatccataccggtgagaaaccatacaaatgtgaagagtgcggaaagggatttagtcgtagagcagatcttaaaattcattgtaggatccacacaggggagaaaccatataattgtgaggagtgtgggaaggtcttcagtcaggcctcgcatcttctaacccatcagagagttcacagtggggaaaaaccatttaaatgtgaagagtgtgggaagagcttcagtcggagtgcacaccttcaagcccatcaaaaagtccacactggagaaaagccatacaaatgtggggagtgtggaaagggcttcaagtggagcttgaaccttgacatgcatcagagggtgcacacaggagaaaaaccctatacatgtggggagtgtgggaagcacttcagtcaggcctcaagtctccaacttcatcagagtgtccacacaggagagaaaccatacaaatgtgatgtatgtggtaaagtcttcagtcggtcttcacaattacagtatcataggcgagttcacactggggaaaaaccttacaaatgtgagatatgtggtaagaggttcagctggcgatcaaatcttgtaagtcatcacaaaattcatgctgctggtacattttatgaaaatgatgagaatagtaagaacatcagagagttgtcagagggaggaagttctacaaggtga

SEQ ID NO: 201860 - DNA, 663 bp, Homo sapiens
  Payload ID: 19822
  Gene Name: zinc finger protein 234
  ENST ID: ENST00000590795
  CDS Start-End: 223-384
cgggcccctcctaatgtcagggacttaagattggggctcgctgggacctggtggtccggttatgggaaaagaagcctcgtgggagagcagagcctgaaaaaggactgcgcggactgacttcttggctactgaaagcaaagctccactgttccaggcacgattctgccttctctcaaatggcataactcaggactctgcaaattcccagaaacaggaggaaaaatgaccacattcaaggagggactgaccttcaaggatgtggctgtggtcttcactgaggaggagctggggctgctggaccctgtccagaggaatctgtaccaagatgtgatgctggagaacttcaggaacctgctgtcagtgggaccaatcaggttgaagtaaagatatatagagaccggacttacagtttgaaaaaaagaaagtagagtgcccactggaacccactggagcccactgtacctatgcccacaaaaggagaagaaaccttttcctgggagcccgctgactatacagaggacaaaggcattcttatgccaggccttgctcctttatctgagcgagctggagggcatcaccccttcaaacatgatgtattccttttagaaaaggaaaaaaagcttgatataatgaagacagcaactcaaagaaaagggaaatcag

SEQ ID NO: 201861 - DNA, 3188 bp, Homo sapiens
  Payload ID: 19823
  Gene Name: zinc finger protein 235
  Uniprot ID: Q14590
  ENST ID: ENST00000291182
  CDS Start-End: 104-2320
ggaggcacttccgctccaggaaggcgaggtcggatctgagatatctcccagggaggttcacttccccggaactctgccttttcccagaaggaggaggggaaaaatgaccaagttccaggaggcagtgacattcaaggatgtggctgtggccttcactgaggaggagctggggctgctggactctgcccagaggaagctgtaccgagatgtgatgctggagaactttaggaacctggtttcagtgggacatcagtccttcaaaccagatatgatatcccagttggagagggaagaaaagctttggatgaaggagcttcaaacccaaagaggtaagcattcaggagacaggaatcaaaatgagatggcaactcttcacaaagcaggattaaggtgcttttcactgggagagctttcatgctggcaaatcaagagacacattgcgagcaaattagccagaagtcaagactccatgataaatattgaaggaaagagctctcagttccccaagcaccatgattccccctgtcaagtgggagcaggagaatctattcaagcttctgtggatgacaactgtctagtgaatcacataggggatcattccagtatcattgaaaatcaagaatttccaactgggaaagttccgaattcttggagtaaaatatatctgaatgagacacagaattatcagagaagttgtaagcagactcagatgaaaaacaaactatgtatatttgctccatatgttgacattttcagttgtatttcacaccaccatgatgataatatagtgcacaaaagagataaagttcatagcaatagtgattgtggtaaagataccctaaaggtatcacctcttacccagcgtagtattcacacaggacagaaaacctaccagggtaatgaatgtgaagaagccttcaatgatagctccagtcttgaacttcataaacaggtacacttgggaaagaagtctccagcgtgtagtacacatgagaaggacaccagttatagctcaggtattcctgttcaacaaagtgttcgtactgggaaaaaacgctattggtgtcatgaatgtggtaaaggtttcagtcagagctcaaatctgcaaactcatcagagagtccacacaggggagaaaccctatacatgccacgagtgtggtaagagctttaatcagagctcacatctttatgctcatttgcctattcacacaggagagaagccctatagatgtgacagttgtgggaagggcttcagtcgtagcacagatcttaacattcattgcagagttcacactggagagaaaccttataaatgtgaggtgtgtgggaagggcttcactcagagatcacatcttcaggcccatgaaagaattcacactggagagaaaccatataaatgtggggattgtggtaaacgctttagttgtagctcaaatcttcatacccatcagagagtccacactgaagaaaaaccatacaaatgtgatgagtgtggtaagtgctttagtttgagctttaatcttcatagtcatcaacgagtccacacaggagaaaaaccatataaatgtgaagagtgtggtaagggttttagttcagcctcaagtttccagagccatcagagggtccatacaggagagaaaccatttcgatgcaacgtgtgtgggaaaggcttcagtcagagttcatactttcaagcacatcagagagtccacactggagaaaaaccatacaaatgtgaagtgtgtgggaagcgcttcaattggagcttgaatcttcacaatcatcagagagtccacaccggagagaaaccctacaaatgtgaagagtgtggtaagggtttcagtcaggcttcaaatcttcaagcccatcagagcgtccacactggggaaaaaccattcaagtgtgatgcatgtcagaagcgattcagtcaggcctcacaccttcaagcccatcagagagtccacaccggagagaaaccatataaatgtgacacttgtggtaaggccttcagccagaggtcaaatcttcaagtccatcagataattcacactggagagaaaccatttaaatgtgaggaatgtgggaaagaattcagttggagtgctggtctcagtgcccatcagagggtccacacaggagagaaaccctatacgtgtcagcagtgtgggaagggcttcagtcaggcctcacattttcacacacaccagagagtccacactggagagaggccttacatatgtgatgtctgttgtaagggcttcagtcagaggtcacatctcatctaccatcagagagtccacactggagggaatctgtagaaatgagaggtgtggttcagccttcagttagagctcacatctttgtctccgttgggaagtccatgctgatgattgtgaaaagttcctttaaaactagaagcttcaaagaatcttgacaggaaagaagtctctcaaatgctgtgttttagacttggttaggacatgaattctttacaaacgtcatatttcacagatgcgagaaaactttgttctgtaaatatgatcagtgtttatatcagagtaccaggtgtcccggttctcaagatgtaacacagcagaaaagtcttgtcggagtctgcacaggagagaggccttcctttaacaaaagtatgattgacagaaaaaatggatgtcaactaaaatgtaacctctatgtaaggaggtgtttttcaccactctatctctaccatgtagaattgtgcttggctcataatagggcccagcaattactgaagaaagtgaagaaaatacctataattaggacaaatacttgaaaattctagtctgttttctactctaaatttatattaatttatattcaaaaggaatcctgcaagtagccttaataacgttagtttcagtaagtactgaaaagtatataatactgccatccatactaacacaaatttggaaaaaagacatgaatggctcccatccttcagccttagttctttgtacagtgtatcatcagttgtgtacagtatgatttttagtgtcagtttatagactgaacaatactgtttttatctaatgtgaccctgcaatttacatgattagaatttttggacactaagctgtactgtaactctgaaagtgttaaaagtagttactgatgacaaaaagtttcttagtaaacttgaattgttaa

SEQ ID NO: 201862 - DNA, 616 bp, Homo sapiens
  Payload ID: 19823
  Gene Name: zinc finger protein 235
  ENST ID: ENST00000592844
  CDS Start-End: 29-274
gccttttcccagaaggaggaggggaaaaatgaccaagttccaggaggcagtgacattcaaggatgtggctgtggccttcactgaggaggagctggggctgctggactctgcccagaggaagctgtaccgagatgtgatgctggagaactttaggaacctggtttcagtgggacatcagtccttcaaaccagatatgatatcccagttggagagggaagaaaagctttggatgaaggagcttcaaacccaaagaggtaagcattcagaaacctgaatagagtcaccttgtaataactgggaactcttcccctgaagacacctggttaattcacttgcaacctgtttccagatttgccagcaggacagctcttgatttgaaagggttttgcaactgcagcactactattttggactggccaattctctgttgggggcactgtcctgtgcactgtaggagattttgcagaattcctggatactacccacaaaatgccaatagcacccctctgtcaggtgtgacaaccatttccagacattgccaaatatcttctgggggcgaaatcacccatggttgagaaccagcaatttaaaaggacagaattttgcctgagcagaa

SEQ ID NO: 201863 - DNA, 946 bp, Homo sapiens
  Payload ID: 19823
  Gene Name: zinc finger protein 235
  ENST ID: ENST00000591609
  CDS Start-End: 62-946
gagtcagctccgggtctccaagacttctccgagccctctttgcctaggcgtggggccagcaatgaacccgtccttggcttggggaagagaagccgcggccagcgctggagggcggggttgggaggctgcgggagtttgcgtcccctcggcagaacctcttgcgtgggaggcgggctcgcgtcgtccttcgaggttgagggtctgctgccctagccgtcctcacgcacctaccagccagtcctgcctgctcctcgcagtaaaatattgggttcacttccccggaactctgccttttcccagaaggaggaggggaaaaatgaccaagttccaggaggcagtgacattcaaggatgtggctgtggccttcactgaggaggagctggggctgctggactctgcccagaggaagctgtaccgagatgtgatgctggagaactttaggaacctggtttcagtgggacatcagtccttcaaaccagatatgatatcccagttggagagggaagaaaagctttggatgaaggagcttcaaacccaaagaggtaagcattcaggagacaggaatcaaaatgagatggcaactcttcacaaagcaggattaaggtgcttttcactgggagagctttcatgctggcaaatcaagagacacattgcgagcaaattagccagaagtcaagactccatgataaatattgaaggaaagagctctcagttccccaagcaccatgattccccctgtcaagtgggagcaggagaatctattcaagcttctgtggatgacaactgtctagtgaatcacataggggatcattccagtatcattgaaaatcaagaatttccaactgggaaagttccgaattcttggagtaaaatatatctgaatgagacacagaattatcagagaagttgtaagcagactcagatgaaaaacaaactatgtatattt

SEQ ID NO: 201864 - DNA, 532 bp, Homo sapiens
  Payload ID: 19823
  Gene Name: zinc finger protein 235
  ENST ID: ENST00000589248
  CDS Start-End: 125-388
gtccacgaaccgtgggcactcggaggcacttccgctccaggaaggcgaggtcggatctgagatatctcccagggaggttcacttccccggaactctgccttttcccagaaggaggaggggaaaaatgaccaagttccaggaggcagtgacattcaaggatgtggctgtggccttcactgaggaggagctggggctgctggactctgcccagaggaagctgtaccgagatgtgatgctggagaactttaggaacctggtttcagtgggacatcagtccttcaaaccagatatgatatcccagttggagagggaagaaaagctttggatgaaggagcttcaaacccaaagaggtaagcattcagggtttctctgttgtgtgttctcttgacaactgtgacattttgggctctgcttgaaactggtcatattcatacaaaaataggttttcttcaatggaattcagataactataaaaactcagctcatgaattcttaaaacatgacattttataaatattctgtgctgtgtgga

SEQ ID NO: 201865 - DNA, 955 bp, Homo sapiens
  Payload ID: 19823
  Gene Name: zinc finger protein 235
  ENST ID: ENST00000589799
  CDS Start-End: 98-349
acttccgctccaggaaggcgaggtcggatctgagatatctcccagggaggttcacttccccggaactctgccttttcccagaaggaggaggggaaaaatgaccaagttccaggaggcagtgacattcaaggatgtggctgtggccttcactgaggaggagctggggctgctggactctgcccagaggaagctgtaccgagatgtgatgctggagaactttaggaacctggtttcagtgggacatcagtccttcaaaccagatatgatatcccagttggagagggaagaaaagctttggatgaaggagcttcaaacccaaagaggtaagcattcagtgtggactctctgatgggcttcaagacgtgcactctgactgaagcctttaccacactcttcacatttaaagagtttttccctggtgtgaacacccaggtggactcgaagatttgaggggagactgaaggccttaccacactcctcacatatatggggtttctctcccgtgtggaccctctgatgatggcgaagattcaagctcctaccaaagcctttcccacactcttcacatttgtaaggtttttctccagtgtggcctctctgatggtatataaactgcgaactgtatctaaagccctttccacacacatcacatttgtatggcttttcccccgtgtggactctctgatgggattgaagaccagaggactgactgaagcccttaccacagacaccacatttgtatggcttctctccagtatggactctctgatgtacccgaaaatctatggcctgactgaagctcttatcacactgctcacatttatagggtttttctcctgagtgaactctttgatgtgcatgaagatttgatctccaactgaagcccttcccacattcctcacatttatatggtttttctccagtgtgaattacttggtgtagtttaagatttgaa

SEQ ID NO: 201866 - DNA, 1764 bp, Homo sapiens
  Payload ID: 19823
  Gene Name: zinc finger protein 235
  ENST ID: ENST00000616224
  CDS Start-End: 1-1764
tcaggagacaggaatcaaaatgagatggcaactcttcacaaagcaggattaaggtgcttttcactgggagagctttcatgctggcaaatcaagagacacattgcgagcaaattagccagaagtcaagactccatgataaatattgaaggaaagagctctcagttccccaagcaccatgattccccctgtcaagtgggagcaggagaatctattcaagcttctgtggatgacaactgtctagtgaatcacataggggatcattccagtatcattgaaaatcaagaatttccaactgggaaagttccgaattcttggagtaaaatatatctgaatgagacacagaattatcagagaagttgtaagcagactcagatgaaaaacaaactatgtatatttgctccatatgttgacattttcagttgtatttcacaccaccatgatgataatatagtgcacaaaagagataaagttcatagcaatagtgattgtggtaaagataccctaaaggtatcacctcttacccagcgtagtattcacacaggacagaaaacctaccagggtaatgaatgtgaagaagccttcaatgatagctccagtcttgaacttcataaacaggtacacttgggaaagaagtctccagcgtgtagtacacatgagaaggacaccagttatagctcaggtattcctgttcaacaaagtgttcgtactgggaaaaaacgctattggtgtcatgaatgtggtaaaggtttcagtcagagctcaaatctgcaaactcatcagagagtccacacaggggagaaaccctatacatgccacgagtgtggtaagagctttaatcagagctcacatctttatgctcatttgcctattcacacaggagagaagccctatagatgtgacagttgtgggaagggcttcagtcgtagcacagatcttaacattcattgcagagttcacactggagagaaaccttataaatgtgaggtgtgtgggaagggcttcactcagagatcacatcttcaggcccatgaaagaattcacactggagagaaaccatataaatctcaaatcttcatacccatcagagactttaatcttcatagtcatcaacgagtccacacaggagaaaaaccatataaatgtgaagagtgtggtaagggttttagttcagcctcaagtttccagagccatcagagggtccatacaggagagaaaccatttcgatgcaacgtgtgtgggaaaggcttcagtcagagttcatactttcaagcacatcagagagtccacactggagaaaaaccatacaaatgtgaagtgtgtgggaagcgcttcaattggagcttgaatcttcacaatcatcagagagtccacaccggagagaaaccctacaaatgtgaagagtgtggtaagggtttcagtcaggcttcaaatcttcaagcccatcagagcgtccacactggggaaaaaccattcaagtgtgatgcatgtcagaagcgattcagtcaggcctcacaccttcaagcccatcagagagtccacaccggagagaaaccatataaatgtgacacttgtggtaaggccttcagccagaggtcaaatcttcaagtccatcagataattcacactggagagaaaccatttaaatgtgaggaatgtgggaaagaattcagttggagtgctggtctcagtgcccatcagagggtccacacaggagagaaaccctatacgtgtcagcagtgtgggaagggcttcagtcaggcctca

SEQ ID NO: 201867 - DNA, 8124 bp, Homo sapiens
  Payload ID: 19824
  Gene Name: zinc finger protein 236
  Uniprot ID: Q9UL36
  ENST ID: ENST00000253159
  CDS Start-End: 199-5736
gcctggaaactacaaaggattgtgttaattttgtgtttaggaagaaagaggtaatgggtaggaatcaatgtaaacttattcataggccacaccaaaccaggaattcttgtcgtgattgcacttggtagagttaacacacgtgcacattacggaaacgttggtgaccaacaggcgtttcagcgagctttcgcacacctcatgggcctttgtgggctgctggagagatgttggctgcaccatgacccagatggagttttaacattgaatgcggagaacactaattatgcctatcaagttccaaacttccataaatgtgaaatctgtctactatcttttccaaaagaatcccagtttcaacgccacatgagggatcacgagcgaaatgacaagccacatcgatgtgaccagtgcccccaaacatttaatgttgaattcaacctgacacttcataaatgcacccacagcggggaagatcctacctgccctgtgtgtaacaagaaattctccagagtggctagtctcaaagcgcatattatgctacatgaaaaggaagagaatctcatctgttctgagtgtggggatgagtttactctgcagagtcagctggccgtgcacatggaggagcaccgccaggagctggctggaacccggcagcatgcctgcaaggcctgcaagaaagagttcgagacctcctcggagctgaaggaacacatgaagactcattacaaaattagggtatcaagtacaaggtcttataaccggaatatcgacagaagtggattcacgtattcgtgtccgcactgtggaaagacgtttcaaaagccaagccagttaacgcgacacattaggatacacacaggtgaaaggccgttcaaatgtagtgaatgtggaaaggcttttaaccagaagggggcactgcagacccacatgatcaagcacacaggtgaaaaaccccatgcctgtgccttctgtcctgccgccttctctcagaaagggaatcttcagtcgcacgtgcagcgagtccactcagaggtcaagaatggtcctacctataactgtacagaatgtagttgtgtatttaaaagtttaggcagcttaaacacgcatatcagcaagatgcatatgggtgggccacagaattcaacaagttctacagagactgctcatgttttaacggccacactttttcagacgttacctcttcaacagacggaagcccaagccacgtcggcctcaagccagccgagctcccaggcggtgagcgacgtcatccagcagctcctggagctctcagagccggcgccggtggagtcggggcagtccccgcagcctgggcagcagctgagcatcacagtgggcatcaaccaggacattttacagcaagccttagaaaacagtgggctgtcttcaattccagctgcagcacatcctaatgactcctgccatgccaagacctctgcaccacacgctcaaaacccagatgtttccagcgtttcaaatgagcagacggaccccacagacgcagagcaagaaaaagaacaggaaagcccggagaaactggataaaaaagaaaaaaaaatgataaagaagaagtcaccgtttctacctggctccatccgcgaggagaacggcgtgcgctggcatgtgtgtccctactgcgccaaggagttccgcaagcccagcgacctggtccgccacatccgcatccacacccacgagaagcccttcaagtgcccgcagtgcttccgcgccttcgccgtgaagagcacgctgacagcgcacatcaagacgcacaccggcatcaaggcgttcaagtgccagtactgcatgaagagcttctccacctctggcagcctcaaggtgcacattcgcctgcacacaggagttagaccttttgcttgtcctcactgtgacaaaaaatttcgaacctcaggccataggaagactcacattgcttcccactttaaacatacggaattaaggaaaatgaggcaccagcgtaaacctgcaaaggtccgtgttggcaagacgaatattccagtccctgatattcctttgcaggaaccaatcctcataactgacttaggtctcatccagcccattccaaaaaaccagtttttccaaagctatttcaataataattttgtcaatgaagcagatagaccatacaagtgtttttactgtcatcgtgcatataaaaaatcttgccaccttaaacaacacatcagatcccatacaggtgaaaaaccttttaaatgttctcagtgtggaagaggctttgtttctgcaggcgtgctcaaagcacacatcagaacacacacaggactgaaatctttcaagtgtctgatatgtaatggggctttcactactggtggcagcttacggcgacacatgggtatccacaacgaccttcgtccctatatgtgtccctattgccaaaaaacatttaagacttcactaaattgcaaaaagcacatgaaaacccacagatatgagcttgcccagcagctccaacagcatcagcaggcagcctcgatagatgacagcactgtagaccagcagagcatgcaggcctccactcaaatgcaggtggagatcgagagcgacgagctgccgcagacggcagaggtggtcgcagcgaaccccgaggccatgctggacctggagcctcagcatgtggtgggcacggaggaagcagggctgggccagcagttggcagatcagcccctggaagcagatgaagatgggtttgtggctccacaggaccctctgcgagggcacgtagaccagtttgaagagcagagccctgcgcaacagtccttcgaaccagcagggctaccccaaggttttacagtgactgatacgtaccatcagcagcctcagtttccacctgtccaacagctacaggattccagcacacttgagtctcaggccctctccacaagcttccaccagcagagcttgctgcaggctcccagctctgatgggatgaatgtaacaactcgcttgattcaggagtcatcccaagaggaactggacctgcaggcacaaggttcccagtttctggaggacaacgaggaccagagcaggcgctcttacaggtgtgactattgcaacaaaggctttaagaagtccagccacctgaagcagcatgtgcggtcgcacaccggggaaaagccctacaagtgcaagctctgtggacgcggctttgtttcctctggggtcctcaagtcccacgagaagacacacacaggagtgaaggcgttcagctgcagtgtgtgcaatgcttccttcaccaccaatggcagcctcacccggcacatggccacacatatgagcatgaagccttataagtgtccgttttgtgaggagggtttccgaactacagtgcattgtaaaaagcacatgaagagacaccaaacagtcccctctgctgtgtcagccactggagagacagaaggaggagacatttgtatggaggaagaggaagaacattctgacagaaatgcatcacggaagtctcgtcctgaggtcatcactttcacggaggaggagacagcccagttagccaagatccggccgcaggagagcgccacggtgtcagagaaggtcctggtgcagtccgcggcagaaaaggaccgcatcagtgagctgagggacaagcaggcggagctgcaggacgagcccaagcacgccaactgctgcacatactgccccaagagcttcaagaaacctagcgacctggtgaggcatgttcgaatccatactggagaaaagccatacaaatgtgatgaatgtggaaagagttttactgtgaaatccactctcgattgtcatgtgaagactcacacaggtcagaagctcttcagctgtcacgtctgcagcaacgccttctccacgaagggaagtctgaaggtccacatgcgcctgcacacgggagccaagcccttcaaatgcccgcattgcgagctgcgtttccgtacctcgggtagaagaaagacacacatgcagtttcattataaaccagacccaaagaaggccagaaagcctatgactcgaagctcatcggaaggactgcagcctgtaaacctcctcaactcctcctctactgacccaaacgtgtttatcatgaacaactctgttctaacaggacagtttgatcagaatctgctgcaaccaggactggtgggccaagctattctccctgcctctgtgtcagctgggggtgacctgaccgtgtctctgacagatgggagcctggctaccctagaaggcatccagttacagttggctgctaacttggttggaccaaatgtacagatttctggaatcgatgctgccagcattaataacattacgttgcagattgatccaagcattctgcagcagacgctacagcagggcaacctattggctcagcagctcacgggggagcctggcctggccccacagaacagctctctccagacatcggacagcacggtccctgccagtgttgtcatccagcccatctcaggcctgtccttacagcccacagtgacctctgcgaacctgaccataggcccgctgtctgagcaggattcagtgctgaccactaacagcagtgggacccaagacctcactcaagtgatgacttcgcaaggtctagtgtccccctccggcggtccccacgagatcaccctgaccattaacaactccagcctgagccaggtcctggcacaggccgctgggcccactgccacgtcttcctcggggtctccacaggaaattaccctgactatctccgaacttaacactacaagcggaagccttccttcaacaacaccgatgtctccatcggccatctcgactcagaacctggtcatgtcctcgtcgggcgtgggaggtgacgctagtgtcacgctgacgctggccgatactcagggtatgctatctggaggcctggacactgtcacactcaacatcacctctcagggtcagcagttcccagcgctcctcacggatccctctctctcgggccagggtggagcaggctcgccgcaagtcatactagtgagccacacgccacagtcagcgtctgctgcttgtgaagaaatagcctaccaggtagctggcgtctctgggaacctggccccgggcaaccagccagagaaggagggccgggcgcaccagtgcctggagtgtgaccgcgccttctcatcggcggcggtgctcatgcaccacagcaaggaggtgcatggccgggagcgcatccacggctgccccgtgtgcaggaaggccttcaagcgcgccacgcacctcaaggagcacatgcagacacaccaggccggcccctctttgagctcccagaagccaagagtgtttaaatgtgacacttgtgagaaggcatttgccaaaccaagccagctggagcgccacagccgcatacatacaggggagcggccgttccattgcacgctttgtgagaaagccttcaaccagaagagtgcgctgcaggtgcacatgaagaagcacacgggggagcggccctacaagtgtgcctactgcgtcatgggcttcacgcagaagagcaacatgaagctgcacatgaagcgggcgcacagctatgctggagctctgcaggagtctgcaggtcacccggagcaggacggggaggagctgagccggaccctccacctggaggaggtggtgcaggaggccgccggcgagtggcaggccctcacccacgtcttctgatgcgagttggaagtacacctttaagaatgtttctgaagttacgttttgtgaagagcaaagcacttggaatctccgttttaaagcttcaagtgttaaaaatgctacaatagttttttatctataaaattatctaaagaatcattgtctttcagagactcataggaaaaaaaaactaggaaaagtgtcaccgcattgttctcttttgtctacaaatcactgaactcaggtactactgtaggcagtttcctcctcagtctcctccgtggctagtgtgtctagttcacgaagcaattaactgggtcttactatcattgtagtgtgatttctttgtattagcaaagacaaaaacgctaacattgaaaaagtatgtcagattttccttcatgtttctggttataagaagcatagcttacaaagcaagcgtaagattgaggcatgaagttcagaaaaaaaagtgttacaacacacagggaagttttttccactcttttctctgtgcattttgaaaattagtcaaaatggactcttttcagtctaccataagttaatataactgataccttgagagatggctggaccaattctctccatgacaaatgtttaatcattagttacaagaatgcagtatctggggcgtcaacatggggactcgagtaaacctgacccaccaataaggattcagctgtccacacgggctggcgacacacttaccgcatcaatctgtgttcaggtccagggttacataattgcagaagcacaagccatacatcgcaggtaggaaaccacagaaccgtctgcaaggagcaagcaacggtggccctgtccaccccagcaaataagaagcatatctgtagcttaaggccacgaatccgtaaaaaccccatgactttctcttcgtgcataaacagatgtatttttgatttcagggaattctttagtatcgtcaatggtgccacataaaacatgtcccaaaccaaatcccacccgtgctgggcagagtgcgtgcacgccattcctacagcattccaaagatggaaggttctttacttcatgttaatttttcctttgaaattatttatatgttctatatataaatacatatgtacatagatatatgggcctctgtgtggctgaacagtatattttgtaaatataagtactagtcctaattgcagaaagagcgtcagtttcacctccccacgagcacttcagatcagtattgtattcattttattcataaatggatatctttttcattgtcatataaagctgggttttatttttttttcctgaaaaataattgcctttattttctctcgttgcctccttggtttcagaagagagtagttttattataaatattgtatggactttgtatattaagagaggagctcatttcagattcctaaagaaatagacattttactgttattttgaaagggcatcttttgatttttttgttgttgttgttcacttttggcatatgtatataagtaatattgacggtgatatgaaaacttttgttatgtgaagatatttaagtcagaaaattgttaaataatattacttcttttccaaactgctttgtgtattgtatatttttttaagaaaaagaaaagccttatttgacttatgcttgtgatactggacttcttaccaatccggaggtttccttccttgaatgtcagtgtgtaaacctggctgtagccgcatatgcagaataactgtaattgtgctagagttttaaaggttctgcttttaatgcactttttattttataattttgtattgaaatattttagaaatgttgattaattttggtgaaaaaatatccccaaagtggaaattattggaattttaaacttttgttcttgctgggttatttattttgattttagcattaaatgtcatctcaggacatctctaaaaggggttgtttaattcctaattgtatagaaagctagtttggtgaattgtattggttaattgactgtttaaggccttaacaggtgaatctagagcctacttttattttggttaaagaaaaagaaaatatcaataattcaattttgtgtcttttctcaatttattagcaaacacaagacattttatgtattatttcgatttacttcctaattataaaagctgcttttttgcagaacattccttgaaaatataaggttttgaaaagacataattttacttgaatctttgtggggtacaggttgatctttatattttactggttgttttaaaaattctagaaaagagatttctaggcctcatgtataaccagggttttgaggataaagaactgtatttttagaactatctcatcatagcatatctgctttggaataactataaataaaagatgaagttaggaaa

SEQ ID NO: 201868 - DNA, 7124 bp, Homo sapiens
  Payload ID: 19824
  Gene Name: zinc finger protein 236
  ENST ID: ENST00000320610
  CDS Start-End: 2-5545
gatgccgcggggccgccccccgaagcccagggagagcaaggcgcgcggcgactccgatggagttttaacattgaatgcggagaacactaattatgcctatcaagttccaaacttccataaatgtgaaatctgtctactatcttttccaaaagaatcccagtttcaacgccacatgagggatcacgagcgaaatgacaagccacatcgatgtgaccagtgcccccaaacatttaatgttgaattcaacctgacacttcataaatgcacccacagcggggaagatcctacctgccctgtgtgtaacaagaaattctccagagtggctagtctcaaagcgcatattatgctacatgaaaaggaagagaatctcatctgttctgagtgtggggatgagtttactctgcagagtcagctggccgtgcacatggaggagcaccgccaggagctggctggaacccggcagcatgcctgcaaggcctgcaagaaagagttcgagacctcctcggagctgaaggaacacatgaagactcattacaaaattagggtatcaagtacaaggtcttataaccggaatatcgacagaagtggattcacgtattcgtgtccgcactgtggaaagacgtttcaaaagccaagccagttaacgcgacacattaggatacacacaggtgaaaggccgttcaaatgtagtgaatgtggaaaggcttttaaccagaagggggcactgcagacccacatgatcaagcacacaggtgaaaaaccccatgcctgtgccttctgtcctgccgccttctctcagaaagggaatcttcagtcgcacgtgcagcgagtccactcagaggtcaagaatggtcctacctataactgtacagaatgtagttgtgtatttaaaagtttaggcagcttaaacacgcatatcagcaagatgcatatgggtgggccacagaattcaacaagttctacagagactgctcatgttttaacggccacactttttcagacgttacctcttcaacagacggaagcccaagccacgtcggcctcaagccagccgagctcccaggcggtgagcgacgtcatccagcagctcctggagctctcagagccggcgccggtggagtcggggcagtccccgcagcctgggcagcagctgagcatcacagtgggcatcaaccaggacattttacagcaagccttagaaaacagtgggctgtcttcaattccagctgcagcacatcctaatgactcctgccatgccaagacctctgcaccacacgctcaaaacccagatgtttccagcgtttcaaatgagcagacggaccccacagacgcagagcaagaaaaagaacaggaaagcccggagaaactggataaaaaagaaaaaaaaatgataaagaagaagtcaccgtttctacctggctccatccgcgaggagaacggcgtgcgctggcatgtgtgtccctactgcgccaaggagttccgcaagcccagcgacctggtccgccacatccgcatccacacccacgagaagcccttcaagtgcccgcagtgcttccgcgccttcgccgtgaagagcacgctgacagcgcacatcaagacgcacaccggcatcaaggcgttcaagtgccagtactgcatgaagagcttctccacctctggcagcctcaaggtgcacattcgcctgcacacaggagttagaccttttgcttgtcctcactgtgacaaaaaatttcgaacctcaggccataggaagactcacattgcttcccactttaaacatacggaattaaggaaaatgaggcaccagcgtaaacctgcaaaggtccgtgttggcaagacgaatattccagtccctgatattcctttgcaggaaccaatcctcataactgacttaggtctcatccagcccattccaaaaaaccagtttttccaaagctatttcaataataattttgtcaatgaagcagatagaccatacaagtgtttttactgtcatcgtgcatataaaaaatcttgccaccttaaacaacacatcagatcccatacaggtgaaaaaccttttaaatgttctcagtgtggaagaggctttgtttctgcaggcgtgctcaaagcacacatcagaacacacacaggactgaaatctttcaagtgtctgatatgtaatggggctttcactactggtggcagcttacggcgacacatgggtatccacaacgaccttcgtccctatatgtgtccctattgccaaaaaacatttaagacttcactaaattgcaaaaagcacatgaaaacccacagatatgagcttgcccagcagctccaacagcatcagcaggcagcctcgatagatgacagcactgtagaccagcagagcatgcaggcctccactcaaatgcaggtggagatcgagagcgacgagctgccgcagacggcagaggtggtcgcagcgaaccccgaggccatgctggacctggagcctcagcatgtggtgggcacggaggaagcagggctgggccagcagttggcagatcagcccctggaagcagatgaagatgggtttgtggctccacaggaccctctgcgagggcacgtagaccagtttgaagagcagagccctgcgcaacagtccttcgaaccagcagggctaccccaaggttttacagtgactgatacgtaccatcagcagcctcagtttccacctgtccaacagctacaggattccagcacacttgagtctcaggccctctccacaagcttccaccagcagagcttgctgcaggctcccagctctgatgggatgaatgtaacaactcgcttgattcaggagtcatcccaagaggaactggacctgcaggcacaaggttcccagtttctggaggacaacgaggaccagagcaggcgctcttacaggtgtgactattgcaacaaaggctttaagaagtccagccacctgaagcagcatgtgcggtcgcacaccggggaaaagccctacaagtgcaagctctgtggacgcggctttgtttcctctggggtcctcaagtcccacgagaagacacacacaggagtgaaggcgttcagctgcagtgtgtgcaatgcttccttcaccaccaatggcagcctcacccggcacatggccacacatatgagcatgaagccttataagtgtccgttttgtgaggagggtttccgaactacagtgcattgtaaaaagcacatgaagagacaccaaacagtcccctctgctgtgtcagccactggagagacagaaggaggagacatttgtatggaggaagaggaagaacattctgacagaaatgcatcacggaagtctcgtcctgaggtcatcactttcacggaggaggagacagcccagttagccaagatccggccgcaggagagcgccacggtgtcagagaaggtcctggtgcagtccgcggcagaaaaggaccgcatcagtgagctgagggacaagcaggcggagctgcaggacgagcccaagcacgccaactgctgcacatactgccccaagagcttcaagaaacctagcgacctggtgaggcatgttcgaatccatactggagaaaagccatacaaatgtgatgaatgtggaaagagttttactgtgaaatccactctcgattgtcatgtgaagactcacacaggtcagaagctcttcagctgtcacgtctgcagcaacgccttctccacgaagggaagtctgaaggtccacatgcgcctgcacacgggagccaagcccttcaaatgcccgcattgcgagctgcgtttccgtacctcgggtagaagaaagacacacatgcagtttcattataaaccagacccaaagaaggccagaaagcctatgactcgaagctcatcggaaggactgcagcctgtaaacctcctcaactcctcctctactgacccaaacgtgtttatcatgaacaactctgttctaacaggacagtttgatcagaatctgctgcaaccaggactggtgggccaagctattctccctgcctctgtgtcagctgggggtgacctgaccgtgtctctgacagatgggagcctggctaccctagaaggcatccagttacagttggctgctaacttggttggaccaaatgtacagatttctggaatcgatgctgccagcattaataacattacgttgcagattgatccaagcattctgcagcagacgctacagcagggcaacctattggctcagcagctcacgggggagcctggcctggccccacagaacagctctctccagacatcggacagcacggtccctgccagtgttgtcatccagcccatctcaggcctgtccttacagcccacagtgacctctgcgaacctgaccataggcccgctgtctgagcaggattcagtgctgaccactaacagcagtgggacccaagacctcactcaagtgatgacttcgcaaggtctagtgtccccctccggcggtccccacgagatcaccctgaccattaacaactccagcctgagccaggtcctggcacaggccgctgggcccactgccacgtcttcctcggggtctccacaggaaattaccctgactatctccgaacttaacactacaagcggaagccttccttcaacaacaccgatgtctccatcggccatctcgactcagaacctggtcatgtcctcgtcgggcgtgggaggtgacgctagtgtcacgctgacgctggccgatactcagggtatgctatctggaggcctggacactgtcacactcaacatcacctctcagggtcagcagttcccagcgctcctcacggatccctctctctcgggccagggtggagcaggctcgccgcaagtcatactagtgagccacacgccacagtcagcgtctgctgcttgtgaagaaatagcctaccaggtagctggcgtctctgggaacctggccccgggcaaccagccagagaaggagggccgggcgcaccagtgcctggagtgtgaccgcgccttctcatcggcggcggtgctcatgcaccacagcaaggaggtgcatggccgggagcgcatccacggctgccccgtgtgcaggaaggccttcaagcgcgccacgcacctcaaggagcacatgcagacacaccaggccggcccctctttgagctcccagaagccaagagtgtttaaatgtgacacttgtgagaaggcatttgccaaaccaagccagctggagcgccacagccgcatacatacaggggagcggccgttccattgcacgctttgtgagaaagccttcaaccagaagagtgcgctgcaggtgcacatgaagaagcacacgggggagcggccctacaagtgtgcctactgcgtcatgggcttcacgcagaagagcaacatgaagctgcacatgaagcgggcgcacagctatgctggagctctgcaggagtctgcaggtcacccggagcaggacggggaggagctgagccggaccctccacctggaggaggtggtgcaggaggccgccggcgagtggcaggccctcacccacgtcttctgatgcgagttggaagtacacctttaagaatgtttctgaagttacgttttgtgaagagcaaagcacttggaatctccgttttaaagcttcaagtgttaaaaatgctacaatagttttttatctataaaattatctaaagaatcattgtctttcagagactcataggaaaaaaaaactaggaaaagtgtcaccgcattgttctcttttgtctacaaatcactgaactcaggtactactgtaggcagtttcctcctcagtctcctccgtggctagtgtgtctagttcacgaagcaattaactgggtcttactatcattgtagtgtgatttctttgtattagcaaagacaaaaacgctaacattgaaaaagtatgtcagattttccttcatgtttctggttataagaagcatagcttacaaagcaagcgtaagattgaggcatgaagttcagaaaaaaaagtgttacaacacacagggaagttttttccactcttttctctgtgcattttgaaaattagtcaaaatggactcttttcagtctaccataagttaatataactgataccttgagagatggctggaccaattctctccatgacaaatgtttaatcattagttacaagaatgcagtatctggggcgtcaacatggggactcgagtaaacctgacccaccaataaggattcagctgtccacacgggctggcgacacacttaccgcatcaatctgtgttcaggtccagggttacataattgcagaagcacaagccatacatcgcaggtaggaaaccacagaaccgtctgcaaggagcaagcaacggtggccctgtccaccccagcaaataagaagcatatctgtagcttaaggccacgaatccgtaaaaaccccatgactttctcttcgtgcataaacagatgtatttttgatttcagggaattctttagtatcgtcaatggtgccacataaaacatgtcccaaaccaaatcccacccgtgctgggcagagtgcgtgcacgccattcctacagcattccaaagatggaaggttctttacttcatgttaatttttcctttgaaattatttatatgttctatatataaatacatatgtacatagatatatgggcctctgtgtggctgaacagtatattttgtaaatataagtactagtcctaattgcagaaagagcgtcagtttcacctccccacgagcacttcagatcagtattgtattcattttattcataaatggatatctttttcattgtcatataaagctgggttttatttttttttcctgaaaaataattgcctttattttctctcgttgcctccttggtttcagaagagagtagttttattataaatattgtatggactttgtatattaagagaggagctcatttcagattcctaaagaaatagacattttactgttattttgaaagggcatcttttgatttttttgttgttgttgttcacttttggcatatgtatataagtaatattgacggtgatatgaaaacttttgttatgtgaagatatttaagtcagaaaattgttaaataatattacttcttttccaaa

SEQ ID NO: 201869 - DNA, 8206 bp, Homo sapiens
  Payload ID: 19824
  Gene Name: zinc finger protein 236
  Uniprot ID: Q9UL36
  ENST ID: ENST00000543926
  CDS Start-End: 199-4875
gcctggaaactacaaaggattgtgttaattttgtgtttaggaagaaagaggtaatgggtaggaatcaatgtaaacttattcataggccacaccaaaccaggaattcttgtcgtgattgcacttggtagagttaacacacgtgcacattacggaaacgttggtgaccaacaggcgtttcagcgagctttcgcacacctcatgggcctttgtgggctgctggagagatgttggctgcaccatgacccagatggagttttaacattgaatgcggagaacactaattatgcctatcaagttccaaacttccataaatgtgaaatctgtctactatcttttccaaaagaatcccagtttcaacgccacatgagggatcacgagcgaaatgacaagccacatcgatgtgaccagtgcccccaaacatttaatgttgaattcaacctgacacttcataaatgcacccacagcggggaagatcctacctgccctgtgtgtaacaagaaattctccagagtggctagtctcaaagcgcatattatgctacatgaaaaggaagagaatctcatctgttctgagtgtggggatgagtttactctgcagagtcagctggccgtgcacatggaggagcaccgccaggagctggctggaacccggcagcatgcctgcaaggcctgcaagaaagagttcgagacctcctcggagctgaaggaacacatgaagactcattacaaaattagggtatcaagtacaaggtcttataaccggaatatcgacagaagtggattcacgtattcgtgtccgcactgtggaaagacgtttcaaaagccaagccagttaacgcgacacattaggatacacacaggtgaaaggccgttcaaatgtagtgaatgtggaaaggcttttaaccagaagggggcactgcagacccacatgatcaagcacacaggtgaaaaaccccatgcctgtgccttctgtcctgccgccttctctcagaaagggaatcttcagtcgcacgtgcagcgagtccactcagaggtcaagaatggtcctacctataactgtacagaatgtagttgtgtatttaaaagtttaggcagcttaaacacgcatatcagcaagatgcatatgggtgggccacagaattcaacaagttctacagagactgctcatgttttaacggccacactttttcagacgttacctcttcaacagacggaagcccaagccacgtcggcctcaagccagccgagctcccaggcggtgagcgacgtcatccagcagctcctggagctctcagagccggcgccggtggagtcggggcagtccccgcagcctgggcagcagctgagcatcacagtgggcatcaaccaggacattttacagcaagccttagaaaacagtgggctgtcttcaattccagctgcagcacatcctaatgactcctgccatgccaagacctctgcaccacacgctcaaaacccagatgtttccagcgtttcaaatgagcagacggaccccacagacgcagagcaagaaaaagaacaggaaagcccggagaaactggataaaaaagaaaaaaaaatgataaagaagaagtcaccgtttctacctggctccatccgcgaggagaacggcgtgcgctggcatgtgtgtccctactgcgccaaggagttccgcaagcccagcgacctggtccgccacatccgcatccacacccacgagaagcccttcaagtgcccgcagtgcttccgcgccttcgccgtgaagagcacgctgacagcgcacatcaagacgcacaccggcatcaaggcgttcaagtgccagtactgcatgaagagcttctccacctctggcagcctcaaggtgcacattcgcctgcacacaggagttagaccttttgcttgtcctcactgtgacaaaaaatttcgaacctcaggccataggaagactcacattgcttcccactttaaacatacggaattaaggaaaatgaggcaccagcgtaaacctgcaaaggtccgtgttggcaagacgaatattccagtccctgatattcctttgcaggaaccaatcctcataactgacttaggtctcatccagcccattccaaaaaaccagtttttccaaagctatttcaataataattttgtcaatgaagcagatagaccatacaagtgtttttactgtcatcgtgcatataaaaaatcttgccaccttaaacaacacatcagatcccatacaggtgaaaaaccttttaaatgttctcagtgtggaagaggctttgtttctgcaggcgtgctcaaagcacacatcagaacacacacaggactgaaatctttcaagtgtctgatatgtaatggggctttcactactggtggcagcttacggcgacacatgggtatccacaacgaccttcgtccctatatgtgtccctattgccaaaaaacatttaagacttcactaaattgcaaaaagcacatgaaaacccacagatatgagcttgcccagcagctccaacagcatcagcaggcagcctcgatagatgacagcactgtagaccagcagagcatgcaggcctccactcaaatgcaggtggagatcgagagcgacgagctgccgcagacggcagaggtggtcgcagcgaaccccgaggccatgctggacctggagcctcagcatgtggtgggcacggaggaagcagggctgggccagcagttggcagatcagcccctggaagcagatgaagatgggtttgtggctccacaggaccctctgcgagggcacgtagaccagtttgaagagcagagccctgcgcaacagtccttcgaaccagcagggctaccccaaggttttacagtgactgatacgtaccatcagcagcctcagtttccacctgtccaacagctacaggattccagcacacttgagtctcaggccctctccacaagcttccaccagcagagcttgctgcaggctcccagctctgatgggatgaatgtaacaactcgcttgattcaggagtcatcccaagaggaactggacctgcaggcacaaggttcccagtttctggaggacaacgaggaccagagcaggcgctcttacaggtgtgactattgcaacaaaggctttaagaagtccagccacctgaagcagcatgtgcggtcgcacaccggggaaaagccctacaagtgcaagctctgtggacgcggctttgtttcctctggggtcctcaagtcccacgagaagacacacacaggagtgaaggcgttcagctgcagtgtgtgcaatgcttccttcaccaccaatggcagcctcacccggcacatggccacacatatgagcatgaagccttataagtgtccgttttgtgaggagggtttccgaactacagtgcattgtaaaaagcacatgaagagacaccaaacagtcccctctgctgtgtcagccactggagagacagaaggaggagacatttgtatggaggaagaggaagaacattctgacagaaatgcatcacggaagtctcgtcctgaggtcatcactttcacggaggaggagacagcccagttagccaagatccggccgcaggagagcgccacggtgtcagagaaggtcctggtgcagtccgcggcagaaaaggaccgcatcagtgagctgagggacaagcaggcggagctgcaggacgagcccaagcacgccaactgctgcacatactgccccaagagcttcaagaaacctagcgacctggtgaggcatgttcgaatccatactggagaaaagccatacaaatgtgatgaatgtggaaagagttttactgtgaaatccactctcgattgtcatgtgaagactcacacaggtcagaagctcttcagctgtcacgtctgcagcaacgccttctccacgaagggaagtctgaaggtccacatgcgcctgcacacgggagccaagcccttcaaatgcccgcattgcgagctgcgtttccgtacctcgggtagaagaaagacacacatgcagtttcattataaaccagacccaaagaaggccagaaagcctatgactcgaagctcatcggaaggactgcagcctgtaaacctcctcaactcctcctctactgacccaaacgtgtttatcatgaacaactctgttctaacaggacagtttgatcagaatctgctgcaaccaggactggtgggccaagctattctccctgcctctgtgtcagctgggggtgacctgaccgtgtctctgacagatgggagcctggctaccctagaaggcatccagttacagttggctgctaacttggttggaccaaatgtacagatttctggaatcgatgctgccagcattaataacattacgttgcagattgatccaagcattctgcagcagacgctacagcagggcaacctattggctcagcagctcacgggggagcctggcctggccccacagaacagctctctccagacatcggacagcacggtccctgccagtgttgtcatccagcccatctcaggcctgtccttacagcccacagtgacctctgcgaacctgaccataggcccgctgtctgagcaggattcagtgctgaccactaacagcagtgggacccaagacctcactcaagtgatgacttcgcaaggtctagtgtccccctccggcggtccccacgagatcaccctgaccattaacaactccagcctgagccaggtcctggcacaggccgctgggcccactgccacgtcttcctcggggtctccacaggaaattaccctgactatctccggttccaggtctgtgcagcacagtgtgggaccccaggagtgtggatctgtggaggcattgtatttggagaactccagcgacaaaacttaacactacaagcggaagccttccttcaacaacaccgatgtctccatcggccatctcgactcagaacctggtcatgtcctcgtcgggcgtgggaggtgacgctagtgtcacgctgacgctggccgatactcagggtatgctatctggaggcctggacactgtcacactcaacatcacctctcagggtcagcagttcccagcgctcctcacggatccctctctctcgggccagggtggagcaggctcgccgcaagtcatactagtgagccacacgccacagtcagcgtctgctgcttgtgaagaaatagcctaccaggtagctggcgtctctgggaacctggccccgggcaaccagccagagaaggagggccgggcgcaccagtgcctggagtgtgaccgcgccttctcatcggcggcggtgctcatgcaccacagcaaggaggtgcatggccgggagcgcatccacggctgccccgtgtgcaggaaggccttcaagcgcgccacgcacctcaaggagcacatgcagacacaccaggccggcccctctttgagctcccagaagccaagagtgtttaaatgtgacacttgtgagaaggcatttgccaaaccaagccagctggagcgccacagccgcatacatacaggggagcggccgttccattgcacgctttgtgagaaagccttcaaccagaagagtgcgctgcaggtgcacatgaagaagcacacgggggagcggccctacaagtgtgcctactgcgtcatgggcttcacgcagaagagcaacatgaagctgcacatgaagcgggcgcacagctatgctggagctctgcaggagtctgcaggtcacccggagcaggacggggaggagctgagccggaccctccacctggaggaggtggtgcaggaggccgccggcgagtggcaggccctcacccacgtcttctgatgcgagttggaagtacacctttaagaatgtttctgaagttacgttttgtgaagagcaaagcacttggaatctccgttttaaagcttcaagtgttaaaaatgctacaatagttttttatctataaaattatctaaagaatcattgtctttcagagactcataggaaaaaaaaactaggaaaagtgtcaccgcattgttctcttttgtctacaaatcactgaactcaggtactactgtaggcagtttcctcctcagtctcctccgtggctagtgtgtctagttcacgaagcaattaactgggtcttactatcattgtagtgtgatttctttgtattagcaaagacaaaaacgctaacattgaaaaagtatgtcagattttccttcatgtttctggttataagaagcatagcttacaaagcaagcgtaagattgaggcatgaagttcagaaaaaaaagtgttacaacacacagggaagttttttccactcttttctctgtgcattttgaaaattagtcaaaatggactcttttcagtctaccataagttaatataactgataccttgagagatggctggaccaattctctccatgacaaatgtttaatcattagttacaagaatgcagtatctggggcgtcaacatggggactcgagtaaacctgacccaccaataaggattcagctgtccacacgggctggcgacacacttaccgcatcaatctgtgttcaggtccagggttacataattgcagaagcacaagccatacatcgcaggtaggaaaccacagaaccgtctgcaaggagcaagcaacggtggccctgtccaccccagcaaataagaagcatatctgtagcttaaggccacgaatccgtaaaaaccccatgactttctcttcgtgcataaacagatgtatttttgatttcagggaattctttagtatcgtcaatggtgccacataaaacatgtcccaaaccaaatcccacccgtgctgggcagagtgcgtgcacgccattcctacagcattccaaagatggaaggttctttacttcatgttaatttttcctttgaaattatttatatgttctatatataaatacatatgtacatagatatatgggcctctgtgtggctgaacagtatattttgtaaatataagtactagtcctaattgcagaaagagcgtcagtttcacctccccacgagcacttcagatcagtattgtattcattttattcataaatggatatctttttcattgtcatataaagctgggttttatttttttttcctgaaaaataattgcctttattttctctcgttgcctccttggtttcagaagagagtagttttattataaatattgtatggactttgtatattaagagaggagctcatttcagattcctaaagaaatagacattttactgttattttgaaagggcatcttttgatttttttgttgttgttgttcacttttggcatatgtatataagtaatattgacggtgatatgaaaacttttgttatgtgaagatatttaagtcagaaaattgttaaataatattacttcttttccaaactgctttgtgtattgtatatttttttaagaaaaagaaaagccttatttgacttatgcttgtgatactggacttcttaccaatccggaggtttccttccttgaatgtcagtgtgtaaacctggctgtagccgcatatgcagaataactgtaattgtgctagagttttaaaggttctgcttttaatgcactttttattttataattttgtattgaaatattttagaaatgttgattaattttggtgaaaaaatatccccaaagtggaaattattggaattttaaacttttgttcttgctgggttatttattttgattttagcattaaatgtcatctcaggacatctctaaaaggggttgtttaattcctaattgtatagaaagctagtttggtgaattgtattggttaattgactgtttaaggccttaacaggtgaatctagagcctacttttattttggttaaagaaaaagaaaatatcaataattcaattttgtgtcttttctcaatttattagcaaacacaagacattttatgtattatttcgatttacttcctaattataaaagctgcttttttgcagaacattccttgaaaatataaggttttgaaaagacataattttacttgaatctttgtggggtacaggttgatctttatattttactggttgttttaaaaattctagaaaagagatttctaggcctcatgtataaccagggttttgaggataaagaactgtatttttagaactatctcatcatagcatatctgctttggaataactataaataaaagatgaagttaggaaa

SEQ ID NO: 201870 - DNA, 1659 bp, Homo sapiens
  Payload ID: 19824
  Gene Name: zinc finger protein 236
  ENST ID: ENST00000579322
  CDS Start-End: 279-1659
cacatggtttaagaagcatcattatggcttttgtgtgttttggtgtgtgtggctgtgaagcctcaggaatttagtttaagcttctgaaaagcccaccaatatgtatttagaattctgttgtcccatatcttagtcatctcaatgtttctcatttctaactttaaaacatgtcaattaaaaaaattcagtatatcattaatttcgtctaaaatgtcacataaatctctgacataatttggtttttaaacaataaccaataatttggttttatttatgtgatgagaataacaactggtatttattgtctatacttatgcaattttatagatggagttttaacattgaatgcggagaacactaattatgcctatcaagttccaaacttccataaatgtgaaatctgtctactatcttttccaaaagaatcccagtttcaacgccacatgagggatcacgagcgaaatgacaagccacatcgatgtgaccagtgcccccaaacatttaatgttgaattcaacctgacacttcataaatgcacccacagcggggaagatcctacctgccctgtgtgtaacaagaaattctccagagtggctagtctcaaagcgcatattatgctacatgaaaaggaagagaatctcatctgttctgagtgtggggatgagtttactctgcagagtcagctggccgtgcacatggaggagcaccgccaggagctggctggaacccggcagcatgcctgcaaggcctgcaagaaagagttcgagacctcctcggagctgaaggaacacatgaagactcattacaaaattagggtatcaagtacaaggtcttataaccggaatatcgacagaagtggattcacgtattcgtgtccgcactgtggaaagacgtttcaaaagccaagccagttaacgcgacacattaggatacacacaggtgaaaggccgttcaaatgtagtgaatgtggaaaggcttttaaccagaagggggcactgcagacccacatgatcaagcacacaggtgaaaaaccccatgcctgtgccttctgtcctgccgccttctctcagaaagggaatcttcagtcgcacgtgcagcgagtccactcagaggtcaagaatggtcctacctataactgtacagaatgtagttgtgtatttaaaagtttaggcagcttaaacacgcatatcagcaagatgcatatgggtgggccacagaattcaacaagttctacagagactgctcatgttttaacggccacactttttcagacgttacctcttcaacagacggaagcccaagccacgtcggcctcaagccagccgagctcccaggcggtgagcgacgtcatccagcagctcctggagctctcagagccggcgccggtggagtcggggcagtccccgcagcctgggcagcagctgagcatcacagtgggcatcaaccaggacattttacagcaagccttagaaaacagtgggctgtcttcaattccagctgcagcacatcctaatgactcctgccatgccaagacctctgcaccacacgctcaaaacccagatgtttccagcgtttcaaatgagcagacggaccccacagacgcagagcaagaaaaagaacaggaaagcccggagaaactggataaaaaagaaaaaaaaa

SEQ ID NO: 201871 - DNA, 2389 bp, Homo sapiens
  Payload ID: 19825
  Gene Name: zinc finger protein 239
  Uniprot ID: Q16600
  ENST ID: ENST00000306006
  CDS Start-End: 654-2030
ctagtcccgattatggttattacagtttgatgaaatgtggctgagatcattggcactgtggagattaagaaatgtgaggtcagagtgttgggtaaattgttcctgcgagtgttaaggttgtcaggataatggtgggaatggggtgaagatgacaactcagcaatgacacaagaagagagtgacacagaaagattcagtagctgagaacttgagcgtagatatgttgtgggcaggagggaaatgatttggatggaagtagccaagtaagtgagaaaggaaagactttccaacaaaacttggcttagctcactcagatccctgagctgcaaacttcttctatacctttcttaccttttccagtgctgctgacttcaccccacttgcagggcatttgtgcagatggttgtttgttgaggaggaatgtgcttaatgttttaggaaccagttacattcaaggatgcctctgtggccttcaccgaggaggagtgaggtcacctggactctgctcccaggaagctgtgcggagctgtgatgctgggcaactacagaaacttggtcttggagacttgaatgaaaattctgtggagaatcttcagcagaaaacacttcaggatctgttacatgagctttcctcctggctagttttggaaggcatggccagtacaattactggaagtcaggattgtattgtgaatcatcgaggggaagtggatggggagcctgaactagatatttccccttgtcaacagtggggagaagcatcttctcctatttccagaaacagggacagtgtgatgactcttcaaagtggttgtttcgaaaacattgaaagtgaaacatatttgcctttgaaagtctcaagccaaatagacacacaagactcttcagtgaagttctgtaagaatgagcctcaggatcatcaggaaagcagacgtctctttgtaatggaagaaagcactgagagaaaagtgataaagggggaaagttgttcagagaaccttcaagttaaactggtgtctgatggacaagaactggcctcgccattgttaaatggtgaggcaacttgccagaatggccagttaaaagaatctttggatcccattgactgtaactgcaaagacattcatggatggaaatcacaggtggtcagttgtagtcagcagagagctcatacagaggagaaaccctgtgaccataataactgtgggaaaatacttaacaccagcccagatggtcatccatatgagaaaatccacactgcagagaaacaatacgaatgtagtcagtgtggtaagaacttcagtcaaagctcagagctactacttcatcagagagaccacacagaagaaaaaccctacaaatgtgagcaatgtgggaagggcttcacaaggagctcgagtctgcttatccatcaggcagtccacacagatgagaagccttataagtgtgacaagtgtgggaagggcttcaccaggagctcaagtctgctcatccatcatgccgtccatacaggcgaaaaaccttataaatgtgacaagtgtgggaagggctttagtcagagctccaaactgcacatccaccagcgagtccacactggagagaagccctatgagtgtgaggagtgtggtatgagcttcagtcagcgctcaaacctgcacatccaccagcgagtacacacaggagagaggccctacaagtgtggtgagtgtgggaagggcttcagtcagagctcgaaccttcacattcaccggtgcatccacacaggagagaagccttaccaatgctatgagtgtgggaagggtttcagccagagctcggatcttcgcatccatctcagagtccacactggagagaagccctatcactgtggcaagtgtgggaagggatttagccagagttccaaactcctcatccaccagagagtacatactggagagaagccctatgagtgcagcaagtgtgggaagggcttcagccagagctccaaccttcacatccaccagcgggttcacaagaaagatcctcgctaactgacattagcccattcaggtcttcacagcgctcatactgtaaaaactgttaaatatttagtatcactcttactttatattctacaaaggagagagatgtaagggttatttagatatgttccctcactgaaaaatcactcattcaaaatatttaagtatcaagcactttgttatgctgtacaatgaatggattgttcttgtttctcagatgggtagagtaaaagtgtctgtactttacaattcaactacatgttctacccagcattttaacggcaagaactttatatttattctcaagcagggcatgtttccctttgttcacattctctgagaaattgaaactctggtttctcttcaaa

SEQ ID NO: 201872 - DNA, 2037 bp, Homo sapiens
  Payload ID: 19825
  Gene Name: zinc finger protein 239
  Uniprot ID: Q16600
  ENST ID: ENST00000374446
  CDS Start-End: 302-1678
gcatccggaatctggcccctgcaggcgtggggttccacgtgggaggaatccatcccctctgggagtaagaaatgaccagggtccgggaaccagttacattcaaggatgcctctgtggccttcaccgaggaggagtgaggtcacctggactctgctcccaggaagctgtgcggagctgtgatgctgggcaactacagaaacttggtcttggagacttgaatgaaaattctgtggagaatcttcagcagaaaacacttcaggatctgttacatgagctttcctcctggctagttttggaaggcatggccagtacaattactggaagtcaggattgtattgtgaatcatcgaggggaagtggatggggagcctgaactagatatttccccttgtcaacagtggggagaagcatcttctcctatttccagaaacagggacagtgtgatgactcttcaaagtggttgtttcgaaaacattgaaagtgaaacatatttgcctttgaaagtctcaagccaaatagacacacaagactcttcagtgaagttctgtaagaatgagcctcaggatcatcaggaaagcagacgtctctttgtaatggaagaaagcactgagagaaaagtgataaagggggaaagttgttcagagaaccttcaagttaaactggtgtctgatggacaagaactggcctcgccattgttaaatggtgaggcaacttgccagaatggccagttaaaagaatctttggatcccattgactgtaactgcaaagacattcatggatggaaatcacaggtggtcagttgtagtcagcagagagctcatacagaggagaaaccctgtgaccataataactgtgggaaaatacttaacaccagcccagatggtcatccatatgagaaaatccacactgcagagaaacaatacgaatgtagtcagtgtggtaagaacttcagtcaaagctcagagctactacttcatcagagagaccacacagaagaaaaaccctacaaatgtgagcaatgtgggaagggcttcacaaggagctcgagtctgcttatccatcaggcagtccacacagatgagaagccttataagtgtgacaagtgtgggaagggcttcaccaggagctcaagtctgctcatccatcatgccgtccatacaggcgaaaaaccttataaatgtgacaagtgtgggaagggctttagtcagagctccaaactgcacatccaccagcgagtccacactggagagaagccctatgagtgtgaggagtgtggtatgagcttcagtcagcgctcaaacctgcacatccaccagcgagtacacacaggagagaggccctacaagtgtggtgagtgtgggaagggcttcagtcagagctcgaaccttcacattcaccggtgcatccacacaggagagaagccttaccaatgctatgagtgtgggaagggtttcagccagagctcggatcttcgcatccatctcagagtccacactggagagaagccctatcactgtggcaagtgtgggaagggatttagccagagttccaaactcctcatccaccagagagtacatactggagagaagccctatgagtgcagcaagtgtgggaagggcttcagccagagctccaaccttcacatccaccagcgggttcacaagaaagatcctcgctaactgacattagcccattcaggtcttcacagcgctcatactgtaaaaactgttaaatatttagtatcactcttactttatattctacaaaggagagagatgtaagggttatttagatatgttccctcactgaaaaatcactcattcaaaatatttaagtatcaagcactttgttatgctgtacaatgaatggattgttcttgtttctcagatgggtagagtaaaagtgtctgtactttacaattcaactacatgttctacccagcattttaacggcaagaactttatatttattctcaagcagggcatgtttccctttgttcacattctctgagaaattgaaactctggtttctcttcaaa

SEQ ID NO: 201873 - DNA, 2027 bp, Homo sapiens
  Payload ID: 19825
  Gene Name: zinc finger protein 239
  Uniprot ID: Q16600
  ENST ID: ENST00000426961
  CDS Start-End: 295-1671
ttgtatttcggggccctaggcgcgcgagcggtcagcatccggaatctggcccctgcaggcgtggggttccacgtgggaggaaccagttacattcaaggatgcctctgtggccttcaccgaggaggagtgaggtcacctggactctgctcccaggaagctgtgcggagctgtgatgctgggcaactacagaaacttggtcttggagacttgaatgaaaattctgtggagaatcttcagcagaaaacacttcaggatctgttacatgagctttcctcctggctagttttggaaggcatggccagtacaattactggaagtcaggattgtattgtgaatcatcgaggggaagtggatggggagcctgaactagatatttccccttgtcaacagtggggagaagcatcttctcctatttccagaaacagggacagtgtgatgactcttcaaagtggttgtttcgaaaacattgaaagtgaaacatatttgcctttgaaagtctcaagccaaatagacacacaagactcttcagtgaagttctgtaagaatgagcctcaggatcatcaggaaagcagacgtctctttgtaatggaagaaagcactgagagaaaagtgataaagggggaaagttgttcagagaaccttcaagttaaactggtgtctgatggacaagaactggcctcgccattgttaaatggtgaggcaacttgccagaatggccagttaaaagaatctttggatcccattgactgtaactgcaaagacattcatggatggaaatcacaggtggtcagttgtagtcagcagagagctcatacagaggagaaaccctgtgaccataataactgtgggaaaatacttaacaccagcccagatggtcatccatatgagaaaatccacactgcagagaaacaatacgaatgtagtcagtgtggtaagaacttcagtcaaagctcagagctactacttcatcagagagaccacacagaagaaaaaccctacaaatgtgagcaatgtgggaagggcttcacaaggagctcgagtctgcttatccatcaggcagtccacacagatgagaagccttataagtgtgacaagtgtgggaagggcttcaccaggagctcaagtctgctcatccatcatgccgtccatacaggcgaaaaaccttataaatgtgacaagtgtgggaagggctttagtcagagctccaaactgcacatccaccagcgagtccacactggagagaagccctatgagtgtgaggagtgtggtatgagcttcagtcagcgctcaaacctgcacatccaccagcgagtacacacaggagagaggccctacaagtgtggtgagtgtgggaagggcttcagtcagagctcgaaccttcacattcaccggtgcatccacacaggagagaagccttaccaatgctatgagtgtgggaagggtttcagccagagctcggatcttcgcatccatctcagagtccacactggagagaagccctatcactgtggcaagtgtgggaagggatttagccagagttccaaactcctcatccaccagagagtacatactggagagaagccctatgagtgcagcaagtgtgggaagggcttcagccagagctccaaccttcacatccaccagcgggttcacaagaaagatcctcgctaactgacattagcccattcaggtcttcacagcgctcatactgtaaaaactgttaaatatttagtatcactcttactttatattctacaaaggagagagatgtaagggttatttagatatgttccctcactgaaaaatcactcattcaaaatatttaagtatcaagcactttgttatgctgtacaatgaatggattgttcttgtttctcagatgggtagagtaaaagtgtctgtactttacaattcaactacatgttctacccagcattttaacggcaagaactttatatttattctcaagcagggcatgtttccctttgttcacattctctgagaaattgaaactctggtttctcttc

SEQ ID NO: 201874 - DNA, 1904 bp, Homo sapiens
  Payload ID: 19825
  Gene Name: zinc finger protein 239
  Uniprot ID: Q16600
  ENST ID: ENST00000535642
  CDS Start-End: 172-1548
ttgtatttcggggccctaggcgcgcgagcggtcagcatccggaatctggcccctgcaggcgtggggttccacgtgggaggagacttgaatgaaaattctgtggagaatcttcagcagaaaacacttcaggatctgttacatgagctttcctcctggctagttttggaaggcatggccagtacaattactggaagtcaggattgtattgtgaatcatcgaggggaagtggatggggagcctgaactagatatttccccttgtcaacagtggggagaagcatcttctcctatttccagaaacagggacagtgtgatgactcttcaaagtggttgtttcgaaaacattgaaagtgaaacatatttgcctttgaaagtctcaagccaaatagacacacaagactcttcagtgaagttctgtaagaatgagcctcaggatcatcaggaaagcagacgtctctttgtaatggaagaaagcactgagagaaaagtgataaagggggaaagttgttcagagaaccttcaagttaaactggtgtctgatggacaagaactggcctcgccattgttaaatggtgaggcaacttgccagaatggccagttaaaagaatctttggatcccattgactgtaactgcaaagacattcatggatggaaatcacaggtggtcagttgtagtcagcagagagctcatacagaggagaaaccctgtgaccataataactgtgggaaaatacttaacaccagcccagatggtcatccatatgagaaaatccacactgcagagaaacaatacgaatgtagtcagtgtggtaagaacttcagtcaaagctcagagctactacttcatcagagagaccacacagaagaaaaaccctacaaatgtgagcaatgtgggaagggcttcacaaggagctcgagtctgcttatccatcaggcagtccacacagatgagaagccttataagtgtgacaagtgtgggaagggcttcaccaggagctcaagtctgctcatccatcatgccgtccatacaggcgaaaaaccttataaatgtgacaagtgtgggaagggctttagtcagagctccaaactgcacatccaccagcgagtccacactggagagaagccctatgagtgtgaggagtgtggtatgagcttcagtcagcgctcaaacctgcacatccaccagcgagtacacacaggagagaggccctacaagtgtggtgagtgtgggaagggcttcagtcagagctcgaaccttcacattcaccggtgcatccacacaggagagaagccttaccaatgctatgagtgtgggaagggtttcagccagagctcggatcttcgcatccatctcagagtccacactggagagaagccctatcactgtggcaagtgtgggaagggatttagccagagttccaaactcctcatccaccagagagtacatactggagagaagccctatgagtgcagcaagtgtgggaagggcttcagccagagctccaaccttcacatccaccagcgggttcacaagaaagatcctcgctaactgacattagcccattcaggtcttcacagcgctcatactgtaaaaactgttaaatatttagtatcactcttactttatattctacaaaggagagagatgtaagggttatttagatatgttccctcactgaaaaatcactcattcaaaatatttaagtatcaagcactttgttatgctgtacaatgaatggattgttcttgtttctcagatgggtagagtaaaagtgtctgtactttacaattcaactacatgttctacccagcattttaacggcaagaactttatatttattctcaagcagggcatgtttccctttgttcacattctctgagaaattgaaactctggtttctcttc

SEQ ID NO: 201875 - DNA, 6307 bp, Homo sapiens
  Payload ID: 19826
  Gene Name: zinc finger protein 24
  Uniprot ID: P17028
  ENST ID: ENST00000261332
  CDS Start-End: 181-1287
gcgccgggggcttctgggaaaaggcttgtgaacggcgtttctgcgtctgccgtggacagcgaagctgctgcggttcctgagccggaggtttgcgccggagtgcctgtgaagaaaacggggtattgccctgaggcttatattctgcctcagttgtcttttcttgaaatattataaatcagaatgtctgcacagtcagtggaagaagattcaatacttatcatcccaactccagatgaagaggaaaaaattctgagagtgaagttggaggaggatcctgatggcgaagagggatcaagtatcccctggaaccatctcccagacccagagattttccgacagcgattcaggcagtttggataccaggattcacctgggccccgtgaggctgtgagccagctccgagaactttgccgtctgtggctcaggccagagacgcacacaaaagaacaaatcttggagctggtagtgctggagcagtttgttgccatcctacccaaagagctacagacttgggttcgagatcatcatccagagaatggagaggaggcagtgacagtgctggaggatttggagagtgaacttgatgaccctggacaaccggtttctctccgtcgacgaaaacgggaagtactagtagaagacatggtatctcaagaagaagctcagggattaccaagttctgagcttgatgctgtggagaaccagctcaagtgggcatcctgggagctccattccctaaggcactgtgatgatgatggtaggactgaaaatggagcactagctccaaagcaggagcttccttcagcattagaatcccatgaagttcctggcactctcaatatgggtgttcctcaaatttttaaatatggagaaacctgtttccccaagggcaggtttgaaagaaagagaaatccctctcgaaagaaacaacatatatgtgatgaatgtggaaaacacttcagtcagggctcagcccttattcttcatcaaagaattcacagtggggagaaaccttatggatgtgttgagtgtgggaaagcattcagccgaagttccattcttgtgcaacaccagagagtccacactggagaaaaaccttacaaatgtcttgaatgtgggaaagcctttagccagaattcggggcttattaatcatcagagaatccatactggggagaaaccttatgaatgcgttcagtgtgggaaatcgtatagtcaaagctcaaatctttttagacatcagagaagacacaatgcagaaaaacttctgaatgttgtgaaagtttaagaaattgaaaaaaaaaaaagaatcagcactcaggtctttttcttcagaaatgaagacaaaatttaaaatatgaaatgatgcagaatagttttttccctattgactgtcagaaaatccactgggaaatgtaaaaatcttcactcaccattatgatatttatcttgaaagaaatggtgtcatacctgcctagaaactgaaattttaaacttaattcaggtcttaatgcctaaattttccatgtgatgtttatagtctgtattacttctccaaataatgaactacctgattcattgtccctttcttgaaagtttcttttttaagacaaatacattatttctgcattgatcattgaaatgttctttatatggatacattcccttatatattaaaaggcaacaggaattacaaagtctgaaaaccattttaaaccatcttttaaaaatttacccttatttccttttacctaatttgaatatgcatttgagaaaataagaggataaaggatggctaagagcctcaaaatgaaccataagatctcagataagaagtgatggtgataaaacatcaaaaagtgaatggaacaccttgattggggaagatatgcaaatactttgatctaagaattgaaatgtatcaagaatttatattttgcctgcaggaaaattcaaaagctactcatcctctctataatttggagtcatcttactaatgaaaataatgttttcccatatattattaaaaagcatacagtctaaataataaacagttgtaaaataatgaaggtagaaattataacactagggaaaaatttgtagcggatggcagtgttgaaggcaaatgtaaacataagggtaatggtctgtcatggcttttagaaaaagatgatagagttcatcattattttgccttcatctttgttaaggacagaaaattccctgacaggtgggcaagtatcaggttacctattttttattcctttggtacaaaagggttgaacgtcaggctaaaaaagcagccatgcatttattattaaacattttctaccgacaaggcactgtgctaggtactgtaatcctaccataagtaggtaggtatttcttccactgtaaatcataggggtttgctgttttatgtgagttagcctcttccccttgtctgagcattcctcaggggaggtcacctgtgaggttcccagaactgtagttttttttaccagggtgttgtatttggagggggaggaggactcggctcaaaagagctagctggctctccagtgttcagaggtgagtccacgatactcttaccacaatttggaagtttgtgaatctttttaaagaactaatcaatctctaatagcattgaggttgtacctacatattaagttgaatggactgttctatttaaaaaataaacaactagacaattaactagtttattaacctatcacaattgaatttttttttaattttcagtcttaacacattttttaaaatgtattaaagtaatacattgtagtagtaggattatatactccttggctgagaattccaagtactgtggttctactgtttagtggaaaactctggaagttaaaatatagaatatgagaggaggcttttttataatgggcatcattgtgtggaaaatgacccatgtgaatacaaatatttcctagttcagagattttggttatatctggtgcttggatcaagtttaaaaatggaaggtgagattttgcatgagcctattaaaaagcatagtaataaatgcaaggccagctggtggaaaagtgaggcagaatggagcttgtttataggttttctgataacaattataaaaaatgtgctttatagattaagatttattgaagtataaatatgtagtaatgatataatgtattttaagttatacaagaaaatgtagggacttttgtttgggtctttttctctttgtggctgaggggaaacaagtcagtgtccaataaagctgtaaactcctctgctctaagataaatgatgtgatttatttatttataactggcttctttccaagtaggttttcaggtggcatatttggaagacggctggaatgacagaattcttgtatcagagtaggtaagaagggagcaacctctcaatggctattatgtcatgctttttaagatcgtatgcggttcctatatacaaggaagcttccctgtggtagatttgtcataaatgccaaagatatttggtaatgtgagtgtagaaaaagtagtatgagggttggcaaatactgtttttgtcttggcagctctaatatctgcattgttcagaaaggattctgaggctaaggcaaagctctgtgggaaaaagggactggaccaaaaaaaactggatggtggcacacaagaagaggaaatgatgagatgtgtactttctatctctggttaggcttagtccccactagacaaattgattttaaatactatgtagtgatttttaaattccatccacacattcattacccacacagataatcatagaaatttgggggagtgcctagcttctgatgaagtggtgatatggcagtgccaagcagtggcatcgccagagtatctgtttggttagcaaatgagcagtcattttaggtcatgcagattgctgatatctgcccagtagccactgagcatttgctggttttttcttctggctttcttggaggttaagctctctgtagtcatacccagttggtacttgatctttagcaatatgtctcatattcatgtaaattgaagggagggttacatgtactgaaataatctgcatgctaggcattggcttagacaccgtacctatctcacttagatttgtggactaggaaagcaagattcagagatcatgtgacttgcatgtggcctagagataaaattcaaatctggttctgtagactccagggacatattcaccatgccatgggtggtggctattaaaccttgataaatttgtgtttatggttaacaaatgtgaaagctattaaacattgctggtttgaattttttacagtgcagaaatgtaaaatgaaaaaggatatttcctttcacagtgttaccgagaagtcatgataatttcgtttgttcttccagatttaggcatatacttatttaatcaataatgtgttaacagctgacacctgtggttgctgtgacaggcactatttgaagtgctttatcatggattaactcttaatcctcagctaccgtataaagtaggacataaccccatttcacatgcactacactgagacttgcctcctctccccccacattgaagatgttcttttttcataactatatactattccattgcatgaatattctgtaatttatttaatcccctatggattgataattaggttcattatagatagaagtgtaattaacattcctgtacatgtattttgctacttgtgtgggtatttctgtaggatgaataactagaaatttattggatcaggtttcacatttgcagttttgaaaactactaccaaaaagatttcaccaatttacaactccatcattagtaagaatgcctgtttgcctatagtctgccaaccctgaatccttaaaaatttttgccaatctggtaggcaaaatttctttcttttctttgaatattaatgaggaggaacatcttttcatgtttcttggccatttgcatttcctattatgaattgcttttgcccattttcctttttttaattatgaaagtctaatgactaccttctcattgtataaaaaacacagttctttgaatagagagacccttttctccaatgctaccaatcacattccacttaccacagtttaacatacatcctctagtcacctttccgtacgaatatacatacacataaaaacactttttacataaataggatctcatattctgtagctttttaaaattttggtctcaaaaaaagataacaggtctttaaatttctttaatggttgaatatgattaaatactatgaaaatgccattatttattcccttaatttttttcctctcgctattacattgccaaagtaaacatcctattcagatgtctttgtgcatgtgtgtgaatatttctttagtctggagtccagtaaggtggatttttggatcaaagggtttgttctctgtccaccttcagtcttcccaaaggccttcataactgtattttcaccaagtgtatggagaatgttcatttccccatataaccatacctacacttgatagtttttatctgttgggcgaaaaagaaccttttcttattttgcatttccctgattataaaaaaaaatggtgagattggggttattttcatgtttattggccatttatagtttactgtggattgtttgtatcccttacctgctttctattgggttatgtgtggatatattgtttttatttgttcagcatctccttccccatcttctggtaacacaacctttatttatttgtggggaacctattccctgtggcttaggtgagcatgtgaccaggcctggcctcctgagtcccacagcttcctagccacagtgataaaagaatgggtatataacttaagccaggctaaggaaagcccttaacagaacttctgctggaactactggaaagaaggctttatggagatcccaggaaccaaggaccatgtaagcctgaatttgtgccatgtggagagagtctgtctgaggagaaactcggatgctagcagaaatggaaagagaactaagttctgatgtcatttttctggaggccctagatccagctgtgcctaaagcctgccctacctccggactttaaagttttgtgagccaataaagtccctttcttgtttaagataattgaattgagtttctgttctgattaatataggttatttgtattttcttattgatttgtagaaaacctttgtaattttaaattctagactttatgcactatataagttaataaaattagcatggccttccatgatttggcctgtgtcaa

SEQ ID NO: 201876 - DNA, 6282 bp, Homo sapiens
  Payload ID: 19826
  Gene Name: zinc finger protein 24
  Uniprot ID: P17028
  ENST ID: ENST00000399061
  CDS Start-End: 171-1277
gcgccgggggcttctgggaaaaggcttgtgaacggcgtttctgcgtctgccgtggacagcgaagctgctgcggttcctgagccggaggagtgcctgtgaagaaaacggggtattgccctgaggcttatattctgcctcagttgtcttttcttgaaatattataaatcagaatgtctgcacagtcagtggaagaagattcaatacttatcatcccaactccagatgaagaggaaaaaattctgagagtgaagttggaggaggatcctgatggcgaagagggatcaagtatcccctggaaccatctcccagacccagagattttccgacagcgattcaggcagtttggataccaggattcacctgggccccgtgaggctgtgagccagctccgagaactttgccgtctgtggctcaggccagagacgcacacaaaagaacaaatcttggagctggtagtgctggagcagtttgttgccatcctacccaaagagctacagacttgggttcgagatcatcatccagagaatggagaggaggcagtgacagtgctggaggatttggagagtgaacttgatgaccctggacaaccggtttctctccgtcgacgaaaacgggaagtactagtagaagacatggtatctcaagaagaagctcagggattaccaagttctgagcttgatgctgtggagaaccagctcaagtgggcatcctgggagctccattccctaaggcactgtgatgatgatggtaggactgaaaatggagcactagctccaaagcaggagcttccttcagcattagaatcccatgaagttcctggcactctcaatatgggtgttcctcaaatttttaaatatggagaaacctgtttccccaagggcaggtttgaaagaaagagaaatccctctcgaaagaaacaacatatatgtgatgaatgtggaaaacacttcagtcagggctcagcccttattcttcatcaaagaattcacagtggggagaaaccttatggatgtgttgagtgtgggaaagcattcagccgaagttccattcttgtgcaacaccagagagtccacactggagaaaaaccttacaaatgtcttgaatgtgggaaagcctttagccagaattcggggcttattaatcatcagagaatccatactggggagaaaccttatgaatgcgttcagtgtgggaaatcgtatagtcaaagctcaaatctttttagacatcagagaagacacaatgcagaaaaacttctgaatgttgtgaaagtttaagaaattgaaaaaaaaaaaagaatcagcactcaggtctttttcttcagaaatgaagacaaaatttaaaatatgaaatgatgcagaatagttttttccctattgactgtcagaaaatccactgggaaatgtaaaaatcttcactcaccattatgatatttatcttgaaagaaatggtgtcatacctgcctagaaactgaaattttaaacttaattcaggtcttaatgcctaaattttccatgtgatgtttatagtctgtattacttctccaaataatgaactacctgattcattgtccctttcttgaaagtttcttttttaagacaaatacattatttctgcattgatcattgaaatgttctttatatggatacattcccttatatattaaaaggcaacaggaattacaaagtctgaaaaccattttaaaccatcttttaaaaatttacccttatttccttttacctaatttgaatatgcatttgagaaaataagaggataaaggatggctaagagcctcaaaatgaaccataagatctcagataagaagtgatggtgataaaacatcaaaaagtgaatggaacaccttgattggggaagatatgcaaatactttgatctaagaattgaaatgtatcaagaatttatattttgcctgcaggaaaattcaaaagctactcatcctctctataatttggagtcatcttactaatgaaaataatgttttcccatatattattaaaaagcatacagtctaaataataaacagttgtaaaataatgaaggtagaaattataacactagggaaaaatttgtagcggatggcagtgttgaaggcaaatgtaaacataagggtaatggtctgtcatggcttttagaaaaagatgatagagttcatcattattttgccttcatctttgttaaggacagaaaattccctgacaggtgggcaagtatcaggttacctattttttattcctttggtacaaaagggttgaacgtcaggctaaaaaagcagccatgcatttattattaaacattttctaccgacaaggcactgtgctaggtactgtaatcctaccataagtaggtaggtatttcttccactgtaaatcataggggtttgctgttttatgtgagttagcctcttccccttgtctgagcattcctcaggggaggtcacctgtgaggttcccagaactgtagttttttttaccagggtgttgtatttggagggggaggaggactcggctcaaaagagctagctggctctccagtgttcagaggtgagtccacgatactcttaccacaatttggaagtttgtgaatctttttaaagaactaatcaatctctaatagcattgaggttgtacctacatattaagttgaatggactgttctatttaaaaaataaacaactagacaattaactagtttattaacctatcacaattgaatttttttttaattttcagtcttaacacattttttaaaatgtattaaagtaatacattgtagtagtaggattatatactccttggctgagaattccaagtactgtggttctactgtttagtggaaaactctggaagttaaaatatagaatatgagaggaggcttttttataatgggcatcattgtgtggaaaatgacccatgtgaatacaaatatttcctagttcagagattttggttatatctggtgcttggatcaagtttaaaaatggaaggtgagattttgcatgagcctattaaaaagcatagtaataaatgcaaggccagctggtggaaaagtgaggcagaatggagcttgtttataggttttctgataacaattataaaaaatgtgctttatagattaagatttattgaagtataaatatgtagtaatgatataatgtattttaagttatacaagaaaatgtagggacttttgtttgggtctttttctctttgtggctgaggggaaacaagtcagtgtccaataaagctgtaaactcctctgctctaagataaatgatgtgatttatttatttataactggcttctttccaagtaggttttcaggtggcatatttggaagacggctggaatgacagaattcttgtatcagagtaggtaagaagggagcaacctctcaatggctattatgtcatgctttttaagatcgtatgcggttcctatatacaaggaagcttccctgtggtagatttgtcataaatgccaaagatatttggtaatgtgagtgtagaaaaagtagtatgagggttggcaaatactgtttttgtcttggcagctctaatatctgcattgttcagaaaggattctgaggctaaggcaaagctctgtgggaaaaagggactggaccaaaaaaaactggatggtggcacacaagaagaggaaatgatgagatgtgtactttctatctctggttaggcttagtccccactagacaaattgattttaaatactatgtagtgatttttaaattccatccacacattcattacccacacagataatcatagaaatttgggggagtgcctagcttctgatgaagtggtgatatggcagtgccaagcagtggcatcgccagagtatctgtttggttagcaaatgagcagtcattttaggtcatgcagattgctgatatctgcccagtagccactgagcatttgctggttttttcttctggctttcttggaggttaagctctctgtagtcatacccagttggtacttgatctttagcaatatgtctcatattcatgtaaattgaagggagggttacatgtactgaaataatctgcatgctaggcattggcttagacaccgtacctatctcacttagatttgtggactaggaaagcaagattcagagatcatgtgacttgcatgtggcctagagataaaattcaaatctggttctgtagactccagggacatattcaccatgccatgggtggtggctattaaaccttgataaatttgtgtttatggttaacaaatgtgaaagctattaaacattgctggtttgaattttttacagtgcagaaatgtaaaatgaaaaaggatatttcctttcacagtgttaccgagaagtcatgataatttcgtttgttcttccagatttaggcatatacttatttaatcaataatgtgttaacagctgacacctgtggttgctgtgacaggcactatttgaagtgctttatcatggattaactcttaatcctcagctaccgtataaagtaggacataaccccatttcacatgcactacactgagacttgcctcctctccccccacattgaagatgttcttttttcataactatatactattccattgcatgaatattctgtaatttatttaatcccctatggattgataattaggttcattatagatagaagtgtaattaacattcctgtacatgtattttgctacttgtgtgggtatttctgtaggatgaataactagaaatttattggatcaggtttcacatttgcagttttgaaaactactaccaaaaagatttcaccaatttacaactccatcattagtaagaatgcctgtttgcctatagtctgccaaccctgaatccttaaaaatttttgccaatctggtaggcaaaatttctttcttttctttgaatattaatgaggaggaacatcttttcatgtttcttggccatttgcatttcctattatgaattgcttttgcccattttcctttttttaattatgaaagtctaatgactaccttctcattgtataaaaaacacagttctttgaatagagagacccttttctccaatgctaccaatcacattccacttaccacagtttaacatacatcctctagtcacctttccgtacgaatatacatacacataaaaacactttttacataaataggatctcatattctgtagctttttaaaattttggtctcaaaaaaagataacaggtctttaaatttctttaatggttgaatatgattaaatactatgaaaatgccattatttattcccttaatttttttcctctcgctattacattgccaaagtaaacatcctattcagatgtctttgtgcatgtgtgtgaatatttctttagtctggagtccagtaaggtggatttttggatcaaagggtttgttctctgtccaccttcagtcttcccaaaggccttcataactgtattttcaccaagtgtatggagaatgttcatttccccatataaccatacctacacttgatagtttttatctgttgggcgaaaaagaaccttttcttattttgcatttccctgattataaaaaaaaatggtgagattggggttattttcatgtttattggccatttatagtttactgtggattgtttgtatcccttacctgctttctattgggttatgtgtggatatattgtttttatttgttcagcatctccttccccatcttctggtaacacaacctttatttatttgtggggaacctattccctgtggcttaggtgagcatgtgaccaggcctggcctcctgagtcccacagcttcctagccacagtgataaaagaatgggtatataacttaagccaggctaaggaaagcccttaacagaacttctgctggaactactggaaagaaggctttatggagatcccaggaaccaaggaccatgtaagcctgaatttgtgccatgtggagagagtctgtctgaggagaaactcggatgctagcagaaatggaaagagaactaagttctgatgtcatttttctggaggccctagatccagctgtgcctaaagcctgccctacctccggactttaaagttttgtgagccaataaagtccctttcttgtttaagataattgaattgagtttctgttctgattaatataggttatttgtattttcttattgatttgtagaaaacctttgtaattttaaattctagactttatgcactatataagttaataaaattagcatggccttccatga

SEQ ID NO: 201877 - DNA, 756 bp, Homo sapiens
  Payload ID: 19826
  Gene Name: zinc finger protein 24
  ENST ID: ENST00000590140
  CDS Start-End: 341-756
caggatctaggatgggatactgtggtgagcaagacagacaaggtccctgcccttaagggacttaaagacaaaacaaaacaaaaaataaaacaagtaaataaatgagatcacttccattaataacagtgccatgaagggtcatgcgccatgaaaggcaggtggtgaggctgaggatcttgggccacaatgagccgaggagctgaggggattactgagaggatccacaagataatgcacgtgaaagggcttgcgaaattgagtgcctgtgaagaaaacggggtattgccctgaggcttatattctgcctcagttgtcttttcttgaaatattataaatcagaatgtctgcacagtcagtggaagaagattcaatacttatcatcccaactccagatgaagaggaaaaaattctgagagtgaagttggaggaggatcctgatggcgaagagggatcaagtatcccctggaaccatctcccagacccagagattttccgacagcgattcaggcagtttggataccaggattcacctgggccccgtgaggctgtgagccagctccgagaactttgccgtctgtggctcaggccagagacgcacacaaaagaacaaatcttggagctggtagtgctggagcagtttgttgccatcctacccaaagagctacagacttgggttcgagatcatcatccagagaatggagaggaggcagtgacagtgctggaggatttggagagtgaacttgatgaccctggaca

SEQ ID NO: 201878 - DNA, 578 bp, Homo sapiens
  Payload ID: 19826
  Gene Name: zinc finger protein 24
  ENST ID: ENST00000589539
  CDS Start-End: 273-578
tttggtcatctgaaatccgcggtcctgagtgctgggaagaggggctagaggacgtcgggccggggccggggccggggccgggatacacagcaggtctatgcagcagtaaggtgggcgatccacctgggacgaggtaccctgcccaaacattgtcgggaccgtgggccttccctccatttcccacaagcggagtgcctgtgaagaaaacggggtattgccctgaggcttatattctgcctcagttgtcttttcttgaaatattataaatcagaatgtctgcacagtcagtggaagaagattcaatacttatcatcccaactccagatgaagaggaaaaaattctgagagtgaagttggaggaggatcctgatggcgaagagggatcaagtatcccctggaaccatctcccagacccagagattttccgacagcgattcaggcagtttggataccaggattcacctgggccccgtgaggctgtgagccagctccgagaactttgccgtctgtggctcaggccagagacgcacacaaaagaacaaatcttggagctggtagtgctggagcagtttgttgcc

SEQ ID NO: 201879 - DNA, 7419 bp, Homo sapiens
  Payload ID: 19826
  Gene Name: zinc finger protein 24
  Uniprot ID: P17028
  ENST ID: ENST00000589881
  CDS Start-End: 5-586
cagaatgtctgcacagtcagtggaagaagattcaatacttatcatcccaactccagatgaagaggaaaaaattctgagagtgaagttggaggaggatcctgatggcgaagagggatcaagtatcccctggaaccatctcccagacccagagattttccgacagcgattcaggcagtttggataccaggattcacctgggccccgtgaggctgtgagccagctccgagaactttgccgtctgtggctcaggccagagacgcacacaaaagaacaaatcttggagctggtagtgctggagcagtttgttgccatcctacccaaagagctacagacttgggttcgagatcatcatccagagaatggagaggaggcagtgacagtgctggaggatttggagagtgaacttgatgaccctggacaaccggtttctctccgtcgacgaaaacgggaagtactagtagaagacatggtatctcaagaagaagctcagggattaccaagttctgagcttgatgctgtggagaaccagctcaagtgggcatcctgggagctccattccctaaggcactgtgtaatcattccttgaagtagttggagatggtgctggtatgccactgaatgaggtctgagcaggttttcttcacatctgaggggacagtgccagccagtcaacttttggggtggggctgaagtctgctgaaaatctgcagttttacatgtttcatgggacattcttctgtgcaataaagtttgagaagtatcattcttgatatatggggctgatattttcaacttctcatcatctgaattttagagtgacttttcacctgcgttccttatttcagctgtctagtctcttccacacttgggaatttctgtttcctgtgtgccgtttgtctccacttaatcttcacgctcctctgtttttcaagtctccaagcctcactatcctcctctaacctttcagtctctctctcttagccttatctcctgacttgatctttttgttaattatttactgttttcctcttcgctgaaggcagttgctaaccctatatgaactggatctttactccttaaggcatgaagttttagaaaagtcttaaatgacacttgctgttatctctgcctgcgtgtgagtgatgctaacccatgttggtaattcaggcttttctttcattggacacgtttcactgaggcttagaaataacgatttttctaagtaccatgacaaataccacatgggagaagctgcttttattggaaaactttcatttattaggggcatactgaatttttatgtcatgtctttggttaacacaggaggcccccagcttatcttcagccccttcttgtcaagactcctgtgttctgcttttaggctaacattggctgtgacctgacttggcttgttcatttcagaaatagccactttctgacatgtttttctaatttacatctttgtattttgatgtaatttctccctttctcaaagtaaaagaacattataatgatttcctagtggccaattttattttatttttattcttacaaagtttcatccatacctagccacatcattttgactatctccctaaccatcttagaatctaccatctttctgacctttgttttctgactaccatttgtaaaccacttgcctatgttttattcagatatcccttatatcatgatgttatactgttattcagagtaatttcattttttcttttttgagaataggccttaacaccagtgtcagagtggtttatagatgtgtgctagctattttagttcattaaaaaaaaaattttttttaggtttcttttcccttaatagataatgaatgatatttacattttctgtttatttcagatgatgatggtaggactgaaaatggagcactagctccaaagcaggagcttccttcagcattagaatcccatgaagttcctggcactctcaatatgggtgttcctcaaatttttaaatatggagaaacctgtttccccaagggcaggtttgaaagaaagagaaatccctctcgaaagaaacaacatatatgtgatgaatgtggaaaacacttcagtcagggctcagcccttattcttcatcaaagaattcacagtggggagaaaccttatggatgtgttgagtgtgggaaagcattcagccgaagttccattcttgtgcaacaccagagagtccacactggagaaaaaccttacaaatgtcttgaatgtgggaaagcctttagccagaattcggggcttattaatcatcagagaatccatactggggagaaaccttatgaatgcgttcagtgtgggaaatcgtatagtcaaagctcaaatctttttagacatcagagaagacacaatgcagaaaaacttctgaatgttgtgaaagtttaagaaattgaaaaaaaaaaaagaatcagcactcaggtctttttcttcagaaatgaagacaaaatttaaaatatgaaatgatgcagaatagttttttccctattgactgtcagaaaatccactgggaaatgtaaaaatcttcactcaccattatgatatttatcttgaaagaaatggtgtcatacctgcctagaaactgaaattttaaacttaattcaggtcttaatgcctaaattttccatgtgatgtttatagtctgtattacttctccaaataatgaactacctgattcattgtccctttcttgaaagtttcttttttaagacaaatacattatttctgcattgatcattgaaatgttctttatatggatacattcccttatatattaaaaggcaacaggaattacaaagtctgaaaaccattttaaaccatcttttaaaaatttacccttatttccttttacctaatttgaatatgcatttgagaaaataagaggataaaggatggctaagagcctcaaaatgaaccataagatctcagataagaagtgatggtgataaaacatcaaaaagtgaatggaacaccttgattggggaagatatgcaaatactttgatctaagaattgaaatgtatcaagaatttatattttgcctgcaggaaaattcaaaagctactcatcctctctataatttggagtcatcttactaatgaaaataatgttttcccatatattattaaaaagcatacagtctaaataataaacagttgtaaaataatgaaggtagaaattataacactagggaaaaatttgtagcggatggcagtgttgaaggcaaatgtaaacataagggtaatggtctgtcatggcttttagaaaaagatgatagagttcatcattattttgccttcatctttgttaaggacagaaaattccctgacaggtgggcaagtatcaggttacctattttttattcctttggtacaaaagggttgaacgtcaggctaaaaaagcagccatgcatttattattaaacattttctaccgacaaggcactgtgctaggtactgtaatcctaccataagtaggtaggtatttcttccactgtaaatcataggggtttgctgttttatgtgagttagcctcttccccttgtctgagcattcctcaggggaggtcacctgtgaggttcccagaactgtagttttttttaccagggtgttgtatttggagggggaggaggactcggctcaaaagagctagctggctctccagtgttcagaggtgagtccacgatactcttaccacaatttggaagtttgtgaatctttttaaagaactaatcaatctctaatagcattgaggttgtacctacatattaagttgaatggactgttctatttaaaaaataaacaactagacaattaactagtttattaacctatcacaattgaatttttttttaattttcagtcttaacacattttttaaaatgtattaaagtaatacattgtagtagtaggattatatactccttggctgagaattccaagtactgtggttctactgtttagtggaaaactctggaagttaaaatatagaatatgagaggaggcttttttataatgggcatcattgtgtggaaaatgacccatgtgaatacaaatatttcctagttcagagattttggttatatctggtgcttggatcaagtttaaaaatggaaggtgagattttgcatgagcctattaaaaagcatagtaataaatgcaaggccagctggtggaaaagtgaggcagaatggagcttgtttataggttttctgataacaattataaaaaatgtgctttatagattaagatttattgaagtataaatatgtagtaatgatataatgtattttaagttatacaagaaaatgtagggacttttgtttgggtctttttctctttgtggctgaggggaaacaagtcagtgtccaataaagctgtaaactcctctgctctaagataaatgatgtgatttatttatttataactggcttctttccaagtaggttttcaggtggcatatttggaagacggctggaatgacagaattcttgtatcagagtaggtaagaagggagcaacctctcaatggctattatgtcatgctttttaagatcgtatgcggttcctatatacaaggaagcttccctgtggtagatttgtcataaatgccaaagatatttggtaatgtgagtgtagaaaaagtagtatgagggttggcaaatactgtttttgtcttggcagctctaatatctgcattgttcagaaaggattctgaggctaaggcaaagctctgtgggaaaaagggactggaccaaaaaaaactggatggtggcacacaagaagaggaaatgatgagatgtgtactttctatctctggttaggcttagtccccactagacaaattgattttaaatactatgtagtgatttttaaattccatccacacattcattacccacacagataatcatagaaatttgggggagtgcctagcttctgatgaagtggtgatatggcagtgccaagcagtggcatcgccagagtatctgtttggttagcaaatgagcagtcattttaggtcatgcagattgctgatatctgcccagtagccactgagcatttgctggttttttcttctggctttcttggaggttaagctctctgtagtcatacccagttggtacttgatctttagcaatatgtctcatattcatgtaaattgaagggagggttacatgtactgaaataatctgcatgctaggcattggcttagacaccgtacctatctcacttagatttgtggactaggaaagcaagattcagagatcatgtgacttgcatgtggcctagagataaaattcaaatctggttctgtagactccagggacatattcaccatgccatgggtggtggctattaaaccttgataaatttgtgtttatggttaacaaatgtgaaagctattaaacattgctggtttgaattttttacagtgcagaaatgtaaaatgaaaaaggatatttcctttcacagtgttaccgagaagtcatgataatttcgtttgttcttccagatttaggcatatacttatttaatcaataatgtgttaacagctgacacctgtggttgctgtgacaggcactatttgaagtgctttatcatggattaactcttaatcctcagctaccgtataaagtaggacataaccccatttcacatgcactacactgagacttgcctcctctccccccacattgaagatgttcttttttcataactatatactattccattgcatgaatattctgtaatttatttaatcccctatggattgataattaggttcattatagatagaagtgtaattaacattcctgtacatgtattttgctacttgtgtgggtatttctgtaggatgaataactagaaatttattggatcaggtttcacatttgcagttttgaaaactactaccaaaaagatttcaccaatttacaactccatcattagtaagaatgcctgtttgcctatagtctgccaaccctgaatccttaaaaatttttgccaatctggtaggcaaaatttctttcttttctttgaatattaatgaggaggaacatcttttcatgtttcttggccatttgcatttcctattatgaattgcttttgcccattttcctttttttaattatgaaagtctaatgactaccttctcattgtataaaaaacacagttctttgaatagagagacccttttctccaatgctaccaatcacattccacttaccacagtttaacatacatcctctagtcacctttccgtacgaatatacatacacataaaaacactttttacataaataggatctcatattctgtagctttttaaaattttggtctcaaaaaaagataacaggtctttaaatttctttaatggttgaatatgattaaatactatgaaaatgccattatttattcccttaatttttttcctctcgctattacattgccaaagtaaacatcctattcagatgtctttgtgcatgtgtgtgaatatttctttagtctggagtccagtaaggtggatttttggatcaaagggtttgttctctgtccaccttcagtcttcccaaaggccttcataactgtattttcaccaagtgtatggagaatgttcatttccccatataaccatacctacacttgatagtttttatctgttgggcgaaaaagaaccttttcttattttgcatttccctgattataaaaaaaaatggtgagattggggttattttcatgtttattggccatttatagtttactgtggattgtttgtatcccttacctgctttctattgggttatgtgtggatatattgtttttatttgttcagcatctccttccccatcttctggtaacacaacctttatttatttgtggggaacctattccctgtggcttaggtgagcatgtgaccaggcctggcctcctgagtcccacagcttcctagccacagtgataaaagaatgggtatataacttaagccaggctaaggaaagcccttaacagaacttctgctggaactactggaaagaaggctttatggagatcccaggaaccaaggaccatgtaagcctgaatttgtgccatgtggagagagtctgtctgaggagaaactcggatgctagcagaaatggaaagagaactaagttctgatgtcatttttctggaggccctagatccagctgtgcctaaagcctgccctacctccggactttaaagttttgtgagccaataaagtccctttcttgtttaagataattgaattgagtttctgttctgattaatataggttatttgtattttcttattgatttgtagaaaacctttgtaattttaaattctagactttatgcactatataagttaataaaattagcatggccttccatga

SEQ ID NO: 201880 - DNA, 569 bp, Homo sapiens
  Payload ID: 19826
  Gene Name: zinc finger protein 24
  ENST ID: ENST00000593130
  CDS Start-End: 282-569
aggctacaaaccggtacggcatgttgctgtactgaatactgtagagaattgtaacacaatgctaactatttgtgtatcaaaacatagaaaagataagagtaaaatatgatataaaatgtttgaaaaaaaaaaaagatatgcctgtacagggcacttaccatgaatggacctcgctggattggaagttgctctaagaagtcatgcctgtgaagaaaacggggtattgccctgaggcttatattctgcctcagttgtcttttcttgaaatattataaatcagaatgtctgcacagtcagtggaagaagattcaatacttatcatcccaactccagatgaagaggaaaaaattctgagagtgaagttggaggaggatcctgatggcgaagagggatcaagtatcccctggaaccatctcccagacccagagattttccgacagcgattcaggcagtttggataccaggattcacctgggccccgtgaggctgtgagccagctccgagaactttgccgtctgtggctcaggccagagacgcacacaaaagaacaaatcttggagctggtagtg

SEQ ID NO: 201881 - DNA, 4795 bp, Homo sapiens
  Payload ID: 19827
  Gene Name: zinc finger protein 248
  Uniprot ID: Q8NDW4
  ENST ID: ENST00000357328
  CDS Start-End: 206-1945
gctccaggcgagtccttccctggactccagtcccttgtgggaaacaatccctcgcctccggaggcggcgaggagcggcggaacctaaattggtaataaatcaataagaaatatttacattcactcagtgaaaagtgtcatgtctgagctcagcatatatcggagccacacatggacacctctccttcctccactaagagcggaaaatgaacaaatcccaggaacaagtgtcattcaaggatgtatgtgtggacttcactcaggaagagtggtatctgctggaccctgctcagaagattctatacagagatgtgatcctggaaaattatagcaatcttgtctcagtagggtattgcattactaaaccagaagtgatctttaagatcgagcaaggagaagagccctggatattagaaaaaggattcccaagccagtgccacccagaaaggaaatggaaagttgatgacgtgttagagagcagccaggaaaatgaagatgaccatttttgggagcttctattccacaacaacaaaacagtaagtgtagaaaatggagatagaggaagcaaaactttcaatttgggcacagaccctgtttctttaagaaattatccctataaaatatgtgactcatgtgaaatgaatttgaaaaatatttcgggcttaattattagtaaaaagaactgttccagaaagaagcctgatgagtttaatgtatgtgagaaattgctccttgatattaggcatgagaaaatccctattggagagaagtcttataaatatgatcaaaaaaggaatgccattaattatcaccaggatctcagtcagccaagttttggccaatcttttgagtatagtaaaaatggacaaggcttccatgatgaggcagcattttttacaaataagagatctcagataggagagacagtctgtaaatataacgaatgtggaagaaccttcattgaaagtttaaagctgaatatatctcaaagacctcatttggaaatggagccgtatggatgcagtatttgcgggaagtccttctgcatgaatttaaggtttggacatcagagagctcttacaaaggacaatccttatgaatataatgaatatggggaaatcttctgtgacaattcagctttcattatccatcagggagcttacacaagaaagattctccgtgaatataaagtgagtgacaaaacctgggaaaagtcagctctcttaaaacatcaaatagtacacatggggggaaagtcttatgattacaatgaaaatgggagtaatttcagcaagaagtcacatcttacccagcttcggagagctcacacaggagaaaaaacctttgaatgtggtgaatgtgggaaaaccttctgggagaagtcaaacctcactcaacatcagagaacacacacaggagagaagccctatgaatgtactgaatgtgggaaagccttttgccagaaaccacacctgaccaaccatcagcgaacacatacaggagaaaaaccctatgaatgtaagcaatgtggaaaaacattctgtgtgaagtcaaacctcactgaacatcagagaacacacacaggggagaagccctatgaatgtaatgcatgtgggaaatccttctgccacagatcagccctcactgtgcatcagagaacacacacaggggagaaaccgtttatatgtaatgaatgtggaaaatccttctgtgtgaagtcaaacctcattgtacatcaaagaactcacactggggagaaaccatataagtgtaatgaatgtgggaaaaccttctgtgaaaaatcagctctcactaaacatcagaggactcacacaggggagaagccgtatgagtgtaatgcatgtgggaagacctttagtcagaggtcagtgctcaccaaacatcagagaattcacacaagggtgaaagctctttcaacatcctgaatgttagaagccttcatacacttgtgaaattggttatacagtttcaaaaaaggagatcagagaaagccaaagaatgtcagaaatttgtagaaaatgacttcttgtttgaatatgtaaaagctttcaagaaaaattaaaacttttcattagaaaatttgtactgaggggaattctattcatctaagtaatatggtgaaaatatttatctggaatttatgttgtttagtgttatattccagacgtgataccaaaattttgttgcaaatataatggacaatatttatttatacccatattcacagtggaatctgaagcttataaaagttgaatgacagcagcattaaacatatatgtgaagagtccccgatgtttgtagaccttatgtgagtatgcaaatatataaatttgagtatgcttgatttgtatattggaactcaacatgatcataaggagaagatacgtacccttaattgagtaactactatggtatttgttaatattttctacactaaataccattggtgtctttataggttgacataattatatatgtgtatgtacatatgtttgtgtgtatatgtaaatatatttctacacacatacttaaatatagtgatgtgctagtataacctcatactgacttaaaagttctgattgttaaattttaaggaattttgtgagccagttattaaaagcagtcattatttaaaatatgtaaacttacagttaaaaacaaaggtaataaatactcagcactcatcacttcctaattattttgctacatttcactattacctttgctgttttacttatttaatctgtatgatgaaaatactgtataatagtgtgcactgcacatctgtctcttcccagctccacattcagtgctgtcttggtagcttggacttagtgggagtgtttacaccatggaaattgacaaactataaatcagggttttaattttctcagagaacctgctgtcaaatatttacagcacatcactgtgtatatatgaaaacgtatttggcaatacaaaccacataccccttctatttcctgacataaataaatggctatggccatttacagctgaaccacgtcttcaagaaagaagccaaaaatatttccgtgaggtttttaactacctctgaatctgtcctactctaaatactaccggagtctctttgtaggttggccagtatatgtttttagtgaaatattatttcacaaagaactatatcacgtacctttcctctgactgtttcctggcatatatgcatgaatatggccattattgaactatcacttcagtaaagaagttaaacagtacttttctgaggtttttcagctacctctgggtcattctgtaatgtaaatgttgttaataagaatggtttttacataaattatgcaaaggttaacaagcagtaacactgcactcctcaaaaagtggcggtatgtaatgaaaggcccttttgatatccttgatttttcattgtgtatctgtttgggcacggtctatgtaacactagttctgcgtattagtattttagagtatctctgcctcccttgtcctgttgtttcttttgcccccttggaacacattggtcagcagttctaagagacactgcccacatgatggccattccctacttcatccttgctgagctaaattttatatttttgtgcatccttctcccagatgacttaggtggtaagtccagattagtcaaagctaatcatggaagttccattttaatgattctgttggggtgaacttgggagcaatgagatgtttgggaagtattgtgtagtacttctgggaaagatctccttgatacaacattgtcatgacatgagaagagactctgctgggctttttcatgtctgtaacatggtattggcttatcgtttttatctctgaagggcagtagcctgaagataacagtgcacaaggtgggaaaagccagctcagaggtgacgttgccgagctactctgctctctatacctgttctctactgggactttttataaccctcaataactgttttttatttggtcttagggctgtctgatacttagagctgaaggcattccagctgacacagaggaatatttttctaagtgttaatgttctatatggtaattagggggaagaattatttcttttcacaagttaatatagggatggctgtttgtatcagccatggttctttctggtggaaaacagaattctccaactaaaaatattttaatggcagactgattacagtggtgtgggccagaaacaagggacagtgaaacacccagagacttgtatcagcaggaagccattgccattctgagccttgaagggcaaggagggaaacagtgttaccagagcccagtaagaactgctgtcatgaaggaggggccaccttgtaagagacatcattactaccagaactgtggtgccaaattgctggtgtctctctttggagaaaccaaccagatacatctgctggagagcccaggtgggcacagagaagggtggagagagaatctgggaagagaaatggagaataagcagcacagtgttattcatttctgtaaattcctatgtagaaggctcagtgttagaaataaagttattctactagttgcaagttaagtgtttctgtttgttctgctttcctgttagcataagtaaactccctttggaactacacaggtatgtctctccttcaacatgtgtgaagcagacattatattaaattacattattcatacctccctgtggtgtttcttattgtatgtggtgtaaggtaagcagctctgtattcttccaaataaatagccagttgtccctg

SEQ ID NO: 201882 - DNA, 1286 bp, Homo sapiens
  Payload ID: 19827
  Gene Name: zinc finger protein 248
  Uniprot ID: Q8NDW4
  ENST ID: ENST00000374648
  CDS Start-End: 500-859
caattatccacgggagactcggttttcctctctgtaaattacggatattaggaatacttgccgcctggggttgttttgagcactttcattgtttaggtgctgtatttattgggtgtgcgttccctgggagagcccgagggagacggctcctgcaccggccccaagggcctctctgcccgtggagtgcaggagcgaaggggctggcctagctgaccaccagggcccctgctggctctgaccgccctcctatcccaagtaattatttacacgtttcgcgttcgcttatgtattatgtgtaatcatggcacagtatcctgaagccgtcggagtctgtgtgctggtgcaaggtctgggacaaatttaagaagagagagaacctaaattggtaataaatcaataagaaatatttacattcactcagtgaaaagtgtcatgtctgagctcagcatatatcggagccacacatggacacctctccttcctccactaagagcggaaaatgaacaaatcccaggaacaagtgtcattcaaggatgtatgtgtggacttcactcaggaagagtggtatctgctggaccctgctcagaagattctatacagagatgtgatcctggaaaattatagcaatcttgtctcagtagggtattgcattactaaaccagaagtgatctttaagatcgagcaaggagaagagccctggatattagaaaaaggattcccaagccagtgccacccagaaaggaaatggaaagttgatgacgtgttagagagcagccaggaaaatgaagatgaccatttttgggagcttctattccacaacaacaaaacatggaatctgaagcttataaaagttgaatgacagcagcattaaacatatatgtgaagagtccccgatgtttgtagaccttatgtgagtatgcaaatatataaatttgagtatgcttgatttgtatattggaactcaacatgatcataaggagaagatacgtacccttaattgagtaactactatggtatttgttaatattttctacactaaataccattggtgtctttataggttgacataattatatatgtgtatgtacatatgtttgtgtgtatatgtaaatatatttctacacacatacttaaatatagtgatgtgctagtataacctcatactgacttaaaagttctgattgttaaattttaaggaattttgtgagccagttattaaaagcagtcattatttaaaatatgtaaacttacagttaaaaacaaaggtaataaatactcagcactca

SEQ ID NO: 201883 - DNA, 5141 bp, Homo sapiens
  Payload ID: 19827
  Gene Name: zinc finger protein 248
  Uniprot ID: Q8NDW4
  ENST ID: ENST00000395867
  CDS Start-End: 552-2291
ggggctgcgggggagagcgactgcgccaggtccgcgacaaatgaattagacacaattatccacgggagactcggttttcctctctgtaaattacggatattaggaatacttgccgcctggggttgttttgagcactttcattgtttaggtgctgtatttattgggtgtgcgttccctgggagagcccgagggagacggctcctgcaccggccccaagggcctctctgcccgtggagtgcaggagcgaaggggctggcctagctgaccaccagggcccctgctggctctgaccgccctcctatcccaagtaattatttacacgtttcgcgttcgcttatgtattatgtgtaatcatggcacagtatcctgaagccgtcggagtctgtgtgctggtgcaaggtctgggacaaatttaagaagagagagaacctaaattggtaataaatcaataagaaatatttacattcactcagtgaaaagtgtcatgtctgagctcagcatatatcggagccacacatggacacctctccttcctccactaagagcggaaaatgaacaaatcccaggaacaagtgtcattcaaggatgtatgtgtggacttcactcaggaagagtggtatctgctggaccctgctcagaagattctatacagagatgtgatcctggaaaattatagcaatcttgtctcagtagggtattgcattactaaaccagaagtgatctttaagatcgagcaaggagaagagccctggatattagaaaaaggattcccaagccagtgccacccagaaaggaaatggaaagttgatgacgtgttagagagcagccaggaaaatgaagatgaccatttttgggagcttctattccacaacaacaaaacagtaagtgtagaaaatggagatagaggaagcaaaactttcaatttgggcacagaccctgtttctttaagaaattatccctataaaatatgtgactcatgtgaaatgaatttgaaaaatatttcgggcttaattattagtaaaaagaactgttccagaaagaagcctgatgagtttaatgtatgtgagaaattgctccttgatattaggcatgagaaaatccctattggagagaagtcttataaatatgatcaaaaaaggaatgccattaattatcaccaggatctcagtcagccaagttttggccaatcttttgagtatagtaaaaatggacaaggcttccatgatgaggcagcattttttacaaataagagatctcagataggagagacagtctgtaaatataacgaatgtggaagaaccttcattgaaagtttaaagctgaatatatctcaaagacctcatttggaaatggagccgtatggatgcagtatttgcgggaagtccttctgcatgaatttaaggtttggacatcagagagctcttacaaaggacaatccttatgaatataatgaatatggggaaatcttctgtgacaattcagctttcattatccatcagggagcttacacaagaaagattctccgtgaatataaagtgagtgacaaaacctgggaaaagtcagctctcttaaaacatcaaatagtacacatggggggaaagtcttatgattacaatgaaaatgggagtaatttcagcaagaagtcacatcttacccagcttcggagagctcacacaggagaaaaaacctttgaatgtggtgaatgtgggaaaaccttctgggagaagtcaaacctcactcaacatcagagaacacacacaggagagaagccctatgaatgtactgaatgtgggaaagccttttgccagaaaccacacctgaccaaccatcagcgaacacatacaggagaaaaaccctatgaatgtaagcaatgtggaaaaacattctgtgtgaagtcaaacctcactgaacatcagagaacacacacaggggagaagccctatgaatgtaatgcatgtgggaaatccttctgccacagatcagccctcactgtgcatcagagaacacacacaggggagaaaccgtttatatgtaatgaatgtggaaaatccttctgtgtgaagtcaaacctcattgtacatcaaagaactcacactggggagaaaccatataagtgtaatgaatgtgggaaaaccttctgtgaaaaatcagctctcactaaacatcagaggactcacacaggggagaagccgtatgagtgtaatgcatgtgggaagacctttagtcagaggtcagtgctcaccaaacatcagagaattcacacaagggtgaaagctctttcaacatcctgaatgttagaagccttcatacacttgtgaaattggttatacagtttcaaaaaaggagatcagagaaagccaaagaatgtcagaaatttgtagaaaatgacttcttgtttgaatatgtaaaagctttcaagaaaaattaaaacttttcattagaaaatttgtactgaggggaattctattcatctaagtaatatggtgaaaatatttatctggaatttatgttgtttagtgttatattccagacgtgataccaaaattttgttgcaaatataatggacaatatttatttatacccatattcacagtggaatctgaagcttataaaagttgaatgacagcagcattaaacatatatgtgaagagtccccgatgtttgtagaccttatgtgagtatgcaaatatataaatttgagtatgcttgatttgtatattggaactcaacatgatcataaggagaagatacgtacccttaattgagtaactactatggtatttgttaatattttctacactaaataccattggtgtctttataggttgacataattatatatgtgtatgtacatatgtttgtgtgtatatgtaaatatatttctacacacatacttaaatatagtgatgtgctagtataacctcatactgacttaaaagttctgattgttaaattttaaggaattttgtgagccagttattaaaagcagtcattatttaaaatatgtaaacttacagttaaaaacaaaggtaataaatactcagcactcatcacttcctaattattttgctacatttcactattacctttgctgttttacttatttaatctgtatgatgaaaatactgtataatagtgtgcactgcacatctgtctcttcccagctccacattcagtgctgtcttggtagcttggacttagtgggagtgtttacaccatggaaattgacaaactataaatcagggttttaattttctcagagaacctgctgtcaaatatttacagcacatcactgtgtatatatgaaaacgtatttggcaatacaaaccacataccccttctatttcctgacataaataaatggctatggccatttacagctgaaccacgtcttcaagaaagaagccaaaaatatttccgtgaggtttttaactacctctgaatctgtcctactctaaatactaccggagtctctttgtaggttggccagtatatgtttttagtgaaatattatttcacaaagaactatatcacgtacctttcctctgactgtttcctggcatatatgcatgaatatggccattattgaactatcacttcagtaaagaagttaaacagtacttttctgaggtttttcagctacctctgggtcattctgtaatgtaaatgttgttaataagaatggtttttacataaattatgcaaaggttaacaagcagtaacactgcactcctcaaaaagtggcggtatgtaatgaaaggcccttttgatatccttgatttttcattgtgtatctgtttgggcacggtctatgtaacactagttctgcgtattagtattttagagtatctctgcctcccttgtcctgttgtttcttttgcccccttggaacacattggtcagcagttctaagagacactgcccacatgatggccattccctacttcatccttgctgagctaaattttatatttttgtgcatccttctcccagatgacttaggtggtaagtccagattagtcaaagctaatcatggaagttccattttaatgattctgttggggtgaacttgggagcaatgagatgtttgggaagtattgtgtagtacttctgggaaagatctccttgatacaacattgtcatgacatgagaagagactctgctgggctttttcatgtctgtaacatggtattggcttatcgtttttatctctgaagggcagtagcctgaagataacagtgcacaaggtgggaaaagccagctcagaggtgacgttgccgagctactctgctctctatacctgttctctactgggactttttataaccctcaataactgttttttatttggtcttagggctgtctgatacttagagctgaaggcattccagctgacacagaggaatatttttctaagtgttaatgttctatatggtaattagggggaagaattatttcttttcacaagttaatatagggatggctgtttgtatcagccatggttctttctggtggaaaacagaattctccaactaaaaatattttaatggcagactgattacagtggtgtgggccagaaacaagggacagtgaaacacccagagacttgtatcagcaggaagccattgccattctgagccttgaagggcaaggagggaaacagtgttaccagagcccagtaagaactgctgtcatgaaggaggggccaccttgtaagagacatcattactaccagaactgtggtgccaaattgctggtgtctctctttggagaaaccaaccagatacatctgctggagagcccaggtgggcacagagaagggtggagagagaatctgggaagagaaatggagaataagcagcacagtgttattcatttctgtaaattcctatgtagaaggctcagtgttagaaataaagttattctactagttgcaagttaagtgtttctgtttgttctgctttcctgttagcataagtaaactccctttggaactacacaggtatgtctctccttcaacatgtgtgaagcagacattatattaaattacattattcatacctccctgtggtgtttcttattgtatgtggtgtaaggtaagcagctctgtattcttccaaataaatagccagttgtccctg

SEQ ID NO: 201884 - DNA, 698 bp, Homo sapiens
  Payload ID: 19827
  Gene Name: zinc finger protein 248
  ENST ID: ENST00000395873
  CDS Start-End: 399-698
tccctcgcctccggaggcggcgaggagcggcgggtgagccccggagcactgggcgagggccagggggtccccgcgctgccctgaaggcgggcgggcggcggctagacctcggcggtggggagggacccctggcgcctgcggcgacggtgggacgagggcgtctctgtcagaaggggatgaggtctggcgtgggaacgcgagttccggggctcccgggggtccgtatgcgtccagtccctgcgcctggcgctcagcgaagtcctgtagcacgggaacctaaattggtaataaatcaataagaaatatttacattcactcagtgaaaagtgtcatgtctgagctcagcatatatcggagccacacatggacacctctccttcctccactaagagcggaaaatgaacaaatcccaggaacaagtgtcattcaaggatgtatgtgtggacttcactcaggaagagtggtatctgctggaccctgctcagaagattctatacagagatgtgatcctggaaaattatagcaatcttgtctcagtagggtattgcattactaaaccagaagtgatctttaagatcgagcaaggagaagagccctggatattagaaaaaggattcccaagccagtgccacccagaaaggaaatggaaagttgatgacgtgttagagagcagccaggaaaatgaagatgaccatttt

SEQ ID NO: 201885 - DNA, 436 bp, Homo sapiens
  Payload ID: 19827
  Gene Name: zinc finger protein 248
  ENST ID: ENST00000395874
  CDS Start-End: 228-436
cgcatgtgcatccccgcctcccgctccaggcgagtccttccctggactccagtcccttgtgggaaacaatccctcgcctccggaggcggcgaggagcggcggaacctaaattggtaataaatcaataagaaatatttacattcactcagtgaaaagtgtcatgtctgagctcagcatatatcggagccacacatggacacctctccttcctccactaagagcggaaaatgaacaaatcccaggaacaagtgtcattcaaggatgtatgtgtggacttcactcaggaagagtggtatctgctggaccctgctcagaagattctatacagagatgtgatcctggaaaattatagcaatcttgtctcagtagggtattgcattactaaaccagaagtgatctttaagatcgagcaaggagaagagccctggatattaga

SEQ ID NO: 201886 - DNA, 1705 bp, Homo sapiens
  Payload ID: 19827
  Gene Name: zinc finger protein 248
  ENST ID: ENST00000485560
  CDS Start-End: 395-730
ccacgggagactcggttttcctctctgtaaattacggatattaggaatacttgccgcctggggttgttttgagcactttcattgtttaggtgctgtatttattgggtgtgcgttccctgggagagcccgagggagacggctcctgcaccggccccaagggcctctctgcccgtggagtgcaggagcgaaggggctggcctagctgaccaccagggcccctgctggctctgaccgccctcctatcccaagtaattatttacacgtttcgcgttcgcttatgtattatgtgtaatcatggcacagtatcctgaagccgtcggagtctgtgtgctggtgcaaggtctgggacaaatttaagaagagagagctctccttcctccactaagagcggaaaatgaacaaatcccaggaacaagtgtcattcaaggatgtatgtgtggacttcactcaggaagagtggtatctgctggaccctgctcagaagattctatacagagatgtgatcctggaaaattatagcaatcttgtctcagtagggtattgcattactaaaccagaagtgatctttaagatcgagcaaggagaagagccctggatattagaaaaaggattcccaagccagtgccacccagaaaggaaatggaaagttgatgacgtgttagagagcagccaggaaaatgaagatgaccatttttgggagcttctattccacaacaacaaaacacattgagaactgatgtgccttcacaggaaacttggcccgtgtgtttccaggattcttgatgtttcttctgagctccagggtcaggcagtatgattgaagtttctaagccagcatccttggaataaagtagcttttgaggtaataaggagtagtccctaagaacccacgtggaaggtcacacttctgatctgagacctttcagcagagcctcagagcagagtggaaaaggccaggaaagagcatgtctggaactgcctgttcactgaagacattcttggcactcctgtacagttaaataacacttggtgatgtcagcacatgcagaaaccatggcagactgtccagtggatgggctttcaggaagaattaggctgccagcatgagcaaggggcaggcagcacaggagaggacacgtcactgcccactgtgaggactgtgaggacacagtctggggaaggcatcgcctagatggggaacttgtccctgtgctcctccataagcctgctcccttcctgtctactcactgtctttgcagcctgtggagatgcatcattgttcctattctgatgttacaaaaatcaagtgacagtgttgtataaaggtcaaaaaatgggcctagaaaatgtgacttatttaatcatttcatttgttagtggcatactcagaaaataactaattagggctgagctcggtggctcatgcctgtaatcccagcactctgggaggccgacatgggaggactgcttgaatccaggaattcaagaccagcttgggcaacatagtgagacccggtctctacaaaaaaaaagtatctggctgtggtggtgcgcacttgtagttctcctacttaagaggccgagactggaggattacttgagcttcagcccaggagttcaaggctgcagtgagctgtgaatcataccactgtggtacagcccaggcaacagagccagaccctgtctcaaaacaaaaaacaaaaaa

SEQ ID NO: 201887 - DNA, 957 bp, Homo sapiens
  Payload ID: 19827
  Gene Name: zinc finger protein 248
  ENST ID: ENST00000615949
  CDS Start-End: 578-946
gtgccctgagcccgcggggaggaggcggggctgcgggggagagcgactgcgccaggtccgcgacaaatgaattagacacaattatccacgggagactcggttttcctctctgtaaattacggatattaggaatacttgccgcctggggttgttttgagcactttcattgtttaggtgctgtatttattgggtgtgcgttccctgggagagcccgagggagacggctcctgcaccggccccaagggcctctctgcccgtggagtgcaggagcgaaggggctggcctagctgaccaccagggcccctgctggctctgaccgccctcctatcccaagtaattatttacacgtttcgcgttcgcttatgtattatgtgtaatcatggcacagtatcctgaagccgtcggagtctgtgtgctggtgcaaggtctgggacaaatttaagaagagagagaacctaaattggtaataaatcaataagaaatatttacattcactcagtgaaaagtgtcatgtctgagctcagcatatatcggagccacacatggacacctctccttcctccactaagagcggaaaatgaacaaatcccaggaacaagtgtcattcaaggatgtatgtgtggacttcactcaggaagagtggtatctgctggaccctgctcagaagattctatacagagatgtgatcctggaaaattatagcaatcttgtctcagtagggtattgcattactaaaccagaagtgatctttaagatcgagcaaggagaagagccctggatattagaaaaaggattcccaagccagtgccacccagaaaggaaatggaaagttgatgacgtgttagagagcagccaggaaaatgaagatgaccatttttgggagcttctattccacaacaacaaaacactcaggtttcagctcctcggaagaaagcagttcttgtgaagtaagaagaa

SEQ ID NO: 201888 - DNA, 4204 bp, Homo sapiens
  Payload ID: 19827
  Gene Name: zinc finger protein 248
  Uniprot ID: Q8NDW4
  ENST ID: ENST00000611278
  CDS Start-End: 1327-1686
gtgccctgagcccgcggggaggaggcggggctgcgggggagagcgactgcgccaggtccgcgacaaatgaattagacacaattatccacgggagactcggttttcctctctgtaaattacggatattaggaatacttgccgcctggggttgttttgagcactttcattgtttaggtgctgtatttattgggtgtgcgttccctgggagagcccgagggagacggctcctgcaccggccccaagggcctctctgcccgtggagtgcaggagcgaaggggctggcctagctgaccaccagggcccctgctggctctgaccgccctcctatcccaagtaattatttacacgtttcgcgttcgcttatgtattatgtgtaatcatggcacagtatcctgaagccgtcggagtctgtgtgctggtgcaaggtctgggacaaatttaagaagagagaggtgagctggagctgaggggtgggcgcgcaggctaacaggaacgtcacctctggagagtctgagggcagggacgggtgaaaggctcacggccacagcgaaagaaatgctgttatcacccctccgcgaacaccgggcacatccagatgagctgctgagcttcctcctctcttggcctgatatccccgccggatggtagtgcagtcaggtcatacttgggttatctgttttgaccttatttgaaagatggaaaaacaaaattgagtttgaggaggtgagtagttcagatcttgtcattccttagaggcagaactgagattagaagtcaagtctgcagtttcccgagccactgctgcccattttgttactctatatcacagtttctcattaaaagatccttttgaggaattgttagcaagttagaacaaacatttttaaacttgcatttaacatcctatccctttttttagaggtcttttgcattatctaacctcagggcattaatggtgttaacaggtaaacagataaacaatatggcctcagtttttttttttccctacaaggaattttgacaaacccatagtgttttttccttcagattactgttaacttgttaaactcatcttttcatgtttttaatttttctgtgtcacagaacctaaattggtaataaatcaataagaaatatttacattcactcagtgaaaagtgtcatgtctgagctcagcatatatcggagccacacatggacacgtaagtatcttgtgtgtggacctgtataggcaggtgaatctccgaactgcaaggccggcgaaggctctcctgacattcttcctttctaatccttcagctctccttcctccactaagagcggaaaatgaacaaatcccaggaacaagtgtcattcaaggatgtatgtgtggacttcactcaggaagagtggtatctgctggaccctgctcagaagattctatacagagatgtgatcctggaaaattatagcaatcttgtctcagtagggtattgcattactaaaccagaagtgatctttaagatcgagcaaggagaagagccctggatattagaaaaaggattcccaagccagtgccacccagaaaggaaatggaaagttgatgacgtgttagagagcagccaggaaaatgaagatgaccatttttgggagcttctattccacaacaacaaaacatggaatctgaagcttataaaagttgaatgacagcagcattaaacatatatgtgaagagtccccgatgtttgtagaccttatgtgagtatgcaaatatataaatttgagtatgcttgatttgtatattggaactcaacatgatcataaggagaagatacgtacccttaattgagtaactactatggtatttgttaatattttctacactaaataccattggtgtctttataggttgacataattatatatgtgtatgtacatatgtttgtgtgtatatgtaaatatatttctacacacatacttaaatatagtgatgtgctagtataacctcatactgacttaaaagttctgattgttaaattttaaggaattttgtgagccagttattaaaagcagtcattatttaaaatatgtaaacttacagttaaaaacaaaggtaataaatactcagcactcatcacttcctaattattttgctacatttcactattacctttgctgttttacttatttaatctgtatgatgaaaatactgtataatagtgtgcactgcacatctgtctcttcccagctccacattcagtgctgtcttggtagcttggacttagtgggagtgtttacaccatggaaattgacaaactataaatcagggttttaattttctcagagaacctgctgtcaaatatttacagcacatcactgtgtatatatgaaaacgtatttggcaatacaaaccacataccccttctatttcctgacataaataaatggctatggccatttacagctgaaccacgtcttcaagaaagaagccaaaaatatttccgtgaggtttttaactacctctgaatctgtcctactctaaatactaccggagtctctttgtaggttggccagtatatgtttttagtgaaatattatttcacaaagaactatatcacgtacctttcctctgactgtttcctggcatatatgcatgaatatggccattattgaactatcacttcagtaaagaagttaaacagtacttttctgaggtttttcagctacctctgggtcattctgtaatgtaaatgttgttaataagaatggtttttacataaattatgcaaaggttaacaagcagtaacactgcactcctcaaaaagtggcggtatgtaatgaaaggcccttttgatatccttgatttttcattgtgtatctgtttgggcacggtctatgtaacactagttctgcgtattagtattttagagtatctctgcctcccttgtcctgttgtttcttttgcccccttggaacacattggtcagcagttctaagagacactgcccacatgatggccattccctacttcatccttgctgagctaaattttatatttttgtgcatccttctcccagatgacttaggtggtaagtccagattagtcaaagctaatcatggaagttccattttaatgattctgttggggtgaacttgggagcaatgagatgtttgggaagtattgtgtagtacttctgggaaagatctccttgatacaacattgtcatgacatgagaagagactctgctgggctttttcatgtctgtaacatggtattggcttatcgtttttatctctgaagggcagtagcctgaagataacagtgcacaaggtgggaaaagccagctcagaggtgacgttgccgagctactctgctctctatacctgttctctactgggactttttataaccctcaataactgttttttatttggtcttagggctgtctgatacttagagctgaaggcattccagctgacacagaggaatatttttctaagtgttaatgttctatatggtaattagggggaagaattatttcttttcacaagttaatatagggatggctgtttgtatcagccatggttctttctggtggaaaacagaattctccaactaaaaatattttaatggcagactgattacagtggtgtgggccagaaacaagggacagtgaaacacccagagacttgtatcagcaggaagccattgccattctgagccttgaagggcaaggagggaaacagtgttaccagagcccagtaagaactgctgtcatgaaggaggggccaccttgtaagagacatcattactaccagaactgtggtgccaaattgctggtgtctctctttggagaaaccaaccagatacatctgctggagagcccaggtgggcacagagaagggtggagagagaatctgggaagagaaatggagaataagcagcacagtgttattcatttctgtaaattcctatgtagaaggctcagtgttagaaataaagttattctactagttgcaagttaagtgtttctgtttgttctgctttcctgttagcataagtaaactccctttggaactacacaggtatgtctctccttcaacatgtgtgaagcagacattatattaaattacattattcatacctccctgtggtgtttcttattgtatgtggtgtaaggtaagcagctctgtattcttccaaataaatagccagttgtccctg

SEQ ID NO: 201889 - DNA, 4139 bp, Homo sapiens
  Payload ID: 19828
  Gene Name: zinc finger protein 25
  Uniprot ID: P17030
  ENST ID: ENST00000302609
  CDS Start-End: 214-1584
attggcgtttttttggtcttacgccctagggtggggagaggactccggtgcctccgggtctgggctgggccgcaaagggcggggcctgggcccggcgcgggccgggagcagaggccgagaccctgcaggtgattcctggggctgccagctaaggtcccttatgatttctgctctggctttgcagttttcagcctttcccaagagcagcagaaaatgaacaagttccagggacccgtgacattaaaggatgttattgtggaattcaccaaggaagaatggaagttactgacccctgctcagaggactctgtataaggatgtgatgctggaaaactatagtcaccttgtctcagtgggttaccatgtgaataagccaaatgcagtcttcaagttgaagcaaggaaaagagccatggatattagaagtagaatttccacatcggggcttccctgaagacctatggagcattcatgatctagaagcaagataccaggaaagccaagctggaaattcaaggaatggagaactcacaaaacatcagaaaactcataccacagagaaagcctgtgaatgtaaggaatgtgggaagttcttctgccagaagtctgccctcatagtacatcagcatactcactcaaagggcaaatcctatgactgtgataaatgtgggaaatctttctctaaaaatgaagacctcataagacatcagaaaattcacacgagagataaaacctatgagtgtaaagaatgtaagaaaatattttaccacctatcatctctcagtagacatctgagaacccatgcaggagagaaaccctatgaatgtaatcagtgtgaaaaatccttctaccagaaaccacatctcacagaacatcagaaaacacacacaggggagaaaccttttgaatgtactgaatgtgggaagttcttctatgtgaaggcatacctcatggtacatcagaaaacacacacaggggagaaaccctatgagtgtaaggagtgtgggaaagccttttcccagaagtcacacctcacagtacatcagagaatgcacacaggggagaaaccctataaatgtaaggaatgtgggaaattcttctctaggaattcacacctcaaaactcatcagagaagtcacacaggagagaaaccctatgaatgtaaggaatgtaggaaatgcttctaccagaagtcagccctcacagtacatcagcgaactcacacaggggagaaaccctttgaatgtaataaatgtgggaaaacattttactataaatcagacctcactaaacatcagagaaaacacacaggggagaagccctatgaatgcacagaatgtggcaaatcttttgctgtgaattcagtcctcagattacatcaaaggactcacacaggagagaagccctatgcatgcaaggaatgtgggaagtccttttctcagaagtcacattttattatacatcagagaaaacacacaggggagaagccctatgagtgtcaggagtgtggggaaacctttatccagaagtcacaactcactgcacatcagaagacacacacaaagaagaggaatgctgagaagtaagatgagttgggaaattctcttgactgaattaatccttcaaaacaatcagataattcacacaagaggtacaccttatgaatcgcatcaatagagggaaattttcagctacaatctttgctctctctgtgtatcagcaaatacatagagagattctgtacatttatttgggagaaaattttatcatattttaggcttttctaaatattagataatatagatggcagaagtcatgcaaattgtaaaacaggaaggaaacctttcagaagtcatacttttgttttgcaacatagaagtcacacaggagaaaaatcctgtaagtaaaacgaatgtcaagacattttctgtcagggcagccagctgtagacatccaaaagctcacaaatgagaagctccttgagtatctagaaatctctttacacaattggagctcatgtactagagaattcaaagggataactgcaaagacactggtagatatagaagcctttattaagaattgatgtttcattcaatttcagatcactggtacttggatagatattttaaatatttggaaggtgttcaataaaaattcaaataatttgtactgagggaaacagttatactacaaatcatgttgcagatctgatgccgagattgctctattttaaaaggaaacctgcaaatgtctacatatatgaagcttttaaaaagcacaagttatcaggcaacatcattaaacatacattaaatgtctgttagcatataggattttgtgcgtatgtgagtgtgctataacatgtaacttgcggatgttcagcgtgcatgtggaatccatccataatggtacatagcgaaataatataatcttagttcagtaactattatgtgtatgaagatgttgcacattaagtctcagtagtgactctggttgttaatatttgtattgtaagtgtaatattccttttaaattataaggcatctttttatccttttttgtgtttgtaaatggatatagacagtggtaataactaatccttcaaaaataagttaaaatgtttttgtaaaattttcaaatgtcagtcaagttttgcattagggacacatttatatatagcaaaagcctgagctgtttttaaacagctaaaaacagtagtatttattacaatctccacaatgaaaacaaatagtgcaatgtaagaaatattatgtatcttactgttgatgtgtgagcagggagcagagctatctgcatttgtatttagtgtgagagtcctaaatgttcttcaccaactttttcttcctcatagaagcaacatggcatagttaagggtgtggactctgggctcctgctgcctgggccccgattccagcatggggcatgctacttaatatctctgtgcctcagttcccatcccataaaagagtagtgatagtgacaacatcttaggattgctttgaggtctaaatgagttaacattttcaaagcacttagaatagtgtctgagacacaagagctatatgttagaggttatcatcattatttgtattttgtgaattacgctgcaaaaaaaaaaaaaatgttggctacccaacattcattccccaccttcttgctgccagtgccttgatttggttgtttgttgtttgtttgttttcctacaagtgatttaggggcagatcctgactacactaagtcagggtttgacaaatgacagtccatcagacagatctggcccactacccatttttgtatcctgcaagctaagaatggttttatatttctaaatggttgaaagaatcaaagaatattgtgacacatgaaaattatatgatattcaaatttcagtgtccataaataaagttttgaaaacatgaatacaaacaaaaaacacctatttatgtttgacctgtggctgtctttgcactaccccagcagagttgagtagttgtagcagacaccacatgcccttgagcctaagatctagcactttacaaagtaagtttttctgttacttagagctgaaaataaaagcaatgtagagttacgcttttataagtatttcatgtttcagaaatgatgcatacagcaatttgtaggtgggtggttttttgcagtatatttattttgtgcattatatttatatgttaagagcctgagcttagaagtatttttttcaaagaaatgtgttttttacttgctaaattgtcataacatcaaaacaagaaatttcttgatggaatgtagcagtaaacatatgaaataaacattgtctaaattaagtcgaattgttcattgatactgccccacagtattcctttgttttctcccaaatcaatggccagttttccctgtatcattttataattttctttctatcccataagataccattggtaagtcatacttagctaacgtaacccaataacaaaaaacttacaatacccaattccatcagctacattactagtaatctataaaattattgcctgcacttcatgtaattgtcatatgctgctacaatctaaacctgccagcgtcttacttccccttcctaataaagactttcattgat

SEQ ID NO: 201890 - DNA, 6364 bp, Homo sapiens
  Payload ID: 19829
  Gene Name: zinc finger protein 250
  Uniprot ID: P15622
  ENST ID: ENST00000292579
  CDS Start-End: 118-1800
agccctttgtctgaaggtgctgcgggatgccgttccttcgcgcgtgaggctgcggctctgacgccccataggctccttcaatttccgtgatcctcggagtccccaggagaccaggtgatggcagcagccagactcctgccagtgccggcaggaccccagcccctgtcgttccaggccaagctgaccttcgaggatgtggctgtgctcctctcccaggatgaatgggaccgcctgtgccctgctcagaggggtctctacagaaatgtgatgatggaaacctatgggaatgtagtctcattgggacttccaggatccaagcctgacataatctcccagctggagcgaggggaagatccctgggtcctggacaggaagggggctaagaagagccagggcctgtggagtgactactcagacaacctcaaatatgaccacactacagcctgtacacaacaagacagtttatcttgtccatgggaatgtgaaaccaagggagagagtcaaaatacagacttgagtccgaagccattaatttcagagcaaacagtgattctggggaaaacacccttggggaggattgatcaagaaaataatgaaacaaagcaaagcttctgtctgagtccaaactctgttgaccaccgtgaagttcaggtcttaagccaaagcatgccactcactccgcaccaggcagtgcctagtggagagaggccctacatgtgtgttgagtgtgggaagtgctttggccggagttcccacctccttcagcatcagcgtatccacactggagagaagccctatgtgtgcagtgtatgtgggaaggccttcagccagagctcagtccttagtaaacacaggagaattcacacaggtgagaagccctatgagtgtaatgagtgtggaaaagcctttagagtgagctcagatcttgctcagcatcacaagatacatacaggagagaagcctcacgaatgtcttgagtgtcggaaagccttcactcaactctcacatctcattcagcaccagcggatccacacgggagaaaggccatatgtgtgtccgttgtgtgggaaagccttcaaccatagcactgttctgcggagccaccagagggtacacactggggagaagcctcacaggtgcaatgagtgtgggaaaaccttcagtgtgaagaggacactgctgcagcaccagaggatccacaccggggagaagccctacacgtgcagcgagtgtgggaaggccttcagcgaccgctcagtcctcattcagcaccacaacgtgcacaccggggagaagccctatgagtgcagtgagtgtgggaagaccttcagccaccgctccacactgatgaatcacgagcggatccacaccgaggaaaagccctatgcatgctacgaatgtgggaaggccttcgttcagcactcacacctgatccagcaccagagagtccacactggggagaagccctatgtgtgtggtgaatgtgggcacgccttcagtgcacgccggtctctgatccagcatgagagaatccacacaggtgaaaagcccttccagtgcacagaatgtggcaaagccttcagcctgaaagcaactctgattgtgcacctgaggacccacacgggcgagaagccatatgagtgcaatagctgcgggaaggccttcagccagtactcagtgctcatccagcaccagcggatccacacaggcgagaagccctatgagtgcggggagtgtgggcgtgccttcaaccagcatggccacctaatccagcaccagaaagtgcacagaaagttgtgacccatggctgacacaagaatccattctcacagaaactgcatgtggaaccacaagcagccttcagcccaagagaagtctctgttaactctataggaagcttttctttggcgattcagtgtcacaaaataactccagaaagaagcacttagcgtgctgttcctgtggaaaaacttcagagactacctgttttattttcctcaacatcttgaagttatgttggagagtaatcatacaattgtagagaattttggtaaaaaacagccataattctttaacattagtttatttgaactaagggaatttaaggcataagaaccattatcccaataaaatcttacattccaaataaagttctttttctaagaacattacatgcccttcctaaatatcaattaaccatactaattattgcacttaaaatttgaaagtcggactattttcagtattctcttaaaagactaaagtattgtatggataaagtgatataaaaagatattttcatcaagcatcatgtaaaatggttggaaatcctaagtgtgtggatttccatcctaagtgtgtggagtcctgttttgtatgaaacaaggaaaaagcttatatattagtgagaaattacataaatttaaaaaactttttgtatgtgtgtgtggagatagtcttgctctgttgcccaagctgcagtgcagtggcatgatcttggctcactgcagtctccgcccccaccccaggttcaagcttttcttgtgcctcagtctcccaagtaactaggattatagatatgcgccaccacacctggctaatttttgtatttttagtagagacggagtttcaccgtgttggccaggctggtctcgaactcctggcctcaagtgatcctcccacctttgcttccgaaagtgttgggattacaggcgtgaggcaccatgcctggcctagaaaaccctttatctggagcttttaactttattcaagatcagaaaggttatgctaactttttagtaaaaattcaactcaaaaatgggtattttcctcaaaacttgcccttatgacctgcagatcctgtgccccagaaaccgtgagatgtctcaattcccatgcaggcaaaggaggggagcttcacactcagcagacctcatagctgttacaccaagtgggtacctctttacatcttatggtatttcccccaaaacaatgctgaaaatactgttctttggtagatatatttaaaacatacatttctcaaattcagatagctcttttttactatctctagtatttctattcctatatttgaaggggttttttttttcatttttttactcctggttcaagagtccagtatccattgccatattactatgatgaagatgaatctagtttattcataattaaaaatttgtattcagaattatttgttctgttttaagcatacttttttttttttttttgagacaaagtcttgctcttgttccccaggctgaagtgcaatggcacaatctcagctcactgcaatctccacctcccaggttcaagcaattctcctgcctctgcctcccaagtagctggaattacaggcacctgctaccacgcccgactaattttcgtatttttagtagagatgaggtttcaccatgttggccaggctggtctcaaactcctgacctcaggtgatccgcccgcctcggcctcccaaagtgctgggattacaggcgtgtgccaccgcacccggccaaggatacagttcttgaaaccgaatcagaaccatttctagtagcagccagctgcaaacgaaacaaatgtatgaggttcaagccacttgaaattctcaacatgttaagtgcctgagatagagaagggctgtcttcaccccaggcccccgcccccaacatctgtcagtttggtggggaggaaatagtcaccaggatattgatcctttttgtttgttttaaagacggtcttgctctgtcaccaggttggagtgcagtggtgccatcatggctcaccgctgcctcaaactcctgggctgaagcagtcctcccacctcaccttcccaaaaggttaggattacaggcatgagctgctgtgcccatccaggcattgatccttaagtccacagcaaaacaccacgatgtagacaaaagcttgttcccccttctatgtacagacactgacaacagtgaattattaactccagagaggaactggtaactgattggttaacttgagaaaggagctgacatcactggtgttttacttcagagcaactgaaaccactgaagtgaaattccagaggaactaatattactgaggtgttacttcagagggactgagatcactgaagtgaaacctcagatagctcagataaccaaggtgttaaccttagaggtgttgccattctgtgaggtgttgtttcagatagataaaataactaaggtgttagttcagagaagacaagagcttaactgtttctttggagaagagctgagatcactgaggcgtcacttcagaaagaaagtgagacaatttttgttacttcagaggatctgagtacactgaggtgtttcatcagagaggaggtgagatcactgggtgttacttctgaaaggaattgacatcactagtgggtactgcagagtagctctgaccactgaggtttacttcagaggagctgaaataacggaaatgggatcactaaggtattactttagagattagatcattgaggtaattcttcagagaagctgagatcacagaggtgtttcttcagagaagttgaaatcactaatgtgaaactctagaagaatggaggtcactgagtgctatttcataaaggaagtgaaatcactatattgtaccatcggaaagatgagaatgctgagatgttacttaggagctgagatcactgaggttctgcttcagagaaaagctgataccaatgagatgttacttaagggaggagctgaggttactgaggtattattcaggaccaagatggtgtccctcaggtgttagaagctgagatcacagagatgttacttaagagaggctgagactgctgatgtgattcttcagaaaggaaatgagatcactaagctgttaactttagaaaggagatgaaataactgagttgttcactggagttgagatcacacaggtgttaacttcagaggtggctgaaatcactaaggtgattcttcagagaaaggttgagatcactaggggtgatgctttagaaagaggttactttagggaaaagctatgatcactgagaagttacttcagaatggagctgagatcactgaggtaacagtccaaagaggaactgagattactgaggtgttacttcagagccaagagatcacccaggtacctagatgagatcactgagatgaaagtccagaaacctgaggtcacctcaatattaattgagagaaaatgagaacactgtggtgctatcttaaatcttctatgaaaggaagctgccaacctgtgttagctgagtccacagctggcatgtgactcagtggcagctgctcagtgcccactactattcaggccccaatttctaatcattaaagacaaagtcatattccaattaagatgagaataattaaattcaatatacaggaacatttgtttagaaagactgtgtatcacaggacaacgtaagttacacagtacaagttattctggattccaataacctagggttttcagggaaatccttccaaaaagtatagtttttttcctgcattcttaaaatgagcttaatatcattctgcctgttcttgctatgtcaggctgccattgatccactggtgagaatgcaggctcaggtgtccacggagccaggaagtgggcttcaatgcccttctttctgaggaggattcccaggctacattttcttgccactcacctcctcctctccaaggagaaagaggtggcacatgacctactggaacatgtgggctatctacctttttgggatataacatcaaaggccagggccctgaattttcatgctgataacagtcttctcaaccattatcttctgcctgatttgtcagcagcattccacctttattttggatttgttttattcagaagtctgtatattttaggtatttaaatacttctctttggctgggtgcaatggctcacacctgtaatcccagcactttgggaggctgaagtgggtggatcgcttgagcccaggactttgagaccagcatggcgaaaacccgtctctacaaaaaaaaaattagctgggtgttgtggcttgcgcctgtagtcccagatacgtgggaggctaaggtgggaggattgattgggagttcaagactagtgtgctgtgatcatactatctagcctggacaacagagagagaccttgtcacaaaaaatacgtatatatttcttttaaaattgtttcttctaacagctattaagaatttgaaacttggttctcttcaaattttctattattttggaaaacattttagtctgcctggaatttctgtgtataatctgacgctttccaataaaaaagtaatgactggaacaag

SEQ ID NO: 201891 - DNA, 2131 bp, Homo sapiens
  Payload ID: 19829
  Gene Name: zinc finger protein 250
  Uniprot ID: P15622
  ENST ID: ENST00000417550
  CDS Start-End: 88-1755
cgttccttcgcgcgtgaggctgcggctctgacgccccataggctccttcaatttccgtgatcctcggagtccccaggagaccaggtgatggcagcagccagactcctgccagtgccggcaggaccccaggccaagctgaccttcgaggatgtggctgtgctcctctcccaggatgaatgggaccgcctgtgccctgctcagaggggtctctacagaaatgtgatgatggaaacctatgggaatgtagtctcattgggacttccaggatccaagcctgacataatctcccagctggagcgaggggaagatccctgggtcctggacaggaagggggctaagaagagccagggcctgtggagtgactactcagacaacctcaaatatgaccacactacagcctgtacacaacaagacagtttatcttgtccatgggaatgtgaaaccaagggagagagtcaaaatacagacttgagtccgaagccattaatttcagagcaaacagtgattctggggaaaacacccttggggaggattgatcaagaaaataatgaaacaaagcaaagcttctgtctgagtccaaactctgttgaccaccgtgaagttcaggtcttaagccaaagcatgccactcactccgcaccaggcagtgcctagtggagagaggccctacatgtgtgttgagtgtgggaagtgctttggccggagttcccacctccttcagcatcagcgtatccacactggagagaagccctatgtgtgcagtgtatgtgggaaggccttcagccagagctcagtccttagtaaacacaggagaattcacacaggtgagaagccctatgagtgtaatgagtgtggaaaagcctttagagtgagctcagatcttgctcagcatcacaagatacatacaggagagaagcctcacgaatgtcttgagtgtcggaaagccttcactcaactctcacatctcattcagcaccagcggatccacacgggagaaaggccatatgtgtgtccgttgtgtgggaaagccttcaaccatagcactgttctgcggagccaccagagggtacacactggggagaagcctcacaggtgcaatgagtgtgggaaaaccttcagtgtgaagaggacactgctgcagcaccagaggatccacaccggggagaagccctacacgtgcagcgagtgtgggaaggccttcagcgaccgctcagtcctcattcagcaccacaacgtgcacaccggggagaagccctatgagtgcagtgagtgtgggaagaccttcagccaccgctccacactgatgaatcacgagcggatccacaccgaggaaaagccctatgcatgctacgaatgtgggaaggccttcgttcagcactcacacctgatccagcaccagagagtccacactggggagaagccctatgtgtgtggtgaatgtgggcacgccttcagtgcacgccggtctctgatccagcatgagagaatccacacaggtgaaaagcccttccagtgcacagaatgtggcaaagccttcagcctgaaagcaactctgattgtgcacctgaggacccacacgggcgagaagccatatgagtgcaatagctgcgggaaggccttcagccagtactcagtgctcatccagcaccagcggatccacacaggcgagaagccctatgagtgcggggagtgtgggcgtgccttcaaccagcatggccacctaatccagcaccagaaagtgcacagaaagttgtgacccatggctgacacaagaatccattctcacagaaactgcatgtggaaccacaagcagccttcagcccaagagaagtctctgttaactctataggaagcttttctttggcgattcagtgtcacaaaataactccagaaagaagcacttagcgtgctgttcctgtggaaaaacttcagagactacctgttttattttcctcaacatcttgaagttatgttggagagtaatcatacaattgtagagaattttggtaaaaaacagccataattctttaacattagtttatttgaactaagggaatttaaggcataagaaccattatcccaataaaatcttacattccaaataaagttctttttctaagaacattacatgc

SEQ ID NO: 201892 - DNA, 677 bp, Homo sapiens
  Payload ID: 19829
  Gene Name: zinc finger protein 250
  ENST ID: ENST00000528258
  CDS Start-End: 136-441
gcgcagacggggcggggcagccctttgtctgaaggtgctgcgggatgccgttccttcgcgcgtgaggctgcggctctgacgccccataggctccttcaatttccgtgatcctcggagtccccaggagaccaggtgatggcagcagccagactcctgccagtgccggcaggaccccaggccaagctgaccttcgaggatgtggctgtgctcctctcccaggatgaatgggaccgcctgtgccctgctcagaggggtctctacagaaatgtgatgatggaaacctatgggaatgtagtctcattgggacttccaggatccaagcctgacataatctcccagctggagcgaggggaagatccctgggtcctggacaggaagggggctaagaagagccagggcctgtggagtgactactcagatcctgtgccccagaaaccgtgagatgtctcaattcccatgcaggcaaaggaggggagcttcacactcagcagacctcatagctgttacaccaatggcttctgctgtggctatcccatgtccggtgtgaggagacagtggtatgactcatccctttgtgtccggaattggtgggttcttggtctcactgacgtcaagaatgaagctgcggaccctcgtggtgagtgttacagttcttaaaggcagtgtgtctggagttt

SEQ ID NO: 201893 - DNA, 592 bp, Homo sapiens
  Payload ID: 19829
  Gene Name: zinc finger protein 250
  ENST ID: ENST00000525694
  CDS Start-End: 170-592
cgcgcgtgaggctgcggctctgacggtgtgtaacttgtatgtggaaggaccaacgtagcatttgcctcagcaacatccttgaatctgcaccctcacccacatccattcttatcagccccataggctccttcaatttccgtgatcctcggagtccccaggagaccaggtgatggcagcagccagactcctgccagtgccggcaggaccccaggccaagctgaccttcgaggatgtggctgtgctcctctcccaggatgaatgggaccgcctgtgccctgctcagaggggtctctacagaaatgtgatgatggaaacctatgggaatgtagtctcattgggacttccaggatccaagcctgacataatctcccagctggagcgaggggaagatccctgggtcctggacaggaagggggctaagaagagccagggcctgtggagtgactactcagacaacctcaaatatgaccacactacagcctgtacacaacaagacagtttatcttgtccatgggaatgtgaaaccaagggagagagtcaaaatacagacttgagtccgaagccattaatttcagagcaaacagtgattctg

SEQ ID NO: 201894 - DNA, 687 bp, Homo sapiens
  Payload ID: 19829
  Gene Name: zinc finger protein 250
  ENST ID: ENST00000529780
  CDS Start-End: 122-490
gggcagccctttgtctgaaggtgctgcgggatgccgttccttcgcgcgtgaggctgcggctctgacgccccataggctccttcaatttccgtgatcctcggagtccccaggagaccaggtgatggcagcagccagactcctgccagtgccggcaggaccccaggccaagctgaccttcgaggatgtggctgtgctcctctcccaggatgaatgggaccgcctgtgccctgctcagaggggtctctacagaaatgtgatgatggaaacctatgggaatgtagtctcattgggacttccaggatccaagcctgacataatctcccagctggagcgaggggaagatccctgggtcctggacaggaagggggctaagaagagccagggcctgtggagtgactactcagacaacctcaaatatgaccacactacagcctgtacacaacaagacagtttatcttgtccatgggatcctgtgccccagaaaccgtgagatgtctcaattcccatgcaggcaaaggaggggagcttcacactcagcagacctcatagctgttacaccaatggcttctgctgtggctatcccatgtccggtgtgaggagacagtggtatgactcatccctttgtgtccggaattggtgggttcttggtctcactgacgtcaagaatgaagctgcggaccctcgtgg

SEQ ID NO: 201895 - DNA, 593 bp, Homo sapiens
  Payload ID: 19829
  Gene Name: zinc finger protein 250
  ENST ID: ENST00000533221
  CDS Start-End: 80-593
cgcgcgtgaggctgcggctctgacgccccataggctccttcaatttccgtgatcctcggagtccccaggagaccaggtgatggcagcagccagactcctgccagtgccggcaggaccccaggccaagctgaccttcgaggatgtggctgtgctcctctcccaggatgaatgggaccgcctgtgccctgctcagaggggtctctacagaaatgtgatgatggaaacctatgggaatgtagtctcattgggacttccaggatccaagcctgacataatctcccagctggagcgaggggaagatccctgggtcctggacaggaagggggctaagaagagccagggcctgtggagtgactactcagaatgtgaaaccaagggagagagtcaaaatacagacttgagtccgaagccattaatttcagagcaaacagtgattctggggaaaacacccttggggaggattgatcaagaaaataatgaaacaaagcaaagcttctgtctgagtccaaactctgttgaccaccgtgaagttcaggtcttaagccaaagcatgccactcactccgcaccaggcagtgcctagtggagagaggc

SEQ ID NO: 201896 - DNA, 672 bp, Homo sapiens
  Payload ID: 19829
  Gene Name: zinc finger protein 250
  ENST ID: ENST00000533622
  CDS Start-End: 145-672
cttcgcgcgtgaggctgcggctctgacggtgagtggggggcgcgtgtcgtcgccggccaggaccctctcccatcacggacaccggagccgccccataggctccttcaatttccgtgatcctcggagtccccaggagaccaggtgatggcagcagccagactcctgccagtgccggcaggaccccaggccaagctgaccttcgaggatgtggctgtgctcctctcccaggatgaatgggaccgcctgtgccctgctcagaggggtctctacagaaatgtgatgatggaaacctatgggaatgtagtctcattgggacttccaggatccaagcctgacataatctcccagctggagcgaggggaagatccctgggtcctggacaggaagggggctaagaagagccagggcctgtggagtgactactcagacaacctcaaatatgaccacactacagcctgtacacaacaagacagtttatcttgtccatgggaatgtgaaaccaagggagagagtcaaaatacagacttgagtccgaagccattaatttcagagcaaacagtgattctggggaaaacacccttggggaggattgatcaagaaaataatgaaacaaagcaaagcttctgtctgagtccaaactctgttgaccaccgtgaagttcaggtcttaagc

SEQ ID NO: 201897 - DNA, 610 bp, Homo sapiens
  Payload ID: 19829
  Gene Name: zinc finger protein 250
  ENST ID: ENST00000527049
  CDS Start-End: 475-610
ggccgagtgggcgacggagacggtcgctgttcagtgacgccccctgtcgggagcacgccgggccggacacagcgaagagcggctgcgcctcggacctcgcagcactcagcctcctaagtgggaggaataacctcacgcaagtcatcaaacaagaggacttcagtgttgcaacgaaggaagagaaagggcccctgagaaggcgacattcgcactgcagcggcgcagggaccagccaggcggctgagggcaaggtcgttcccagcagcgggaaccgcaagggcaaaaggctcggaggggggaacgagctcgagttccaggacggccgaagccagcgcaagtcgaggagggactgcggggccggcaggggtgtcctccacagggcgacggcggcaggagctcgggaaccgggactgcgagcggccccataggctccttcaatttccgtgatcctcggagtccccaggagaccaggtgatggcagcagccagactcctgccagtgccggcaggaccccaggccaagctgaccttcgaggatgtggctgtgctcctctcccaggatgaatgggaccgcctgtgccctgctcagaggggtctctacagaaatgtga

SEQ ID NO: 201898 - DNA, 702 bp, Homo sapiens
  Payload ID: 19829
  Gene Name: zinc finger protein 250
  ENST ID: ENST00000533543
  CDS Start-End: 122-505
gggcagccctttgtctgaaggtgctgcgggatgccgttccttcgcgcgtgaggctgcggctctgacgccccataggctccttcaatttccgtgatcctcggagtccccaggagaccaggtgatggcagcagccagactcctgccagtgccggcaggaccccagcccctgtcgttccaggccaagctgaccttcgaggatgtggctgtgctcctctcccaggatgaatgggaccgcctgtgccctgctcagaggggtctctacagaaatgtgatgatggaaacctatgggaatgtagtctcattgggacttccaggatccaagcctgacataatctcccagctggagcgaggggaagatccctgggtcctggacaggaagggggctaagaagagccagggcctgtggagtgactactcagacaacctcaaatatgaccacactacagcctgtacacaacaagacagtttatcttgtccatgggatcctgtgccccagaaaccgtgagatgtctcaattcccatgcaggcaaaggaggggagcttcacactcagcagacctcatagctgttacaccaatggcttctgctgtggctatcccatgtccggtgtgaggagacagtggtatgactcatccctttgtgtccggaattggtgggttcttggtctcactgacgtcaagaatgaagctgcggaccctcgtgg

SEQ ID NO: 201899 - DNA, 2807 bp, Homo sapiens
  Payload ID: 19830
  Gene Name: zinc finger protein 251
  Uniprot ID: Q9BRH9
  ENST ID: ENST00000292562
  CDS Start-End: 277-2292
gcgttctcggaggcgtactgaggccccgcagggggcggggaagcctgcgtgtgcgcagctcggcccggcccgccctcttcatcctagcccgccccctccccggctctggacccggttctgtgggagggtccgttccgggctcggtgcgactgcgcagctcctcggcgcttcctcggtggcttccccgggtcgagcaaacaggtaagttcggggagacttcaggccagggcagtctcctgtcttctcttggaaaccacagcagcccatgcacacagaatggcagccacattccagcttccagggcaccaggagatgccgctgaccttccaggatgtggccgtgtacttctctcaggcggaggggcggcagctgggcccccagcagcgggcgctctaccgggatgtgatgctggagaactatgggaacgtggcctctctgggattccctgtccctaagccggagttgatctcccagctggagcaggggaaggaactttgggtcctgaatcttctgggagctgaggaaccagatatcttgaaaagctgccagaaagattctgaggttgggaccaagaaggaactatctattttaaaccaaaaattttccgaagaagtaaaaaccccagaatttgtatcaagaagactcttaagggataatgcacaggccgctgagtttcgggaagcatggggccgtgagggcaaactcaaagagcgcgtgggaaattctgccgggcagagtttgaacaaacccaatattcacaagagagttttaacagaagctaccgtgggcagggaaagatctttgggagaaagaacccaagagtgtagtgcatttgatagaaacttgaatctggaccaaaatgttgttagacttcaaagaaataaaacaggagagagggtctttaaatgtgatatatgcagcaaaaccttcaaatataattcagacctaagtagacaccagagaagtcacactggggagaagccgtacgaatgtggccggtgtgggcgagcctttactcacagctcaaatcttgttctgcaccatcacattcacactggaaataaaccatttaaatgtgatgaatgtgggaaaacttttggactcaattctcacctccgtcttcatcggagaattcacactggagaaaaaccctttggctgtggtgagtgtgggaaggctttcagtcgaagctcaactcttattcaacatcggatcattcacacaggagagaaaccctacaagtgtaatgaatgtggaagaggctttagccagagcccccagttaactcagcatcagagaattcacactggagagaagccgcatgaatgcagtcactgtgggaaggccttcagtcgaagctccagccttattcagcatgagagaattcacactggagagaagccccataaatgcaatcagtgtgggaaggccttcagtcagagctcaagccttttcctccatcatcgggttcatactggagagaaaccctatgtatgtaatgaatgcggcagagcctttggttttaactctcatcttactgaacacgtaaggattcacacaggagaaaaaccctatgtttgtaatgagtgcggcaaagcctttcgtcggagttccactcttgttcagcatcgaagagttcacactggggagaagccctaccagtgcgttgaatgtgggaaagctttcagccagagctcccagctcaccctacatcagcgagttcacactggagagaagccctatgactgtggtgactgtgggaaggccttcagccggaggtcaaccctcattcagcatcagaaagttcacagcggagagactcgtaagtgcagaaaacatggtccagcctttgttcatggctccagcctcacagcagatggacagattcccactggagagaagcacggcagagcctttaaccatggtgcaaatctcattctgcgctggacagttcacactggtgagaaatcctttggatgtaatgaatatggaaaagctttcagtcccacctcacgacccactgaagatcagataatgcatgctggggaaaagccctataaatgtcaagaatgtggaaacgccttcagtggaaagtcaacccttattcaacatcaggtaactcacactggtcagaaaccatgtcattgcagtgtgtatgggaaagccttcagccagagttcacagctcacaccacctcagcagactcgtgttggagagaaacctgctttaaatgatggctctaaaagatactttattcatatcaagaagattttccaagaaagacatttttaatgtgataaatgcagaagacagtttagcaactgttcacttgacattagaagataagatggcataatgaaagatatataaggtctaaatattactggcaaagtaaaataaatagttcagatgactactaaagtcaaagtcattaaatctggaagtaaacacgagaattcattctgggaaatcaggctgtctgtgtaaaggttactgctgtgctcaggagttgaaccgtgtggtgctgtatccggatactcatgacgaatggatggagggcgtgaaaagtgagcccagctggtgctctgggtctaccctacctgacatccttccagtcttatcctttgtttcctatccaggcccaggcttgtggctgagaacatccactttcagtcccatatacctgcctccaagtgtggtacagagaacttgggcctgctgggggcgcttagccttactctctccaccacctctcccaccaacccccagatgaactgcaggtagacgtttcttccttgcttggagcc

SEQ ID NO: 201900 - DNA, 618 bp, Homo sapiens
  Payload ID: 19830
  Gene Name: zinc finger protein 251
  ENST ID: ENST00000525191
  CDS Start-End: 1-442
gcgcttcctcggtggcttccccgggtcgagcaaacaggtaagttcggggagacttcaggccagggcagtctcctgtcttctcttggaaaccacagcagcccatgcacacagaatggcagccacattccagcttccagggcaccaggagatgccgctgaccttccaggatgtggccgtgtacttctctcaggcggaggggcggcagctgggcccccagcagcgggcgctctaccgggatgtgatgctggagaactatgggaacgtggcctctctgggattccctgtccctaagccggagttgatctcccagctggagcaggggaaggaactttgggtcctgaatcttctgggagctgaggaaccagatatcttgaaaagctgccagaaaggtgagaatggatgggatgctaatcctgggagcagcctcccaatcctgccttaagaggctccaagcgagggacagctggggcatggcgttcatattaatggcctcccccaggggcagtctcacagatacagcccctctacaaatgtgagcatgtgcacatgctttagaagttttatcttgctggtctgtttctttgctttaaaaatatatatatactacttctgatcata

SEQ ID NO: 201901 - DNA, 3027 bp, Homo sapiens
  Payload ID: 19830
  Gene Name: zinc finger protein 251
  Uniprot ID: Q9BRH9
  ENST ID: ENST00000612318
  CDS Start-End: 277-2292
gcgttctcggaggcgtactgaggccccgcagggggcggggaagcctgcgtgtgcgcagctcggcccggcccgccctcttcatcctagcccgccccctccccggctctggacccggttctgtgggagggtccgttccgggctcggtgcgactgcgcagctcctcggcgcttcctcggtggcttccccgggtcgagcaaacaggtaagttcggggagacttcaggccagggcagtctcctgtcttctcttggaaaccacagcagcccatgcacacagaatggcagccacattccagcttccagggcaccaggagatgccgctgaccttccaggatgtggccgtgtacttctctcaggcggaggggcggcagctgggcccccagcagcgggcgctctaccgggatgtgatgctggagaactatgggaacgtggcctctctgggattccctgtccctaagccggagttgatctcccagctggagcaggggaaggaactttgggtcctgaatcttctgggagctgaggaaccagatatcttgaaaagctgccagaaagattctgaggttgggaccaagaaggaactatctattttaaaccaaaaattttccgaagaagtaaaaaccccagaatttgtatcaagaagactcttaagggataatgcacaggccgctgagtttcgggaagcatggggccgtgagggcaaactcaaagagcgcgtgggaaattctgccgggcagagtttgaacaaacccaatattcacaagagagttttaacagaagctaccgtgggcagggaaagatctttgggagaaagaacccaagagtgtagtgcatttgatagaaacttgaatctggaccaaaatgttgttagacttcaaagaaataaaacaggagagagggtctttaaatgtgatatatgcagcaaaaccttcaaatataattcagacctaagtagacaccagagaagtcacactggggagaagccgtacgaatgtggccggtgtgggcgagcctttactcacagctcaaatcttgttctgcaccatcacattcacactggaaataaaccatttaaatgtgatgaatgtgggaaaacttttggactcaattctcacctccgtcttcatcggagaattcacactggagaaaaaccctttggctgtggtgagtgtgggaaggctttcagtcgaagctcaactcttattcaacatcggatcattcacacaggagagaaaccctacaagtgtaatgaatgtggaagaggctttagccagagcccccagttaactcagcatcagagaattcacactggagagaagccgcatgaatgcagtcactgtgggaaggccttcagtcgaagctccagccttattcagcatgagagaattcacactggagagaagccccataaatgcaatcagtgtgggaaggccttcagtcagagctcaagccttttcctccatcatcgggttcatactggagagaaaccctatgtatgtaatgaatgcggcagagcctttggttttaactctcatcttactgaacacgtaaggattcacacaggagaaaaaccctatgtttgtaatgagtgcggcaaagcctttcgtcggagttccactcttgttcagcatcgaagagttcacactggggagaagccctaccagtgcgttgaatgtgggaaagctttcagccagagctcccagctcaccctacatcagcgagttcacactggagagaagccctatgactgtggtgactgtgggaaggccttcagccggaggtcaaccctcattcagcatcagaaagttcacagcggagagactcgtaagtgcagaaaacatggtccagcctttgttcatggctccagcctcacagcagatggacagattcccactggagagaagcacggcagagcctttaaccatggtgcaaatctcattctgcgctggacagttcacactggtgagaaatcctttggatgtaatgaatatggaaaagctttcagtcccacctcacgacccactgaagatcagataatgcatgctggggaaaagccctataaatgtcaagaatgtggaaacgccttcagtggaaagtcaacccttattcaacatcaggtaactcacactggtcagaaaccatgtcattgcagtgtgtatgggaaagccttcagccagagttcacagctcacaccacctcagcagactcgtgttggagagaaacctgctttaaatgatggctctaaaagatactttattcatatcaagaagattttccaagaaagacatttttaatgtgataaatgcagaagacagtttagcaactgttcacttgacattagaagataagatggcataatgaaagatatataaggtctaaatattactggcaaagtaaaataaatagttcagatgactactaaagtcaaagtcattaaatctggaagtaaacacgagaattcattctgggaaatcaggctgtctgtgtaaaggttactgctgtgctcaggagttgaaccgtgtggtgctgtatccggatactcatgacgaatggatggagggcgtgaaaagtgagcccagctggtgctctgggtctaccctacctgacatccttccagtcttatcctttgtttcctatccaggcccaggcttgtggctgagaacatccactttcagtcccatatacctgcctccaagtgtggtacagagaacttgggcctgctgggggcgcttagccttactctctccaccacctctcccaccaacccccagatgaactgcaggtagacgtttcttccttgcttggagccccagtttttgcatttcattttcattaaaatgaaaggtggtttggttttggttctaaggagctctacagtttaacagagagagggaccttaggggccaagaaagcaggggcctaccaagtatctccacttttgaaaattgtaattactgataaaaaattttttaaaggcaggtttattgaagcataatttataaacaataaaatttactctttttagtgta

SEQ ID NO: 201902 - DNA, 616 bp, Homo sapiens
  Payload ID: 19830
  Gene Name: zinc finger protein 251
  ENST ID: ENST00000633636
  CDS Start-End: 1-442
gcgcttcctcggtggcttccccgggtcgagcaaacaggtaagttcggggagacttcaggccagggcagtctcctgtcttctcttggaaaccacagcagcccatgcacacagaatggcagccacattccagcttccagggcaccaggagatgccgctgaccttccaggatgtggccgtgtacttctctcaggcggaggggcggcagctgggcccccagcagcgggcgctctaccgggatgtgatgctggagaactatgggaacgtggcctctctgggattccctgtccctaagccggagttgatctcccagctggagcaggggaaggaactttgggtcctgaatcttctgggagctgaggaaccagatatcttgaaaagctgccagaaaggtgagaatggatgggatgctaatcctgggagcagcctcccaatcctgccttaagaggctccaagcgagggacagctggggcatggcgttcatattaatggcctcccccaggggcagtctcacagatacagcccctctacaaatgtgagcatgtgcacatgctttagaagttttatcttgctggtctgtttctttgctttaaaaatatatatatactacttctgatca

SEQ ID NO: 201903 - DNA, 2268 bp, Homo sapiens
  Payload ID: 19831
  Gene Name: zinc finger protein 253
  Uniprot ID: O75346
  ENST ID: ENST00000355650
  CDS Start-End: 96-1367
gtgcttatagaggcccgtcctctgtggccgtgtgacctgcaagtattgggagagccacagctaaaccccgggacccctggaagcctagaaatgttatgagttctcattttgcccaagacctttggccagagaacatacaaaattctttccaaatagggatgctgagaagatatgaagaatgcagacatgacaatttacagttaaaaaaaggctgtaaaagcgtgggtgagcataaggtgcacaaaggaggttataatggacttaaccaatgtttgacaactacccagaaagaaatatttcaatgtgataaatatggaaaagtctttcataagttttcaaattcaaacacatataagacaagacatactggaataaatcttttcaaatgtataatatgtggcaaagcttttaaacggtcctcaacccttactacacataagaaaattcatactggagagaaaccttacagatgtgaagaatgtggcaaagcttttaaccaatctgcaaaccttactacacataagagaattcataccggagagaaaccctacagatgtgaagaatgtggcaaagcctttaagcagtcctcaaaccttactacacataagaaaattcatactggagagaaaccctacaaatgtgaagaatgtggcaaagccttcaaccgatccacagaccttactacacataagatagttcatactggagagaaaccctacaaatgtgaagaatgtggcaaagcctttaagcacccctcacacgttaccacacataagaaaattcatactagagggaaaccctacaactgtgaagaatgtggcaaatcctttaagcactgctctaaccttactatacataagagaattcatacaggagagaaaccctacaaatgtgaagaatgtggcaaagcctttcacctatcctcacaccttactacacataagatacttcatactggagagaaaccctacagatgtagagaatgtggcaaagcttttaaccattccacaacccttttttcacatgagaaaattcatactggagagaaaccctacaaatgtgatgaatgtggcaaaacctttacctggccctcaatcctctccaaacataaaagaactcatactggagagaaaccctacaaatgtgaagaatgtggcaaatcctttactgcatcctcaactctaactacacataagagaattcatactggagagaaaccttacaaatgtgaagaatgtggcaaagcttttaactggtcctcagaccttaataaacataagaaaattcatattgaacgaaaaccctacatagtgaagaatgtgacagatcttttaaatgttcctccacttttaattagcataagataattcatactggagagaaaccctatgaatgtgatgaatgtgggaaagcctttaaccagccctcgactcttagtaaatttgagagtttatatggaacacaaaccctacaaatataaagaatgtgacaaagctttttaaggaagttctcaacccttattacacataattcataccaaacagaagccctacaagtgtgaagaatgtggcaaaacctataaacctataacaagttctcaattcctttttttttgagatggagtttcactcttgtcaccgaggctggagtgcaatgacatgatctccgttcactgcaatctctgcctcctgggtttaagccattcttctgcctcagcctcccaagtagctgggattacaggtgcccaacaccacgcctggctaatttttggatttttagtagagatggggtttcacaatgttggccaggctggtctcgaactcctgacctcaggtgatccacctgccttggccttccaaagtgctggggttacaggcgtgagccaccatgcctggctacaagttcttaattcttaagagacaccatgcctggctacaagttcttaattcttaagagacatggcgataattcatgctgaagaggaaatctggaaacctgaaagatgcgacattgcttttaccaacacctccacatttcctatacataaaaataaattatactagtgtaataccctagaaatgtataaaatgtgacaaagcctttatatgattgtcatacatgattgtaggtgatagaagtcatactgccaaaactcctgtaagtgtgaagaatgtggcaaaatattttattagtgcttataccttatttcacaggaaagctcttatccttgagaaaaattgtgcaaatacaaagaatatggaaaaacca

SEQ ID NO: 201904 - DNA, 820 bp, Homo sapiens
  Payload ID: 19831
  Gene Name: zinc finger protein 253
  ENST ID: ENST00000592725
  CDS Start-End: 177-820
atcctcagtgttctgtgtcctgtgcttatagaggcccgtcctctgtggccgtgtgacctgcaagtattgggagagccacagctaaaccccgggacccctggaagcctagaaatggtattgttgtctctaagccagacctggttacctgtctggagcaaggaaaaaaacctttaactatggaaagacatgagatgattgccaaacccccagttatgagttctcattttgcccaagacctttggccagagaacatacaaaattctttccaaatagggatgctgagaagatatgaagaatgcagacatgacaatttacagttaaaaaaaggctgtaaaagcgtgggtgagcataaggtgcacaaaggaggttataatggacttaaccaatgtttgacaactacccagaaagaaatatttcaatgtgataaatatggaaaagtctttcataagttttcaaattcaaacacatataagacaagacatactggaataaatcttttcaaatgtataatatgtggcaaagcttttaaacggtcctcaacccttactacacataagaaaattcatactggagagaaaccttacagatgtgaagaatgtggcaaagcttttaaccaatctgcaaaccttactacacataagagaattcataccggagagaaaccctacagatgtgaagaatgtggcaaagcctttaagcagtcctcaaaccttactacacataagaaaattcatactggagagaaaccctacaaatgtgaagaatgtggcaaagccttcaaccgatccacagaccttactacacataagatagttcatac

SEQ ID NO: 201905 - DNA, 3519 bp, Homo sapiens
  Payload ID: 19831
  Gene Name: zinc finger protein 253
  Uniprot ID: O75346
  ENST ID: ENST00000589717
  CDS Start-End: 93-1592
ctgtgcttatagaggcccgtcctctgtggccgtgtgacctgcaagtattgggagagccacagctaaaccccgggacccctggaagcctagaaatgggaccattgcaatttagagatgtggccatagaattctctctggaggagtggcattgcctggacactgcacagcggaatttatatagggatgtgatgttagagaactacagaaacttggtcttccttggtattgttgtctctaagccagacctggttacctgtctggagcaaggaaaaaaacctttaactatggaaagacatgagatgattgccaaacccccagttatgagttctcattttgcccaagacctttggccagagaacatacaaaattctttccaaatagggatgctgagaagatatgaagaatgcagacatgacaatttacagttaaaaaaaggctgtaaaagcgtgggtgagcataaggtgcacaaaggaggttataatggacttaaccaatgtttgacaactacccagaaagaaatatttcaatgtgataaatatggaaaagtctttcataagttttcaaattcaaacacatataagacaagacatactggaataaatcttttcaaatgtataatatgtggcaaagcttttaaacggtcctcaacccttactacacataagaaaattcatactggagagaaaccttacagatgtgaagaatgtggcaaagcttttaaccaatctgcaaaccttactacacataagagaattcataccggagagaaaccctacagatgtgaagaatgtggcaaagcctttaagcagtcctcaaaccttactacacataagaaaattcatactggagagaaaccctacaaatgtgaagaatgtggcaaagccttcaaccgatccacagaccttactacacataagatagttcatactggagagaaaccctacaaatgtgaagaatgtggcaaagcctttaagcacccctcacacgttaccacacataagaaaattcatactagagggaaaccctacaactgtgaagaatgtggcaaatcctttaagcactgctctaaccttactatacataagagaattcatacaggagagaaaccctacaaatgtgaagaatgtggcaaagcctttcacctatcctcacaccttactacacataagatacttcatactggagagaaaccctacagatgtagagaatgtggcaaagcttttaaccattccacaacccttttttcacatgagaaaattcatactggagagaaaccctacaaatgtgatgaatgtggcaaaacctttacctggccctcaatcctctccaaacataaaagaactcatactggagagaaaccctacaaatgtgaagaatgtggcaaatcctttactgcatcctcaactctaactacacataagagaattcatactggagagaaaccttacaaatgtgaagaatgtggcaaagcttttaactggtcctcagaccttaataaacataagaaaattcatattgaacgaaaaccctacatagtgaagaatgtgacagatcttttaaatgttcctccacttttaattagcataagataattcatactggagagaaaccctatgaatgtgatgaatgtgggaaagcctttaaccagccctcgactcttagtaaatttgagagtttatatggaacacaaaccctacaaatataaagaatgtgacaaagctttttaaggaagttctcaacccttattacacataattcataccaaacagaagccctacaagtgtgaagaatgtggcaaaacctataaacctataacaagttctcaattcctttttttttgagatggagtttcactcttgtcaccgaggctggagtgcaatgacatgatctccgttcactgcaatctctgcctcctgggtttaagccattcttctgcctcagcctcccaagtagctgggattacaggtgcccaacaccacgcctggctaatttttggatttttagtagagatggggtttcacaatgttggccaggctggtctcgaactcctgacctcaggtgatccacctgccttggccttccaaagtgctggggttacaggcgtgagccaccatgcctggctacaagttcttaattcttaagagacaccatgcctggctacaagttcttaattcttaagagacatggcgataattcatgctgaagaggaaatctggaaacctgaaagatgcgacattgcttttaccaacacctccacatttcctatacataaaaataaattatactagtgtaataccctagaaatgtataaaatgtgacaaagcctttatatgattgtcatacatgattgtaggtgatagaagtcatactgccaaaactcctgtaagtgtgaagaatgtggcaaaatattttattagtgcttataccttatttcacaggaaagctcttatccttgagaaaaattgtgcaaatacaaagaatatggaaaaaccattaatgcctactcacatcttactgaacagaagaaggttcatagttaataaagcattaaaagtgcaattactgtcaaaaaatctttcagaaaatagaagtctttaaagtgaagaatatttattctgaagacagccattacaaatataaagggggttgtagtgcctttacttgtgtcacagatcttagtgcacacatgtagtactagaggaaaaccctgaagcagttgctcaagctttgtttcagggaatcaagggaatttatattgagaatagtactgcaaatgtaatgaatggaaagacttttcttttccaaaaatgacagcttagaaaacaccagagggtttataccaaaatatatttttgcagatgcagtaaatatcaaaaaatatttaattcaaaattgattctatgtaaatatcagagaattttccatagaataattaaggcactgacacttcagacattacactaaatcagaatgttcagtataaaaactaatccacagctacagctgttagataaattatttctatataattttttaaaaagtggatttttgaagcactgtaattacattgaaagtatacttgttttcttgaaaaaatttttttgaaaagtgaataatgatataatacagctttcacattgctttatgctattttattcctattatattcacatgtgaaagcatgtgatcaattgttgctgcattagagatattagagattgttttttattagttgggcattatgtatgaccttttctataaaagagtaaggacattaaaatgtaagatgcatgatgaaaatataagtggagaggctctttgtagttaactgatattaagtaatgtgtaaggtgggggttcatgttctcatttctataatcctagccaatgacttaatgttgatgctttgaatgtcttttggatggtctaacctacattaacatgtatgcggaacatcttaaaactttttttcaaaaatcataatgaattattttattaataagcaaagataaaaaataa

SEQ ID NO: 201906 - DNA, 511 bp, Homo sapiens
  Payload ID: 19832
  Gene Name: zinc finger protein 254
  ENST ID: ENST00000339642
  CDS Start-End: 125-400
ggggcctttgtctctcgctgtcgccggagtcccaggtctgtcttcactgctctgtgtcctctgctcctagaggcccagcctctgtggcgctgttaccagcaggtattggagatccacagctaagatgccaggaccccctagaagcctagaaatgggactgttgacatttagggatgtggccatagaattctctctggaggagtggcaacacctggacattgcacagcagaatttatatagaaatgtgatgttagagaactacagaaacctggccttcctgggtattgctgtctctaagccagacctgatcacctgtctggaacaagggaaagagccctggaatatgaagcgacatgagatggtggatgaacccccaggattggatttttcattactgtgaagaaaaacactggaattttgataaggagttctttaaatctacaggtcactttggataatatggcagtttcataatacttattctttcaatagaaataaaacattttaaaat

SEQ ID NO: 201907 - DNA, 3967 bp, Homo sapiens
  Payload ID: 19832
  Gene Name: zinc finger protein 254
  Uniprot ID: O75437
  ENST ID: ENST00000357002
  CDS Start-End: 116-2095
gtctctcgctgtcgccggagtcccaggtctgtcttcactgctctgtgtcctctgctcctagaggcccagcctctgtggcgctgttaccagcaggtattggagatccacagctaagatgccaggaccccctagaagcctagaaatgggactgttgacatttagggatgtggccatagaattctctctggaggagtggcaacacctggacattgcacagcagaatttatatagaaatgtgatgttagagaactacagaaacctggccttcctgggtattgctgtctctaagccagacctgatcacctgtctggaacaagggaaagagccctggaatatgaagcgacatgagatggtggatgaacccccaggtatgtgtcctcattttgctcaagacctttggccagagcagggcatggaagattcttttcaaaaagcaatactgagaagatatggaaaatatggacatgagaatttacagttaagaaaaggctgtaaaagtgtggatgagtataaggtgaacaaagaaggttataatggacttaaccagtgtttcacaactgcccagagcaaagtatttcaatgtgataaatatttgaaagtcttctataaatttttaaattcaaacagacctaagataagacatactgaaaagaaatctttcaaatgtaaaaaacgtgtcaaattattttgcatgctttcacataaaacccaacacaaaagcatttatcatagagagaagtcctacaaatgtaaagaatgtggaaaaacctttaattggtcctcaacccttactaatcataggaaaatttatactgaagagaaaccttacaaatgtgaagaatataacaaatctcctaagcaactctcaacccttactacacatgaaataattcatgctggagagaaactctacaaatgtgaagaatgtggtgaagcttttaatcgatcctcaaatcttactacacataagataattcatactggagagaaaccttacaagtgtgaagaatgtggcaaagcatttatctggtcctcaacccttactgagcataagaaaattcatactagaaagaaaccctacaagtgtgaagaatgtggcaaagcatttatatggtcctcaacactaactagacataagaggatgcacactggagagaaaccctacaaatgtgaagaatgtggcaaagcttttagccagtcctcaacccttactacacataagataattcatactggagagaaacgctacaaatgcttagaatgtggcaaagcttttaagcaactctcaactcttactacacataaaataattcatgttggagagaaactctacaaatgtgaagaatgcggcaaaggttttaatcgatcttcaaatcttactacacataagataattcatactggagagaaaccttacaagtgtgaagaatgtggcaaagcatttatctggtcctcaacccttactaaacataagagaattcatactagagagaaaccctacaaatgtgaagaatgtggcaaggcatttatatggtcctcaaccctaactagacataagaggatgcacactggagagaaaccctacaaatgtgaagaatgtggcaaatcttttagccaatcctcaacccttactacacataagataattcatactggagagaaaccctacaaatgtgaagaatgtggcaaagcctttaactggtcctcaactcttactaaacataagataattcatactgaagagaaaccctacaaatgtgaaaaatgtggcaaagcctttaagcagtcttcaatccttactaaccataagagaattcatactggagagaaaccctataaatgtgaagaatgtggcaaatcttttaaccggtcttcaacttttactaaacataaggtaattcatactggagtaaaaccctacaaatgtgaagaatgtggcaaagcatttttctggtcctcaaccctaactaaacataagagaattcatactggagagcaaccctacaaatgggaaaaatttggcaaagcctttaatcggtcctcgcacctcaccacagataagataactcattggagagaaatcttacaagtatgaataatgtgccaaagcctaagaaaaccctcaattcttaatagatataagattattcctactggagagaaactacaaacctgagagaggcgctaatgcttttgacagtacctaaaactttaaagaaaatcattctgctgaaaaatcctagaaatgtgaagaatgtgaaaaagcctttaaatgattgtcacacttgattgtaggtaagataattcatactggagaaaactaccagtgtgaacaacgtggccaagcttcgacaatgctcacaccctattgcacaggaaagcatttatacttgagaagaaatgtacaaatattggcaaagtaaaaaatccattaacacctgctcacatcttactcaaaattgtagagttcatagtaaataaaagcattaaaattctaattactctcagaagatctgtcagaaagtatgtctttaaagtatagaagagcatttattttgaaaaaaacattacacatatgaagaggattgtaatatctttacttgtaccacagatcttattgtacacattttatactagagaaaaaccctcaggcagttgttaaaattttgttgaacatcagggagtttaagaaaaccctgcaagtataatgaatttggaaaaacattttttcaaaaactacaaattataaaacaccaaagtgttcatactaaaatatatttttgcagatacattaaatatgaaagatattcaatccaaaattaagtctatgtaaatatcagggaataattcacagtagaaatatctagggcattcaagctttagacattacactaaatcagagtgctgagtatagaaaataatacaaacagatttgtctaaacatttgtatataactttaaaaatagaatattttttggagggttataattacattcaaagtacttttttttgaaaatacagattttttttaaaagtgaataatgtgttcaactcttaaattcatgctgtttcatcattgctggtgtattcatatgtgaaagcatgtgactaattgttgctgcataaaagatatgagattcttttttattaggcattatttatgaccttttctatgaaaagataaggacattaaaatgtaagatgcgtgaggaaaatttaggtagagaggctctttgtggttaacttataatattgagtgatgcatgaggtaggtgttcagaataatattcctctgcattattatgaatgaaaagcattcttaattttagttaaaattaagttagtcatatgttattttattaattgtacttctatgaaataatatgcagtctatttttaaattataaattatgtgtgaacttagcttttcaattcaacatttttaacatattaaatactattgtgaattcaatgaagtgttcttatgccactaactttaacctattcccttactcaaggatgtaggtaaaagatggtaacaatacactatttggtaagataatgtactgacatctctagcaatcttttttgccagtggctttaaattgccaataagttaaagaatattgttcctatgggttaaatttttattcttattttcacatttaaatttatttttcttaatttttgtggatacataatatgtgtatatatgtatgccatatatggtatattttgatgcaggcatactctatataataatcacattagaggaaatgagatatccattacctctagcatttattctttttattacaagcaattcaattgtacacttttagttatttttaaatttacaatgttattgattacagggtcatttttatggtcataataaaaaattttatacaaacgtgtaaaatctatacatttctgagttctgaataaatatttttaaaaattttaa

SEQ ID NO: 201908 - DNA, 4021 bp, Homo sapiens
  Payload ID: 19832
  Gene Name: zinc finger protein 254
  ENST ID: ENST00000342944
  CDS Start-End: 316-2040
aatcaagcgcgcagttgaagaggagtgcatggtttccggcatttggctgggcctttgtctctcgctcccaccagagcttggaatccgtctctgctcttctgcattctccacctcgggagcccctggggactctgtgacggcctctgttgccctgtgatctgcaggtccggagagacgcacagctaagatgtcaggacatcctggaagctgggaaagggtcttgccatctctaagctggacctggtgacctttttggagggaaagaaagagccctggactgtgaagagtgaggagaccatagctgcacagccaggtatgtgtcctcattttgctcaagacctttggccagagcagggcatggaagattcttttcaaaaagcaatactgagaagatatggaaaatatggacatgagaatttacagttaagaaaaggctgtaaaagtgtggatgagtataaggtgaacaaagaaggttataatggacttaaccagtgtttcacaactgcccagagcaaagtatttcaatgtgataaatatttgaaagtcttctataaatttttaaattcaaacagacctaagataagacatactgaaaagaaatctttcaaatgtaaaaaacgtgtcaaattattttgcatgctttcacataaaacccaacacaaaagcatttatcatagagagaagtcctacaaatgtaaagaatgtggaaaaacctttaattggtcctcaacccttactaatcataggaaaatttatactgaagagaaaccttacaaatgtgaagaatataacaaatctcctaagcaactctcaacccttactacacatgaaataattcatgctggagagaaactctacaaatgtgaagaatgtggtgaagcttttaatcgatcctcaaatcttactacacataagataattcatactggagagaaaccttacaagtgtgaagaatgtggcaaagcatttatctggtcctcaacccttactgagcataagaaaattcatactagaaagaaaccctacaagtgtgaagaatgtggcaaagcatttatatggtcctcaacactaactagacataagaggatgcacactggagagaaaccctacaaatgtgaagaatgtggcaaagcttttagccagtcctcaacccttactacacataagataattcatactggagagaaacgctacaaatgcttagaatgtggcaaagcttttaagcaactctcaactcttactacacataaaataattcatgttggagagaaactctacaaatgtgaagaatgcggcaaaggttttaatcgatcttcaaatcttactacacataagataattcatactggagagaaaccttacaagtgtgaagaatgtggcaaagcatttatctggtcctcaacccttactaaacataagagaattcatactagagagaaaccctacaaatgtgaagaatgtggcaaggcatttatatggtcctcaaccctaactagacataagaggatgcacactggagagaaaccctacaaatgtgaagaatgtggcaaatcttttagccaatcctcaacccttactacacataagataattcatactggagagaaaccctacaaatgtgaagaatgtggcaaagcctttaactggtcctcaactcttactaaacataagataattcatactgaagagaaaccctacaaatgtgaaaaatgtggcaaagcctttaagcagtcttcaatccttactaaccataagagaattcatactggagagaaaccctataaatgtgaagaatgtggcaaatcttttaaccggtcttcaacttttactaaacataaggtaattcatactggagtaaaaccctacaaatgtgaagaatgtggcaaagcatttttctggtcctcaaccctaactaaacataagagaattcatactggagagcaaccctacaaatgggaaaaatttggcaaagcctttaatcggtcctcgcacctcaccacagataagataactcattggagagaaatcttacaagtatgaataatgtgccaaagcctaagaaaaccctcaattcttaatagatataagattattcctactggagagaaactacaaacctgagagaggcgctaatgcttttgacagtacctaaaactttaaagaaaatcattctgctgaaaaatcctagaaatgtgaagaatgtgaaaaagcctttaaatgattgtcacacttgattgtaggtaagataattcatactggagaaaactaccagtgtgaacaacgtggccaagcttcgacaatgctcacaccctattgcacaggaaagcatttatacttgagaagaaatgtacaaatattggcaaagtaaaaaatccattaacacctgctcacatcttactcaaaattgtagagttcatagtaaataaaagcattaaaattctaattactctcagaagatctgtcagaaagtatgtctttaaagtatagaagagcatttattttgaaaaaaacattacacatatgaagaggattgtaatatctttacttgtaccacagatcttattgtacacattttatactagagaaaaaccctcaggcagttgttaaaattttgttgaacatcagggagtttaagaaaaccctgcaagtataatgaatttggaaaaacattttttcaaaaactacaaattataaaacaccaaagtgttcatactaaaatatatttttgcagatacattaaatatgaaagatattcaatccaaaattaagtctatgtaaatatcagggaataattcacagtagaaatatctagggcattcaagctttagacattacactaaatcagagtgctgagtatagaaaataatacaaacagatttgtctaaacatttgtatataactttaaaaatagaatattttttggagggttataattacattcaaagtacttttttttgaaaatacagattttttttaaaagtgaataatgtgttcaactcttaaattcatgctgtttcatcattgctggtgtattcatatgtgaaagcatgtgactaattgttgctgcataaaagatatgagattcttttttattaggcattatttatgaccttttctatgaaaagataaggacattaaaatgtaagatgcgtgaggaaaatttaggtagagaggctctttgtggttaacttataatattgagtgatgcatgaggtaggtgttcagaataatattcctctgcattattatgaatgaaaagcattcttaattttagttaaaattaagttagtcatatgttattttattaattgtacttctatgaaataatatgcagtctatttttaaattataaattatgtgtgaacttagcttttcaattcaacatttttaacatattaaatactattgtgaattcaatgaagtgttcttatgccactaactttaacctattcccttactcaaggatgtaggtaaaagatggtaacaatacactatttggtaagataatgtactgacatctctagcaatcttttttgccagtggctttaaattgccaataagttaaagaatattgttcctatgggttaaatttttattcttattttcacatttaaatttatttttcttaatttttgtggatacataatatgtgtatatatgtatgccatatatggtatattttgatgcaggcatactctatataataatcacattagaggaaatgagatatccattacctctagcatttattctttttattacaagcaattcaattgtacacttttagttatttttaaatttacaatgttattgattacagggtcatttttatggtcataataaaaaattttatacaaacgtgtaaaatctatacatttctgagttctgaataaatatttttaaaaattttaatatatttttctttgaatatgtgacctttgcctgcaagcacatatggactcttagaattgatttacataaaattaaatatatacttctattaaagataaaccttaggtgt

SEQ ID NO: 201909 - DNA, 792 bp, Homo sapiens
  Payload ID: 19832
  Gene Name: zinc finger protein 254
  ENST ID: ENST00000594886
  CDS Start-End: 133-294
gatatggcggggcctttgtctctcgctgtcgccggagtcccaggtctgtcttcactgctctgtgtcctctgctcctagaggcccagcctctgtggcgctgttaccagcaggtattggagatccacagctaagatgccaggaccccctagaagcctagaaatgatggagtctcgctctgttggccaagctggagtgcagaggcgcaatctcagctcactgcaagctctgtctcccgggttcacgccgttctcagcctctcgagcagctggaactacagggactgttgacatttagggatgtggccatagaattctctctggaggagtggcaacacctggacattgcacagcagaatttatatagaaatgtgatgttagagaactacagaaacctggccttcctgggtattgctgtctctaagccagacctgatcacctgtctggaacaagggaaagagccctggaatatgaagcgacatgagatggtggatgaacccccaggtatgtgtcctcattttgctcaagacctttggccagagcagggcatggaagattcttttcaaaaagcaatactgagaagatatggaaaatatggacatgagaatttacagttaagaaaaggctgtaaaagtgtggatgagtataaggtgaacaaagaaggttataatggacttaaccagtgtttcacaactgcccagagcaaagtatttcaatgtgataaatatttgaaagtcttctataaatttttaaattcaaacagacctaagataagacatactgaaaagaaatcttt

SEQ ID NO: 201910 - DNA, 611 bp, Homo sapiens
  Payload ID: 19832
  Gene Name: zinc finger protein 254
  ENST ID: ENST00000595187
  CDS Start-End: 56-283
gaggcccagcctctgtggcgctgttaccagcaggtattggagatccacagctaagatgccaggaccccctagaagcctagaaatgatggagtctcgctctgttggccaagctggagtgcagaggcgcaatctcagctcactgcaagctctgtctcccgggttcacgccgttctcagcctctcgagcagctggaactacagatggagtctcgctctgtcatccaggctggagtcaatggcacaatctcggctcactgcaacctctgcctcccgggttcaagtgattctcctgcctcagcctcctgagtagctgcgattacagggactgttgacatttagggatgtggccatagaattctctctggaggagtggcaacacctggacattgcacagcagaatttatatagaaatgtgatgttagagaactacagaaacctggccttcctgggtattgctgtctctaagccagacctgatcacctgtctggaacaagggaaagagccctggaatatgaagcgacatgagatggtggatgaacccccaggtatgtgtcctcattttgctcaagacctttggccagagcagggcatggaagattcttttcaaaaagc

SEQ ID NO: 201911 - DNA, 4244 bp, Homo sapiens
  Payload ID: 19832
  Gene Name: zinc finger protein 254
  ENST ID: ENST00000613065
  CDS Start-End: 407-2263
aatcaagcgcgcagttgaagaggagtgcatggtttccggcatttggctgggcctttgtctctcgctcccaccagagcttggaatccgtctctgctcttctgcattctccacctcgggagcccctggggactctgtgacggcctctgttgccctgtgatctgcaggtccggagagacgcacagctaagatgtcaggacatcctggaagctgggaaagggtcttgccatctctaagctggacctggtgacctttttggagggaaagaaagagccctggactgtgaagagtgaggagaccatagctgcacagccagggactgttgacatttagggatgtggccatagaattctctctggaggagtggcaacacctggacattgcacagcagaatttatatagaaatgtgatgttagagaactacagaaacctggccttcctgggtattgctgtctctaagccagacctgatcacctgtctggaacaagggaaagagccctggaatatgaagcgacatgagatggtggatgaacccccaggtatgtgtcctcattttgctcaagacctttggccagagcagggcatggaagattcttttcaaaaagcaatactgagaagatatggaaaatatggacatgagaatttacagttaagaaaaggctgtaaaagtgtggatgagtataaggtgaacaaagaaggttataatggacttaaccagtgtttcacaactgcccagagcaaagtatttcaatgtgataaatatttgaaagtcttctataaatttttaaattcaaacagacctaagataagacatactgaaaagaaatctttcaaatgtaaaaaacgtgtcaaattattttgcatgctttcacataaaacccaacacaaaagcatttatcatagagagaagtcctacaaatgtaaagaatgtggaaaaacctttaattggtcctcaacccttactaatcataggaaaatttatactgaagagaaaccttacaaatgtgaagaatataacaaatctcctaagcaactctcaacccttactacacatgaaataattcatgctggagagaaactctacaaatgtgaagaatgtggtgaagcttttaatcgatcctcaaatcttactacacataagataattcatactggagagaaaccttacaagtgtgaagaatgtggcaaagcatttatctggtcctcaacccttactgagcataagaaaattcatactagaaagaaaccctacaagtgtgaagaatgtggcaaagcatttatatggtcctcaacactaactagacataagaggatgcacactggagagaaaccctacaaatgtgaagaatgtggcaaagcttttagccagtcctcaacccttactacacataagataattcatactggagagaaacgctacaaatgcttagaatgtggcaaagcttttaagcaactctcaactcttactacacataaaataattcatgttggagagaaactctacaaatgtgaagaatgcggcaaaggttttaatcgatcttcaaatcttactacacataagataattcatactggagagaaaccttacaagtgtgaagaatgtggcaaagcatttatctggtcctcaacccttactaaacataagagaattcatactagagagaaaccctacaaatgtgaagaatgtggcaaggcatttatatggtcctcaaccctaactagacataagaggatgcacactggagagaaaccctacaaatgtgaagaatgtggcaaatcttttagccaatcctcaacccttactacacataagataattcatactggagagaaaccctacaaatgtgaagaatgtggcaaagcctttaactggtcctcaactcttactaaacataagataattcatactgaagagaaaccctacaaatgtgaaaaatgtggcaaagcctttaagcagtcttcaatccttactaaccataagagaattcatactggagagaaaccctataaatgtgaagaatgtggcaaatcttttaaccggtcttcaacttttactaaacataaggtaattcatactggagtaaaaccctacaaatgtgaagaatgtggcaaagcatttttctggtcctcaaccctaactaaacataagagaattcatactggagagcaaccctacaaatgggaaaaatttggcaaagcctttaatcggtcctcgcacctcaccacagataagataactcattggagagaaatcttacaagtatgaataatgtgccaaagcctaagaaaaccctcaattcttaatagatataagattattcctactggagagaaactacaaacctgagagaggcgctaatgcttttgacagtacctaaaactttaaagaaaatcattctgctgaaaaatcctagaaatgtgaagaatgtgaaaaagcctttaaatgattgtcacacttgattgtaggtaagataattcatactggagaaaactaccagtgtgaacaacgtggccaagcttcgacaatgctcacaccctattgcacaggaaagcatttatacttgagaagaaatgtacaaatattggcaaagtaaaaaatccattaacacctgctcacatcttactcaaaattgtagagttcatagtaaataaaagcattaaaattctaattactctcagaagatctgtcagaaagtatgtctttaaagtatagaagagcatttattttgaaaaaaacattacacatatgaagaggattgtaatatctttacttgtaccacagatcttattgtacacattttatactagagaaaaaccctcaggcagttgttaaaattttgttgaacatcagggagtttaagaaaaccctgcaagtataatgaatttggaaaaacattttttcaaaaactacaaattataaaacaccaaagtgttcatactaaaatatatttttgcagatacattaaatatgaaagatattcaatccaaaattaagtctatgtaaatatcagggaataattcacagtagaaatatctagggcattcaagctttagacattacactaaatcagagtgctgagtatagaaaataatacaaacagatttgtctaaacatttgtatataactttaaaaatagaatattttttggagggttataattacattcaaagtacttttttttgaaaatacagattttttttaaaagtgaataatgtgttcaactcttaaattcatgctgtttcatcattgctggtgtattcatatgtgaaagcatgtgactaattgttgctgcataaaagatatgagattcttttttattaggcattatttatgaccttttctatgaaaagataaggacattaaaatgtaagatgcgtgaggaaaatttaggtagagaggctctttgtggttaacttataatattgagtgatgcatgaggtaggtgttcagaataatattcctctgcattattatgaatgaaaagcattcttaattttagttaaaattaagttagtcatatgttattttattaattgtacttctatgaaataatatgcagtctatttttaaattataaattatgtgtgaacttagcttttcaattcaacatttttaacatattaaatactattgtgaattcaatgaagtgttcttatgccactaactttaacctattcccttactcaaggatgtaggtaaaagatggtaacaatacactatttggtaagataatgtactgacatctctagcaatcttttttgccagtggctttaaattgccaataagttaaagaatattgttcctatgggttaaatttttattcttattttcacatttaaatttatttttcttaatttttgtggatacataatatgtgtatatatgtatgccatatatggtatattttgatgcaggcatactctatataataatcacattagaggaaatgagatatccattacctctagcatttattctttttattacaagcaattcaattgtacacttttagttatttttaaatttacaatgttattgattacagggtcatttttatggtcataataaaaaattttatacaaacgtgtaaaatctatacatttctgagttctgaataaatatttttaaaaattttaatatatttttctttgaatatgtgacctttgcctgcaagcacatatggactcttagaattgatttacataaaattaaatatatacttctattaaagataaaccttaggtgt

SEQ ID NO: 201912 - DNA, 3982 bp, Homo sapiens
  Payload ID: 19832
  Gene Name: zinc finger protein 254
  ENST ID: ENST00000611359
  CDS Start-End: 241-2001
acaaagcggcttccgggatatggcggggcctttgtctctcgctgtcgccggagtcccaggtctgtcttcactgctctgtgtcctctgctcctagaggcccagcctctgtggcgctgttaccagcaggtattggagatccacagctaagatgccaggaccccctagaagcctagaaatggtattgctgtctctaagccagacctgatcacctgtctggaacaagggaaagagccctggaatatgaagcgacatgagatggtggatgaacccccaggtatgtgtcctcattttgctcaagacctttggccagagcagggcatggaagattcttttcaaaaagcaatactgagaagatatggaaaatatggacatgagaatttacagttaagaaaaggctgtaaaagtgtggatgagtataaggtgaacaaagaaggttataatggacttaaccagtgtttcacaactgcccagagcaaagtatttcaatgtgataaatatttgaaagtcttctataaatttttaaattcaaacagacctaagataagacatactgaaaagaaatctttcaaatgtaaaaaacgtgtcaaattattttgcatgctttcacataaaacccaacacaaaagcatttatcatagagagaagtcctacaaatgtaaagaatgtggaaaaacctttaattggtcctcaacccttactaatcataggaaaatttatactgaagagaaaccttacaaatgtgaagaatataacaaatctcctaagcaactctcaacccttactacacatgaaataattcatgctggagagaaactctacaaatgtgaagaatgtggtgaagcttttaatcgatcctcaaatcttactacacataagataattcatactggagagaaaccttacaagtgtgaagaatgtggcaaagcatttatctggtcctcaacccttactgagcataagaaaattcatactagaaagaaaccctacaagtgtgaagaatgtggcaaagcatttatatggtcctcaacactaactagacataagaggatgcacactggagagaaaccctacaaatgtgaagaatgtggcaaagcttttagccagtcctcaacccttactacacataagataattcatactggagagaaacgctacaaatgcttagaatgtggcaaagcttttaagcaactctcaactcttactacacataaaataattcatgttggagagaaactctacaaatgtgaagaatgcggcaaaggttttaatcgatcttcaaatcttactacacataagataattcatactggagagaaaccttacaagtgtgaagaatgtggcaaagcatttatctggtcctcaacccttactaaacataagagaattcatactagagagaaaccctacaaatgtgaagaatgtggcaaggcatttatatggtcctcaaccctaactagacataagaggatgcacactggagagaaaccctacaaatgtgaagaatgtggcaaatcttttagccaatcctcaacccttactacacataagataattcatactggagagaaaccctacaaatgtgaagaatgtggcaaagcctttaactggtcctcaactcttactaaacataagataattcatactgaagagaaaccctacaaatgtgaaaaatgtggcaaagcctttaagcagtcttcaatccttactaaccataagagaattcatactggagagaaaccctataaatgtgaagaatgtggcaaatcttttaaccggtcttcaacttttactaaacataaggtaattcatactggagtaaaaccctacaaatgtgaagaatgtggcaaagcatttttctggtcctcaaccctaactaaacataagagaattcatactggagagcaaccctacaaatgggaaaaatttggcaaagcctttaatcggtcctcgcacctcaccacagataagataactcattggagagaaatcttacaagtatgaataatgtgccaaagcctaagaaaaccctcaattcttaatagatataagattattcctactggagagaaactacaaacctgagagaggcgctaatgcttttgacagtacctaaaactttaaagaaaatcattctgctgaaaaatcctagaaatgtgaagaatgtgaaaaagcctttaaatgattgtcacacttgattgtaggtaagataattcatactggagaaaactaccagtgtgaacaacgtggccaagcttcgacaatgctcacaccctattgcacaggaaagcatttatacttgagaagaaatgtacaaatattggcaaagtaaaaaatccattaacacctgctcacatcttactcaaaattgtagagttcatagtaaataaaagcattaaaattctaattactctcagaagatctgtcagaaagtatgtctttaaagtatagaagagcatttattttgaaaaaaacattacacatatgaagaggattgtaatatctttacttgtaccacagatcttattgtacacattttatactagagaaaaaccctcaggcagttgttaaaattttgttgaacatcagggagtttaagaaaaccctgcaagtataatgaatttggaaaaacattttttcaaaaactacaaattataaaacaccaaagtgttcatactaaaatatatttttgcagatacattaaatatgaaagatattcaatccaaaattaagtctatgtaaatatcagggaataattcacagtagaaatatctagggcattcaagctttagacattacactaaatcagagtgctgagtatagaaaataatacaaacagatttgtctaaacatttgtatataactttaaaaatagaatattttttggagggttataattacattcaaagtacttttttttgaaaatacagattttttttaaaagtgaataatgtgttcaactcttaaattcatgctgtttcatcattgctggtgtattcatatgtgaaagcatgtgactaattgttgctgcataaaagatatgagattcttttttattaggcattatttatgaccttttctatgaaaagataaggacattaaaatgtaagatgcgtgaggaaaatttaggtagagaggctctttgtggttaacttataatattgagtgatgcatgaggtaggtgttcagaataatattcctctgcattattatgaatgaaaagcattcttaattttagttaaaattaagttagtcatatgttattttattaattgtacttctatgaaataatatgcagtctatttttaaattataaattatgtgtgaacttagcttttcaattcaacatttttaacatattaaatactattgtgaattcaatgaagtgttcttatgccactaactttaacctattcccttactcaaggatgtaggtaaaagatggtaacaatacactatttggtaagataatgtactgacatctctagcaatcttttttgccagtggctttaaattgccaataagttaaagaatattgttcctatgggttaaatttttattcttattttcacatttaaatttatttttcttaatttttgtggatacataatatgtgtatatatgtatgccatatatggtatattttgatgcaggcatactctatataataatcacattagaggaaatgagatatccattacctctagcatttattctttttattacaagcaattcaattgtacacttttagttatttttaaatttacaatgttattgattacagggtcatttttatggtcataataaaaaattttatacaaacgtgtaaaatctatacatttctgagttctgaataaatatttttaaaaattttaatatatttttctttgaatatgtgacctttgcctgcaagcacatatggactcttagaattgatttacataaaattaaatatatacttctattaaagataaaccttaggtgt

SEQ ID NO: 201913 - DNA, 3886 bp, Homo sapiens
  Payload ID: 19832
  Gene Name: zinc finger protein 254
  ENST ID: ENST00000616028
  CDS Start-End: 181-1905
acaaagcggcttccgggatatggcggggcctttgtctctcgctgtcgccggagtcccaggtctgtcttcactgctctgtgtcctctgctcctagaggcccagcctctgtggcgctgttaccagcaggtattggagatccacagctaagatgccaggaccccctagaagcctagaaatggtatgtgtcctcattttgctcaagacctttggccagagcagggcatggaagattcttttcaaaaagcaatactgagaagatatggaaaatatggacatgagaatttacagttaagaaaaggctgtaaaagtgtggatgagtataaggtgaacaaagaaggttataatggacttaaccagtgtttcacaactgcccagagcaaagtatttcaatgtgataaatatttgaaagtcttctataaatttttaaattcaaacagacctaagataagacatactgaaaagaaatctttcaaatgtaaaaaacgtgtcaaattattttgcatgctttcacataaaacccaacacaaaagcatttatcatagagagaagtcctacaaatgtaaagaatgtggaaaaacctttaattggtcctcaacccttactaatcataggaaaatttatactgaagagaaaccttacaaatgtgaagaatataacaaatctcctaagcaactctcaacccttactacacatgaaataattcatgctggagagaaactctacaaatgtgaagaatgtggtgaagcttttaatcgatcctcaaatcttactacacataagataattcatactggagagaaaccttacaagtgtgaagaatgtggcaaagcatttatctggtcctcaacccttactgagcataagaaaattcatactagaaagaaaccctacaagtgtgaagaatgtggcaaagcatttatatggtcctcaacactaactagacataagaggatgcacactggagagaaaccctacaaatgtgaagaatgtggcaaagcttttagccagtcctcaacccttactacacataagataattcatactggagagaaacgctacaaatgcttagaatgtggcaaagcttttaagcaactctcaactcttactacacataaaataattcatgttggagagaaactctacaaatgtgaagaatgcggcaaaggttttaatcgatcttcaaatcttactacacataagataattcatactggagagaaaccttacaagtgtgaagaatgtggcaaagcatttatctggtcctcaacccttactaaacataagagaattcatactagagagaaaccctacaaatgtgaagaatgtggcaaggcatttatatggtcctcaaccctaactagacataagaggatgcacactggagagaaaccctacaaatgtgaagaatgtggcaaatcttttagccaatcctcaacccttactacacataagataattcatactggagagaaaccctacaaatgtgaagaatgtggcaaagcctttaactggtcctcaactcttactaaacataagataattcatactgaagagaaaccctacaaatgtgaaaaatgtggcaaagcctttaagcagtcttcaatccttactaaccataagagaattcatactggagagaaaccctataaatgtgaagaatgtggcaaatcttttaaccggtcttcaacttttactaaacataaggtaattcatactggagtaaaaccctacaaatgtgaagaatgtggcaaagcatttttctggtcctcaaccctaactaaacataagagaattcatactggagagcaaccctacaaatgggaaaaatttggcaaagcctttaatcggtcctcgcacctcaccacagataagataactcattggagagaaatcttacaagtatgaataatgtgccaaagcctaagaaaaccctcaattcttaatagatataagattattcctactggagagaaactacaaacctgagagaggcgctaatgcttttgacagtacctaaaactttaaagaaaatcattctgctgaaaaatcctagaaatgtgaagaatgtgaaaaagcctttaaatgattgtcacacttgattgtaggtaagataattcatactggagaaaactaccagtgtgaacaacgtggccaagcttcgacaatgctcacaccctattgcacaggaaagcatttatacttgagaagaaatgtacaaatattggcaaagtaaaaaatccattaacacctgctcacatcttactcaaaattgtagagttcatagtaaataaaagcattaaaattctaattactctcagaagatctgtcagaaagtatgtctttaaagtatagaagagcatttattttgaaaaaaacattacacatatgaagaggattgtaatatctttacttgtaccacagatcttattgtacacattttatactagagaaaaaccctcaggcagttgttaaaattttgttgaacatcagggagtttaagaaaaccctgcaagtataatgaatttggaaaaacattttttcaaaaactacaaattataaaacaccaaagtgttcatactaaaatatatttttgcagatacattaaatatgaaagatattcaatccaaaattaagtctatgtaaatatcagggaataattcacagtagaaatatctagggcattcaagctttagacattacactaaatcagagtgctgagtatagaaaataatacaaacagatttgtctaaacatttgtatataactttaaaaatagaatattttttggagggttataattacattcaaagtacttttttttgaaaatacagattttttttaaaagtgaataatgtgttcaactcttaaattcatgctgtttcatcattgctggtgtattcatatgtgaaagcatgtgactaattgttgctgcataaaagatatgagattcttttttattaggcattatttatgaccttttctatgaaaagataaggacattaaaatgtaagatgcgtgaggaaaatttaggtagagaggctctttgtggttaacttataatattgagtgatgcatgaggtaggtgttcagaataatattcctctgcattattatgaatgaaaagcattcttaattttagttaaaattaagttagtcatatgttattttattaattgtacttctatgaaataatatgcagtctatttttaaattataaattatgtgtgaacttagcttttcaattcaacatttttaacatattaaatactattgtgaattcaatgaagtgttcttatgccactaactttaacctattcccttactcaaggatgtaggtaaaagatggtaacaatacactatttggtaagataatgtactgacatctctagcaatcttttttgccagtggctttaaattgccaataagttaaagaatattgttcctatgggttaaatttttattcttattttcacatttaaatttatttttcttaatttttgtggatacataatatgtgtatatatgtatgccatatatggtatattttgatgcaggcatactctatataataatcacattagaggaaatgagatatccattacctctagcatttattctttttattacaagcaattcaattgtacacttttagttatttttaaatttacaatgttattgattacagggtcatttttatggtcataataaaaaattttatacaaacgtgtaaaatctatacatttctgagttctgaataaatatttttaaaaattttaatatatttttctttgaatatgtgacctttgcctgcaagcacatatggactcttagaattgatttacataaaattaaatatatacttctattaaagataaaccttaggtgt

SEQ ID NO: 201914 - DNA, 2172 bp, Homo sapiens
  Payload ID: 19833
  Gene Name: zinc finger protein 256
  Uniprot ID: Q9Y2P7
  ENST ID: ENST00000282308
  CDS Start-End: 198-2081
ggcatttgtctggactgattacttggtagaaagccccggagcgctgggtcagcatcatccgtgactgactgagaaggcgcgagaggagtcttccccgctgcacagaggcgtggctgaggctcggcggcgcccagggtacccaggcccggcccggaataaggacatcctctctggccccgctccgctcacagagtcagatggcggcggccgagctgacggccccggcccagggcattgtgacctttgaggacgtggctgtttacttctcctggaaggagtggggtcttcttgatgaggctcagaaatgcctgtaccacgatgtgatgctggagaacttgacacttacaacctccctgggtggttctggagcaggggatgaggaggcaccttatcagcagagcacttctccacagcgggtgtcacaggttaggattcctaaggcccttccttctccccagaagaccaacccctgtgagatatgtggcccagtcttgagacagattttgcacttggttgaacaccaaggaacacaccatggtcagaaactgtatacagacggggcatgtaggaaacaattacaatttactgcataccttcatcagcaccagaagcagcatgttggacagaaacacttcagaagcaatgggggcagagacatgtttttgagcagctgcacatttgaagtatctgggaagcccttcacttgcaaggaggttgggaaggatttcctggtgagatcaagatttcttcagcaacaggctgctcacaccagaaagaagtcaaacagaaccaagagtgcagtggcctttcacagtgtaaaaaatcattacaactggggagaatgtgtgaaagctttcagctacaaacatgtacgtgttcagcaccagggagacctcattagggaaagatcttacatgtgcagtgaatgtgggaaatcttttagcacaagctgtagcctcagtgatcatttgagagttcacacttcagaaaagccttatacatgtggagaatgtgggaaatcctataggcaaagctctagccttattacgcaccgaagaattcacactggagtaagacctcatcaatgtgatgaatgtggaaaattatttaacaggaagtatgaccttcttatacatcagagagttcatactggagaaaggccttacaagtgcagtgaatgtgggaaatcctttagccatagctctagcctcattacacaccagagaattcatactggaatgaggccttatgagtgcagtgaatgtgggaaatcttttatccatagttctagccttattacacaccagagagttcacactggtacaaggccttatatgtgcagtgaatgtgggaaatcctttagccagagctgtcacctcattaaacaccggagacttcacattggagaagggccttatgagtgtagtgaatgtgggaaattgtttacttatagatctcgtttcttccaacaccagagagttcatactggagtaagatctcatgaatgtcatgaatgtggaaaattatttagcaggaaatttgacctcattgtacatgagagagttcacacaggagaaaggccatatgagtgcagtgaatgtggaaaatcctttacctgtaaatcctacctcatctcacactggaaagttcatactggagcaaggccttatgaatgtggggagtgtgggaaatcatttactcatagctctacgctccttcaacaccagagagttcacactggagaaaggccttatgagtgcaatgaatgtgggaagttttttagccagagctccagcctcattagacataggagaagtcacaccggagaaaggccttatgagtgcagtgagtgttggaaatcctttagtaaccactctagcctcgttaaacaccgaagagttcataccggagaaaggccttatgaatgcagtgaatgtggaaaatcctttagccagagctctaacctcactaatcaccagcgaattcacagtggggaaaggccttatgagtgtagtgactgtggaaaattttttaccttcaactccaacctcctaaaacatcagaacgttcacaagggataaaggttaggtaacacacatagggctgttacggactgagaagtgtccctgcaaaattcacagacataaataaataaatacgtattttcaataa

SEQ ID NO: 201915 - DNA, 1958 bp, Homo sapiens
  Payload ID: 19833
  Gene Name: zinc finger protein 256
  ENST ID: ENST00000598928
  CDS Start-End: 202-372
ttttggcatttgtctggactgattacttggtagaaagccccggagcgctgggtcagcatcatccgtgactgactgagaaggcgcgagaggagtcttccccgctgcacagaggcgtggctgaggctcggcggcgcccagggtacccaggcccggcccggaataaggacatcctctctggccccgctccgctcacagagtcagatggcggcggccgagctgacggccccggcccaggtggttctggagcaggggatgaggaggcaccttatcagcagagcacttctccacagcgggtgtcacaggttaggattcctaaggcccttccttctccccagaagaccaacccctgtgagatatgtggcccagtcttgagacagattttgcacttggttgaacaccaaggaacacaccatggtcagaaactgtatacagacggggcatgtaggaaacaattacaatttactgcataccttcatcagcaccagaagcagcatgttggacagaaacacttcagaagcaatgggggcagagacatgtttttgagcagctgcacatttgaagtatctgggaagcccttcacttgcaaggaggttgggaaggatttcctggtgagatcaagatttcttcagcaacaggctgctcacaccagaaagaagtcaaacagaaccaagagtgcagtggcctttcacagtgtaaaaaatcattacaactggggagaatgtgtgaaagctttcagctacaaacatgtacgtgttcagcaccagggagacctcattagggaaagatcttacatgtgcagtgaatgtgggaaatcttttagcacaagctgtagcctcagtgatcatttgagagttcacacttcagaaaagccttatacatgtggagaatgtgggaaatcctataggcaaagctctagccttattacgcaccgaagaattcacactggagtaagacctcatcaatgtgatgaatgtggaaaattatttaacaggaagtatgaccttcttatacatcagagagttcatactggagaaaggccttacaagtgcagtgaatgtgggaaatcctttagccatagctctagcctcattacacaccagagaattcatactggaatgaggccttatgagtgcagtgaatgtgggaaatcttttatccatagttctagccttattacacaccagagagttcacactggtacaaggccttatatgtgcagtgaatgtgggaaatcctttagccagagctgtcacctcattaaacaccggagacttcacattggagaagggccttatgagtgtagtgaatgtgggaaattgtttacttatagatctcgtttcttccaacaccagagagttcatactggagtaagatctcatgaatgtcatgaatgtggaaaattatttagcaggaaatttgacctcattgtacatgagagagttcacacaggagaaaggccatatgagtgcagtgaatgtggaaaatcctttacctgtaaatcctacctcatctcacactggaaagttcatactggagcaaggccttatgaatgtggggagtgtgggaaatcatttactcatagctctacgctccttcaacaccagagagttcacactggagaaaggccttatgagtgcaatgaatgtgggaagttttttagccagagctccagcctcattagacataggagaagtcacaccggagaaaggccttatgagtgcagtgagtgttggaaatcctttagtaaccactctagcctcgttaaacaccgaagagttcataccggagaaaggccttatgaatgcagtgaatgtggaaaatcctttagccagagctctaacctcactaatcaccagcgaattcacagtggggaaaggccttatgagtgtagtgactgtggaaaattttttaccttcaactccaacctcctaaaacatcagaacgttcacaagggataa

SEQ ID NO: 201916 - DNA, 3655 bp, Homo sapiens
  Payload ID: 19834
  Gene Name: zinc finger protein 257
  ENST ID: ENST00000435820
  CDS Start-End: 182-289
agcggacagggtggcttccgggtttggcgggtactttgtctctcgctctagcccgagctgcaggtctcgtcttccctggtctgtgtcctcttctcctaggggcccagcctctgtggccctgtgacctgcaggtattgggagatccccagctaagacgccaggtcctcctggaagcctagaaatgatggagtcttgctctgtcgtcagactggagtgcagtgggatgatctcggctctctgcaacctccgcctcccaggttcaagcaattctcctgcctcagcctcctgagtagctgggattacagggaccactgacaattagggatgtgactgtagaattctctctggaggagtggcattgcctggacactgcacagcagaatttatatagggatgtgatgttagagaactacagaaacctggtcttcctgggtattgctgtctctaagccagacctgatcacctgtctggagcaaggaaaagagccctgtaatatgaagagacatgagatggtagccaaacccccagttatgtgttctcatattgctgaagacctttgcccagagcgagacataaaatattttttccaaaaagtcatactgaggagatatgataaatgtgaacatgagaatttacaattaagaaagggctgtaaaagtgtggatgagtgtaaggtgtgcaaaggaggttataatggacttaaccaatgtctgataactacccagagcaaaatgtatcaatgtgataaatatgtaaaagtcttctataagttttcaaattcagatagacataagataagacatactgaaaagaaaacttgcaaatgtaaagaatgtggcaaatcattttgcatgctttcacaactaactcgacataagagaattcatattagagagaattcccacaaatgtgaagaatgtggcaaagcctttaaccagtcctcagctcttactcgacataagatgactcatactggagagaaaccctacaaatgtgaagagtgtggaaaagcttttaaccggtcttcacaccttactcaacataaggtaattcatactagagagaaaccctacaaatgtgaagagtgtggcaaagcctttaaccggtcttcacacattactcaacataagagaattcataatagagagaagcccttcaaatatgatgaatgttgcaaagcctttaagtggtcctcagctcttactacccttactcaacataagagaattcatactggagagaaaccctacaaatgtgaagagtgtggcaaagcctttaaccagtcctcagcccttactcgacataagatgattcatactggagagaaacccttccaatgtgaagagtgtggcaaagcttttaaccggtcttcacaccttactcaacataagataattcatactaaagagaaaccctacaaatgtgaagagtgtggaaaagcctttaaccggtcttcacaccttactaaacataagagaattcatactagagagaaggcctacaaatgtgatgaatattgcaaagcttttaactggtcctcagctcttactacccttactcagcataagataattcatactggagagaaaccctacaaatgtgaagagtgtggcaaagcctttaaccggtcttcataccttattcgacataagataattcatactggagagaaaccctacaaatgtgaagagtgtggcaaagcctttaaccagtcttcacaccttactcaacataaaataattcatactggggagaagccctacaaatgtgaagaatgtggcaaagcctttaaccggtcttcacacctttctcaacataagataattcatactggagagaaaccctacaaatgtgaagaatgtggcaagccttttaatcgtttctcataccttaccgtacataagagaattcatgctggagagaaccccaacaaatatgaagaatgtggcaaagcttgtaaccattcctcaaaccttactaaacataattcataatggagaaaaaccctacaaatgtgaagaatgtgtcaaagcttttaactgttcctcaatccttactaaacataagggaattcataatagagaaaccctacaaatgtgaagaacgtggcctggcttttaacaaatcctcaacatttactaagcataaaataattcatgctggagagaaactcttgaaatgtgatgaatgtggcatagcctcttcccagttctcaactcttactaaacatgagaacacatgtggaagataaagcctacaaatatgaagaatgtgacaaggcctttaaaagttctcaacccttattacacataatttatactggacagaaatcctaaagtgtgaagaatgtcacaaagcccttaataagtcctcaattcttaacagatataagatgtttcatactggagcgaaactacaatcctgaatgatgtcacagtgcttttaacaatacctcaaacttttctaaacataaaaaaaaattatactagtgcgaaactctagaaatataaagaacatgaaaaacttttaaatggttttcacacttgattgcaggtaaaataatttataccggagaaaactccaagtgtgaagaatataacttttaaccagtgttcacaacttattgtacaggaaagcatttatagttgagaaatggtgtacaaatataaagaatgtggaaaagtcattaatatttgctcacatattacacatcagagagttcatacttaataaaagtattataaatacaattactgtcaaatgatctttcagaaatataaacctttaaagtgaagaagagttcattctaaagacaaacattacaaatataaaggggtttgtagtgcttttacttgtatcacagattttattgtacacattttgtactagagaataaccctgaagcagttgctaaaattttgttcagcattaggaaatttatgttggagaagaattcagcaagtgtgattaatttggaaaaacattttttccataactatagcttagaaaatgccagagagctcatactaaaatatacttttgcagatgcaataaatacaaagaaatatttaattcaaattgagtttatataattatcagagaattaacagtagaaatagctaaggcactgacacttcagacattacactaaatcagattgctgagtatagaaaatccaaaactacagttggtaagtaaattaattttatgtaactttaaaatgagtagacatttctttgagaagtcataattaaattcaagtatacttttttgataaaattataaagctttttaaaagtaaataatgatgtaagtcaactctcaaattacttcatgctgtttcttcatttctattgtattcacctgtgaaagcatgtgatcaactattgctgcatcagagatatgagagatactttattaggtgggaattatatacgacctcttctataaaatagtaaggacactgaaatataagatgcataagagtctaagtgaagaggttctttgtggttaacttagtgatgtatgaagtagttgctcatgttatgagagaaaaacatttttaattttagttaaatgtaagttaaaattaaaatagtaccatataatgttagtgattgtacttttatttaataaaatgcagtacattttaaaa

SEQ ID NO: 201917 - DNA, 557 bp, Homo sapiens
  Payload ID: 19834
  Gene Name: zinc finger protein 257
  ENST ID: ENST00000594363
  CDS Start-End: 150-557
actttgtctctcgctctagcccgagctgcaggtctcgtcttccctggtctgtgtcctcttctcctaggggcccagcctctgtggccctgtgacctgcaggtattgggagatccccagctaagacgccaggtcctcctggaagcctagaaatgggaccactgacaattagggatgtgactgtagaattctctctggaggagtggcattgcctggacactgcacagcagaatttatatagggatgtgatgttagagaactacagaaacctggtcttcctgggtattgctgtctctaagccagacctgatcacctgtctggagcaaggaaaagagccctgtaatatgaagagacatgagatggtagccaaacccccagatggaggttcactcttcttgcccagactgaagtgcaatggtgcagtctcagctcaccgtaaactcctcctcccgggttcaagcgattctcttgcctcagcctttcaagtagcagggattacaggcactcgccaccatgcctggctaatttttgtatttttagtagacatggggtttcaccat

SEQ ID NO: 201918 - DNA, 817 bp, Homo sapiens
  Payload ID: 19834
  Gene Name: zinc finger protein 257
  ENST ID: ENST00000600162
  CDS Start-End: 98-346
gtcctcttctcctaggggcccagcctctgtggccctgtgacctgcaggtattgggagatccccagctaagacgccaggtcctcctggaagcctagaaatgggaccactgacaattagggatgtgactgtagaattctctctggaggagtggcattgcctggacactgcacagcagaatttatatagggatgtgatgttagagaactacagaaacctggtcttcctgggtattgctgtctctaagccagacctgatcacctgtctggagcaaggaaaagagccctgtaatatgaagagacatgagatggtagccaaacccccagcattttatttaatgggagaatgaaaccagtgtcttgaaagacccctaaaagccagacatagaaatttatgtgttctcatattgctgaagacctttgcccagagcgagacataaaatattttttccaaaaagtcatactgaggagatatgataaatgtgaacatgagaatttacaattaagaaagggctgtaaaagtgtggatgagtgtaaggtgtgcaaaggaggttataatggacttaaccaatgtctgataactacccagagcaaaatgtatcaatgtgataaatatgtaaaagtcttctataagttttcaaattcagatagacataagataagacatactgaaaagaaaacttgcaaatgtaaagaatgtggcaaatcattttgcatgctttcacaactaactcgacataagagaattcatattagagagaattcccacaaatgtgaagaatgtggcaaagcctttaaccagtcctcagctcttactcgac

SEQ ID NO: 201919 - DNA, 3874 bp, Homo sapiens
  Payload ID: 19834
  Gene Name: zinc finger protein 257
  Uniprot ID: Q9Y2Q1
  ENST ID: ENST00000594947
  CDS Start-End: 145-1836
gtctctcgctctagcccgagctgcaggtctcgtcttccctggtctgtgtcctcttctcctaggggcccagcctctgtggccctgtgacctgcaggtattgggagatccccagctaagacgccaggtcctcctggaagcctagaaatgggaccactgacaattagggatgtgactgtagaattctctctggaggagtggcattgcctggacactgcacagcagaatttatatagggatgtgatgttagagaactacagaaacctggtcttcctgggtattgctgtctctaagccagacctgatcacctgtctggagcaaggaaaagagccctgtaatatgaagagacatgagatggtagccaaacccccagttatgtgttctcatattgctgaagacctttgcccagagcgagacataaaatattttttccaaaaagtcatactgaggagatatgataaatgtgaacatgagaatttacaattaagaaagggctgtaaaagtgtggatgagtgtaaggtgtgcaaaggaggttataatggacttaaccaatgtctgataactacccagagcaaaatgtatcaatgtgataaatatgtaaaagtcttctataagttttcaaattcagatagacataagataagacatactgaaaagaaaacttgcaaatgtaaagaatgtggcaaatcattttgcatgctttcacaactaactcgacataagagaattcatattagagagaattcccacaaatgtgaagaatgtggcaaagcctttaaccagtcctcagctcttactcgacataagatgactcatactggagagaaaccctacaaatgtgaagagtgtggaaaagcttttaaccggtcttcacaccttactcaacataaggtaattcatactagagagaaaccctacaaatgtgaagagtgtggcaaagcctttaaccggtcttcacacattactcaacataagagaattcataatagagagaagcccttcaaatatgatgaatgttgcaaagcctttaagtggtcctcagctcttactacccttactcaacataagagaattcatactggagagaaaccctacaaatgtgaagagtgtggcaaagcctttaaccagtcctcagcccttactcgacataagatgattcatactggagagaaacccttccaatgtgaagagtgtggcaaagcttttaaccggtcttcacaccttactcaacataagataattcatactaaagagaaaccctacaaatgtgaagagtgtggaaaagcctttaaccggtcttcacaccttactaaacataagagaattcatactagagagaaggcctacaaatgtgatgaatattgcaaagcttttaactggtcctcagctcttactacccttactcagcataagataattcatactggagagaaaccctacaaatgtgaagagtgtggcaaagcctttaaccggtcttcataccttattcgacataagataattcatactggagagaaaccctacaaatgtgaagagtgtggcaaagcctttaaccagtcttcacaccttactcaacataaaataattcatactggggagaagccctacaaatgtgaagaatgtggcaaagcctttaaccggtcttcacacctttctcaacataagataattcatactggagagaaaccctacaaatgtgaagaatgtggcaagccttttaatcgtttctcataccttaccgtacataagagaattcatgctggagagaaccccaacaaatatgaagaatgtggcaaagcttgtaaccattcctcaaaccttactaaacataattcataatggagaaaaaccctacaaatgtgaagaatgtgtcaaagcttttaactgttcctcaatccttactaaacataagggaattcataatagagaaaccctacaaatgtgaagaacgtggcctggcttttaacaaatcctcaacatttactaagcataaaataattcatgctggagagaaactcttgaaatgtgatgaatgtggcatagcctcttcccagttctcaactcttactaaacatgagaacacatgtggaagataaagcctacaaatatgaagaatgtgacaaggcctttaaaagttctcaacccttattacacataatttatactggacagaaatcctaaagtgtgaagaatgtcacaaagcccttaataagtcctcaattcttaacagatataagatgtttcatactggagcgaaactacaatcctgaatgatgtcacagtgcttttaacaatacctcaaacttttctaaacataaaaaaaaattatactagtgcgaaactctagaaatataaagaacatgaaaaacttttaaatggttttcacacttgattgcaggtaaaataatttataccggagaaaactccaagtgtgaagaatataacttttaaccagtgttcacaacttattgtacaggaaagcatttatagttgagaaatggtgtacaaatataaagaatgtggaaaagtcattaatatttgctcacatattacacatcagagagttcatacttaataaaagtattataaatacaattactgtcaaatgatctttcagaaatataaacctttaaagtgaagaagagttcattctaaagacaaacattacaaatataaaggggtttgtagtgcttttacttgtatcacagattttattgtacacattttgtactagagaataaccctgaagcagttgctaaaattttgttcagcattaggaaatttatgttggagaagaattcagcaagtgtgattaatttggaaaaacattttttccataactatagcttagaaaatgccagagagctcatactaaaatatacttttgcagatgcaataaatacaaagaaatatttaattcaaattgagtttatataattatcagagaattaacagtagaaatagctaaggcactgacacttcagacattacactaaatcagattgctgagtatagaaaatccaaaactacagttggtaagtaaattaattttatgtaactttaaaatgagtagacatttctttgagaagtcataattaaattcaagtatacttttttgataaaattataaagctttttaaaagtaaataatgatgtaagtcaactctcaaattacttcatgctgtttcttcatttctattgtattcacctgtgaaagcatgtgatcaactattgctgcatcagagatatgagagatactttattaggtgggaattatatacgacctcttctataaaatagtaaggacactgaaatataagatgcataagagtctaagtgaagaggttctttgtggttaacttagtgatgtatgaagtagttgctcatgttatgagagaaaaacatttttaattttagttaaatgtaagttaaaattaaaatagtaccatataatgttagtgattgtacttttatttaataaaatgcagtacattttaaaatttttagattatttgtggacttaatttataattaaatattttcttttaccacgttaagactattgtacgttcaggccgggcacagtagctcacgcctgtaatcccaacactttgggaggctgaggcgggcggatcaattgaggccaggagtttgaaaccagcctggccaacatggtgaaaccctgtctctactgaaaatacaaaaaattagccaggcatggtggtgggtgcctgaaatcccagctatttgggagattgaggcaagagaatcacgtgtacccaggaggcagaggttgcagtgagccaagatcacgacattgcactccagcctaggcaacaagagcaagacttcgtctcaaaaaaaaaaaaaaaaaaaa

SEQ ID NO: 201920 - DNA, 552 bp, Homo sapiens
  Payload ID: 19834
  Gene Name: zinc finger protein 257
  ENST ID: ENST00000597927
  CDS Start-End: 155-552
actttgtctctcgctctagcccgagctgcaggtctcgtcttccctggtctgtgtcctcttctcctaggggcccagcctctgtggccctgtgacctgcaggtattgggagatccccagctaagacgccaggtcctcctggaagcctagaaatgttatgtgttctcatattgctgaagacctttgcccagagcgagacataaaatattttttccaaaaagtcatactgaggagatatgataaatgtgaacatgagaatttacaattaagaaagggctgtaaaagtgtggatgagtgtaaggtgtgcaaaggaggttataatggacttaaccaatgtctgataactacccagagcaaaatgtatcaatgtgataaatatgtaaaagtcttctataagttttcaaattcagatagacataagataagacatactgaaaagaaaacttgcaaatgtaaagaatgtggcaaatcattttgcatgctttcacaactaactcgacataagagaattcatattagagagaattcccacaaatgtgaagaatgtggcaaagc

SEQ ID NO: 201921 - DNA, 967 bp, Homo sapiens
  Payload ID: 19834
  Gene Name: zinc finger protein 257
  ENST ID: ENST00000597796
  CDS Start-End: 125-232
ctgcaggtctcgtcttccctggtctgtgtcctcttctcctaggggcccagcctctgtggccctgtgacctgcaggtattgggagatccccagctaagacgccaggtcctcctggaagcctagaaatgatggagtcttgctctgtcgtcagactggagtgcagtgggatgatctcggctctctgcaacctccgcctcccaggttcaagcaattctcctgcctcagcctcctgagtagctgggattacagggaccactgacaattagggatgtgactgtagaattctctctggaggagtggcattgcctggacactgcacagcagaatttatatagggatgtgatgttagagaactacagaaacctggtcttcctgggtattgctgtctctaagccagacctgatcacctgtctggagcaaggaaaagagccctgtaatatgaagagacatgagatggtagccaaacccccaggtaaagagaactggccataaactgtggcccaggaagctggaactgagactttgaactgcttcaggcaccacattaaaagccagggtctgcaggcctgcctgcatggctgtaaacgggtgtcttcctccaggcctgtgaaaggacagaacctctcccagactgcggctgaaaggattttgaaataattacagagtaaattcagaattctcagtgggaccaagtagcgttggccatttcctgtcctgtagccaagaccaggggtcctgtagtttgccaccaaaatgagagcctgctttctgaagagaacacccctcaatctttggctttagcagaatttcacaacttcatccctggactttaaagatctcttaaaggcatttattttggagatggggtcttgctacataacccaggctggtcttgaaatcttggcctgaagcaattctccaaccttaatataccatgtagctgtcattacaggtttgagccatgaggc

SEQ ID NO: 201922 - DNA, 17601 bp, Homo sapiens
  Payload ID: 19835
  Gene Name: zinc finger protein 26
  Uniprot ID: P17031
  ENST ID: ENST00000328654
  CDS Start-End: 378-1979
gtggccgcggaggcgcggagctaagcggctcggattatcctgggcagaccagagacttgaccagctaaacacttccgtcggtccggggcgtggacggggccagatcagcctcctgctctcccgagtcagggccacggaaaggcacaaatccatccgtgcgactcctggtacccagaccgggaggttgtctagtcacgcgcggtctgtgttgggcgagagctgaggagccggcgtccctgccaacgactcggccccgggacggtcaggagcctggggccctggtcccgcacctgtcttcgggcggacgcatccctcacggtctctccgcagcccgcgggtcctgcccccgcaggcagcgcgcgaacgtgggcgtggggatggccaccagtttccggacagcttcgtgctggggattattgtcattcaaggatatatctatggagttcacctgggatgaatggcagctactggattctacacagaagtacctgtacagagatgtgatattggaaaactatcataacctgatatcagtggggtatcatggtaccaagcctgacttaatcttcaagttggaacaaggagaagatccatggataataaatgccaaaatttccaggcagagctgtccagatggctgggaagaatggtaccagaacaatcaagatgagcttgagagtattgaaagaagctatgcttgtagtgtgttgggaagacttaatctgagcaaaacccatgattcttcaagacagagactctataacacacgtggaaaaagtttgacacaaaactcagctccaagcagaagttatttaagaaagaatcctgataagtttcatggttatgaagaaccatattttcttaagcatcaaagagctcatagcatagaaaaaaactgtgtgtgtagtgaatgtgggaaagcttttcgttgtaagtcacagctcattgtacatctcagaattcatacaggagagagaccttatgaatgcagtaaatgtgaaagagccttcagtgccaagtcaaaccttaatgctcatcagagagttcatacaggagaaaaaccctactcatgtagtgagtgcgagaaggtcttctctttcaggtcacagctcattgtccatcaggaaattcacacaggagggaaaccctatggctgcagtgaatgtgggaaagcctacagttggaaatcacagcttcttttacaccagagaagtcacacaggagtgaaaccgtatgaatgcagcgaatgtgggaaagcctttagtttgaagtctccattcgttgtacaccagagaactcatacaggagtgaaaccccataaatgcagtgaatgtgggaaagcctttaggagtaagtcctatctccttgttcacatccgaatgcatacaggagaaaaaccctatcaatgcagtgattgtgggaaagccttcaatatgaagacacaactcattgtacatcagggagttcacacaggaaataatccttatcaatgcggtgaatgtgggaaagcctttggtaggaaggaacagctcactgcacatctgagagctcatgcaggagagaagccctatggatgcagtgaatgtgggaaggctttcagcagcaagtcataccttgttatacataggagaacacacaccggagagagaccctatgaatgtagtttgtgtgagagagccttttgtggaaaatcacagctgattatacatcagagaactcattcaactgagaagccctatgaatgcaatgaatgtgaaaaagcctaccctaggaaggcatcacttcagatacaccagaaaactcattcgggagagaaaccttttaaatgcagtgaatgtggaaaagccttcactcagaagtcatctctcagtgaacatcagagagttcacaccggagagaaaccatggaaatgctctgaatgtgggaaatccttctgttggaattcagggcttcgtatacatcggaagactcataaatgagaaatcagaatgatgcaatgtgagaaactgatgttcaggagacttcggataatatagacaggatttacaagcaggaggccctaaaattacactcatgtcaaaaatcagagaggagagagaccaaccatatttgggatgagtgtaaaagctttcagaaataagttacaaatctttgtagatgaaaataatggaaggaatgtggagcaataaatgtatcaaatgttgtagtatcatcatgaagattcagagaatttacactaggaacaccttataagttgaataaattaaggaagcattttcccattgaaagtgtgttccatggaaagtcacattccagatttgaagctgtgtttttgtaaaataaaatcttggtatgaacagttgacttcatggtggagtataaagttgtttttttaaaaatatgtaaataatgttcaggaaaaacgcagggaacagagtcttaaagttaatggatatttaatgtgactttcctgagttaacactgaatagtatttctaaaattttttgtactttattttttaatgtaacttgttctatctatctatatatatatttgatagtttgtggaataatatcccccagtattttccatattaaatgctaattatcttttgatttctttttcataagcagatctggcatttattacagggctgccgcttaagagaactcattataatgaacgtttattatattttgcagttccatgcctgttgtccattgattgacatgagcacccctgttttctctggagaaatacctcccctctctggggtgcttcctgtggtagtgtctttcaggtatccgttccactagctacaggtgagcattttacccattgttggataatggtaatctctttttcagaattttgagtctgtaattcatttgtacatgaaccagaaaatgtgggaactcattcattcttgtcccagaattctgttgagaacatccattcattctggctaattgattacaagaataactgtggatacgatccctttagaacctgcttctctgatctgtgtgtttcctcacttctcaataaaaatgtcttttgctttttgttgtttgggtttttttttttttttttttttttttttttttgagactaagtttcactcttgtcctccaggctggaatgcaatggcatgatctcagctcactgcaacttccacctcctgggttcaagcaatttccttgcctcagcctcccaagtggctaggattacatgcctggctaatatttgtatttttagtatagacggggtttcaccatgttggccaggctggtcttgaactcctgacctcaggtgatctgcccacttcagcctcccaaagtcatgggattacaggtgtgagccaccgagcccggccagctttctatttcttataacctaagggctttaactgatcagttgttgccttggtagcatgtagttaacaaagtggggtatatgatttaggtttgtttgtttttcctgagacaagaaaatcacattcttgtttatatttgaagatagcaacttttagccatcatgtgaaatatggttattgtttctgtacacctggaacgttgtagtgcctgatactgaaattttggaaacactgaagaattatagcattataagaattttaaatttatgagaaaatctgagacaggggcagagatggctgattttgatcttgctggatcttagaccatgagaatgacaggcctgaagccctgaaatctcacctcagggtggagtgtcagacttggcaactttgacattgctgaaaaagtttcttacagctgtaggagtgaggtggtgggaatcaaatagtatatttggcttggtgaattaaagtcagttcacctcaaatgtttactaaatcccttaatgtaaacatgtgttgaaaaagttatcctcacccttccccccctcaaaaagttatcccttgataatttgaataggaatatctgggaagaacctgaggactcagcctagcaagctcttgtgatagactttgaatagcagtatctgcgaagaacctgaggcctcagcctagcaaactcttctgatagactttgaataggaatgtctgggaagaacctgaggactcagcctagcaaactcttctgatagactttgaataggagtatctgggaagaacctgaggactcagcctagcaaactcttctgatagactttgaataggaatgtctgggaagaacctgaggactcagcctagcaaactcttctgatagactttgaataggagtatctgggaagaacctgaggactcagcctagcaaactcttctgatagactttgcactgcagatgcttcatttaaggctatagagtagatgttggcaatatataaaattcaaacttgagtgtccataaataactgttgttggaacatggctaaatatatttgtgtattatttgactgcttttgcacagccatggcacagttgagtagttgaggtataaaaaacctgccacctcctgatacagatagaaccccttcccttttctgggaaaatgtggaatttgccttgcaggaggaagcttattctgccagttccccatggcttatttttaccagtttggtaacaataatctacactaaacatgccctgggatgggattgctcatttaggaaaatatgtagaattcatagagcattgcaggaatgagtaatgtatcaaaacttctcagcatgacaacacccagggcaacgtgacaaaaccctgtctacaaaagtttcttaaaagctggttacagcggtgcacacctgcaatcccagctactcaggaggttgaggcaggaggatcacttgagcccaggaggtcaaggatgcagtgagctgcactgtactccagtctgggcaacagtgagaccctgtctcaaaaaaaaagttgggggagggggtagatacttgtgaaatcctttgagggtgttcagtgaagggcaattacttacagcatatacttggtgcactgacacccagcagtgatgatggttttgctttctgtttttttttttgttttgttttgtttttttttttttttgagacggagtcttgttctgtcacccaggctggagtgaattgcacaatctcggctcactgcaacctccgcctcctgggttcaagcgattctcctgcctcagcctccatagtagctgggattacaggtgtgtgccaccgcgcctggctaatttttgtatttttagtagagacggggtttcaccacgttggccaggctggtcttgaattcctgacctcaggtaatccacctgcctcggcctcccgaagtgccgggattacaggcgtgagccaccatgcctgaccatgatgatggttttaaaagttagctgtagcagctaaggcaagaccagatccaacactggcttatggcaaggggaagaacaaaagtcaggaactttgccataatctagaagaaagaatgataatgctttgtgacatgctggattgtatccattatgtgttcctaagaccctcagccctctccctccaccaagacccaataaaagtgtgttattgaaagtagtagctactggccgggcgtggtggctcacgcctgtaatcccagcactttgggaggccaaggtgggtggatcacaaggtcgggagttcgagttcagcctggccaatatggtgaaatcccgtctcaactaaaaatacaaaaattagtcgggcatggtggcgggcgcctgtaatcccagctacttgggaggctgaggcaggagaatcgctggaacccgggaggtggaggtggcagtgagcagagattgcgccattgcactccagcctgggtgacagagtgagactctgtctcaaaaaaaaaaaaaaaaagaaaagaaaatgacaaacacatgttctgtgtatatgacacaatcctaactgtggcatgtatctatgtcttcacttgcatcggcctcaattatcaacttgtggcaaaagaataagaaagagaactaaaaaatgaaaaaaaataagatgctttcctatggtcccagctacttgggaggctgaggcaggagtgtcgcttcagcccagaaggttgaggatgcagtgagccatgattgtgtttcagcctggatgacagggcaagacctcatatctgtaaaaagtaaaaataaataaacaaactatataataataatacagaagacaaatgtcaatgttgctgaaaagccaaaagaagccaagaggacagtcttctgagtagagggcataggagttcccaaagaggaaagtccagtctgagatcaggctggaggccaaaaggaactcttgacctgagacagttggaaatattacttctactggcaaataaaagtgcttcaagcagacgtttatttagaaattcatgctgcatgtttattgatggaatgtttgtgtgactctttaatagaagtctgaactaggtatgccatatatttccatatatcttcatttgtcttgggggtaagtgttgagagaaggaagtggcttttggttttgtgagtgtcttgaagatctaaggtttattgtgaaaaagtgtaggggtaatttttttttttttttttttttgagacagagtctcactgtgtcacccatgctggagtgcagtggcgtgatctcggctcactgcaacttccgcctctggggttcaggtgattctcctgcctcagcctcctgagtagctgggattacaggcacctgccaccacacctggctaatttttgtatttttagtagagatggggtttcaccattttggccaggatggtctcaaactcctgacctcaggtgatccacccgccttggcctcccaaagtgctaggattacaggcatgagccatcgtacccggccagagcatccttaatttttaaaaacaatttagctactttttttttttttttttaactattttaagagcatcacagtaaaaggaaaataacagctcactttggggccaaagtctaaaatttaaaatcagccctactctggctgggtgcagtggcttatgcctataatcccaacactttgggaggcaggaggatcacttgagctcaggaatttgagaccagtctggacaacaaagcaaaaccccatctctgaaaaaaaaaaaataccccgggatggtggcttagggctgtggtcccagctactctggaggctgaggcaggaggattgcttgagcccaggaggttgaagctgcagtaagccatatttgtaccactgcactccagcctgggtgacagagcaagaccttgactcaaaaaaaaaaaaaaattctactctcttggtatttgtaatatgttatgagataccatcattggaggttgtaaggatgggaatattagttgaaagtctgatattttatcattgagttgcccttttccaattttacatgcttaggttgacttctcaatagcaacagtaaaaatcagaagacagtaaaagaatgtcttcaatgttctgaaagaaaatatctacctagaagggttattcacaaaccagggtgaaataatgtcattttaaacaaaatatttaataccaagaaagttggaaacataaaaaaataaaaagtcatgctcggccaaatctaaacagacttaaaaattataagatgtaatttgatggtacaaaaatatggaaataagccccagaaaataacagtatgtaacattggaagaagtctaataatttttaggggagtagagattctgattatcccacatggcagggcattagacaaggagacccactttaccacagataaggttcagtggtggtcccatgactgatctattggtcacaccttatgcttaccccaccacctagaagcggctggtgtgacagagcattggatgacctgctgaaggtggtttgaagtaccagcttagtggcagtacttgacaagcacagggcaccgtcctccaagatgcagtcctggaatcacagacttttatctggtagtgattcctcaatagggagtgtacacaggtccaagagccaaggagtgggaacgggatcagctccacttaacatcatttccagtgatcagtttggagactgaagagcaacagtctgaggaatgaccccaggcagtaatttgtttccacagaaaaaacaaagagcaccagtaaagggtaattatgtaataataaaagatagtgcaagtgcagatttcttattttattagtaactgattaataattataggccaggcgtggtggctcacgcctgtaatcccagcactttgggaggccgaggtgggcggatcacaaggtctggaggtcaagaccatcctcactaacatggtgaaaccccatctctattaaaaacacaaaaaattagcggggcgtggtggcgggcgcctgtagtcccagctactcgggaggctgaggcaggagaatggcttgaacccaggaggcagaggttgcagtgagccgagatcacgccaccgcacttcagcctgggcaacagagtgagactccgtctcaataacagcaacaaaaaaagcaattatataaaacaatatgcagtactgtttggactataacatacagaagtgtaatatgtctaccaataacaccacaaaggaggaggatgggagaagagtcgtgttggggtaaggaaatggctctagatggcaacttaaagccacaagaataagctgagagaaccagaaataggaaataaataggctactgtaacaaaagctgttaatatatactttctcttcatctctcagcctctttaaattataaaatatataaagcaatatttatagcaatgtgttgttgcatttgtaacatagatatatatatcaataccagcacaaaagtcggggtgggggctagaactatataggaataatgggtttataaaagtcttattggaattaaggtagtataaatctgaagtagactctgataagttaatgtgtatttaacacttcctagaacaaacactaaagaaataactgcaaaaatattgtaaggaatcattaaataaataaaatattacattacaaaatatgcacttaagacaaaagtgaaggagaaatagatgaacaaaagatacatgagacataaaatacaaaagggaaagcagcatatgtaaatctaactatatcaataataacttttttttaagagggtcttgctctattgcccaggctggagtgcagttgcatgatcatagctcactgcagccttgaactcttggcttcaagcaattctcccacctcccacctggctattttattttattttatttatttatttatagagatggaggtatcaaactccagggctcaagcaatcctcccattctggtctctcgaagcatcaagattataggcatgagccagcgcacctggccagtaataacattaaatgtgaatagattaaactatcaaaagacacagattgtcaaagtggtgataaaaaaaaatccaaccatgtacagaagacatacatacatactcaaagatacaattggattagaagtaaaggatggaaaaagatataaaacgcaaacagcaaccataataaatctccagtggctttctaatatcagacacaatagagtttaaaacaaaagttttactagagataaagaaaagtattttgtaaagataagtcatcaagaagatgtaacaattataaatagacaattgggattacatcaagctgggaagcttccatactgccgaggaaataacaaaataaagagacaacccacagattgggagaaaatatttgcaaactatccatttgacaaggggttaattgccagaatatacagggagctcaaacaactctatagcaaaaacaaagaaaaataacaaaaaaaaaaccccaaactccagatattccaattataaagtaggcaaaagatccaaacagacgtttctcagagaagacatgcaaatgtctaacaggtatatgaaaaaatgctcaatatcaccacttatcagagaaatgcaaattaaccacaatcagatatcatccctcttcagttaaaatggcttgtatcagaaagacaggaaagaacagatgctggtgaggatatggaggaaggacagccctcgtacactgttggtgggagtggaaattagtacagccactatggagaacagtatggaggctcctcaaagcaactgaaaatagaactattatacgatccagcaaccccactactgggtgaaaagccaaaagaaaggaaatcagtacatcaaagagacacctgcactctcacgtttcctgcagcactatccacaagagccaaaaaatgaaatcaggccaggcgtggtggctcacgcctgtaatcccagcactttgggaggctgaggtgggtggatcacttgaggtcaagagttcaagaccagcttcaccagcctggtgaaaccccgtctctactaaaaatacaaaagttagcggggtgtggtggcagacacctgtagtcccagctactcgggaggctgaggcaggagaatcacttgaacccgggaggcggaggttgcagtgagttgagattgaactgctgccctccagcctgggcgacagagtaaagctccatctcaaaaaacaaaacaaaaaaaaaatcagagcccatcaacaaatggataaagaaagtgtgatatatataaacacagtcaatatgtctattcagtcataaaaataaaatcctgtcatttgcagcaactgggatggaactgaaagccattataataagtgaaataagccaagcacagaaagacaaatattgcatgttctcactcatatttgaaagctaaaaaagtagacctcatgaagatagagttgatggtggttaccagaagctgggaagagggggaaggatgaaggggaaaaatatgaatgtatctattattgctgaactgtacacttaaaaatggtaatgatgataatatttataatatatttacattttgtttatatatttatattttgcctcaaaaaaggcaaaaaagaagatataataattataaacatgtatgtacctaataacagcaccaaaatacatgaagcaaaatctgacagaaatgaagagagacaactcaacaatactagttggagacttaatatcccactttcaatattagaacaatcgtataagttgtctaggactgtcgtaacaaagaaccacaaactggatggcttaaacaacacagatatattgtcttactgttctggagcctccatgtttgaaatcaaggcattgacaggttttggttccttctgagggctctgagggaaggatctgttccaggcctctctccttggcttgtagatggctgtcttctcactgtctcatcacataatctcccttctatatgcacatatctctgtgcaaacgtcccctttttatagggacatcagtcatattgactcctaagtcctcattttaacattgttaactctgtacagaccctctctccaaataaggcctcactctgaggtatggaaattaggaccccaacatatctctttgagttggggggacactactcaacactgaagtgtttagggatgtcgagaaattatgcctccaacctatgctcatacattttttttttctttttcattttttttttttttttttgagacggaatctcactctgtcaccaaggttgaagtgcagtggcaccgtgtcggctcactgcaacctctgcctcccgggttcaagtgattctccagcctcagcctcctgggttcaagtgattctccagcctcagcctcctgagtagctgggattacaggtgcccaccaccacgcccagctagtttttatatttttagtagagacaggttttcaccatgttggccaggctggtcttgaactcctgacctcaggtgatccacccacctcggcctcccaaagtgctgggattacaggcgtgagccactgtgccctgccaatgcttatacatttcaagaaaaacatttatttggccgggcatggtggctcacatctgtaatcctagcattttgggaggccgaggcgggtggatcacctgaggttgggcgtttgagaacaacctggccaacatggtgaaacccccgtctctactaaaaatacaaaaattacccaggcgtggtggcaggcacctgtaatcccagctacttgggaggctgaggcaggagaattgcttgaacccgggaggcagaggttgcagtgagccgggatcacaccactgcactccagcctgggtgacagagtgaaactgtctcagaaaaaagaaagaaagaaaaacgtttatttgtagagaaagctaacatggtaaaaatttgaggaatattggtaaagaatatttacaaattcattatcattgtgtaaattctatattactttttaaactttcatgttttgtggagtcatttctaaatcaaatcattaaaaagaggccaggtgtggtgactcacgcctgtaatcccagcactttggaaggccaaggtgggcggatcacttgaggtcaggagtttgagaccagtctagccaacatggtgatagcccctgtttaccaaaaatacaaaaattagccagggtggtgacgtgcacctgtaattccagctactcgggaggctgagacgggagtatcacttgaactcgaaaggtggaggttgcagtgagccgggatcacatcactgcactccagcctgggtgacagagtgagaccctgtcacacacaaaaaattaaagtcattaaaaagaaaaactgaattttgcaaaattattggatgtcagtatattcaaatcaattttatttctatatatcagaaaaataatataaaatgggatttaacaaattgaatcaattttcagtggcatcaaaatacaaaatagatacaaatcttatggtgttggaactgttcagcatcttgaaggtggttgttgatacatgaacctacactggtgataacattgaacagaacttaatatacacacatacaaagtataagtaaaactggggaaatgttaagtattgtgtgtcagtattctggctgtgatatactgtagtgttgcaaaatgttagcattgggggaaactgggaaaagtgtataagggatctctgcattattttgtatactctaggtgaaactatctcaatacaaatttaattaaaacaaaataaatctgataaagatgtaaaagaataaagagactattatccagttgataaaatatgcaactatgaaataaactgaataaattgaacaagcttgaacaaattgaatcatcaatatgttcaagtcctagacatttaatagtgataaatgttattccccaaatactgtatgtagtataacatctttgttaaaggccaagataaagcaaaatggagttatatattgtttaggcatatgtgtttatgtgacaaaacaacggggaaaaaaagctagaaaatgataatcaaaatctttaggatagtgtctacaccctgtggaagaagcagtgagttggaaaaagggaacactaagtagaggcttcaagttatttttaattttctgtttgggtgaaagattcaagagcattcgtgagaatgtacttgtaactagtatttgatgaacaggggctatacaacagtttagattttaaaaaattatgggagaatactaaggataaccatacgccagtcaaataaaaatagataacacatttttcagttttctagaatactgcacattatcaaaactgaccaaagcagaaaaagcaagactgaataaaatcaacaataaataacaaaattgaattggagtatcaaaagcttccctcagtgaaatatagcaaagcccagatggatgtccaataaaattttagcaaacattaaggacttgattatcattatgtaagcagtattagagaatttttaaaatatagattacttccaaattcacctagaaattcttttataacctttacaccaaatcaggatagagacagtagaagaaaaaataaatacaggtcaatctaatatatgaaaattttctgagtaaatgaaatccaggtctctttcgccatacatttgtatatgaggttgaaccataggaaattacaataatcaaccatgttttacatatgtggcagattttattttctgaagtgggctatgacagtagcttccatctcatctcctcttctacagtgtgatcttgccactcctcccacttatagtcttgccccatcctttgagttttgttggcttgtgagtcacttgtagccaaaagaatgtggaggaagtgatcatgtaacttcgcaggatataaaaagccatgcggcttctgccttgattgcagagatccttcatttgccatgtaagcagtccttgaagctgcagtactaggaggaaatctcaaataatccatatagagaaaccacatagagaggctctgagattacataaagagatgcttgttcagccccatatgctcccgttccatgcctttctggctccatgagaaattctgacccagaacggctcagtcagacctctcctgaatccctgacaaacaggaaccatcagaaataataacgtctttgttgctatttgtgctataatgttttgaggtgatacgttagactacagtagtgattggaatagaaatttagtgttggaagtggggttctacttacatgcatcactggccttggcactggatgatgagcagaatctgaaaggcccttgagtaaaatatcagtaaaacccagtgggctttggggatggtattagcagagtctaaaagtcatcaaggaggttgctggtgagagcttgaaggaacacaaggaaagcattattgaaacatggagaaaatgagacttttttatgtagtgacaggtgtatcaacactgtcacctaatgtaaatggaaaatagaagatgtacctcatgacctcagtgatagagctaagtgttttctagacccagtgttcaggatgctacctggctcctcattgcttataataaaatgagaggaaagagaactaaaaaatgaaccattccatggaggaaatggtaaacagtcttttcagcttgtaaagcattctcaaagtacgaaagctcctcagggaaaagatgtaatccaaggctggctataatacccttatgtaagattccagaaagatctgaagcggtgcctcctgacccccttcaatgaataaacaaaaaggacttctaaggacttgagagaatgcttctgtgagccctctctcataagcaacagaactgctaagaattttaagggtgaggtcccacaaaaggcccactgagagcccatagtagagaaagtcttattaagagatttttggggtgtggcttttgtctaatggaatgggttgtacacagatagctaaaaatcccacacgttcttaaaaacagtgatgctaactttacagataaggacaaactgtataaaaaaagatatttgaactctcaacctttttgctcaggaaggaggttgagaaggatactcacttgcaaacatggtcacattttatgaaaaaccatggatgactcagagagcagaactaagatccagagggtagagcaaagagccatggaggagaagtccaagaaagcagaaccaaaccctaatcaccgaactggtaatgggtacccagtaggatttatggatttctatggaacagtgactactctgtgcctcctcttgtccccatttttgaataggagtattggtaacagtttttctgtgtctgccccactgttacgttctgggtgtgtaagatgaaaataacttgtctcatatttcacaggcattcagattgggagaaatagcacctcaggaactgcatcctcaagagtcccatctgcacctgtagcagagtttgacgatgagatcctggtcttcaatctgatattataacgggatgagacattgggatcttgggggaggagatggctgtactttgcatgggggggatgtgaattgttacagccagagggcagaccgtggtaatcccaaacatggccaaaacagtatctcctatcacacattctcttccacagtgtgcctgctatatatttctcccatgagagttgaggtcgacaccagctccttgaacctgggtggacttgtaatttgcctgtagccaacagaatgcagcagaaataggccaggtgcagtggctcatacctgtaatcccagagcttcaggaggccaaggcaggaaaattgcttgagcccaggagtttgagaccagcctgggaaacacagtgagaccccgtttctatttaagaaagaaaaaaaagaatgcagcagagatgaagctgtgtaacttccaaagctaggtcataaaaggtgatgcagcttccatcttgtcactggaattcacactcttgaaccattcagcagccatataagcagtccaatggccctgagctgccctgcagtaagaaagcccaaactagctcacacacagactacatcaagagtgagagatgcctaaaacacccccaggcattccagccccttctgttctagatctagccttagaaaaagctgcctagctgagcctatcttgaatttctgacccaggaaactattagatataataagtcacttttttttttttttgagatgcactctcactctttcccaggctggagtgcagtggcacgatcctggctcactgcagcctcctcctactgggttcaagcagttctctgcctcagcctcccaagtagctgggattacaggtgctcgccaccatacttggctaatttttgtatttttagtagagatggggtttcaccatcttgggcaggctggtcttgaactcctgacctcatgatccacctgcctcggcctcccaaagtgctgggattacaggcgtaagccactgcgcctggccaataagtctctttttttaggtaatcaagttaaaataataagtcactaaattttgaggtgttctgttatgtagaagagtgactggaccaacccataaaaaggacaacttcatatagttcaactttttttttttttttttttttttttgatacagagtctcgttctgtcacccaggctggagtgcagtggcataatttcagctcatggcaacctccgcctccaaggttcaagtgattatcatgcctcagcctcccaagtagctgagattacgggcacctgccaccacgcctggataatgtttgtatttttagtagaggtggggtttcaccatgttgactaggctggtctcgaactcctgacctcaggtgatctgcccgccttggcctcccaaagtgctgggattacaggcatgagccattgcatctggcctagttcaactttataaataaatatgtcaaagataattcaatattaaagtttatatatttatcattttaaccaaataatgtagaaatagagtgatatgaaacataaatacctatataggttaagaaaaatattcaataaattggaacaattctttgttataaaattcttaagaaactcagaataaaatgcaacacctttttacgattataaacccctcagcaaacatacttcaagcagaaccttacgaacagtataattaaaatgaggaaccgctgag

SEQ ID NO: 201923 - DNA, 4853 bp, Homo sapiens
  Payload ID: 19835
  Gene Name: zinc finger protein 26
  ENST ID: ENST00000534834
  CDS Start-End: 2666-4207
tatgttctgctgatttcagtgctcaccgttgtatccagcttcccaccaattctttctgtgtcttaatgttgtctctatagggtgtaattttttttttttagagacagagtctggttctgttgcccagtgtaaagtgcagtggcatagtcatggccaactacagcctcaaactcctgtgctcaaaccatccttccacctcagcctcctgagtaactgggactacaggcgtgcaccactatgcccacacatttttttgttatttgtagagatgaggtctaactatgtgacccaggatagtctgaaactcttggcctcaagtgatcctcccgcctcagcctcccaaatgctgggattataggcatgaggtaccacatttgatggatataaattttccaggtgctagtatatttgaaaatgtcttttattttcccttatttttgctttttagtttggctggtataagatttcagaatcagcattattttttctcagtactttatttctctcccactttcaagaagcattgttctttccttttagttggttatcaggtgttctctttatactttattttcagacatttcattaccatctgcttaaatttggaccttttttttgtttgttaacttatcttgtatttcaattggtaggtttttctcatgtgaactcctgtatttgtcttcactccaagagaattttcaggccgcatttctttgaacattgccctattatttctcttatttatataaacctacattggtaattcttctataaaccaggaaaatcattccaggtttatttatttatttatttttttgagacggagtcttgctctgtcgctcaggctggagtgcagtgatgcgatcttggctcactgcaacttctgcctctctggttccagcgattctcctgcctcagccttctgagtagctaggattgcaggtgcccacccccacgcctggctaatttttgtatttttagtagagacggggtttcaccgtgttggtcaggctggtcttgaactcctgaccttgtgatccgcttccctcggcctcccagagtgctgggattacaggcatgagccaccacacccggccaggtttattttgtagtctagctcttacctgttcacctgttgtagccatcgctgtggtttgagtgtatcttccaaatttcatgtgttggaaatttaattcctaaatttatttgttgatggtatttggaggtgggacctttgggaggtatttaggatttgataaagtcatcagggcagggcccctatgatgggattagtagccttaaaaggataggaagagagacctgagctggcatgctgtctgtctctcatcatgtattgccttccaccaagttatgacatagcaagaaggccctcaccagatgccagcaccatgcttatggacttcctggcctccagaaccttgagctaaatgaacatttttctttataaattacccagtttctggtattctgttataaaaatagaaaacaaagacagcagtcttttcggtgtctgaaatatttgttgttccttgaattgaccaggctctaccatgtgttctgtgtgatgcttgcttctggtacagggactgcaaattatgttccatctatttttttttctttctttcataatagatttgccagtttttcagttgggcatatacagaaactccatttctgaatttccctgctgttccctcccagcccccactctttgctgttgcttagaatgcagatgtgatgactagagccatcttagactgggttgccctggaagtggaagccatgtaaggtggagcaagagatggaagccccagaccaattgccttcagactcctgcaagtagaaggataaactctcttgtttatccccctgttctcagctgaacctcgtccaaacacctcctgaattgccctttctaccccaacttcttgaacacatcatgaatcttctaagactacttgagtggctctcttcatttctgtacaaaatgtaccctggatgtttttaccaaggactcagaacaccttattttgtttgcatgtataaatgttcattcccatctacaagatagaaagtttcttgaagacagaactggattttattcatcctgaaatcttcaggacccaagagagtaccggcaaatagaagctccttgattgattttttctttctttcttttttttttttttagatggagtctcactctgtcgccgaggctggagtgcagtggcacgattttggcttgctgcaacctctgctgcctgggttcaagtgattctcctgcctcagccacctgagtagctaggattacaagtgcctgccactgcgcccagctaatttttgtatttttagtagagacagggtttcaccatcttggtcaggctggtcttgaactcctgcccttgtgatccacccgccttggcctccgaaagtgctggcgtgagccaccgtgcctggcactccttgattgatttttaattctctcacaaagtaaatgctgaaccagccacaggaaatagttggtagaggaacatttatcccttcccagttcctctgcatcttttccatgtcacctaatgtaattgcatccaattgaacagggtgtgtgttatttcagggattattgtcattcaaggatatatctatggagttcacctgggatgaatggcagctactggattctacacagaagtacctgtacagagatgtgatattggaaaactatcataacctgatatcagtggggtatcatggtaccaagcctgacttaatcttcaagttggaacaaggagaagatccatggataataaatgccaaaatttccaggcagagctgtccagatggctgggaagaatggtaccagaacaatcaagatgagcttgagagtattgaaagaagctatgcttgtagtgtgttgggaagacttaatctgagcaaaacccatgattcttcaagacagagactctataacacacgtggaaaaagtttgacacaaaactcagctccaagcagaagttatttaagaaagaatcctgataagtttcatggttatgaagaaccatattttcttaagcatcaaagagctcatagcatagaaaaaaactgtgtgtgtagtgaatgtgggaaagcttttcgttgtaagtcacagctcattgtacatctcagaattcatacaggagagagaccttatgaatgcagtaaatgtgaaagagccttcagtgccaagtcaaaccttaatgctcatcagagagttcatacaggagaaaaaccctactcatgtagtgagtgcgagaaggtcttctctttcaggtcacagctcattgtccatcaggaaattcacacaggagggaaaccctatggctgcagtgaatgtgggaaagcctacagttggaaatcacagcttcttttacaccagagaagtcacacaggagtgaaaccgtatgaatgcagcgaatgtgggaaagcctttagtttgaagtctccattcgttgtacaccagagaactcatacaggagtgaaaccccataaatgcagtgaatgtgggaaagcctttaggagtaagtcctatctccttgttcacatccgaatgcatacaggagaaaaaccctatcaatgcagtgattgtgggaaagccttcaatatgaagacacaactcattgtacatcagggagttcacacaggaaataatccttatcaatgcggtgaatgtgggaaagcctttggtaggaaggaacagctcactgcacatctgagagctcatgcaggagagaagccctatggatgcagtgaatgtgggaaggctttcagcagcaagtcataccttgttatacataggagaacacacaccggagagagaccctatgaatgtagtttgtgtgagagagccttttgtggaaaatcacagctgattatacatcagagaactcattcaactgagaagccctatgaatgcaatgaatgtgaaaaagcctaccctaggaaggcatcacttcagatacaccagaaaactcattcgggagagaaaccttttaaatgcagtgaatgtggaaaagccttcactcagaagtcatctctcagtgaacatcagagagttcacaccggagagaaaccatggaaatgctctgaatgtgggaaatccttctgttggaattcagggcttcgtatacatcggaagactcataaatgagaaatcagaatgatgcaatgtgagaaactgatgttcaggagacttcggataatatagacaggatttacaagcaggaggccctaaaattacactcatgtcaaaaatcagagaggagagagaccaaccatatttgggatgagtgtaaaagctttcagaaataagttacaaatctttgtagatgaaaataatggaaggaatgtggagcaataaatgtatcaaatgttgtagtatcatcatgaagattcagagaatttacactaggaacaccttataagttgaataaattaaggaagcattttcccattgaaagtgtgttccatggaaagtcacattccagatttgaagctgtgtttttgtaaaataaaatcttggtatgaacagttgacttcatggtggagtataaagttgtttttttaaaaatatgtaaataatgttcaggaaaaacgcagggaacagagtcttaaagttaatggatatttaatgtgactttcctgagttaacactgaatagtatttctaaaattttttgtactttattttttaatgtaacttgttctatctatctatatatatatttgatagtttgtggaataatatcccccagtattttccatattaaatgctaattatcttttgatttctttttc

SEQ ID NO: 201924 - DNA, 639 bp, Homo sapiens
  Payload ID: 19835
  Gene Name: zinc finger protein 26
  ENST ID: ENST00000540238
  CDS Start-End: 399-639
ggtgtacctggctgagtctctgtggccgcggaggcgcggagctaagcggctcggattatcctgggcagaccagagacttgaccagctaaacacttccgtcggtccggggcgtggacggggccagatcagcctcctgctctcccgagtcagggccacggaaaggcacaaatccatccgtgcgactcctggtacccagaccgggaggttgtctagtcacgcgcggtctgtgttgggcgagagctgaggagccggcgtccctgccaacgactcggccccgggacggtcaggagcctggggccctggtcccgcacctgtcttcgggcggacgcatccctcacggtctctccgcagcccgcgggtcctgcccccgcaggcagcgcgcgaacgtgggcgtggggatggccaccagtttccggacagcttcgtgctggggattattgtcattcaaggatatatctatggagttcacctgggatgaatggcagctactggattctacacagaagtacctgtacagagatgtgatattggaaaactatcataacctgatatcagtggatggctgggaagaatggtaccagaacaatcaagatgagcttgagagtattgaaagaagctatgcttgtagtgtgttgggaa

SEQ ID NO: 201925 - DNA, 834 bp, Homo sapiens
  Payload ID: 19835
  Gene Name: zinc finger protein 26
  ENST ID: ENST00000544181
  CDS Start-End: 374-834
ccgcggaggcgcggagctaagcggctcggattatcctgggcagaccagagacttgaccagctaaacacttccgtcggtccggggcgtggacggggccagatcagcctcctgctctcccgagtcagggccacggaaaggcacaaatccatccgtgcgactcctggtacccagaccgggaggttgtctagtcacgcgcggtctgtgttgggcgagagctgaggagccggcgtccctgccaacgactcggccccgggacggtcaggagcctggggccctggtcccgcacctgtcttcgggcggacgcatccctcacggtctctccgcagcccgcgggtcctgcccccgcaggcagcgcgcgaacgtgggcgtggggatggccaccagtttccggacagcttcgtgctgggtagtgctgctgaggaggagcctgctaatgagctcaagtgtcaagttcgggaatcttctgggtgttccttgggcccagggaaacagtgccctgcctgagggattattgtcattcaaggatatatctatggagttcacctgggatgaatggcagctactggattctacacagaagtacctgtacagagatgtgatattggaaaactatcataacctgatatcagtggggtatcatggtaccaagcctgacttaatcttcaagttggaacaaggagaagatccatggataataaatgccaaaatttccaggcagagctgtccagatggctgggaagaatggtaccagaacaatcaagatgagcttgagagtattgaaagaagctatgcttgtagtgtgttgggaagacttaatctgagcaaaacccatga

SEQ ID NO: 201926 - DNA, 5666 bp, Homo sapiens
  Payload ID: 19836
  Gene Name: zinc finger protein 260
  Uniprot ID: Q3ZCT1
  ENST ID: ENST00000523638
  CDS Start-End: 1123-2361
ccggcttgagcccagccaaagggattaccctcattcccgaaccgtgtctgagagtctcctggggttcctggcttagtatcgcaccgtggctgttacataaagtcagcacagcgtgtttaagctgatgttacaccactacccaatcccagggatagagtaaactaagactaaggccttacacccctgccccggccagggagacagtcccacaagctctggcggaggaaaagttcgcgcgaaaagctgactcaaaccgctgaaccttctgggaaatgtagtctaccctcaaaagagtggcacggaggacgggccaagatctctcgattccgtccggttctgagtcggggcctggcccagcccaggagacctctgggagcgctgcccgcggaaggagtgcgcaggcgcggaatctccgacttgccatggtcgtctttgtctgccggcctgcttccttgtatatccacaggagctgcaaaacctcttagagttctaagggcgctccctgaattttgggatgctgctttgttccccaaccataacatccaagtccagtgtcatttttctgctcacaagtttaaagtcagcacttaaaagaacagcaacagatgattgagaaagaaatgtaaagaaggttctctttgtgtgagtaagcaagaacctgaagaagcctgggaagtttataaacagataaagacgcaacatgaaagacttgtaagttaagtctcatctttctctgtgaaaagacagactgagggaaaatttaggaaacaaagtatttcctctgaacagtcattgattcttcaagactacccttctgtgtatggaactcagtttaaaagaatttgaaacctaatttatatacaatctatacctaaatatgggagaagctatataagaaccattaagaatataaagagaatgttacattttatccctttttgtaatcatctcatctcagggtaatcaatgtgagaaaagtcttccatcataaatttaacttcattagatacctgagaattaatattgaaaatacaccatatgaatttagtgaatgtgggaaagctttcatccttattacatcttatttgatactagggaaatctcctgattaaattcacatgcatgataggcatgttggaaagtcttcagcatgaatcagatctccttcagcatgatcaaattcatactggagagaaaccttatgaatgtaatgaatgtagaaaaacttttagcctgaagcaaaaccttgtagagcataagaaaatgcatactggagagaaatctcatgaatgcactgaatgtggtaaagtgtgctctcgagtctcatctcttactctacaccttagaagtcacacaggaaagaaggcatataaatgtaataaatgtggaaaagccttcagccagaaggaaaacttcctttctcatcagaaacatcacactggagagaaaccttatgaatgtgaaaaagtttctattcagatgccaaccatcatcagacaccagaaaaatcatacaggaaccaaaccctatgcatgtaaggaatgtggcaaagcctttaacggcaaagcatatctcactgagcatgagaaaattcatactggagaaaaaccatttgaatgtaatcagtgtggaagagccttcagccagaagcaatacctcattaaacatcagaacatccatactggaaagaagccctttaaatgtagtgagtgtggaaaagcttttagccagaaggaaaacctcattatacatcagagaatccatactggagagaaaccttatgaatgtaaagggtgtgggaaagctttcattcagaagtcaagcctcattagacaccagagaagtcacacaggagagaaaccttatacgtgtaaggaatgtgggaaagccttcagtggcaagtcaaatctcacagagcatgagaaaattcatattggagagaaaccctacaaatgtaatgaatgtggaacaatcttcaggcagaagcaatacctcattaaacatcacaatattcatacaggagagaaaccctatgaatgtaataaatgtggaaaagccttctctcgaatcacatcacttattgtacatgtgagaattcatacaggtgataagccttatgagtgtaaggtctgtgggaaagccttctgtcaaagctcatctcttactgtgcatatgagaagccatacaggtgagaaaccctatggttgtaatgaatgtgggaaagccttttctcagttctcaacccttgctctgcacatgagaatccatactggtgaaaaaccttatcagtgtagtgaatgtgggaaagctttcagccaaaagtcacatcacattagacaccagagaattcatactcattaaagttctctatgaatgccttggatttagcaaaacgttcagcagattttacacttaatagtgtattggaaaattcattttacattaaagtgacatgaatgtgggaagtccttcagcagcaattcaaaacttaaatactatgatgtttaataagtattatagtgtaaagaaaacccgtacccccaaaactcccacaacaagcattatcaatgctgtacttctaggagtatactcattaaagttaggatctagtcatggacactacttaatgtgttcctggaaggcctacagatgcattaagaaatagatatgagatgtatgaggatttgaaattaagagacaaaattatcatttttgtgatgttttgctacatatatgaattgtaaaactagaatcatcaaaattatttgttgttgaagcagtcataaaactgagactgagacagaatattgaattcagaaatgtgtgcatgaatatatggggaattggtaattgatagaggcggtatcccagattggtggggaaatcatggattacttaaaaattaattgactcttcatatggaaaaataatatctcccatcataatataaaatatttttcttatgaattcttaaagtactaaagactaaaatgcaaaaagcaatacttaataatataacagttttataagaagatgtttttaaaaccttagggcaggaaagaacttctaaaacattccagaatacccggtagttccactcttgagtatggtagtcccctattttctgcaagagatggactctaagacccccagtggatacctaaaacccagataggaccaaactctatgtctatgtttttttcttatatatacatacctatgataaaatttagtttacagattagacacagcaagagatttaaaacaataataaacataatatggaacaattataacaatatactgtaatcataaaagttatgtgaatatgatctttctctcagaataccttattgtactgttctcaactatttatgaactgtggtgactacaggtaactgaaaccatggaaagcaaagctgtggataagggggaactactatatatatgcatctacccaagaaacatgaacacagggagtcatgtactggtctatagctgtatagttcattgcaccatgagttatagtagccagaagttgggaaacaaatgctgtctcttgtgaaatagatgaataaaatgtgatagtaacatagtagagtactctctagcagttaagtgacaaattaagtctatatattaacagaaatatttttaaaaaattagagtgaagaaaaatgatgaacatattgtaatgatgcttctgtgaatttgaataaaatcaacactaaccagccctagtactaagaattggttatggataaattatgtaaaactaaagaatggattgaaaggatatgtatatactcagttcccaaaagtggagtggttacctctaggaagaaaggaggtggaagggaaatgttaccaagcatggtagttaaaggatacttcaattttgtatctatttcttattaaaaagaaacattctaagtaaacataacgaaatattaattctgggtggtggtaatatttgtgttcattctatcattcgtgctatttatttccttaaacttctgaaagttaaaaagtccagataggagtgaggaagctgtacatgaaacataatggacttacattcctagtcagatactaatattctgtagaagatatttctaaaatcttatctttaaaatatgaaataatttttaattggggtggcaacttaaattcaattaaaataactcatgtgtcacaagagtaaattttacataatctgtacgtagttctaatctgtatatagtcttggaggttatgatttgccacagattggttggatcacatacatttaaggatcatattattaaataatatatgcacagacatggagagaattagtttttactaaaacatttatcagaaattttaatactctgcataaccagtattagcattagaaattagccacttttaaaatgagaaaactgtgtcactcttcaatttttttataagccattgaggaaaacattaactcctggatttcagcttcacttttaacctgcagactaaatttctttctcaattatgtcagacacacccaagtcaatcccaacccccttgttaccttgggaagaccgtgctgaaaaaggagatcttccacctaaacagtgttctcttatttgaagcaaatctttttgagaatttgtttacttgatttctttccacaataaactgacagagaacgctactaatgatttttttttttttttgagacggagttttgttcttgttgcccaggctgcagtgcaatggcacaatcttggctcactgcaacctctgcctcacaggttcaagtggttctcctgcctcagcctcttgagtagctgggattacaggcatgcgccaccatgcccggctaattttgtatttttagtagagacggagttgcaccatgttggccaggctggtcttgaattcctgacctcaggtgatccacctgcttcggcctcccaaagtgctaggattacaggtgtgagccaccacgcctggctaattttgtatttttagtagagatggggtttctccaaaggctggtcttgaactcccgacctcaggtgatccgcccaccttggcctcccgaagtgctgggattacaggcgtgagccaccgtgcccggcctgatgtttttgaatgattatgaaaatgggtatacagcattaaaaccttagactgattttaaatatattaatttcttttaaactcaatataatgttaatattactgtagcacttactagcatttctgaaggttggtcttgagataagattgaaaatgacagttgttgattttctgaggtaatatacccaaataaaatatatgtatgtgtacatgaatctaaactgtcttcttctgttcctcattttgctttacttaaataatctttcatattttttaagtgttttgcccatgtgcttgggtagccttgaagtcaccagaataactaggactcaaattcagaccaaaccaggactagctttttgtgccatgagttagccatggtcctggacccagcaaaaagaatgattatgatggtcagagtaagatgagcaattgcaacataatattctctaatattgtatactgtaaatttattcagctgccctcgtttactcacagtttgcttatttgccaccataagaaatggtacaataaaaattcatgtaatc

SEQ ID NO: 201927 - DNA, 5055 bp, Homo sapiens
  Payload ID: 19836
  Gene Name: zinc finger protein 260
  Uniprot ID: Q3ZCT1
  ENST ID: ENST00000592282
  CDS Start-End: 845-2083
agtgcgcaggcgcggaatctccgacttgccatggtcgtctttgtctgccggcctgcttccttgtatatccacaggagctgcaaaacctcttagagttctaagggcgctccctgaattttgggatgctgctttgttccccaaccataacatccaagtccagtgtcatttttctgctcacaagtttaaagtcagcacttaaaagaacagcaacagatgattgagaaagaaatgtaaagaaggttctctttgtgtgagtaagcaagaacctgaaaataattcttccgggccgggtgcggtggctcatggctgtattcccagcactttgggaggccaaggcgggtggatcatgaggtcaggagttcaagaccagcctggccaacatgaagaagcctgggaagtttataaacagataaagacgcaacatgaaagacttgtaagttaagtctcatctttctctgtgaaaagacagactgagggaaaatttaggaaacaaagtatttcctctgaacagtcattgattcttcaagactacccttctgtgtatggaactcagtttaaaagaatttgaaacctaatttatatacaatctatacctaaatatgggagaagctatataagaaccattaagaatataaagagaatgttacattttatccctttttgtaatcatctcatctcagggtaatcaatgtgagaaaagtcttccatcataaatttaacttcattagatacctgagaattaatattgaaaatacaccatatgaatttagtgaatgtgggaaagctttcatccttattacatcttatttgatactagggaaatctcctgattaaattcacatgcatgataggcatgttggaaagtcttcagcatgaatcagatctccttcagcatgatcaaattcatactggagagaaaccttatgaatgtaatgaatgtagaaaaacttttagcctgaagcaaaaccttgtagagcataagaaaatgcatactggagagaaatctcatgaatgcactgaatgtggtaaagtgtgctctcgagtctcatctcttactctacaccttagaagtcacacaggaaagaaggcatataaatgtaataaatgtggaaaagccttcagccagaaggaaaacttcctttctcatcagaaacatcacactggagagaaaccttatgaatgtgaaaaagtttctattcagatgccaaccatcatcagacaccagaaaaatcatacaggaaccaaaccctatgcatgtaaggaatgtggcaaagcctttaacggcaaagcatatctcactgagcatgagaaaattcatactggagaaaaaccatttgaatgtaatcagtgtggaagagccttcagccagaagcaatacctcattaaacatcagaacatccatactggaaagaagccctttaaatgtagtgagtgtggaaaagcttttagccagaaggaaaacctcattatacatcagagaatccatactggagagaaaccttatgaatgtaaagggtgtgggaaagctttcattcagaagtcaagcctcattagacaccagagaagtcacacaggagagaaaccttatacgtgtaaggaatgtgggaaagccttcagtggcaagtcaaatctcacagagcatgagaaaattcatattggagagaaaccctacaaatgtaatgaatgtggaacaatcttcaggcagaagcaatacctcattaaacatcacaatattcatacaggagagaaaccctatgaatgtaataaatgtggaaaagccttctctcgaatcacatcacttattgtacatgtgagaattcatacaggtgataagccttatgagtgtaaggtctgtgggaaagccttctgtcaaagctcatctcttactgtgcatatgagaagccatacaggtgagaaaccctatggttgtaatgaatgtgggaaagccttttctcagttctcaacccttgctctgcacatgagaatccatactggtgaaaaaccttatcagtgtagtgaatgtgggaaagctttcagccaaaagtcacatcacattagacaccagagaattcatactcattaaagttctctatgaatgccttggatttagcaaaacgttcagcagattttacacttaatagtgtattggaaaattcattttacattaaagtgacatgaatgtgggaagtccttcagcagcaattcaaaacttaaatactatgatgtttaataagtattatagtgtaaagaaaacccgtacccccaaaactcccacaacaagcattatcaatgctgtacttctaggagtatactcattaaagttaggatctagtcatggacactacttaatgtgttcctggaaggcctacagatgcattaagaaatagatatgagatgtatgaggatttgaaattaagagacaaaattatcatttttgtgatgttttgctacatatatgaattgtaaaactagaatcatcaaaattatttgttgttgaagcagtcataaaactgagactgagacagaatattgaattcagaaatgtgtgcatgaatatatggggaattggtaattgatagaggcggtatcccagattggtggggaaatcatggattacttaaaaattaattgactcttcatatggaaaaataatatctcccatcataatataaaatatttttcttatgaattcttaaagtactaaagactaaaatgcaaaaagcaatacttaataatataacagttttataagaagatgtttttaaaaccttagggcaggaaagaacttctaaaacattccagaatacccggtagttccactcttgagtatggtagtcccctattttctgcaagagatggactctaagacccccagtggatacctaaaacccagataggaccaaactctatgtctatgtttttttcttatatatacatacctatgataaaatttagtttacagattagacacagcaagagatttaaaacaataataaacataatatggaacaattataacaatatactgtaatcataaaagttatgtgaatatgatctttctctcagaataccttattgtactgttctcaactatttatgaactgtggtgactacaggtaactgaaaccatggaaagcaaagctgtggataagggggaactactatatatatgcatctacccaagaaacatgaacacagggagtcatgtactggtctatagctgtatagttcattgcaccatgagttatagtagccagaagttgggaaacaaatgctgtctcttgtgaaatagatgaataaaatgtgatagtaacatagtagagtactctctagcagttaagtgacaaattaagtctatatattaacagaaatatttttaaaaaattagagtgaagaaaaatgatgaacatattgtaatgatgcttctgtgaatttgaataaaatcaacactaaccagccctagtactaagaattggttatggataaattatgtaaaactaaagaatggattgaaaggatatgtatatactcagttcccaaaagtggagtggttacctctaggaagaaaggaggtggaagggaaatgttaccaagcatggtagttaaaggatacttcaattttgtatctatttcttattaaaaagaaacattctaagtaaacataacgaaatattaattctgggtggtggtaatatttgtgttcattctatcattcgtgctatttatttccttaaacttctgaaagttaaaaagtccagataggagtgaggaagctgtacatgaaacataatggacttacattcctagtcagatactaatattctgtagaagatatttctaaaatcttatctttaaaatatgaaataatttttaattggggtggcaacttaaattcaattaaaataactcatgtgtcacaagagtaaattttacataatctgtacgtagttctaatctgtatatagtcttggaggttatgatttgccacagattggttggatcacatacatttaaggatcatattattaaataatatatgcacagacatggagagaattagtttttactaaaacatttatcagaaattttaatactctgcataaccagtattagcattagaaattagccacttttaaaatgagaaaactgtgtcactcttcaatttttttataagccattgaggaaaacattaactcctggatttcagcttcacttttaacctgcagactaaatttctttctcaattatgtcagacacacccaagtcaatcccaacccccttgttaccttgggaagaccgtgctgaaaaaggagatcttccacctaaacagtgttctcttatttgaagcaaatctttttgagaatttgtttacttgatttctttccacaataaactgacagagaacgctactaatgatttttttttttttttgagacggagttttgttcttgttgcccaggctgcagtgcaatggcacaatcttggctcactgcaacctctgcctcacaggttcaagtggttctcctgcctcagcctcttgagtagctgggattacaggcatgcgccaccatgcccggctaattttgtatttttagtagagacggagttgcaccatgttggccaggctggtcttgaattcctgacctcaggtgatccacctgcttcggcctcccaaagtgctaggattacaggtgtgagccaccacgcctggctaattttgtatttttagtagagatggggtttctccaaaggctggtcttgaactcccgacctcaggtgatccgcccaccttggcctcccgaagtgctgggattacaggcgtgagccaccgtgcccggcctgatgtttttgaatgattatgaaaatgggtatacagcattaaaaccttagactgattttaaatatattaatttcttttaaactcaatataatgttaatattactgtagcacttactagcatttctgaaggttggtcttgagataagattgaaaatgacagttgttgattttctgaggtaatatacccaaataaaatatatgtatgtgtacatgaa

SEQ ID NO: 201928 - DNA, 4047 bp, Homo sapiens
  Payload ID: 19836
  Gene Name: zinc finger protein 260
  Uniprot ID: Q3ZCT1
  ENST ID: ENST00000593142
  CDS Start-End: 588-1826
gctgctttgttccccaaccataacatccaagtccagtgtcatttttctgctcacaagtttaaagtcagcacttaaaagaacagcaacagatgattgagaaagaaatgtaaagaaggttctctttgtaagaagcctgggaagtttataaacagataaagacgcaacatgaaagacttgtaagttaagtctcatctttctctgtgaaaagacagactgagggaaaatttaggaaacaaagtatttcctctgaacagtcattgattcttcaagactacccttctgtgtatggaactcagtttaaaagaatttgaaacctaatttatatacaatctatacctaaatatgggagaagctatataagaaccattaagaatataaagagaatgttacattttatccctttttgtaatcatctcatctcagggtaatcaatgtgagaaaagtcttccatcataaatttaacttcattagatacctgagaattaatattgaaaatacaccatatgaatttagtgaatgtgggaaagctttcatccttattacatcttatttgatactagggaaatctcctgattaaattcacatgcatgataggcatgttggaaagtcttcagcatgaatcagatctccttcagcatgatcaaattcatactggagagaaaccttatgaatgtaatgaatgtagaaaaacttttagcctgaagcaaaaccttgtagagcataagaaaatgcatactggagagaaatctcatgaatgcactgaatgtggtaaagtgtgctctcgagtctcatctcttactctacaccttagaagtcacacaggaaagaaggcatataaatgtaataaatgtggaaaagccttcagccagaaggaaaacttcctttctcatcagaaacatcacactggagagaaaccttatgaatgtgaaaaagtttctattcagatgccaaccatcatcagacaccagaaaaatcatacaggaaccaaaccctatgcatgtaaggaatgtggcaaagcctttaacggcaaagcatatctcactgagcatgagaaaattcatactggagaaaaaccatttgaatgtaatcagtgtggaagagccttcagccagaagcaatacctcattaaacatcagaacatccatactggaaagaagccctttaaatgtagtgagtgtggaaaagcttttagccagaaggaaaacctcattatacatcagagaatccatactggagagaaaccttatgaatgtaaagggtgtgggaaagctttcattcagaagtcaagcctcattagacaccagagaagtcacacaggagagaaaccttatacgtgtaaggaatgtgggaaagccttcagtggcaagtcaaatctcacagagcatgagaaaattcatattggagagaaaccctacaaatgtaatgaatgtggaacaatcttcaggcagaagcaatacctcattaaacatcacaatattcatacaggagagaaaccctatgaatgtaataaatgtggaaaagccttctctcgaatcacatcacttattgtacatgtgagaattcatacaggtgataagccttatgagtgtaaggtctgtgggaaagccttctgtcaaagctcatctcttactgtgcatatgagaagccatacaggtgagaaaccctatggttgtaatgaatgtgggaaagccttttctcagttctcaacccttgctctgcacatgagaatccatactggtgaaaaaccttatcagtgtagtgaatgtgggaaagctttcagccaaaagtcacatcacattagacaccagagaattcatactcattaaagttctctatgaatgccttggatttagcaaaacgttcagcagattttacacttaatagtgtattggaaaattcattttacattaaagtgacatgaatgtgggaagtccttcagcagcaattcaaaacttaaatactatgatgtttaataagtattatagtgtaaagaaaacccgtacccccaaaactcccacaacaagcattatcaatgctgtacttctaggagtatactcattaaagttaggatctagtcatggacactacttaatgtgttcctggaaggcctacagatgcattaagaaatagatatgagatgtatgaggatttgaaattaagagacaaaattatcatttttgtgatgttttgctacatatatgaattgtaaaactagaatcatcaaaattatttgttgttgaagcagtcataaaactgagactgagacagaatattgaattcagaaatgtgtgcatgaatatatggggaattggtaattgatagaggcggtatcccagattggtggggaaatcatggattacttaaaaattaattgactcttcatatggaaaaataatatctcccatcataatataaaatatttttcttatgaattcttaaagtactaaagactaaaatgcaaaaagcaatacttaataatataacagttttataagaagatgtttttaaaaccttagggcaggaaagaacttctaaaacattccagaatacccggtagttccactcttgagtatggtagtcccctattttctgcaagagatggactctaagacccccagtggatacctaaaacccagataggaccaaactctatgtctatgtttttttcttatatatacatacctatgataaaatttagtttacagattagacacagcaagagatttaaaacaataataaacataatatggaacaattataacaatatactgtaatcataaaagttatgtgaatatgatctttctctcagaataccttattgtactgttctcaactatttatgaactgtggtgactacaggtaactgaaaccatggaaagcaaagctgtggataagggggaactactatatatatgcatctacccaagaaacatgaacacagggagtcatgtactggtctatagctgtatagttcattgcaccatgagttatagtagccagaagttgggaaacaaatgctgtctcttgtgaaatagatgaataaaatgtgatagtaacatagtagagtactctctagcagttaagtgacaaattaagtctatatattaacagaaatatttttaaaaaattagagtgaagaaaaatgatgaacatattgtaatgatgcttctgtgaatttgaataaaatcaacactaaccagccctagtactaagaattggttatggataaattatgtaaaactaaagaatggattgaaaggatatgtatatactcagttcccaaaagtggagtggttacctctaggaagaaaggaggtggaagggaaatgttaccaagcatggtagttaaaggatacttcaattttgtatctatttcttattaaaaagaaacattctaagtaaacataacgaaatattaattctgggtggtggtaatatttgtgttcattctatcattcgtgctatttatttccttaaacttctgaaagttaaaaagtccagataggagtgaggaagctgtacatgaaacataatggacttacattcctagtcagatactaatattctgtagaagatatttctaaaatcttatctttaaaatatgaaataatttttaattggggtggcaacttaaattcaattaaaataactcatgtgtcacaagagtaaattttacataatctgtacgtagttctaatctgtatatagtcttggaggttatgatttgccacagattggttggatcacatacatttaaggatcatattattaaataatatatgcacagacatggagagaattagtttttactaaaacatttatcagaaattttaatactctgcataaccagtattagcattagaaattagccacttttaaaatgagaaaactgtgtcactcttcaatttttttataagccattgaggaaaacattaactcctggatttcagcttcacttttaacctgcagactaaatttctttctcaattatgtcagacacacccaagtcaatcccaacccccttgttaccttgggaagaccgtgctg

SEQ ID NO: 201929 - DNA, 4174 bp, Homo sapiens
  Payload ID: 19836
  Gene Name: zinc finger protein 260
  Uniprot ID: Q3ZCT1
  ENST ID: ENST00000588993
  CDS Start-End: 715-1953
gctgctttgttccccaaccataacatccaagtccagtgtcatttttctgctcacaagtttaaagtcagcacttaaaagaacagcaacagatgattgagaaagaaatgtaaagaaggttctctttgtgtgagtaagcaagaacctgagacaaggtcatactctgtcacctaggctggattgcaatggcatgatcatagcatactgcagcctcgaactcctgggctcaagcgatcctcctacttcaacctcccaaaagaagcctgggaagtttataaacagataaagacgcaacatgaaagacttgtaagttaagtctcatctttctctgtgaaaagacagactgagggaaaatttaggaaacaaagtatttcctctgaacagtcattgattcttcaagactacccttctgtgtatggaactcagtttaaaagaatttgaaacctaatttatatacaatctatacctaaatatgggagaagctatataagaaccattaagaatataaagagaatgttacattttatccctttttgtaatcatctcatctcagggtaatcaatgtgagaaaagtcttccatcataaatttaacttcattagatacctgagaattaatattgaaaatacaccatatgaatttagtgaatgtgggaaagctttcatccttattacatcttatttgatactagggaaatctcctgattaaattcacatgcatgataggcatgttggaaagtcttcagcatgaatcagatctccttcagcatgatcaaattcatactggagagaaaccttatgaatgtaatgaatgtagaaaaacttttagcctgaagcaaaaccttgtagagcataagaaaatgcatactggagagaaatctcatgaatgcactgaatgtggtaaagtgtgctctcgagtctcatctcttactctacaccttagaagtcacacaggaaagaaggcatataaatgtaataaatgtggaaaagccttcagccagaaggaaaacttcctttctcatcagaaacatcacactggagagaaaccttatgaatgtgaaaaagtttctattcagatgccaaccatcatcagacaccagaaaaatcatacaggaaccaaaccctatgcatgtaaggaatgtggcaaagcctttaacggcaaagcatatctcactgagcatgagaaaattcatactggagaaaaaccatttgaatgtaatcagtgtggaagagccttcagccagaagcaatacctcattaaacatcagaacatccatactggaaagaagccctttaaatgtagtgagtgtggaaaagcttttagccagaaggaaaacctcattatacatcagagaatccatactggagagaaaccttatgaatgtaaagggtgtgggaaagctttcattcagaagtcaagcctcattagacaccagagaagtcacacaggagagaaaccttatacgtgtaaggaatgtgggaaagccttcagtggcaagtcaaatctcacagagcatgagaaaattcatattggagagaaaccctacaaatgtaatgaatgtggaacaatcttcaggcagaagcaatacctcattaaacatcacaatattcatacaggagagaaaccctatgaatgtaataaatgtggaaaagccttctctcgaatcacatcacttattgtacatgtgagaattcatacaggtgataagccttatgagtgtaaggtctgtgggaaagccttctgtcaaagctcatctcttactgtgcatatgagaagccatacaggtgagaaaccctatggttgtaatgaatgtgggaaagccttttctcagttctcaacccttgctctgcacatgagaatccatactggtgaaaaaccttatcagtgtagtgaatgtgggaaagctttcagccaaaagtcacatcacattagacaccagagaattcatactcattaaagttctctatgaatgccttggatttagcaaaacgttcagcagattttacacttaatagtgtattggaaaattcattttacattaaagtgacatgaatgtgggaagtccttcagcagcaattcaaaacttaaatactatgatgtttaataagtattatagtgtaaagaaaacccgtacccccaaaactcccacaacaagcattatcaatgctgtacttctaggagtatactcattaaagttaggatctagtcatggacactacttaatgtgttcctggaaggcctacagatgcattaagaaatagatatgagatgtatgaggatttgaaattaagagacaaaattatcatttttgtgatgttttgctacatatatgaattgtaaaactagaatcatcaaaattatttgttgttgaagcagtcataaaactgagactgagacagaatattgaattcagaaatgtgtgcatgaatatatggggaattggtaattgatagaggcggtatcccagattggtggggaaatcatggattacttaaaaattaattgactcttcatatggaaaaataatatctcccatcataatataaaatatttttcttatgaattcttaaagtactaaagactaaaatgcaaaaagcaatacttaataatataacagttttataagaagatgtttttaaaaccttagggcaggaaagaacttctaaaacattccagaatacccggtagttccactcttgagtatggtagtcccctattttctgcaagagatggactctaagacccccagtggatacctaaaacccagataggaccaaactctatgtctatgtttttttcttatatatacatacctatgataaaatttagtttacagattagacacagcaagagatttaaaacaataataaacataatatggaacaattataacaatatactgtaatcataaaagttatgtgaatatgatctttctctcagaataccttattgtactgttctcaactatttatgaactgtggtgactacaggtaactgaaaccatggaaagcaaagctgtggataagggggaactactatatatatgcatctacccaagaaacatgaacacagggagtcatgtactggtctatagctgtatagttcattgcaccatgagttatagtagccagaagttgggaaacaaatgctgtctcttgtgaaatagatgaataaaatgtgatagtaacatagtagagtactctctagcagttaagtgacaaattaagtctatatattaacagaaatatttttaaaaaattagagtgaagaaaaatgatgaacatattgtaatgatgcttctgtgaatttgaataaaatcaacactaaccagccctagtactaagaattggttatggataaattatgtaaaactaaagaatggattgaaaggatatgtatatactcagttcccaaaagtggagtggttacctctaggaagaaaggaggtggaagggaaatgttaccaagcatggtagttaaaggatacttcaattttgtatctatttcttattaaaaagaaacattctaagtaaacataacgaaatattaattctgggtggtggtaatatttgtgttcattctatcattcgtgctatttatttccttaaacttctgaaagttaaaaagtccagataggagtgaggaagctgtacatgaaacataatggacttacattcctagtcagatactaatattctgtagaagatatttctaaaatcttatctttaaaatatgaaataatttttaattggggtggcaacttaaattcaattaaaataactcatgtgtcacaagagtaaattttacataatctgtacgtagttctaatctgtatatagtcttggaggttatgatttgccacagattggttggatcacatacatttaaggatcatattattaaataatatatgcacagacatggagagaattagtttttactaaaacatttatcagaaattttaatactctgcataaccagtattagcattagaaattagccacttttaaaatgagaaaactgtgtcactcttcaatttttttataagccattgaggaaaacattaactcctggatttcagcttcacttttaacctgcagactaaatttctttctcaattatgtcagacacacccaagtcaatcccaacccccttgttaccttgggaagaccgtgctg

SEQ ID NO: 201930 - DNA, 3830 bp, Homo sapiens
  Payload ID: 19837
  Gene Name: zinc finger protein 263
  Uniprot ID: O14978
  ENST ID: ENST00000219069
  CDS Start-End: 877-2928
gccactgactgggcgggcggctagctccctggcctccccgacatgccgaggagcccctggcttccggagccgacgaggccgcaggggccaatgggaccatcttcagccagcccagagtagccgaagcgggtggggcctggcttgggaaaggattcatccggggaagctgattaacaattcagatttccgggtctcaccccgacactgacgcactggagagcgcgtggccctgggatctgcgttttcccaagcgctccggagtaattctaacccaggttgcccgccagtcacaacgacctcaggcttgttttcttcgcttggatccagctgccctgcccccagtcactcccagaatttcagggcgcgccccgtggccccgcctctcgtctccaattggtccctcgctcatccagtccccgtaggccaatcttcccttctcattggtaggcggtgagtgtgtggagaaacctgacctaatgggcgctggagttcgcaaaacgtgacccggaaattggtcacgagcaggcgccgtgggcttgtggacgcctaacttgcgcgctgagatttccggcgtgggagcagaggtctgagtcttgcgtgggtcctctatatagggtgagaagcgtggcgctcggttcctgcctcggggaagtcctggcgcagatgggccacggggccggcgtggcggcgcctgggaccgactgaggcctaggcgccggagccggccgcgcctgggctggagcggggctcctcggcctggactgggagcccccggccccgggctcctgctggcgccgtccaaccttacatgggttcagggcgccttcgtaggcgggcacggctggtttcgggctaaggcgctctggagacctgacgatggcgtcgggcccgggctcccaggaacgggaagggctcctgatagtgaagctggaggaggactgcgcctggagccaggagctgcccccacctgacccaggaccgagccccgaggcctcccacttgcgcttcagacggttccgcttccaagaggcagctggtccccgggaagccctcagccggctccaagagctttgccatgggtggcttcggcctgagatgcgcacgaaggagcagatcttggagctgctggtgttagagcagttcctgaccatcctgccccaggagatccagagcagggtgcaggagctgcatccggagagcggcgaagaagcggtgacccttgtggaggatatgcagagagagcttgggagactgagacaacaggtcacaaaccatgggcggggaacagaagtgcttttggaggagcctttgcctctggaaacagcacgagagtcaccgagcttcaagctggagccaatggagactgagcgaagccctggccccaggctgcaggagctgctaggccccagcccccaaagggacccccaggctgtaaaggagagggcattatctgctccctggctttctctttttcctcctgaagggaacatggaagacaaggagatgactgggccccagttgcctgagagcttagaggacgtggcaatgtacatctcccaggaggagtgggggcatcaggatcctagtaagagggccctctccagggacacggtgcaggagagttatgagaatgtggactcactggagtctcacattcccagtcaggaggtcccaggcacccaggtgggacaaggaggaaagctatgggatcccagtgtccagagctgcaaggagggcctgagccccagaggcccagctccaggagaagagaaatttgagaacctggaaggtgttccgtctgtatgctctgagaacatccaccctcaggtgctgcttcctgaccaggcccgaggggaggtgccctggagtcctgagctgggaagacctcatgaccggtcgcaaggggattgggcgcctcccccagagggtggaatggagcaggccttggcaggagcctcaagtggcagagaactggggcgaccgaaggaactgcagccaaagaaactccatttatgtcccttgtgtggcaaaaatttctctaacaactcaaacctaattaggcaccagagaatacatgcagctgaaagactgtgtatgggtgtggactgcactgaaatctttggtgggaacccacgtttcctgtcactacacagagcacacctgggagaggaggcccacaagtgccttgaatgtgggaaatgcttcagtcagaacacccatctgactcgccaccaacgcacccacacgggtgagaagccctatcagtgcaacatttgcggaaaatgtttctcctgcaactccaacctccacaggcaccagagaacgcacactggggagaagccctacaagtgccctgagtgtggggagatctttgctcacagttccaacctccttcggcaccagagaattcacactggagagcgaccttataagtgtcccgagtgtgggaaaagtttctctcggagttcacacctcgtcattcacgaaagaactcatgagagagagagactttaccccttctctgagtgtggggaagctgtgagtgacagcaccccctttcttacaaaccatggagcccataaggcagagaagaagctctttgaatgtttgacttgtgggaaaagcttccggcagggcatgcacctcaccagacatcagagaacacacacaggagagaaaccgtataaatgtaccctttgtggggaaaacttctctcatagatccaatttaatcaggcaccagagaatccacacaggagaaaaaccctatacctgtcatgagtgcggagacagcttctctcacagctccaatcggattcgccacctgagaacgcatacgggagagagaccctataaatgttctgaatgtggagaaagcttctctcggagttcccgtcttatgagtcatcagagaactcacacaggttagtaacagtggggtttctctttgccccaggtgaggtggcatattcagaggagcctgttggcaagagctggtattccctgcccagccgaccaaatgacctctgcattcttcaggtaatgggggctcattgtgagggaggtgcagaggcagcagaggattggcataaaactgaaaaggagttctgtctgcatgagaaaggatggcaagtctctgaggtgacctcagggtggaattctctgttaagtccaccctgccccagggtgctcctaccctcttggtctttttaaagccaaggtgcgatttgggcacctgactgtccagtttaccttaacaagtttgggaatccatgtgatgtttttgatacttcttcctcatttgggacattcagtaggagcatttgggcttccggggcccctgagaccaaagaagaggggccaagtaccctgggaaatcagctgaaggtcaacaaaagactggttgtgagttgcagctgtcccgaaggccccagttgggaagccatgggcagtccagatcaagccaccacgtgccctacgatggcctaacaggagtgcccattggcagattacacatgtaaatatgacctcagacaaaaaggaaccagaggcccaagggcaataataaggtggaatttgcaggtcagcccaggaattggcagaggaagtaggtgtctgataaccctttgtggagaatgagattccccccacctgtgtgagaaaaataaacagctctggagtcttgttcctgactccagaggaacgagagcattccaggaaagagagattccctggaaaattgaaaatgtgaatcctagggggaaattggggattgtgtctttccctgttgaaaatgtttggatgggaataaatatcttcaggaaacataaa

SEQ ID NO: 201931 - DNA, 1721 bp, Homo sapiens
  Payload ID: 19837
  Gene Name: zinc finger protein 263
  ENST ID: ENST00000538765
  CDS Start-End: 255-1250
ctgttttgcaacttcttgtttatgagcctggaagccacgaagtggtgggaaatacgagattcaaatatctggtggccgtgtgacgagaagagaaatttgagaacctggaaggtgttccgtctgtatgctctgagaacatccaccctcaggtgctgcttcctgaccaggcccgaggggaggtgccctggagtcctgagctgggaagacctcatgaccggtcgcaaggggattgggcgcctcccccagagggtggaatggagcaggccttggcaggagcctcaagtggcagagaactggggcgaccgaaggaactgcagccaaagaaactccatttatgtcccttgtgtggcaaaaatttctctaacaactcaaacctaattaggcaccagagaatacatgcagctgaaagactgtgtatgggtgtggactgcactgaaatctttggtgggaacccacgtttcctgtcactacacagagcacacctgggagaggaggcccacaagtgccttgaatgtgggaaatgcttcagtcagaacacccatctgactcgccaccaacgcacccacacgggtgagaagccctatcagtgcaacatttgcggaaaatgtttctcctgcaactccaacctccacaggcaccagagaacgcacactggggagaagccctacaagtgccctgagtgtggggagatctttgctcacagttccaacctccttcggcaccagagaattcacactggagagcgaccttataagtgtcccgagtgtgggaaaagtttctctcggagttcacacctcgtcattcacgaaagaactcatgagagagagagactttaccccttctctgagtgtggggaagctgtgagtgacagcaccccctttcttacaaaccatggagcccataaggcagagaagaagctctttgaatgtttgacttgtgggaaaagcttccggcagggcatgcacctcaccagacatcagagaacacacacaggagagaaaccgtataaatgtaccctttgtggggaaaacttctctcatagatccaatttaatcaggcaccagagaatccacacaggagaaaaaccctatacctgtcatgagtgcggagacagcttctctcacagctccaatcggattcgccacctgagaacgcatacgggagagagaccctataaatgttctgaatgtggagaaagcttctctcggagttcccgtcttatgagtcatcagagaactcacacaggttagtaacagtggggtttctctttgccccaggtgaggtggcatattcagaggagcctgttggcaagagctggtattccctgcccagccgaccaaatgacctctgcattcttcaggtaatgggggctcattgtgagggaggtgcagaggcagcagaggattggcataaaactgaaaaggagttctgtctgcatgagaaaggatggcaagtctctgaggtgacctcagggtggaattctctgttaagtccaccctgccccagggtgctcctaccctcttggtctttttaaagccaaggtgcgatttgggcacctgactgtccagtttaccttaacaagtttgggaatccatgtgatgtttttgatacttcttcctcatttgggacattcagtaggagcatttgggcttccggggcccctgagaccaaagaagaggggccaagtaccctgggaaatcagctgaaggtcaacaaaagac

SEQ ID NO: 201932 - DNA, 851 bp, Homo sapiens
  Payload ID: 19837
  Gene Name: zinc finger protein 263
  ENST ID: ENST00000575823
  CDS Start-End: 1-347
ggttccgcttccaagaggcagctggtccccgggaagccctcagccggctccaagagctttgccatgggtggcttcggcctgagatgcgcacgaaggagcagatcttggagctgctggtgttagagcagttcctgaccatcctgccccaggagatccagagcagggtgcaggagctgcatccggagagcggcgaagaagcggtgacccttgtggaggatatgcagagagagcttgggagactgagacaacagagtctcacattcccagtcaggaggtcccaggcacccaggtgggacaaggaggaaagctatgggatcccagtgtccagagctgcaaggagggcctgagccccagaggcccagctccaggagaagagaaatttgagaacctggaaggtgttccgtctgtatgctctgagaacatccaccctcaggtgctgcttcctgaccaggcccgaggggaggtgccctggagtcctgagctgggaagacctcatgaccggtcgcaaggggattgggcgcctcccccagagggtggaatggagcaggccttggcaggagcctcaagtggcagagaactggggcgaccgaaggaactgcagccaaagaaactccatttatgtcccttgtgtggcaaaaatttctctaacaactcaaacctaattaggcaccagagaatacatgcagctgaaagactgtgtatgggtgtggactgcactgaaatctttggtgggaacccacgtttcctgtcactacacagagcacacctgggagaggaggcccacaagtgccttgaatgtgggaaatgcttcagtcagaacacccatctgactcgccaccaacgcacccaca

SEQ ID NO: 201933 - DNA, 1139 bp, Homo sapiens
  Payload ID: 19837
  Gene Name: zinc finger protein 263
  ENST ID: ENST00000574253
  CDS Start-End: 310-990
ccggcgtgggagcagaggtctgagtcttgcgtgggtcctctatatagggtgagaagcgtggcgctcggttcctgcctcggggaagtcctggcgcagatgggccacggggccggcgtggcggcgcctgggaccgactgaggcctaggcgccggagccggccgcgcctgggctggagcggggctcctcggcctggactgggagcccccggccccgggctcctgctggcgccgtccaaccttacatgggttcagggcgccttcgtaggcgggcacggctggtttcgggctaaggcgctctggagacctgacgatggcgtcgggcccgggctcccaggaacgggaagggctcctgatagtgaagctggaggaggactgcgcctggagccaggagctgcccccacctgacccaggaccgagccccgaggcctcccacttgcgcttcagacggttccgcttccaagaggcagctggtccccgggaagccctcagccggctccaagagctttgccatgggtggcttcggcctgagatgcgcacgaaggagcagatcttggagctgctggtgttagagcagttcctgaccatcctgccccaggagatccagagcagggtgcaggagctgcatccggagagcggcgaagaagcggtgacccttgtggaggatatgcagagagagcttgggagactgagacaacaggagaagagaaatttgagaacctggaaggtgttccgtctgtatgctctgagaacatccaccctcaggtgctgcttcctgaccaggcccgaggggaggtgccctggagtcctgagctgggaagacctcatgaccggtcgcaaggggattgggcgcctcccccagagggtggaatggagcaggccttggcaggagcctcaagtggcagagaactggggcgaccgaaggaactgcagccaaagaaactccatttatgtcccttgtgtggcaaaaatttctctaacaactcaaacctaattaggcaccagagaatacatgcagctgaaagactgtgtatgggtgtggactgcactgaaatctttggtgggaacccacgtttcctgtcactacacagagcacacctgggagaggaggcccacaagtgccttgaatgtgggaaatgcttc

SEQ ID NO: 201934 - DNA, 1636 bp, Homo sapiens
  Payload ID: 19837
  Gene Name: zinc finger protein 263
  ENST ID: ENST00000573578
  CDS Start-End: 314-763
atttccggcgtgggagcagaggtctgagtcttgcgtgggtcctctatatagggtgagaagcgtggcgctcggttcctgcctcggggaagtcctggcgcagatgggccacggggccggcgtggcggcgcctgggaccgactgaggcctaggcgccggagccggccgcgcctgggctggagcggggctcctcggcctggactgggagcccccggccccgggctcctgctggcgccgtccaaccttacatgggttcagggcgccttcgtaggcgggcacggctggtttcgggctaaggcgctctggagacctgacgatggcgtcgggcccgggctcccaggaacgggaagggctcctgatagtgaagctggaggaggactgcgcctggagccaggagctgcccccacctgacccaggaccgagccccgaggcctcccacttgcgcttcagacggttccgcttccaagaggcagctggtccccgggaagccctcagccggctccaagagctttgccatgggtggcttcggcctgagatgcgcacgaaggagcagatcttggagctgctggtgttagagcagttcctgaccatcctgccccaggagatccagagcagggtgcaggagctgcatccggagagcggcgaagaagcggtgacccttgtggaggatatgcagagagagcttgggagactgagacaacagcattatctgctccctggctttctctttttcctcctgaagggaacatggaagacaaggagatgactgggccccagttgcctgagagcttagaggacgtggcaatgtacatctcccaggaggagtgggggcatcaggatcctagtaagagggccctctccagggacacggtgcaggagagttatgagaatgtggactcactgggtaaggacttcttttccagggatgatgactgcgccatttctgaccagggtcctgcccgttattcattcacctcctggacacagactctgagttttgccaagaagcctccacaggagacttccctttgtctaaagtcccctgtacgagagtcatgtatctgccaagtggtacagttggcacaggcagcccgggactggagtcccagctgccagagcctaaggcgagtctgagccatgtgcacttcctagggcagagcaaacccaatgcggtgacaacctgccagcatcacacacatgcagtattccaggatgctggggggctctaaatggttgattccttgcaattttcagatgcttattcttatgagctcgccagtgtttcctgtgttccgttagtgtttctaggctcgtccccaaagacaaaaatttcaggggtagtaggatcaacattccagcctatcatctctcacagcccataaaaattcagaaagtggggagggtcttgtggaaatttggaaacaatgtatagctccaaagtaggccatatcataaattaagatttacctatgtcttgtactgtactcagagttttaaaattatgcctacggaatatgacagactgacatatagttggatttaggtggaggatatgcttgtatttattgtacaattccctcaacttttctgtatgtatgagaattcttttaataaaaagttggggaagtcttaacataaa

SEQ ID NO: 201935 - DNA, 2637 bp, Homo sapiens
  Payload ID: 19837
  Gene Name: zinc finger protein 263
  ENST ID: ENST00000575332
  CDS Start-End: 1-347
aggcagagaagaagctctttgaatgtttgacttgtgggaaaagcttccggcagggcatgcacctcaccagacatcagagaacacacacaggagagaaaccgtataaatgtaccctttgtggggaaaacttctctcatagatccaatttaatcaggcaccagagaatccacacaggagaaaaaccctatacctgtcatgagtgcggagacagcttctctcacagctccaatcggattcgccacctgagaacgcatacgggagagagaccctataaatgttctgaatgtggagaaagcttctctcggagttcccgtcttatgagtcatcagagaactcacacagtgtgaagtggaatctctgaaactcaggtgtggcatcaacaaagtcaagaaggtagtccaaactctctcttacagcagataatttaaattcagcagtctgcttctcagcttctcctcctttttgaacaacttcctttgttattccacctttggtttttaggagacaacccttttcttcatctccatttaaccacaccctatcatcatccaacttagtttccaactccccacatttttcaagaatttctctataatccccatgttctaagccttgaaaatcatattcaggttcctttttgtaaagaagattttcccatgcatttgctatggttatttgttttacttcttcccaactttttgcccagttaaaaattgcactttttatattgtagattttaattttggaaactcctttatctcctttctcttgctcatcatcactttcttcaaatattacaagactctcttcaagttgcttccatctatacagccgtttgcagctcaagatcacaccttgattcattggttgaatcaaggttgaagtgttatgggggaagaacatacattttattcgaccatcctcactggttagggattcagaggaaggatgagccgggcaactgtccagaagtaacaatgccctgacgtcctcgtcatgaaatcttagaacattaagttgaaaatgtcggacctcaggaacaaagttttgaaaaaaccattctgaaaacaattctctggtgaaccaaacatctttactgggtttatatatcacaggcaatgtacttgtgtcctctttcacacttttgggcagttttgattttccaataatgattgactttaatttatgagttccgtctgcatttgcacataaaaaggcagacaacctttctttgtttattttcttccctggtaggcagatatctttcctacttgcctgagaattttctggcattgacttccaaaagaggtctgtttcatccccactgtatagctgagctagacacagtttctcctctttgattatcatggacagtttttgtcgaaatggctcaacattttcagaaactgaacttaggacttgttccccacatccttttcggttcccaattgcatgccgatttcgaaatctaaaaagccaaccagtgctagctttgaaatctgttcgcccaaaacaccgtgcaaatctctctgcagcagcctgaagctccacgcctcttaccggaacaccggctgagcgtttctgttggtaccacatgtagaccgcatcatctacatcaccatatttggctcccgttgtcctctttctcttctcagcccctactaatggcatgtcctgcttcagtacaaagtccagaattaacttcttattttttttaatgtcataaaatgttgacttactgattccaaattcatccattacacttttaagtgatcgtccagcttcaattctacttagaaccttcattttctcctccaaattcagtgttgtatatttccctctcttattcatactgaatttaactctgaaccaccaacaggagaaaacaaagggaaaagccttaatgaattggcaaaaaaaaaacccacattttttaaacaaaacttagctgaaagccccagaaggcatgggcattgtattggaggataatggactgaaggggctaaccatgactgaagagctagtctagaggtggaggtcttatgcactcagaaagctgccagttgcaaagtcctgtctggctcttgctcctgcaagccatgagtgatcatttttcagaatgccccctacctctcctctcttttgacagatacaacagcctcagtcaggaatgacaggaatacctgcatactttccctaactcaataccggaaaacggacaatatgaagagaggagggatggagcaagatgtgcccacaagacaggtgtgataagtttccataaaaactgatgcttcagaagaagggagcgtgaaagactcaaaggcaatgacagagtaatcttgtgtgtagcagagatgcaatgtggcttctccccttccaaaaagacctgattttacctcactgccagaaaagagaatggtgctcaaattgctttgtacatagtgttcactgggcagcagttcatctacctggataagggctccgagctacagggaccctgacattgggatgtatggagagttggaattcaggaacagttgtaccgaatcttgaagtgaagaagaaagtagtttgttgtacatatgaatgaaatccaacttttattgcattcaatatagtattgtcaagcaccgt

SEQ ID NO: 201936 - DNA, 691 bp, Homo sapiens
  Payload ID: 19837
  Gene Name: zinc finger protein 263
  ENST ID: ENST00000574674
  CDS Start-End: 1-156
tgtcatgagtgcggagacagcttctctcacagctccaatcggattcgccacctgagaacgcatacgggagagagaccctataaatgttctgaatgtggagaaagcttctctcggagttcccgtcttatgagtcatcagagaactcacacagtgtgaagtggaatctctgaaactcaggtgtggcatcaacaaagtcaagaagatacaacagcctcagtcaggaatgacaggaatacctgcatactttccctaactcaataccggaaaacggacaatatgaagagaggagggatggagcaagatgtgcccacaagacaggtgtgataagtttccataaaaactgatgcttcagaagaagggagcgtgaaagactcaaaggcaatgacagagtaatcttgtgtgtagcagagatgcaatgtggcttctccccttccaaaaagacctgattttacctcactgccagaaaagagaatggtgctcaaattgctttgtacatagtgttcactgggcagcagttcatctacctggataagggctccgagctacagggaccctgacattgggatgtatggagagttggaattcaggaacagttgtaccgaatcttgaagtgaagaagaaagtagtttgttgtacatatgaatgaaatccaacttttattgcattcaatatagtattgtcaagcaccgtg

SEQ ID NO: 201937 - DNA, 759 bp, Homo sapiens
  Payload ID: 19837
  Gene Name: zinc finger protein 263
  ENST ID: ENST00000572748
  CDS Start-End: 335-759
acgcctaacttgcgcgctgagatttccggcgtgggagcagaggtctgagtcttgcgtgggtcctctatatagggtgagaagcgtggcgctcggttcctgcctcggggaagtcctggcgcagatgggccacggggccggcgtggcggcgcctgggaccgactgaggcctaggcgccggagccggccgcgcctgggctggagcggggctcctcggcctggactgggagcccccggccccgggctcctgctggcgccgtccaaccttacatgggttcagggcgccttcgtaggcgggcacggctggtttcgggctaaggcgctctggagacctgacgatggcgtcgggcccgggctcccaggaacgggaagggctcctgatagtgaagctggaggaggactgcgcctggagccaggagctgcccccacctgacccaggaccgagccccgaggcctcccacttgcgcttcagacggttccgcttccaagaggcagctggtccccgggaagccctcagccggctccaagagctttgccatgggtggcttcggcctgagatgcgcacgaaggagcagatcttggagctgctggtgttagagcagttcctgaccatcctgccccaggagatccagagcagggtgcaggagctgcatccggagagcggcgaagaagcggtgacccttgtggaggatatgcagagagagcttgggagactgagacaacagttgcctgagagcttagaggacgtggcaatgtacatctc

SEQ ID NO: 201938 - DNA, 12163 bp, Homo sapiens
  Payload ID: 19838
  Gene Name: zinc finger protein 264
  Uniprot ID: O43296
  ENST ID: ENST00000263095
  CDS Start-End: 415-2298
attttcttctgcacttctgtctggagaggtctgtagccactgagggccccggtcggggccgctttgcaggtccctagtcaggaccgagcaggggagtaggataggaatccccgccgcacctttgtacgagcctgaccccttccgtgggtttgttcctgggtcgccgtcaagctgcggtctctcctcccccgcccttcagccccgcggtctccaggggcggcgccctgggtctggaacgcggttgccaccgaggaggcggcggccctgcgtctggaacgccgttgccaccgaggaggcggcggccccgagcgcgcctggaagccccgggcaaccggccagggtcgggcacaggtggggtccgtcaggccgcccggggctcctctgtcccagctctgcggcccagggggtgacgtgatggcggcagcggtgctgacggaccgggcccaggtgtctgtgacctttgatgatgtggctgtgactttcaccaaggaggagtgggggcagctggacctagctcagcggaccctgtaccaggaggtgatgctggaaaactgtgggctcctggtgtctctggggtgtcctgttcccaaagctgagctgatctgccacctagagcatgggcaggagccatggaccaggaaggaagacctctcccaagacacctgtccaggcgacaaaggaaaacctaagaccacagaacctaccacttgtgagccagccttgtcagagggaatctcacttcagggacaagtgacacaaggaaactcagtggactcacagttggggcaagccgaggatcaggatgggctatcagaaatgcaggaaggacacttcagaccaggaatagatccccaggagaagtctcctgggaagatgagccctgaatgtgatggtttagggacagctgatggtgtgtgttcaaggattggacaggagcaagtctctccaggagatagagtccgtagccataactcatgtgagtcaggtaaagatcccatgattcaggaagaggaaaataactttaaatgcagtgaatgtggaaaagtatttaacaagaaacacctccttgctggacatgagaaaattcactctggagttaagccctatgaatgcacagaatgtgggaaaacctttattaagagcacacatctcctgcaacatcacatgatccacactggggagaggccctatgagtgcatggagtgtggaaaggccttcaaccgcaagtcataccttacccagcaccagcggattcacagtggagagaagccttacaagtgcaatgaatgcggaaaggccttcacccaccgctccaattttgtcttgcataacaggagacacactggagaaaaatcctttgtgtgcacagaatgtggccaagtctttcgacataggccaggctttctccggcactatgttgtccacagtggtgagaatccctatgagtgcttggagtgtggcaaggtcttcaaacacaggtcatatctcatgtggcaccagcagactcataccggggagaagccctatgagtgcagtgaatgtgggaaggtcttcttggagagtgcagccctgattcaccactatgtcatccacactggagagaagccctttgagtgcctcgagtgtgggaaggctttcaaccaccgatcctacctcaagaggcaccagcggattcacactggggagaagcccttcgtgtgcagtgaatgtggaaaggccttcacccactgctctacttttatcttgcataaaagggcccacactggagaaaagcctttcgagtgcaaagagtgtgggaaagcctttagcaatcggaaggacctcattcgccacttcagcatccacactggagagaagccctatgagtgcgtggagtgtggaaaggccttcacccgcatgtcgggcctcacgaggcacaagcggattcatagtggagagaagccctatgaatgtgttgagtgtgggaaatcgttttgctggagcacaaacctcattcgacatgccattatccacactggagagaagccctataaatgtagtgaatgtggaaaggccttcagtcgcagctcgtccctcactcagcatcaaaggatgcatactgggaaaaatcccatcagtgtaacagatgtgggaagaccttttacaagtggacaaacctcagttacccttcgagaacttcttttagggaaggactttttgaatgtaaccactgaggcaaatattttgccagaggaaacatcttcctctgcatctgatcaaccataccaaagagaaaccccacaagtgtcttcactgtgagaaaaccttctgttgctgaatattacttgtcatctgaagagtcatattagaaattcgttcagtctagagccttattctccatctgataatttatcctggagagagacccagtggttattgtgcacataggagaaccttcagctgcatctttctccttagtttacagtgcaattttatctcaggaattatttttaaaaggaggaggggacatagaaaaaatgaaatgcaagcacacatcttttcaggcttctctgccaagcctatggcgctttgtcatggatttcttagtgtatttgggggaagggaaatgtttcaaggtaaagaaccttgaccctttatgtgcttgtatgtacatttattgctatccagtgtcagaacagttagtttaggaaaagtatgcaaactttaatcgcacatcttctgtattccacaatagtacttactcttgagaagcataactttatgacaacttagggggcttgagccatgaaatactcacgtttaagtcagtaaggatacacatgttaacattcaggcttttgtcttgatgcccgtcttttggtttacgtcatcattgtagccatatggtaaatttttatttgttaaatttttaaaaattacttagctcaaaatgtcagtggtaaatttttaaattgagtaaagtgattcttctttgctcttatttaaaatcgacagcatttctagttcctttgacattccatataatttttaggattagtttgtacttatttacaaaacagtcttgttcagatttttacagaaattgagttaagtctgtggattaatctgttaagaattggtatctttactatgttgggtcttgtagttcatgagtgcaggagtaggcctcttaatttataatagttaagcattccttaaagtatttcattaatgttaaaaattttcagcgtatagatccctatgcatttttgttagaatttgcatcctagggtgcttttttgtttgtgtgtgtgtgtaatttgagtgattgtaaatggcattgatgtttgaactttgaattgcacacaatttttggtagtatacagaaatataatatttttggacattgttttgctaccctgcaaccttattgagttcacttattatttttagctatttctttcgacagaatccttggaattttctatatagaaatgtcatctgcaaatacagaccattttttatctttcatcttacctgtaatataccttttatttcctttttgtttgtcttattgcattgcacaagctgggacttccattatagcgttgaataggaatagtgagaaaggccatccttacctggttcctgatagtaggggggacaatgttcagttttttgtttttttgttttttgtttgagacagggtctcgctctgtcacccaggctggagtgcagtggcacgatcttgtctcaccatagccttaagttcctgggctcaagtgatccccccacctcagccctcaccaccccccagtagctggtactacaagcatgcaccaccagtcccagctaatttttgtattttttggtagagacagggtttcaccatggtgcccaggctggtcttgaactcctgggctcaagcaacctgcttgcctgggtctcccaaagtgctgggattacaggcgtgagccacagtgcacagcatgttcagtttttcatcatgaagtataatgtaagttttataaaacatatgtcctctataagggtaaaaaatttcctctgttcccagttttctgagactctgtgttgctatgaataagtgtggaattttgttcagtactttttctccaccagttgatgtcattatgctattttccttctacatcctattgatggaatgtattgctttgatcaagttttgaatattgagccagccttgcatccttagaataaaccatacttgtttgtagagtataattgtttttatatatcatttgacatcattccctttgtttgtattttgttgaggaaatattcctctaatttattggctaataatgtgtagttcttttttcttttgtttcttatgttctaaatgtcttatgtgtggttttgatgtctaggtgatcttgacctttcaacatgaattggaaggagttctcttctaatttttggaagactgtgtagaattggtgttatttgttcttgtcatgtttgatgacctctagtcaaccattgggccagagatttttcttctggaggcttttaaattacatatttattttattggataggtagaactattcgaagtatctatttcttgtgtaataaattttgatagtctgtcctgttgaaggaatatttcatctgtatttgtagcactcccttattcttttgatagcaggatctgcacttctttttatttttaatatttaaaatgtgcatactcattttatgattgagtcttcttagacatttatcagttttattgcgcatcatgctgaaagatgtaatttttgcttcatctctcacttcagagaactagcactttatattaatgatttgtctctattcttgatttctttgatttctgctctgatcggtattatattccacttgctttggttgtatttggctctttctaacttttcaaggtggggttttagattattgatttgagatttttttgcttttttaatgtaagcattacattgtataaatttacctcatatcactattggtttgatcccacaagttttaatgttttcattacattttaattctaatagtttttattttttgagacattctctcttagccatgaattatttaatagtatgcttaattttctggtgtttggcatatttgttactgatttctaatttgttccatgtttgatctgactgtttaaatgtgttaacatttttttatgacccaggatagggtctatcttgtttcgtatagctgcttgaaaagaatgggtgttctgctgttactgggtggagtttctataaatgtctctatgatcctgctcattgttattcaagtcagctatgtccttgctgattttctgtccagcatttctgtcagttgctgagaggggtgttgaagtcctgaacataggccgggtgcagtggctcacgcctgtaatcctagcactttgagaccactaaggcaggtggatcacctgaggccaggagttcgagaccagcctggccaacatggcaaaaccctgtctactaaaaatacaaaaattagccaggcatggtggcgtgtgcctgtaatcccagctgctggggggctgaggcaggaggatcagttgaacgtgggaggcagaggttgcagtgagctgagatctcaccactgcactccagcctgggcaacagagcgagactctgtctcaacaacaacaacaaaaagtcctgaacatgattgtggaagtgtgttgctctttcaagttctatcactttttgtttgcaaagttcaaagctgtattgtttggtacatatacatgtaggtttgccaagtctttgtggtgaattgactcttctgtcattatgtgatgtcatttttttgccttttaatagtcttgtcaatactttacctgatgttctcatagtgactcctgcatattttgattaatgtttgcatggttaatatttcttcattttattttaaagcttacctgtatcattacttatgaagtcagtttctttgaacagcatatactcaggccatgctttttttattcattctgcatatgtctctcttaattggtatgttgaaatgatttacattaaaataattattgatattttagggcttaagtgtgcccttaaatgatttttgtgttcttttttattgttcctctgttatttggggttgtttactagtcttcctataggttacttcaccttttttttttttaataatttgatttgatacatatgtagtgttttttagtatagatcctccttgacttatgatggggttatgtcacaataaacccattgcaagttgaaaatactatgtcaaatatgcatttaatacacctaccctgctgaacatcatagccgatcttgccttcagaatgctcagaaaatttacattagcctgcagttgggcaaaatcatctaacacaaggcctactttataataaagttactgcaaagaattttaaataaaaattcaagtgtggtttctactgaatgcatgtcgcattcgcaccattgtaaagtcaagtagtaagtcgaaccatcctaagtcagggactgtctgtatatatctgcattttttagtgattgttctactattacagtgtaaatatataacttatgacagtttaataagttatcagcaatttagcactttacttccattaggttcctttagcttacctactaatgtaactatcttaagtaatagtaattcctcttcaaaaattgagcgctatgttgcaagatgtaatttttcttttccttttttttgagaccaagtctcactctgtcacccacgctggagtgctgtgatgcgatctcggctctctgcaacctctgcctcccgggttcaagcaattaactgcctcagcttccctagtaatggattacaggcgcccgccaccacgcctggctaatttttgtatttttagtagagacggggtttcaccatcttggccaggttggtcttgaactcttgacctcatgatccacccgcctcggccccccaaagtgctggggttacaggtgtgagccactgcacccggccacaagatgtaatttttactttatctctcacacgtattttacaaaacgtcatgagaaacattgtctcttgaccttttttttttttttttttttttaaagagacagagtctcactctgtcacccaggctggagtgcagtggcacgatcttggctcactgcaacctccgcctcctgggttcaagcgattctcctgcctcagcctcctgagtagctgggattacaggtgtgcgccgccacacccagctaattttgtatttttagtagagacggggtttcaccatgttgctcaggctggtctcaaactcctgaccttgtgatccgccaaccttggcctgtcgacctctttacccattccattgttcattcttctttcttgaaatcccaaaccttctattaacatttcttttcagttatacactgaactttactgtagcctttcttctagagtaacaaatgttctttgttttccttcctctaaagatgtctttatgtttccttcattcccaaagaatatttttgtggaatataagattcagagttggcagttgttttcttttagacttcagagatgtatctctctgttctgtacattattgtttaatataagaaacctactagcattcaaataatcattccctattttacaatgcatcagttctgtcaagcttcattcaaagtgtttttcattgtctctagtgttcagaagtttggctgtgatgtgcgtggcatggaagtttttgggtgtattctatttggcgctccctggtgcttgcccagctttttgatctgtaggattatgccttttgcaaaatttggggaactttcaactattatttcttcaaatattttttcaccccccagtcttgtcttttttagggacttcaataacatgagtggcagatcttgttttacactcccatgggtccttcaggctctcatcttttttctttttccagtctattttctgtcttgttaatattgattaatttttattgaccttccatggtcctcactgattgttttctttgtcatacctaatctgttgagtttgtgcagtgagttttcattttggttttgtattttccagttgtttaatttccattgggtgggttcttttgtacaccttctgtttctttgcttattttttaacgccaaagaaagactctcagagaatagacaactatattccaaagtcatggttctctggtggtttgtcttgacatttgaatagaaatgttaaactatctgggggaatagaaagcccacagtcttctgagttgtgctacaccaatatttctatgaacagatcttacaactgagagtgatctgcagatttttcagagtcatgttctccatggaatgtttgtaaaattccctagctctctgcactgagctgagatcgtgccactgcactccagcctgggcaacagagcgagactccatctcaaaaaaaaaaaaaattctctagctctctatgccttgttgtatcctcaggaaggagtcacctctcttccaggatcactcttgccttttgttattggacacattttcctacctcctgcccagtcttttttaggctctctgtcatacttcctcgcctagtctttaacttgtctctgataaccagatttttcccccataatctgtatctgtattcaagtctctatcctcatccccaaatggatttcaccccgcttgtccatcagtctctgcccatttcttctgtctcccacagacatggtctgtgtagttgttctgcacactacccgtcctcgccccttctcatttccctcactccacggacagctacaggagggcttccatcatttgtcctcttacttccttgttagaactttgtgctgctgaccaccactctgaaccaaaacttctttcttggttcttgaaagttgctgtctttctcctccagagggtctgtgtcttccttccaactcttaaacatttttgtttcccagaatccatcattggccattgctttttcacttgccatgagctctgtgaatgagatggttcctgctgaagacatttactttcaatgatctacagaatttcccaaatctatgtctccagactggatgtttctcacgtctgtggcccactgggcatcttctgcactttctctgcatttgtaaacactgagcctgtatgcgtgtctatgtggccatggccctggccgtggggatgcacccataattataatgagagcaggtgaatgtcatgtggctatgtatgagacattgttgtgaatgttttacatgcatcagctctttcaacatttacagcatctgtgtgtggtaggtaatgttgtttccttcattttgcagagcagaatatagataggctcaggttaagaatttgcccaaggttacacagttatgaagtttggatttaggaatgggaggccacgtagactggcttcagaattcatgtctttaaccactttattgcttctcatgttggggggtttgttttctggtcactatttttactaaagttgattcaacaatgctataatctgttactctcattcgacaatacatcttgactgtttcttcaacttgaggaaggtaaaccaaagccactctttaatgggtgcaaatatctgttgtaactatgtagaagatacagtgtctgggtttgaggacaggggagtgggaaaactgagtagggaagcggtaagacatgcatctggctttaggagtgtttgaagtgcctaaagatcagggtgaatttcccaaatttgaatcttgttgcccaagccacattgcaaccacctctttttctcttacctcgtccccacatccaggcactgccccattctgttcattccacctttttttttagtagaccctccatatatgtgtgtgttttggtgaatggccacacacagcaaagttatttttattgcaattttgttgttgttgtttgagacacagagtctcatactctgccacccagactgaagtgcagtggtgcgatctcagttcactgcaacctccatccccccatgttcaagcaattctcctgcctcagcctcccaagtagctgggattacaggcatgggccaccatgcccggctaatttttgtattttttgtagacacggggtttcaccatgttggccaggctggtctcacactcctgacctcaggtgatccacccgcctcggcctcccgaagtgctggcattacaggcatgagccaccacacccagcctttattgcaatttttggttccctcacagaatgtttaccatgaagctgtgcgtataggtggtaccatgtatgacataccttgacctcaaagataatctacctgggctttttttgtttgtttgttttgagatggagtctcactctgtcacccatgctggtgtgcagtggcgtgatcttggctcacagcagcctctgcctcccgggttcaagcgattctcctgcctcagcctcctgagtagctgggactacaggtgcctgcgaccacacccagctaatttttgtatttttagtagtagtgggatttcaccatgttggccaggatggcctccacctcctgacttcatgatccacccgcctcggcctcccaaagtgctgggattacaggcgtgagccaccgcacctggcctacctgggcttttttggacagatgtacatgattttagaaattgttatgaatgactgtcttgggatcctcaagaacacccccaggtttgacgatttgctgagaagactcaggtctcagcattctgtcatactcaacagctatgatttactgcagcaaaaaaatacaaagcaaatagtaaagggaaaaagccaaaattcagagaaaaccaggcacaatcttctgagtcttgtttcagtgaagtcacaggatgtgccttatttaagttccatctggtacttatgacaacacatgctatatgtccactgggaagcttattagagactcagtgccagggtttttattgggcatgttttctagcacatcccacaattctggacttccagaaggttagcaggggttcagcttttcagctgaaaacgttatccccctttcagctggggggaaaaaaaggcaccgaaaaacagggcagtgagctactcctgttttgggtgggtggagcagtagtaagcctcccaaaatctaaggtcccacactccagcaagggtgaaccttgcaaactcaaaaggatagcagtctccaacctgctgttttatacagtgacttaagtggtactaaaatgctatataagtcaaatttacgtaacattaagcaaataattttttttcagcaaaaaaataatggtcatgactttgtggtgaaggcttatgtaatgattgtaataaattcaggtggctcacgcctgtgataccagcacttttgggaggctgaggcgggtggatcacttgaggtcaggagtttgagaccagcctagccaacatggtgaaatcccatctctacaaaaatgaaaaattagccgggcgtagtggtacatgcatttagtcctagctacttgggaggctgaggcaggaaaatcgcttgaacctgggaggcagaggttgcagtgagccgagatcatgccactgcactccagcctgggtgacagagtgagactgtgtctcaaaaaaaaaaaaaaaaaaaaaatgcctcagttttgttaagaggaaaaagcaaatcctaagttacagtggaacttatgaacaccctagcctagagatttaatttagtgatgaaaaggtacagagagagtctttcaagaaaggacctagtctgctcgcgttctctctctctctctctctatatatatatatgtatatgtgtgtgtacatatggaccacttcaagctacacacacacacacacatatacacgtgtatgaatatatatatatggctataagtggtgcgacttgcaggtactccctttgttcacctttgtaaagatgttattgccagttcagtgtgtatttctatagtatatatgtaaacaatttgtcatccttttgttgctgcttttgaaactagttcatggcttcagtgggggagagatttaaataatatgggtttataatttctgcattattaaatgcagataacttgtgattaaagagtatgttattggaa

SEQ ID NO: 201939 - DNA, 2078 bp, Homo sapiens
  Payload ID: 19838
  Gene Name: zinc finger protein 264
  Uniprot ID: O43296
  ENST ID: ENST00000536056
  CDS Start-End: 57-1940
acgccgttgccaccgaggctcctctgtcccagctctgcggcccagggggtgacgtgatggcggcagcggtgctgacggaccgggcccaggtgtctgtgacctttgatgatgtggctgtgactttcaccaaggaggagtgggggcagctggacctagctcagcggaccctgtaccaggaggtgatgctggaaaactgtgggctcctggtgtctctggggtgtcctgttcccaaagctgagctgatctgccacctagagcatgggcaggagccatggaccaggaaggaagacctctcccaagacacctgtccaggcgacaaaggaaaacctaagaccacagaacctaccacttgtgagccagccttgtcagagggaatctcacttcagggacaagtgacacaaggaaactcagtggactcacagttggggcaagccgaggatcaggatgggctatcagaaatgcaggaaggacacttcagaccaggaatagatccccaggagaagtctcctgggaagatgagccctgaatgtgatggtttagggacagctgatggtgtgtgttcaaggattggacaggagcaagtctctccaggagatagagtccgtagccataactcatgtgagtcaggtaaagatcccatgattcaggaagaggaaaataactttaaatgcagtgaatgtggaaaagtatttaacaagaaacacctccttgctggacatgagaaaattcactctggagttaagccctatgaatgcacagaatgtgggaaaacctttattaagagcacacatctcctgcaacatcacatgatccacactggggagaggccctatgagtgcatggagtgtggaaaggccttcaaccgcaagtcataccttacccagcaccagcggattcacagtggagagaagccttacaagtgcaatgaatgcggaaaggccttcacccaccgctccaattttgtcttgcataacaggagacacactggagaaaaatcctttgtgtgcacagaatgtggccaagtctttcgacataggccaggctttctccggcactatgttgtccacagtggtgagaatccctatgagtgcttggagtgtggcaaggtcttcaaacacaggtcatatctcatgtggcaccagcagactcataccggggagaagccctatgagtgcagtgaatgtgggaaggtcttcttggagagtgcagccctgattcaccactatgtcatccacactggagagaagccctttgagtgcctcgagtgtgggaaggctttcaaccaccgatcctacctcaagaggcaccagcggattcacactggggagaagcccttcgtgtgcagtgaatgtggaaaggccttcacccactgctctacttttatcttgcataaaagggcccacactggagaaaagcctttcgagtgcaaagagtgtgggaaagcctttagcaatcggaaggacctcattcgccacttcagcatccacactggagagaagccctatgagtgcgtggagtgtggaaaggccttcacccgcatgtcgggcctcacgaggcacaagcggattcatagtggagagaagccctatgaatgtgttgagtgtgggaaatcgttttgctggagcacaaacctcattcgacatgccattatccacactggagagaagccctataaatgtagtgaatgtggaaaggccttcagtcgcagctcgtccctcactcagcatcaaaggatgcatactgggaaaaatcccatcagtgtaacagatgtgggaagaccttttacaagtggacaaacctcagttacccttcgagaacttcttttagggaaggactttttgaatgtaaccactgaggcaaatattttgccagaggaaacatcttcctctgcatctgatcaaccataccaaagagaaaccccacaagtgtcttcactgtgagaaaaccttctgttgctgaatattacttgtcatctgaagagtcatattagaaattcgttcagtctagagccttattctccatctgataatttatcctggagagagacccagtggttattgtgcacataggagaacctt

SEQ ID NO: 201940 - DNA, 359 bp, Homo sapiens
  Payload ID: 19838
  Gene Name: zinc finger protein 264
  ENST ID: ENST00000594126
  CDS Start-End: 243-359
ttttcttctgcacttctgtctggagagccccgcggtctccaggggcggcgccctgggtctggaacgcggttgccaccgaggaggcggcggccctgcgtctggaacgccgttgccaccgaggaggcggcggccccgagcgcgcctggaagccccgggcaaccggccagggtcgggcacaggtggggtccgtcaggccgcccggggctcctctgtcccagctctgcggcccagggggtgacgtgatggcggcagcggtgctgacggaccgggcccaggtgtctgtgacctttgatgatgtggctgtgactttcaccaaggaggagtgggggcagctggacctagctcagcggaccctgtac

SEQ ID NO: 201941 - DNA, 681 bp, Homo sapiens
  Payload ID: 19838
  Gene Name: zinc finger protein 264
  ENST ID: ENST00000597447
  CDS Start-End: 392-681
gagaggtctgtagccactgagggccccggtcggggccgctttgcaggtccctagtcaggaccgagcaggggagtaggataggaatccccgccgcacctttgtacgagcctgaccccttccgtgggtttgttcctgggtcgccgtcaagctgcggtctctcctcccccgcccttcagccccgcggtctccaggggcggcgccctgggtctggaacgcggttgccaccgaggaggcggcggccctgcgtctggaacgccgttgccaccgaggaggcggcggccccgagcgcgcctggaagccccgggcaaccggccagggtcgggcacaggtggggtccgtcaggccgcccggggctcctctgtcccagctctgcggcccagggggtgacgtgatggcggcagcggtgctgacggaccgggcccaggtgtctgtgacctttgatgatgtggctgtgactttcaccaaggaggagtgggggcagctggacctagctcagcggaccctgtaccaggaggtgatgctggaaaactgtgggctcctggtgtctctgggcgacaaaggaaaacctaagaccacagaacctaccacttgtgagccagccttgtcagagggaatctcacttcagggacaagtgacacaaggaaactcagtggactcacagttggggcaagccgaggatca

SEQ ID NO: 201942 - DNA, 774 bp, Homo sapiens
  Payload ID: 19838
  Gene Name: zinc finger protein 264
  ENST ID: ENST00000600531
  CDS Start-End: 414-668
ttttcttctgcacttctgtctggagaggtctgtagccactgagggccccggtcggggccgctttgcaggtccctagtcaggaccgagcaggggagtaggataggaatccccgccgcacctttgtacgagcctgaccccttccgtgggtttgttcctgggtcgccgtcaagctgcggtctctcctcccccgcccttcagccccgcggtctccaggggcggcgccctgggtctggaacgcggttgccaccgaggaggcggcggccctgcgtctggaacgccgttgccaccgaggaggcggcggccccgagcgcgcctggaagccccgggcaaccggccagggtcgggcacaggtggggtccgtcaggccgcccggggctcctctgtcccagctctgcggcccagggggtgacgtgatggcggcagcggtgctgacggaccgggcccaggtgtctgtgacctttgatgatgtggctgtgactttcaccaaggaggagtgggggcagctggacctagctcagcggaccctgtaccaggaggtgatgctggaaaactgtgggctcctggtgtctctggcacctttacagacacacccaggatcaatacgttgcatccttcaatccaatcaagttgacacattaataaaaatcccagagcacactgagcattgaatactttctctttaaatttaacgactgttactggtgggaagtattattgtattgatccagaaataaaggctcagagaaatgaaatgatgtttttgaggtaacagct

SEQ ID NO: 201943 - DNA, 705 bp, Homo sapiens
  Payload ID: 19838
  Gene Name: zinc finger protein 264
  ENST ID: ENST00000599653
  CDS Start-End: 378-572
cactgagggccccggtcggggccgctttgcaggtccctagtcaggaccgagcaggggagtaggataggaatccccgccgcacctttgtacgagcctgaccccttccgtgggtttgttcctgggtcgccgtcaagctgcggtctctcctcccccgcccttcagccccgcggtctccaggggcggcgccctgggtctggaacgcggttgccaccgaggaggcggcggccctgcgtctggaacgccgttgccaccgaggaggcggcggccccgagcgcgcctggaagccccgggcaaccggccagggtcgggcacaggtggggtccgtcaggccgcccggggctcctctgtcccagctctgcggcccagggggtgacgtgatggcggcagcggtgctgacggaccgggcccaggtgtctgtgacctttgatgatgtggctgtgactttcaccaaggaggagtgggggcagctggacctagctcagcggaccctgtaccaggaggtgatgctggaaaactgtgggctcctggtgtctctgggtaaggccttccttccccctccaccatgcaggtgacctgccacttccttcattccatcttctgactccaggcctggctgcacaagaaggcctctagaatctaccttgcctctttcccacagctttagtcattttccacagtaacctcttcctatctggtctcctatat

SEQ ID NO: 201944 - DNA, 4401 bp, Homo sapiens
  Payload ID: 19839
  Gene Name: zinc finger protein 266
  Uniprot ID: Q14584
  ENST ID: ENST00000592904
  CDS Start-End: 2078-3727
gtttcactctgttgccaggctggagtgccgtggtgtgatctcggctcactgcaacctctgtctctcaggttcaagcgattctcctgcctcagcctcctcagtagctgggatttataggcatgcactaccatgcccagctaatttttgtgttttcagtagagatggggtttcaccacattgcccaggctggtcttgaactcctgacctcaactgacacacctgccttggtttcccaaagtgctgggattacaggcgtgagccaccgcccccggcctgattttttctttatcaaataggggtcattggtatctactgtaaagggtggttatgataattaagcgagtatataaagctgctagtgtgacttctgacacacactgttcctcagtagtggaagttggtcttcctactatttgtagtgtacaccgttttcagtgtcttttcctctatatgctctgcagagagagtgctaatgatgtctgatgactgataagtaatgcttgttgattaatgatttatacaaacaggataccgttaaccctggataaagagaatggaggttacctctgtccgtgtagattcctaagctgtcctggagtgatccttggagtaaaggaaaggtgctttgaagcacattcagccatcagccctgtgggatggcagccactgatttgtcctatggtaagtcctgtttctgttcattttcagataccctgctttaggtgtccccccccacacagtatggagtccagtggcctgtgcctgatcattcacgctgcagcttcatttctgaggtgctgatgtgggctagggaatgctttgttcctttttttttttttttttttgagacagagtcttgctctgttgctcaggctggagtgcagtggcatgatctcagctcattgccacctctgccccccaggttcaagcgattttcctgcctcagcctcccgagtagctgggattacaggcgtgtgccaccacacctggctaattttttgtaattttagtagagatggagtttcaccatgttggccaggatggtctcgaactcctaacctcaagtgatctgcctgcctcgacctcccaaagtgctaggattacaggtgtgagccatcacgcccagccagaatacttcatcagccccctgctgtgtgtgctttgggaagaggtgctgtgtctttccagggaagagaagttttccttatctgtaaaataagactgttacccttttcccagtgggcagcatggctgactatccttttttttgcctttacgtgaggcagtagtgccctggaattgatagcggtggtgtgtatgtgtgtgttttcttgagtgtgcgggagtatataggaatctcacagtaggatggaatgactttggggtacgtgaatgtgggaattatcgtcagccctgggttctcatgccttctttcttttccatgaggtctttacagggacccagtctgccttcaagaaaagacagaagtagaaagggtggtggctgactgtctgacaaattgttatcaggtatgcaggaagtatatccttctccaaaatatcatacttgcatcaccaggtagacacatttccttctacacagaattatcttcagagcttcttaaagcaaataaagcctccttcaaggactgagtccctagtcgaattcccggaaggagtggagcctgtcatattggtgagggtttgccttgaatgtcatcccagtatttcaatattgattaattagtcttccctcatggtcccaactgcatagtttttattttgttgagtgttctgacacatggtaagggacatgaaagtatcctttgagataatctttccattcatcagtgtttatctagcatctgctcaagagtgtgctgcagtggagggaaatcagatgacctcccagtctggttgtgttacatacaatcatgtgtaagaagtgccattcaagccgtgtcactggaggggactgacagtgagattcagtgacttttgatgatctggctgtggacttcaccccagaagaatggactttactggacccaactcagagaaacctctacagagatgtgatgctggagaactacaagaatttggccacagtaggatatcagctcttcaaacccagtctgatctcttggctggaacaagaagagtctaggacagtgcagagaggtgatttccaagcttcagaatggaaagtgcaacttaaaaccaaagagttagcccttcagcaggatgttttgggggagccaacctccagtgggattcaaatgataggaagccacaacggaggggaggtcagtgatgttaagcaatgtggagatgtctccagtgaacactcatgccttaagacacatgtgagaactcaaaatagtgagaacacatttgagtgttatctgtatggagtagacttccttactctgcacaagaaaacctctactggagagcaacgttctgtatttagtcagtgtggaaaagccttcagcctgaacccagatgttgtttgccagagaacgtgcacaggagagaaagcttttgattgcagtgactctgggaaatccttcattaatcattcacaccttcagggacatttaagaactcacaatggagaaagtctccatgaatggaaggaatgtgggagaggctttattcactccacagaccttgctgtgcgtatacaaactcacaggtcagaaaaaccctacaaatgtaaggaatgtggaaaaggatttagatattctgcataccttaatattcacatgggaacccacactggagacaatccctatgagtgtaaggagtgtgggaaagccttcaccaggtcttgtcaacttactcagcacagaaaaactcacactggagagaaaccttataaatgtaaggattgtgggagagccttcactgtttcctcttgcttaagtcaacatatgaaaatccatgtgggtgagaagccttatgaatgcaaggaatgtgggatagccttcactagatcttctcaacttactgaacatttaaaaactcacactgcaaaggatccctttgaatgtaagatatgtggaaaatcctttagaaattcctcatgcctcagtgatcactttcgaattcacactggaataaaaccctataaatgtaaggattgtgggaaagccttcactcagaactcagaccttactaagcatgcacgaactcacagtggagagaggccctatgaatgtaaggaatgtggaaaggcctttgccagatcctctcgccttagtgaacatacaagaactcacactggagagaagccttttgaatgtgtcaaatgtgggaaagcctttgctatttcttcaaatcttagtggacatttgagaattcacactggagagaagccctttgagtgcctggaatgtggtaaagcatttacgcattcctccagtcttaataatcacatgcggacccacagcgccaaaaaaccattcacgtgtatggaatgtggcaaagcttttaagtttcccacgtgtgttaaccttcacatgcggatccacactggagaaaaaccctacaaatgtaaacagtgtgggaaatccttcagttactccaattcgtttcagttacatgaacgaactcacactggagagaaaccctatgaatgtaaggagtgcgggaaagccttcagttcttccagttcctttcgaaatcatgaaagaaggcatgcggatgagagactgtcagcataaggaatgtgggaaaacctaaaggtgtccctgttctctctgaagacatgaaaactcactggggagaaaccctatgaatgtaaaaatgtggaagcaactttgtatctcaggtcttaatgaacacatatgaattcacagtggagaagaccctgcatcagggaatgtggaaatgactttgctgaattctcaagccttaccaaacacatcagaaatctcactggagagaaactgtatgaatgtagagaatctgggaatacctttctgaatcccacaaaccttaatgtgtgtatgtgaactcacattggagagaaaccctgcaatttaaatggtatggtctggatgatgccccactccatatttgtaagccctaagtcctagttccttacactataactgtatttggacatagggttttcaaacaggtgagtaacttcaaatgaggttgttgggttcgatccctaatctgacatcactggtgtccctataagggaaactgaaggaaggatacacatggagaagactgtgtggatccaccagaagatggccatctacaagccaaggacagagacctggaacagatgctttcattatggcctccagaggaaaccaaccctgtctccaccttgatattgcacttccaggctccagaactgtgaggcaataaatttctcttggtt

SEQ ID NO: 201945 - DNA, 3293 bp, Homo sapiens
  Payload ID: 19839
  Gene Name: zinc finger protein 266
  Uniprot ID: Q14584
  ENST ID: ENST00000588933
  CDS Start-End: 967-2616
ggagccgtttcgggatctgtcaaacaacgagttttcgtcgttcgaatcaggttgactggtccttcatccccccaatctcccgtacctggcgagtccagctcgtcgcggcctgtacctccccacagagcttcaaaacgggcttttaggaagaaggaatggaggctttgaagcaatgctaagaaaagagtgatatgcaagctgagaccaaaaatatggtatgatttagccatactgaaggggaaggaaataagagctgggcaaagcattctgtgaattggctgactccacttctatggtgagagagaggagtgcatcaaagattactcccaggtttgacagagataccgttaaccctggataaagagaatggaggttacctctgtccgtgtagattcctaagctgtcctggagtgatccttggagtaaaggaaaggtgctttgaagcacattcagccatcagccctgtgggatggcagccactgatttgtcctatggtctttacagggacccagtctgccttcaagaaaagacagaagtagaaagggtggtggctgactgtctgacaaattgttatcaggtatgcaggaagtatatccttctccaaaatatcatacttgcatcaccaggtagacacatttccttctacacagaattatcttcagagcttcttaaagcaaataaagcctccttcaaggactgagtccctagtcgaattcccggaaggagtggagcctgtcatattgtgtttatctagcatctgctcaagagtgtgctgcagtggagggaaatcagatgacctcccagtctggttgtgttacatacaatcatgtgtaagaagtgccattcaagccgtgtcactggaggggactgacagattcagtgacttttgatgatctggctgtggacttcaccccagaagaatggactttactggacccaactcagagaaacctctacagagatgtgatgctggagaactacaagaatttggccacagtaggatatcagctcttcaaacccagtctgatctcttggctggaacaagaagagtctaggacagtgcagagaggtgatttccaagcttcagaatggaaagtgcaacttaaaaccaaagagttagcccttcagcaggatgttttgggggagccaacctccagtgggattcaaatgataggaagccacaacggaggggaggtcagtgatgttaagcaatgtggagatgtctccagtgaacactcatgccttaagacacatgtgagaactcaaaatagtgagaacacatttgagtgttatctgtatggagtagacttccttactctgcacaagaaaacctctactggagagcaacgttctgtatttagtcagtgtggaaaagccttcagcctgaacccagatgttgtttgccagagaacgtgcacaggagagaaagcttttgattgcagtgactctgggaaatccttcattaatcattcacaccttcagggacatttaagaactcacaatggagaaagtctccatgaatggaaggaatgtgggagaggctttattcactccacagaccttgctgtgcgtatacaaactcacaggtcagaaaaaccctacaaatgtaaggaatgtggaaaaggatttagatattctgcataccttaatattcacatgggaacccacactggagacaatccctatgagtgtaaggagtgtgggaaagccttcaccaggtcttgtcaacttactcagcacagaaaaactcacactggagagaaaccttataaatgtaaggattgtgggagagccttcactgtttcctcttgcttaagtcaacatatgaaaatccatgtgggtgagaagccttatgaatgcaaggaatgtgggatagccttcactagatcttctcaacttactgaacatttaaaaactcacactgcaaaggatccctttgaatgtaagatatgtggaaaatcctttagaaattcctcatgcctcagtgatcactttcgaattcacactggaataaaaccctataaatgtaaggattgtgggaaagccttcactcagaactcagaccttactaagcatgcacgaactcacagtggagagaggccctatgaatgtaaggaatgtggaaaggcctttgccagatcctctcgccttagtgaacatacaagaactcacactggagagaagccttttgaatgtgtcaaatgtgggaaagcctttgctatttcttcaaatcttagtggacatttgagaattcacactggagagaagccctttgagtgcctggaatgtggtaaagcatttacgcattcctccagtcttaataatcacatgcggacccacagcgccaaaaaaccattcacgtgtatggaatgtggcaaagcttttaagtttcccacgtgtgttaaccttcacatgcggatccacactggagaaaaaccctacaaatgtaaacagtgtgggaaatccttcagttactccaattcgtttcagttacatgaacgaactcacactggagagaaaccctatgaatgtaaggagtgcgggaaagccttcagttcttccagttcctttcgaaatcatgaaagaaggcatgcggatgagagactgtcagcataaggaatgtgggaaaacctaaaggtgtccctgttctctctgaagacatgaaaactcactggggagaaaccctatgaatgtaaaaatgtggaagcaactttgtatctcaggtcttaatgaacacatatgaattcacagtggagaagaccctgcatcagggaatgtggaaatgactttgctgaattctcaagccttaccaaacacatcagaaatctcactggagagaaactgtatgaatgtagagaatctgggaatacctttctgaatcccacaaaccttaatgtgtgtatgtgaactcacattggagagaaaccctgcaatttaaatggtatggtctggatgatgccccactccatatttgtaagccctaagtcctagttccttacactataactgtatttggacatagggttttcaaacaggtgagtaacttcaaatgaggttgttgggttcgatccctaatctgacatcactggtgtccctataagggaaactgaaggaaggatacacatggagaagactgtgtggatccaccagaagatggccatctacaagccaaggacagagacctggaacagatgctttcattatggcctccagaggaaaccaaccctgtctccaccttgatattgcacttccaggctccagaactgtgaggcaataaatttctcttggttaaa

SEQ ID NO: 201946 - DNA, 3317 bp, Homo sapiens
  Payload ID: 19839
  Gene Name: zinc finger protein 266
  Uniprot ID: Q14584
  ENST ID: ENST00000590306
  CDS Start-End: 997-2646
aaacaacgagttttcgtcgttcgaatcaggttgactggtccttcatccccccaatctcccgtacctggcgagtccagctcgtcgcggcaatgctaagaaaagagtgatatgcaagctgagaccaaaaatatggtatgatttagccatactgaaggggaaggaaataagagctgggcaaagcattctgtgaattggctgactccacttctatggtgagagagaggagtgcatcaaagattactcccagtagagatggtttcagcatgttggccagtctggtctcagactcctgacctcaagtgatccacccacctcggcctcccaaaatgctgggattacaggtataagccactgtgcctggccaaagataccgttaaccctggataaagagaatggaggttacctctgtccgtgtagattcctaagctgtcctggagtgatccttggagtaaaggaaaggtgctttgaagcacattcagccatcagccctgtgggatggcagccactgatttgtcctatggtctttacagggacccagtctgccttcaagaaaagacagaagtagaaagggtggtggctgactgtctgacaaattgttatcaggtatgcaggaagtatatccttctccaaaatatcatacttgcatcaccaggtagacacatttccttctacacagaattatcttcagagcttcttaaagcaaataaagcctccttcaaggactgagtccctagtcgaattcccggaaggagtggagcctgtcatattgtgtttatctagcatctgctcaagagtgtgctgcagtggagggaaatcagatgacctcccagtctggttgtgttacatacaatcatgtgtaagaagtgccattcaagccgtgtcactggaggggactgacagtgagattcagtgacttttgatgatctggctgtggacttcaccccagaagaatggactttactggacccaactcagagaaacctctacagagatgtgatgctggagaactacaagaatttggccacagtaggatatcagctcttcaaacccagtctgatctcttggctggaacaagaagagtctaggacagtgcagagaggtgatttccaagcttcagaatggaaagtgcaacttaaaaccaaagagttagcccttcagcaggatgttttgggggagccaacctccagtgggattcaaatgataggaagccacaacggaggggaggtcagtgatgttaagcaatgtggagatgtctccagtgaacactcatgccttaagacacatgtgagaactcaaaatagtgagaacacatttgagtgttatctgtatggagtagacttccttactctgcacaagaaaacctctactggagagcaacgttctgtatttagtcagtgtggaaaagccttcagcctgaacccagatgttgtttgccagagaacgtgcacaggagagaaagcttttgattgcagtgactctgggaaatccttcattaatcattcacaccttcagggacatttaagaactcacaatggagaaagtctccatgaatggaaggaatgtgggagaggctttattcactccacagaccttgctgtgcgtatacaaactcacaggtcagaaaaaccctacaaatgtaaggaatgtggaaaaggatttagatattctgcataccttaatattcacatgggaacccacactggagacaatccctatgagtgtaaggagtgtgggaaagccttcaccaggtcttgtcaacttactcagcacagaaaaactcacactggagagaaaccttataaatgtaaggattgtgggagagccttcactgtttcctcttgcttaagtcaacatatgaaaatccatgtgggtgagaagccttatgaatgcaaggaatgtgggatagccttcactagatcttctcaacttactgaacatttaaaaactcacactgcaaaggatccctttgaatgtaagatatgtggaaaatcctttagaaattcctcatgcctcagtgatcactttcgaattcacactggaataaaaccctataaatgtaaggattgtgggaaagccttcactcagaactcagaccttactaagcatgcacgaactcacagtggagagaggccctatgaatgtaaggaatgtggaaaggcctttgccagatcctctcgccttagtgaacatacaagaactcacactggagagaagccttttgaatgtgtcaaatgtgggaaagcctttgctatttcttcaaatcttagtggacatttgagaattcacactggagagaagccctttgagtgcctggaatgtggtaaagcatttacgcattcctccagtcttaataatcacatgcggacccacagcgccaaaaaaccattcacgtgtatggaatgtggcaaagcttttaagtttcccacgtgtgttaaccttcacatgcggatccacactggagaaaaaccctacaaatgtaaacagtgtgggaaatccttcagttactccaattcgtttcagttacatgaacgaactcacactggagagaaaccctatgaatgtaaggagtgcgggaaagccttcagttcttccagttcctttcgaaatcatgaaagaaggcatgcggatgagagactgtcagcataaggaatgtgggaaaacctaaaggtgtccctgttctctctgaagacatgaaaactcactggggagaaaccctatgaatgtaaaaatgtggaagcaactttgtatctcaggtcttaatgaacacatatgaattcacagtggagaagaccctgcatcagggaatgtggaaatgactttgctgaattctcaagccttaccaaacacatcagaaatctcactggagagaaactgtatgaatgtagagaatctgggaatacctttctgaatcccacaaaccttaatgtgtgtatgtgaactcacattggagagaaaccctgcaatttaaatggtatggtctggatgatgccccactccatatttgtaagccctaagtcctagttccttacactataactgtatttggacatagggttttcaaacaggtgagtaacttcaaatgaggttgttgggttcgatccctaatctgacatcactggtgtccctataagggaaactgaaggaaggatacacatggagaagactgtgtggatccaccagaagatggccatctacaagccaaggacagagacctggaacagatgctttcattatggcctccagaggaaaccaaccctgtctccaccttgatattgcacttccaggctccagaactgtgaggcaataaatttctcttg

SEQ ID NO: 201947 - DNA, 3100 bp, Homo sapiens
  Payload ID: 19839
  Gene Name: zinc finger protein 266
  Uniprot ID: Q14584
  ENST ID: ENST00000592292
  CDS Start-End: 804-2453
cagctttggcgaggtcggatgacgggtgggagccagcggtggaaggggtggcgaaagtaccggtttgccccaggccgccgaggggcctccttagagagaccttgcctgctccgctcgcgtccgccggggccgcgcgggtcctcctggcgccgccaggttcaaaaagccactcgagttgtcactgcgacggccctgggccaggagccgtttcgggatctgtcaaacaacgagttttcgtcgttcgaatcaggttgactggtccttcatccccccaatctcccgtacctggcgagtccagctcgtcgcggataccgttaaccctggataaagagaatggaggttacctctgtccgtgtagattcctaagctgtcctggagtgatccttggagtaaaggaaaggtgctttgaagcacattcagccatcagccctgtgggatggcagccactgatttgtcctatggtctttacagggacccagtctgccttcaagaaaagacagaagtagaaagggtggtggctgactgtctgacaaattgttatcaggtatgcaggaagtatatccttctccaaaatatcatacttgcatcaccaggtagacacatttccttctacacagaattatcttcagagcttcttaaagcaaataaagcctccttcaaggactgagtccctagtcgaattcccggaaggagtggagcctgtcatattggattcagtgacttttgatgatctggctgtggacttcaccccagaagaatggactttactggacccaactcagagaaacctctacagagatgtgatgctggagaactacaagaatttggccacagtaggatatcagctcttcaaacccagtctgatctcttggctggaacaagaagagtctaggacagtgcagagaggtgatttccaagcttcagaatggaaagtgcaacttaaaaccaaagagttagcccttcagcaggatgttttgggggagccaacctccagtgggattcaaatgataggaagccacaacggaggggaggtcagtgatgttaagcaatgtggagatgtctccagtgaacactcatgccttaagacacatgtgagaactcaaaatagtgagaacacatttgagtgttatctgtatggagtagacttccttactctgcacaagaaaacctctactggagagcaacgttctgtatttagtcagtgtggaaaagccttcagcctgaacccagatgttgtttgccagagaacgtgcacaggagagaaagcttttgattgcagtgactctgggaaatccttcattaatcattcacaccttcagggacatttaagaactcacaatggagaaagtctccatgaatggaaggaatgtgggagaggctttattcactccacagaccttgctgtgcgtatacaaactcacaggtcagaaaaaccctacaaatgtaaggaatgtggaaaaggatttagatattctgcataccttaatattcacatgggaacccacactggagacaatccctatgagtgtaaggagtgtgggaaagccttcaccaggtcttgtcaacttactcagcacagaaaaactcacactggagagaaaccttataaatgtaaggattgtgggagagccttcactgtttcctcttgcttaagtcaacatatgaaaatccatgtgggtgagaagccttatgaatgcaaggaatgtgggatagccttcactagatcttctcaacttactgaacatttaaaaactcacactgcaaaggatccctttgaatgtaagatatgtggaaaatcctttagaaattcctcatgcctcagtgatcactttcgaattcacactggaataaaaccctataaatgtaaggattgtgggaaagccttcactcagaactcagaccttactaagcatgcacgaactcacagtggagagaggccctatgaatgtaaggaatgtggaaaggcctttgccagatcctctcgccttagtgaacatacaagaactcacactggagagaagccttttgaatgtgtcaaatgtgggaaagcctttgctatttcttcaaatcttagtggacatttgagaattcacactggagagaagccctttgagtgcctggaatgtggtaaagcatttacgcattcctccagtcttaataatcacatgcggacccacagcgccaaaaaaccattcacgtgtatggaatgtggcaaagcttttaagtttcccacgtgtgttaaccttcacatgcggatccacactggagaaaaaccctacaaatgtaaacagtgtgggaaatccttcagttactccaattcgtttcagttacatgaacgaactcacactggagagaaaccctatgaatgtaaggagtgcgggaaagccttcagttcttccagttcctttcgaaatcatgaaagaaggcatgcggatgagagactgtcagcataaggaatgtgggaaaacctaaaggtgtccctgttctctctgaagacatgaaaactcactggggagaaaccctatgaatgtaaaaatgtggaagcaactttgtatctcaggtcttaatgaacacatatgaattcacagtggagaagaccctgcatcagggaatgtggaaatgactttgctgaattctcaagccttaccaaacacatcagaaatctcactggagagaaactgtatgaatgtagagaatctgggaatacctttctgaatcccacaaaccttaatgtgtgtatgtgaactcacattggagagaaaccctgcaatttaaatggtatggtctggatgatgccccactccatatttgtaagccctaagtcctagttccttacactataactgtatttggacatagggttttcaaacaggtgagtaacttcaaatgaggttgttgggttcgatccctaatctgacatcactggtgtccctataagggaaactgaaggaaggatacacatggagaagactgtgtggatccaccagaagatggccatctacaagccaaggacagagacctggaacagatgctttcattatggcctccagaggaaaccaaccctgtctccaccttgatattgcacttccaggctccagaa

SEQ ID NO: 201948 - DNA, 760 bp, Homo sapiens
  Payload ID: 19839
  Gene Name: zinc finger protein 266
  ENST ID: ENST00000591213
  CDS Start-End: 544-760
attcccggaaggagtggagcctgtcatattggtgagggtttgccttgaatgtcatcccagtatttcaatattgattaattagtcttccctcatggtcccaactgcatagtttttattttgttgagtgttctgacacatggtaagggacatgaaagtatcctttgagataatctttccattcatcagtgtttatctagcatctgctcaagagtgtgctgcagtggagggaaatcagatgacctcccagtctggttgtgttacatacaatcatgtgtaagaagtgccattcaagccgtgtcactggaggggactgacagtgagtgagtgtggatagagaggacctcctggggtgggcaatgtgagccctcagactctgtaggtattgcattttgcagtgaacactggtagacatgttttgtggctcaagccagcatgtgtgtgatggtttaggattcagtgacttttgatgatctggctgtggacttcaccccagaagaatggactttactggacccaactcagagaaacctctacagagatgtgatgctggagaactacaagaatttggccacagtaggatatcagctcttcaaacccagtctgatctcttggctggaacaagaagagtctaggacagtgcagagaggtgatttccaagcttcagaatggaaagtgcaacttaaaaccaaagagttagcccttcagcaggatgttttgggggagccaacctccagtgggattcaaatgataggaagccaca

SEQ ID NO: 201949 - DNA, 3503 bp, Homo sapiens
  Payload ID: 19839
  Gene Name: zinc finger protein 266
  Uniprot ID: Q14584
  ENST ID: ENST00000588221
  CDS Start-End: 1177-2826
ctggtggcgtttgggcttaatacagctttggcgaggtcggatgacgggtgggagccagcggtggaaggggtggcgaaagtaccggtttgccccaggccgccgaggggcctccttagagagaccttgcctgctccgctcgcgtccgccggggccgcgcgggtcctcctggcgccgccaggttcaaaaagccactcgagttgtcactgcgacggccctgggccaggagccgtttcgggatctgtcaaacaacgagttttcgtcgttcgaatcaggttgactggtccttcatccccccaatctcccgtacctggcgagtccagctcgtcgcggcctgtacctccccacagagcttcaaaacgggcttttaggaagaaggaatggaggctttgaagataccgttaaccctggataaagagaatggaggttacctctgtccgtgtagattcctaagctgtcctggagtgatccttggagtaaaggaaaggtgctttgaagcacattcagccatcagccctgtgggatggcagccactgatttgtcctatggtctttacagggacccagtctgccttcaagaaaagacagaagtagaaagggtggtggctgactgtctgacaaattgttatcaggtatgcaggaagtatatccttctccaaaatatcatacttgcatcaccaggtagacacatttccttctacacagaattatcttcagagcttcttaaagcaaataaagcctccttcaaggactgagtccctagtcgaattcccggaaggagtggagcctgtcatattggtgagggtttgccttgaatgtcatcccagtatttcaatattgattaattagtcttccctcatggtcccaactgcatagtttttattttgttgagtgttctgacacatggtaagggacatgaaagtatcctttgagataatctttccattcatcagtgtttatctagcatctgctcaagagtgtgctgcagtggagggaaatcagatgacctcccagtctggttgtgttacatacaatcatgtgtaagaagtgccattcaagccgtgtcactggaggggactgacagtgagattcagtgacttttgatgatctggctgtggacttcaccccagaagaatggactttactggacccaactcagagaaacctctacagagatgtgatgctggagaactacaagaatttggccacagtaggatatcagctcttcaaacccagtctgatctcttggctggaacaagaagagtctaggacagtgcagagaggtgatttccaagcttcagaatggaaagtgcaacttaaaaccaaagagttagcccttcagcaggatgttttgggggagccaacctccagtgggattcaaatgataggaagccacaacggaggggaggtcagtgatgttaagcaatgtggagatgtctccagtgaacactcatgccttaagacacatgtgagaactcaaaatagtgagaacacatttgagtgttatctgtatggagtagacttccttactctgcacaagaaaacctctactggagagcaacgttctgtatttagtcagtgtggaaaagccttcagcctgaacccagatgttgtttgccagagaacgtgcacaggagagaaagcttttgattgcagtgactctgggaaatccttcattaatcattcacaccttcagggacatttaagaactcacaatggagaaagtctccatgaatggaaggaatgtgggagaggctttattcactccacagaccttgctgtgcgtatacaaactcacaggtcagaaaaaccctacaaatgtaaggaatgtggaaaaggatttagatattctgcataccttaatattcacatgggaacccacactggagacaatccctatgagtgtaaggagtgtgggaaagccttcaccaggtcttgtcaacttactcagcacagaaaaactcacactggagagaaaccttataaatgtaaggattgtgggagagccttcactgtttcctcttgcttaagtcaacatatgaaaatccatgtgggtgagaagccttatgaatgcaaggaatgtgggatagccttcactagatcttctcaacttactgaacatttaaaaactcacactgcaaaggatccctttgaatgtaagatatgtggaaaatcctttagaaattcctcatgcctcagtgatcactttcgaattcacactggaataaaaccctataaatgtaaggattgtgggaaagccttcactcagaactcagaccttactaagcatgcacgaactcacagtggagagaggccctatgaatgtaaggaatgtggaaaggcctttgccagatcctctcgccttagtgaacatacaagaactcacactggagagaagccttttgaatgtgtcaaatgtgggaaagcctttgctatttcttcaaatcttagtggacatttgagaattcacactggagagaagccctttgagtgcctggaatgtggtaaagcatttacgcattcctccagtcttaataatcacatgcggacccacagcgccaaaaaaccattcacgtgtatggaatgtggcaaagcttttaagtttcccacgtgtgttaaccttcacatgcggatccacactggagaaaaaccctacaaatgtaaacagtgtgggaaatccttcagttactccaattcgtttcagttacatgaacgaactcacactggagagaaaccctatgaatgtaaggagtgcgggaaagccttcagttcttccagttcctttcgaaatcatgaaagaaggcatgcggatgagagactgtcagcataaggaatgtgggaaaacctaaaggtgtccctgttctctctgaagacatgaaaactcactggggagaaaccctatgaatgtaaaaatgtggaagcaactttgtatctcaggtcttaatgaacacatatgaattcacagtggagaagaccctgcatcagggaatgtggaaatgactttgctgaattctcaagccttaccaaacacatcagaaatctcactggagagaaactgtatgaatgtagagaatctgggaatacctttctgaatcccacaaaccttaatgtgtgtatgtgaactcacattggagagaaaccctgcaatttaaatggtatggtctggatgatgccccactccatatttgtaagccctaagtcctagttccttacactataactgtatttggacatagggttttcaaacaggtgagtaacttcaaatgaggttgttgggttcgatccctaatctgacatcactggtgtccctataagggaaactgaaggaaggatacacatggagaagactgtgtggatccaccagaagatggccatctacaagccaaggacagagacctggaacagatgctttcattatggcctccagaggaaaccaaccctgtctccaccttgatattgcacttccaggctccagaactgtgaggcaataaatttctcttggttaaa

SEQ ID NO: 201950 - DNA, 3317 bp, Homo sapiens
  Payload ID: 19840
  Gene Name: zinc finger protein 267
  Uniprot ID: Q14586
  ENST ID: ENST00000300870
  CDS Start-End: 210-2441
ggagagcaggggcggcttccgggatttggcgggggccttcgtcggctccagttagagctcgggtctcctcgccacagctccgagtctttcgttctgggaggcccaggcggcttcgcgttctgagaataaacagaacctctgttgctctgcgacttgcaggcactgggagattcgtagctaagacgccagggcatcccggaagctgggaaatgggactgttgacattcagggatgtggccgtagaattctctttggaggagtgggaacacctggaaccagctcagaagaatttgtatcaggatgtgatgttagaaaactacagaaacctggtctctctgggtcttgttgtctctaagccggacctgatcacctttttggaacaaaggaaagagccttggaatgtgaagagtgaggagacagtagccatccagccagatgtgttttcgcattataacaaggacctgttgacagagcactgcacagaagcttcattccaaaaagtgatatcgaggagacatgggagctgtgatcttgagaatttacatttaagaaaaaggtggaaaagggaggagtgtgaagggcacaatggatgttatgatgaaaagacttttaaatatgatcaatttgatgaatcctctgttgaaagtttgtttcaccagcaaatactttcttcttgtgccaaaagctataactttgatcaatataggaaggtctttactcattcatcattgcttaatcaacaagaggaaatagatatttggggaaaacatcacatatatgataaaacttcagtgttatttaggcaggtctctactctaaatagttaccgaaatgtttttattggagagaaaaattatcattgcaataattctgaaaaaaccttgaaccaaagctcaagccctaaaaatcatcaggaaaattattttctagaaaaacaatacaaatgtaaagaatttgaggaagtctttcttcagagtatgcatgggcaagagaaacaagaacagtcttacaaatgtaataaatgtgtagaagtttgtacccagtcattaaaacatattcaacatcagaccatccatatcagagaaaactcatatagctataacaaatatgataaagatcttagtcagtcatcaaatcttagaaagcagataatccataatgaagagaaaccatacaaatgtgaaaaatgtggggatagcttaaaccatagtttgcaccttactcaacatcagatcattcctaccgaagagaaaccctgtaaatggaaagaatgtggcaaggtctttaaccttaactgtagtttataccttactaaacagcagcaaattgatactggagaaaacctttacaaatgtaaagcatgtagcaaatcttttactcgttcctccaatcttattgtgcatcagagaattcacactggagagaaaccatacaaatgtaaagaatgtggcaaagcctttcgctgtagttcataccttactaaacataagcgaattcatactggagagaaaccttataaatgtaaagaatgtggaaaagcttttaaccgtagttcatgccttactcaacatcagacaactcatacaggagaaaaactttacaaatgtaaagtatgtagcaaatcttatgctcgttcttcaaatcttattatgcatcagagagttcatactggagagaagccttataaatgtaaagaatgtggcaaagtctttagccgtagttcttgccttactcaacatcggaaaattcatactggagaaaatctttacaaatgcaaagtatgtgctaaaccttttacttgtttctcaaatcttattgtgcatgagagaattcatactggagagaaaccctataaatgtaaagaatgtggcaaagcctttccttatagttcacaccttattcgacatcatcgaattcatactggagaaaaaccatacaaatgtaaagcatgtagcaaatcttttagtgactcctcaggtcttactgtgcatcggcgaactcatactggagagaaaccctatacatgtaaagaatgtggcaaagcctttagttatagttcagatgttattcagcatcggagaattcatactggccagagaccctacaaatgtgaagaatgtggcaaagccttcaactataggtcatacctcactacacatcagagaagtcatactggagagagaccctacaaatgtgaagaatgtggcaaagccttcaactctaggtcatacctcactacacatcggagaagacatactggagagagaccctacaaatgtgatgaatgtggtaaagccttcagctataggtcatacctcactacacatcggagaagtcatagtggagagagaccctacaaatgtgaagaatgtggcaaagcctttaactctaggtcatacctcattgcacatcagagaagtcatactagagaaaaactttaaaaatgtaaaacatggagcagattttttacttgttacccatgtcttattgtgcatcagataatttatatgggagtgaaaccctacaaatgttaagaatgtggcataacctttaactattttcaagccttacacaatagcagagaatataaactgaaaaaatccatacaaatattaaaaatgtggcaaattattttaaactgtgctcaacccttactcaagataatccatactagagaaacactatagatgtaaaaatgtgaaaagttttattcaaaatatcaaacttatgagtcacctaggggttcatagaaaaaggaagtttgcagatgcaataaatgtgaggaagtatttaataaaaaatgaagtctaaatgtgtcagagaatttatgtgagaaaggactaaagcacagacactttcagcctttatactaaataagagtattttttgtacagaataatctaaaggcaaaataattagataatttatttgcttatatgttttaaagtagcaagaacattgatgttttgacaggtatatttcatagatacttcatttgtatttacagtatttgaggtttttggaaagcaaatattatttatataattcagctttcaaatctgttgctgcttttccttaatccgtggtgttcatgtgaaaatatgtgttctgtttttttttctgcatcagaacaatgtgaggtcattctacgttaatatcattaatatcagcatttttcatggaagtttaatgccaaatgtaaaacacatgaaaatttttaaaaatatgctctttgtgtttgaataaagtagtaatgcatgtaaacatatacgtgtttagagctcttttctatattaaagtaagagggatattctgaa

SEQ ID NO: 201951 - DNA, 563 bp, Homo sapiens
  Payload ID: 19840
  Gene Name: zinc finger protein 267
  ENST ID: ENST00000561814
  CDS Start-End: 1-149
agctccgagtctttcgttctgggaggcccaggcggcttcgcgttctgagaataaacagaacctctgttgctctgcgacttgcaggcactgggagattcgtagctaagacgccagggcatcccggaagctgggaaatgggccctgtatagccaccctctatccagtcttttcctgttcctgaatttcagaactgtctgggatgactcaagatgcccacagtggccatgtctcctggagtgtttagtgactgtcagccccaggtcacctcctgttagaggaccgcccaagggactgttgacattcagggatgtggccgtagaattctctttggaggagtgggaacacctggaaccagctcagaagaatttgtatcaggatgtgatgttagaaaactacagaaacctggtctctctgggtcttgttgtctctaagccggacctgatcacctttttggaacaaaggaaagagccttggaatgtgaagagtgaggagacagtagccatccagccagatgtgttttcgcattataacaaggacctgttgacagagcactgcacagaagc

SEQ ID NO: 201952 - DNA, 589 bp, Homo sapiens
  Payload ID: 19840
  Gene Name: zinc finger protein 267
  ENST ID: ENST00000566541
  CDS Start-End: 1-154
acagctccgagtctttcgttctgggaggcccaggcggcttcgcgttctgagaataaacagaacctctgttgctctgcgacttgcaggcactgggagattcgtagctaagacgccagggcatcccggaagctgggaaatgaactgtctgggatgactcaagatgcccacagtggccatgtctcctggagtgtttagtgactgtcagccccaggtcacctcctgttagaggaccgcccaagggactgttgacattcagggatgtggccgtagaattctctttggaggagtgggaacacctggaaccagctcagaagaatttgtatcaggatgtgatgttagaaaactacagaaacctggtctctctgggtcttgttgtctctaagccggacctgatcacctttttggaacaaaggaaagagccttggaatgtgaagagtgaggagacagtagccatccagccaggacattgaagttccctgttattgcatttcgttttctcaccacagatgtgttttcgcattataacaaggacctgttgacagagcactgcacagaagcttcattccaaaaagtgatatcgaggagacat

SEQ ID NO: 201953 - DNA, 567 bp, Homo sapiens
  Payload ID: 19840
  Gene Name: zinc finger protein 267
  ENST ID: ENST00000562971
  CDS Start-End: 293-567
agcctcggggtctgggccccgagtcccaactggtgcagctcggccctcggtcccctccgctgcaagatggcggccaggccggcagccgggaccccgcgtgtcctgtcccatcccgaccccgcagagcgacctcgtccctggccggagccctctctgggcagctccgcgtcgcagccccgcgtctcccccagattgtgcgggactgttgacattcagggatgtggccgtagaattctctttggaggagtgggaacacctggaaccagctcagaagaatttgtatcaggatgtgatgttagaaaactacagaaacctggtctctctgggtcttgttgtctctaagccggacctgatcacctttttggaacaaaggaaagagccttggaatgtgaagagtgaggagacagtagccatccagccagatgtgttttcgcattataacaaggacctgttgacagagcactgcacagaagcttcattccaaaaagtgatatcgaggagacatgggagctgtgatcttgagaatttacatttaagaaaaaggtggaaaagggaggagtgtgaagg

SEQ ID NO: 201954 - DNA, 680 bp, Homo sapiens
  Payload ID: 19840
  Gene Name: zinc finger protein 267
  ENST ID: ENST00000394846
  CDS Start-End: 161-394
agttagagctcgggtctcctcgccacagctccgagtctttcgttctgggaggcccaggcggcttcgcgttctgagaataaacagaacctctgttgctctgcgacttgcaggcactgggagattcgtagctaagacgccagggcatcccggaagctgggaaatgggactgttgacattcagggatgtggccgtagaattctctttggaggagtgggaacacctggaaccagctcagaagaatttgtatcaggatgtgatgttagaaaactacagaaacctggtctctctgggtcttgttgtctctaagccggacctgatcacctttttggaacaaaggaaagagccttggaatgtgaagagtgaggagacagtagccatccagccaggacattgaagttccctgttattgcatttcgttttctcaccacagatgtgttttcgcattataacaaggacctgttgacagagcactgcacagaagcttcattccaaaaagtgatatcgaggagacatgggagctgtgatcttgagaatttacatttaagaaaaaggtggaaaagggaggagtgtgaagggcacaatggatgttatgatgaaaagacttttaaatatgatcaatttgatgaatcctctgttgaaagtttgtttcaccagcaaatactttcttcttgtgccaaaag

SEQ ID NO: 201955 - DNA, 3543 bp, Homo sapiens
  Payload ID: 19841
  Gene Name: zinc finger protein 268
  Uniprot ID: Q14587
  ENST ID: ENST00000228289
  CDS Start-End: 207-3050
atgacgcaattcctgtgcgacatacgtagcggccgccattgttccgcgccgatggcgagatccttgttcctcagatagcgttcatcgcccgtcgtggtcaacgggccagccgagtctggagtggttgcgaacccttctggctgcagatctggagcatccctcgcgtcctgtcacttccagcgaggcacacaaaactgaccgtagggatggccaccagggtccggacagcttctatttgggtcccacctctccaagaacgaaacagttcatgggataggatcagaaagctccaaggtcaggaatccatcttgggccaagggactcctggtctgcaacctctccctggaacacccaggcagaagcagaagagtcgcagaatagagaaagtcctagagtggctgtttatttcccaagagcagccaaaaatcaccaagtcctggggacctttgtcattcatggatgtgtttgtggattttacctgggaggagtggcagctgctagacccagcacagaagtgcctgtacaggagtgtgatgttggagaactatagcaacctggtgtccctagggtaccaacacaccaaacctgatatcatcttcaagttggaacaaggagaagagctgtgtatggtgcaggcccaagttccaaatcagacctgtccaaacacagtctggaaaattgatgatcttatggattggcatcaggaaaataaagacaagctgggaagtacggcaaaaagctttgaatgcactacatttggaaaactatgtcttcttagtacaaagtatctttcaagacaaaaacctcataaatgtggcacgcatggaaagagtttgaaatatatagatttcactagtgattatgctagaaataatcctaatgggtttcaggtacatggaaaatcattcttccattctaaacatgagcaaactgttattggaataaaatactgtgaaagtattgaatctggaaaaaccgtcaataagaaatcgcaacttatgtgccaacaaatgtatatgggcgaaaaaccctttggatgcagctgttgtgagaaagccttcagcagcaagtcataccttctagtgcatcagcaaactcatgccgaagagaaaccctatggttgtaatgaatgtgggaaagacttcagtagtaaatcatacctcattgtacatcagagaattcatacaggagagaaactacatgaatgcagtgaatgcaggaaaacattcagtttccattcacagcttgttatacatcagagaattcacacaggtgagaatccctatgagtgctgtgaatgtgggaaagtcttcagtaggaaagaccagcttgtttcacaccagaaaactcattcaggacagaaaccatatgtgtgtaatgaatgtgggaaagcttttggtttaaaatcacagctcattatacatgaaagaattcatacaggagagaaaccatatgaatgcaatgaatgtcagaaagcctttaatacaaagtcaaaccttatggtacatcagagaacccatacaggggagaaaccttatgtttgtagtgattgtggaaaagcctttacattcaagtcacagctcattgtacatcaggggattcacacaggagtaaagccctatgggtgtattcagtgtggtaaaggattcagtttgaaatcacagctcattgtacatcagagaagtcacacaggaatgaaaccttatgtatgcaatgaatgtggcaaagccttcaggagcaagtcataccttattatacatacaaggactcatacaggagaaaaactccatgaatgcaacaattgtgggaaagccttcagttttaaatcacagctcattatacatcagaggattcatacaggagagaacccctatgaatgccatgaatgtgggaaagccttcagtcggaaataccagcttatttcacaccagagaactcatgcaggagagaagccttatgaatgcaccgactgtggaaaggcttttggtttaaagtcacagcttattatacaccagagaactcatacaggggagaaaccatttgaatgtagtgagtgtcagaaagcctttaatacaaagtcaaacctgattgtacatcagagaactcatacaggagagaaaccctatagttgtaatgaatgtggaaaagcctttacgttcaaatcacagctcattgtacataaaggagtgcacactggagtaaaaccctatggatgcagtcaatgtgcaaaaacctttagtttgaagtcccagctcattgtacatcagagaagtcacacaggagtaaaaccatatggatgcagtgagtgtgggaaagccttcaggagcaagtcataccttattatacatatgagaactcatacaggagagaaaccacatgagtgcagggaatgcgggaaatcctttagtttcaattcacaactcattgtgcatcagagaattcacacaggagaaaatccctatgaatgcagtgaatgtgggaaagcctttaataggaaagaccagctcatttcacatcagcgaactcatgcaggggaaaagccttatgggtgcagtgaatgtgggaaagcttttagcagcaagtcatacctaattatacacatgagaactcattcaggtgaaaaaccatatgaatgtaatgaatgtgggaaagccttcatttggaaatcactactcattgtacatgagcgaactcatgcaggggtcaacccttataaatgcagtcaatgtgagaaatccttcagtgggaaattacgccttcttgtacaccagagaatgcacacaagagagaaaccatatgaatgcagtgagtgtggaaaagccttcattaggaattctcaactcattgtacatcaaagaactcattcaggagagaaaccctatgggtgcaatgaatgtgggaaaaccttctctcaaaaatcaattctcagtgcacatcagagaacacatacaggagagaagccttgtaagtgcactgaatgtgggaaagccttttgttggaagtcacagctcattatgcatcagagaactcatgtagatgacaaacattgataattttacgaaactctgaaaagtggattcacaagagatagaaacaatcatatataaagagaaactctgtaagtggaatcatcttgtcatcttccagaaaactcatactgaatagaaactttatgaatgcacagcatatggaaaggcatccacagaaagctgttctttacatgcaaaaagatagtagacaatacacaggaaaactgaatttagtaaccactctgaaaatttttagcagcaagtcatacctttttttaaaaagttcatacaggtgaggaaccatgttaaacgttgtaaagtcattttactaaaataagattcacaaagaggaaacttcatgaaccagatgaatatagaatagacttctttgaaattcatagtttacagaattttaatgagagaaattattgagctaatgaatggcagaattaacaaaattacaaacattttatgtatcggaagcatataccttggagggaccatgctataaggg

SEQ ID NO: 201956 - DNA, 897 bp, Homo sapiens
  Payload ID: 19841
  Gene Name: zinc finger protein 268
  ENST ID: ENST00000416488
  CDS Start-End: 331-897
ccggcgcgggagtaactcctcgcagaggcctctgggagttgtagtttttttgcctttgcctctccatgacgcaattcctgtgcgacatacgtagcggccgccattgttccgcgccgatggcgagatccttgttcctcagatagcgttcatcgcccgtcgtggtcaacgggccagccgagtctggagtggttgcgaacccttctggctgcagatctggaggtggaggcagtaccctggactctattctgctgccccttcagggtttggaggagccggagcatccctcgcgtcctgtcacttccagcgaggcacacaaaactgaccgtagggatggccaccagggtccggacagcttctatttgggtcccacctctccaagaacgaaacagttcatgggataggatcagaaagctccaaggtcaggaatccatcttgggccaagggactcctggtctgcaacctctccctggaacacccaggcagaagcagaagagtcgcagaatagagaaagtcctagagtggctgtttatttcccaagagcagccaaaaatcaccaagtcctggggacctttgtcattcatggatgtgtttgtggattttacctgggaggagtggcagctgctagacccagcacagaagtgcctgtacaggagtgtgatgttggagaactatagcaacctggtgtccctagggtaccaacacaccaaacctgatatcatcttcaagttggaacaaggagaagagctgtgtatggtgcaggcccaagttccaaatcagacctgtccaattttgaaggctggaaagtccaaagccaaggtgctggcaggtttggtgtctggtgagggcctgctctgtgcttccaagatgacgccttgttgctgcatcctctggaggtga

SEQ ID NO: 201957 - DNA, 592 bp, Homo sapiens
  Payload ID: 19841
  Gene Name: zinc finger protein 268
  ENST ID: ENST00000546126
  CDS Start-End: 245-361
atacgtagcggccgccattgttccgcgccgatggcgagatccttgttcctcagatagcgttcatcgcccgtcgtggtcaacgggccagccgagtctggagtggttgcgaacccttctggctgcagatctggaggtggaggcagtaccctggactctattctgctgccccttcagggtttggaggagccggagcatccctcgcgtcctgtcacttccagcgaggcacacaaaactgaccgtagggatggccaccagggtccggacagcttctatttgggctggagtgcagtggctatctctgctcaccacaacgtctgcttcccgagttcaagtggttctcttgcctcagcctcctgagtagctgggattacaggtcccacctctccaagaacgaaacagttcatgggataggatcagaaagctccaaggtcaggaatccatcttgggccaagggactcctggtctgcaacctctccctggaacacccaggcagaagcagaagagtcgcagaatagagaaagtcctagagtggctgtttatttcccaagagcagccaaaaatcaccaagtcctggggacctttgtcattcatg

SEQ ID NO: 201958 - DNA, 861 bp, Homo sapiens
  Payload ID: 19841
  Gene Name: zinc finger protein 268
  ENST ID: ENST00000542711
  CDS Start-End: 229-531
attgttccgcgccgatggcgagatccttgttcctcagatagcgttcatcgcccgtcgtggtcaacgggccagccgagtctggagtggttgcgaacccttctggctgcagatctggaggtggaggcagtaccctggactctattctgctgccccttcagggtttggaggagccggagcatccctcgcgtcctgtcacttccagcgaggcacacaaaactgaccgtagggatggccaccagggtccggacagcttctatttggggtaccaacacaccaaacctgatatcatcttcaagttggaacaaggagaagagctgtgtatggtgcaggcccaagttccaaatcagacctgtccaaacacagtctggaaaattgatgatcttatggattggcatcaggaaaataaagacaagctgggaagtacggcaaaaagctttgaatgcactacatttggaaaactatgtcttcttagtacaaagtatctttcaagacaaaaacctcataaatgtggcacgcatggaaagagtttgaaatatatagatttcactagtgattatgctagaaataatcctaatgggtttcaggtacatggaaaatcattcttccattctaaacatgagcaaactgttattggaataaaatactgtgaaagtattgaatctggaaaaaccgtcaataagaaatcgcaacttatgtgccaacaaatgtatatgggcgaaaaaccctttggatgcagctgttgtgagaaagccttcagcagcaagtcataccttctagtgcatcagcaaactcatgccgaagagaaaccctatggttgtaatgaatgtgggaaagacttcagtagtaaatcatacctcattg

SEQ ID NO: 201959 - DNA, 3236 bp, Homo sapiens
  Payload ID: 19841
  Gene Name: zinc finger protein 268
  ENST ID: ENST00000536899
  CDS Start-End: 226-432
gttccgcgccgatggcgagatccttgttcctcagatagcgttcatcgcccgtcgtggtcaacgggccagccgagtctggagtggttgcgaacccttctggctgcagatctggaggtggaggcagtaccctggactctattctgctgccccttcagggtttggaggagccggagcatccctcgcgtcctgtcacttccagcgaggcacacaaaactgaccgtagggatggccaccagggtccggacagcttctatttggacacagtctggaaaattgatgatcttatggattggcatcaggaaaataaagacaagctgggaagtacggcaaaaagctttgaatgcactacatttggaaaactatgtcttcttagtacaaagtatctttcaagacaaaaacctcataaatgtggcacgcatggaaagagtttgaaatatatagatttcactagtgattatgctagaaataatcctaatgggtttcaggtacatggaaaatcattcttccattctaaacatgagcaaactgttattggaataaaatactgtgaaagtattgaatctggaaaaaccgtcaataagaaatcgcaacttatgtgccaacaaatgtatatgggcgaaaaaccctttggatgcagctgttgtgagaaagccttcagcagcaagtcataccttctagtgcatcagcaaactcatgccgaagagaaaccctatggttgtaatgaatgtgggaaagacttcagtagtaaatcatacctcattgtacatcagagaattcatacaggagagaaactacatgaatgcagtgaatgcaggaaaacattcagtttccattcacagcttgttatacatcagagaattcacacaggtgagaatccctatgagtgctgtgaatgtgggaaagtcttcagtaggaaagaccagcttgtttcacaccagaaaactcattcaggacagaaaccatatgtgtgtaatgaatgtgggaaagcttttggtttaaaatcacagctcattatacatgaaagaattcatacaggagagaaaccatatgaatgcaatgaatgtcagaaagcctttaatacaaagtcaaaccttatggtacatcagagaacccatacaggggagaaaccttatgtttgtagtgattgtggaaaagcctttacattcaagtcacagctcattgtacatcaggggattcacacaggagtaaagccctatgggtgtattcagtgtggtaaaggattcagtttgaaatcacagctcattgtacatcagagaagtcacacaggaatgaaaccttatgtatgcaatgaatgtggcaaagccttcaggagcaagtcataccttattatacatacaaggactcatacaggagaaaaactccatgaatgcaacaattgtgggaaagccttcagttttaaatcacagctcattatacatcagaggattcatacaggagagaacccctatgaatgccatgaatgtgggaaagccttcagtcggaaataccagcttatttcacaccagagaactcatgcaggagagaagccttatgaatgcaccgactgtggaaaggcttttggtttaaagtcacagcttattatacaccagagaactcatacaggggagaaaccatttgaatgtagtgagtgtcagaaagcctttaatacaaagtcaaacctgattgtacatcagagaactcatacaggagagaaaccctatagttgtaatgaatgtggaaaagcctttacgttcaaatcacagctcattgtacataaaggagtgcacactggagtaaaaccctatggatgcagtcaatgtgcaaaaacctttagtttgaagtcccagctcattgtacatcagagaagtcacacaggagtaaaaccatatggatgcagtgagtgtgggaaagccttcaggagcaagtcataccttattatacatatgagaactcatacaggagagaaaccacatgagtgcagggaatgcgggaaatcctttagtttcaattcacaactcattgtgcatcagagaattcacacaggagaaaatccctatgaatgcagtgaatgtgggaaagcctttaataggaaagaccagctcatttcacatcagcgaactcatgcaggggaaaagccttatgggtgcagtgaatgtgggaaagcttttagcagcaagtcatacctaattatacacatgagaactcattcaggtgaaaaaccatatgaatgtaatgaatgtgggaaagccttcatttggaaatcactactcattgtacatgagcgaactcatgcaggggtcaacccttataaatgcagtcaatgtgagaaatccttcagtgggaaattacgccttcttgtacaccagagaatgcacacaagagagaaaccatatgaatgcagtgagtgtggaaaagccttcattaggaattctcaactcattgtacatcaaagaactcattcaggagagaaaccctatgggtgcaatgaatgtgggaaaaccttctctcaaaaatcaattctcagtgcacatcagagaacacatacaggagagaagccttgtaagtgcactgaatgtgggaaagccttttgttggaagtcacagctcattatgcatcagagaactcatgtagatgacaaacattgataattttacgaaactctgaaaagtggattcacaagagatagaaacaatcatatataaagagaaactctgtaagtggaatcatcttgtcatcttccagaaaactcatactgaatagaaactttatgaatgcacagcatatggaaaggcatccacagaaagctgttctttacatgcaaaaagatagtagacaatacacaggaaaactgaatttagtaaccactctgaaaatttttagcagcaagtcatacctttttttaaaaagttcatacaggtgaggaaccatgttaaacgttgtaaagtcattttactaaaataagattcacaaagaggaaacttcatgaaccagatgaatatagaatagacttctttgaaattcatagtttacagaattttaatgagagaaattattgagctaatgaatggcagaattaacaaaattacaaacattttatgtatcggaagcatataccttggagggaccatgctataagggaaagtgtaaatctagaaatgagaaacccctagggaaaaaatatatataggagtgaacatcttatgaatgtaccaaataaaccacagctggactgttaa

SEQ ID NO: 201960 - DNA, 3773 bp, Homo sapiens
  Payload ID: 19841
  Gene Name: zinc finger protein 268
  ENST ID: ENST00000541009
  CDS Start-End: 181-762
cgcccgtcgtggtcaacgggccagccgagtctggagtggttgcgaacccttctggctgcagatctggaggtggaggcagtaccctggactctattctgctgccccttcagggtttggaggagccggagcatccctcgcgtcctgtcacttccagcgaggcacacaaaactgaccgtagggatggccaccagggtccggacagcttctatttgggtcccacctctccaagaacgaaacagttcatgggataggatcagaaagctccaaggtcaggaatccatcttgggccaagggactcctggtctgcaacctctccctggaacacccaggcagaagcagaagagtcgcagaatagagaaagtcctagagtggctgtttatttcccaagagcagccaaaaatcaccaagtcctggggacctttgtcattcatggatgtgtttgtggattttacctgggaggagtggcagctgctagacccagcacagaagtgcctgtacaggagtgtgatgttggagaactatagcaacctggtgtccctagggtaccaacacaccaaacctgatatcatcttcaagttggaacaaggagaagagctgtgtatggtgcaggcccaagttccaaatcagacctgtccaattttgaaggctggaaagtccaaagccaaggtgctggcaggtttggtgtctggtgagggcctgctctgtgcttccaagatgacgccttgttgctgcatcctctggagacacagtctggaaaattgatgatcttatggattggcatcaggaaaataaagacaagctgggaagtacggcaaaaagctttgaatgcactacatttggaaaactatgtcttcttagtacaaagtatctttcaagacaaaaacctcataaatgtggcacgcatggaaagagtttgaaatatatagatttcactagtgattatgctagaaataatcctaatgggtttcaggtacatggaaaatcattcttccattctaaacatgagcaaactgttattggaataaaatactgtgaaagtattgaatctggaaaaaccgtcaataagaaatcgcaacttatgtgccaacaaatgtatatgggcgaaaaaccctttggatgcagctgttgtgagaaagccttcagcagcaagtcataccttctagtgcatcagcaaactcatgccgaagagaaaccctatggttgtaatgaatgtgggaaagacttcagtagtaaatcatacctcattgtacatcagagaattcatacaggagagaaactacatgaatgcagtgaatgcaggaaaacattcagtttccattcacagcttgttatacatcagagaattcacacaggtgagaatccctatgagtgctgtgaatgtgggaaagtcttcagtaggaaagaccagcttgtttcacaccagaaaactcattcaggacagaaaccatatgtgtgtaatgaatgtgggaaagcttttggtttaaaatcacagctcattatacatgaaagaattcatacaggagagaaaccatatgaatgcaatgaatgtcagaaagcctttaatacaaagtcaaaccttatggtacatcagagaacccatacaggggagaaaccttatgtttgtagtgattgtggaaaagcctttacattcaagtcacagctcattgtacatcaggggattcacacaggagtaaagccctatgggtgtattcagtgtggtaaaggattcagtttgaaatcacagctcattgtacatcagagaagtcacacaggaatgaaaccttatgtatgcaatgaatgtggcaaagccttcaggagcaagtcataccttattatacatacaaggactcatacaggagaaaaactccatgaatgcaacaattgtgggaaagccttcagttttaaatcacagctcattatacatcagaggattcatacaggagagaacccctatgaatgccatgaatgtgggaaagccttcagtcggaaataccagcttatttcacaccagagaactcatgcaggagagaagccttatgaatgcaccgactgtggaaaggcttttggtttaaagtcacagcttattatacaccagagaactcatacaggggagaaaccatttgaatgtagtgagtgtcagaaagcctttaatacaaagtcaaacctgattgtacatcagagaactcatacaggagagaaaccctatagttgtaatgaatgtggaaaagcctttacgttcaaatcacagctcattgtacataaaggagtgcacactggagtaaaaccctatggatgcagtcaatgtgcaaaaacctttagtttgaagtcccagctcattgtacatcagagaagtcacacaggagtaaaaccatatggatgcagtgagtgtgggaaagccttcaggagcaagtcataccttattatacatatgagaactcatacaggagagaaaccacatgagtgcagggaatgcgggaaatcctttagtttcaattcacaactcattgtgcatcagagaattcacacaggagaaaatccctatgaatgcagtgaatgtgggaaagcctttaataggaaagaccagctcatttcacatcagcgaactcatgcaggggaaaagccttatgggtgcagtgaatgtgggaaagcttttagcagcaagtcatacctaattatacacatgagaactcattcaggtgaaaaaccatatgaatgtaatgaatgtgggaaagccttcatttggaaatcactactcattgtacatgagcgaactcatgcaggggtcaacccttataaatgcagtcaatgtgagaaatccttcagtgggaaattacgccttcttgtacaccagagaatgcacacaagagagaaaccatatgaatgcagtgagtgtggaaaagccttcattaggaattctcaactcattgtacatcaaagaactcattcaggagagaaaccctatgggtgcaatgaatgtgggaaaaccttctctcaaaaatcaattctcagtgcacatcagagaacacatacaggagagaagccttgtaagtgcactgaatgtgggaaagccttttgttggaagtcacagctcattatgcatcagagaactcatgtagatgacaaacattgataattttacgaaactctgaaaagtggattcacaagagatagaaacaatcatatataaagagaaactctgtaagtggaatcatcttgtcatcttccagaaaactcatactgaatagaaactttatgaatgcacagcatatggaaaggcatccacagaaagctgttctttacatgcaaaaagatagtagacaatacacaggaaaactgaatttagtaaccactctgaaaatttttagcagcaagtcatacctttttttaaaaagttcatacaggtgaggaaccatgttaaacgttgtaaagtcattttactaaaataagattcacaaagaggaaacttcatgaaccagatgaatatagaatagacttctttgaaattcatagtttacagaattttaatgagagaaattattgagctaatgaatggcagaattaacaaaattacaaacattttatgtatcggaagcatataccttggagggaccatgctataagggaaagtgtaaatctagaaatgagaaacccctagggaaaaaatatatataggagtgaacatcttatgaatgtaccaaataaaccacagctggactgttaacctcaccttagaagcttcattctaaaaaaaaaaaaaaaaaaaaaaaaaaaaa

SEQ ID NO: 201961 - DNA, 781 bp, Homo sapiens
  Payload ID: 19841
  Gene Name: zinc finger protein 268
  ENST ID: ENST00000541211
  CDS Start-End: 245-748
atacgtagcggccgccattgttccgcgccgatggcgagatccttgttcctcagatagcgttcatcgcccgtcgtggtcaacgggccagccgagtctggagtggttgcgaacccttctggctgcagatctggaggtggaggcagtaccctggactctattctgctgccccttcagggtttggaggagccggagcatccctcgcgtcctgtcacttccagcgaggcacacaaaactgaccgtagggatggccaccagggtccggacagcttctatttgggtcccacctctccaagaacgaaacagttcatgggataggatcagaaagctccaaggtcaggaatccatcttgggccaagggactcctggtctgcaacctctccctggaacacccaggcagaagcagaagagtcgcagaatagagaaagtcctagagtggctgtttatttcccaagagcagccaaaaatcaccaagtcctggggtaccaacacaccaaacctgatatcatcttcaagttggaacaaggagaagagctgtgtatggtgcaggcccaagttccaaatcagacctgtccaaacacagtctggaaaattgatgatcttatggattggcatcaggaaaataaagacaagctgggaagtacggcaaaaagctttgaatgcactacatttggaaaactatgtcttcttagtacaaagtatctttcaagacaaaaacctcataaatgtggcacgcatggaaagagtttgaaatatatagatttcactagtgattatgctagaa

SEQ ID NO: 201962 - DNA, 3773 bp, Homo sapiens
  Payload ID: 19841
  Gene Name: zinc finger protein 268
  ENST ID: ENST00000542986
  CDS Start-End: 226-762
gttccgcgccgatggcgagatccttgttcctcagatagcgttcatcgcccgtcgtggtcaacgggccagccgagtctggagtggttgcgaacccttctggctgcagatctggaggtggaggcagtaccctggactctattctgctgccccttcagggtttggaggagccggagcatccctcgcgtcctgtcacttccagcgaggcacacaaaactgaccgtagggatggccaccagggtccggacagcttctatttgggtcccacctctccaagaacgaaacagttcatgggataggatcagaaagctccaaggtcaggaatccatcttgggccaagggactcctggtctgcaacctctccctggaacacccaggcagaagcagaagagtcgcagaatagagaaagtcctagagtggctgtttatttcccaagagcagccaaaaatcaccaagtcctgggagtggcagctgctagacccagcacagaagtgcctgtacaggagtgtgatgttggagaactatagcaacctggtgtccctagggtaccaacacaccaaacctgatatcatcttcaagttggaacaaggagaagagctgtgtatggtgcaggcccaagttccaaatcagacctgtccaattttgaaggctggaaagtccaaagccaaggtgctggcaggtttggtgtctggtgagggcctgctctgtgcttccaagatgacgccttgttgctgcatcctctggagacacagtctggaaaattgatgatcttatggattggcatcaggaaaataaagacaagctgggaagtacggcaaaaagctttgaatgcactacatttggaaaactatgtcttcttagtacaaagtatctttcaagacaaaaacctcataaatgtggcacgcatggaaagagtttgaaatatatagatttcactagtgattatgctagaaataatcctaatgggtttcaggtacatggaaaatcattcttccattctaaacatgagcaaactgttattggaataaaatactgtgaaagtattgaatctggaaaaaccgtcaataagaaatcgcaacttatgtgccaacaaatgtatatgggcgaaaaaccctttggatgcagctgttgtgagaaagccttcagcagcaagtcataccttctagtgcatcagcaaactcatgccgaagagaaaccctatggttgtaatgaatgtgggaaagacttcagtagtaaatcatacctcattgtacatcagagaattcatacaggagagaaactacatgaatgcagtgaatgcaggaaaacattcagtttccattcacagcttgttatacatcagagaattcacacaggtgagaatccctatgagtgctgtgaatgtgggaaagtcttcagtaggaaagaccagcttgtttcacaccagaaaactcattcaggacagaaaccatatgtgtgtaatgaatgtgggaaagcttttggtttaaaatcacagctcattatacatgaaagaattcatacaggagagaaaccatatgaatgcaatgaatgtcagaaagcctttaatacaaagtcaaaccttatggtacatcagagaacccatacaggggagaaaccttatgtttgtagtgattgtggaaaagcctttacattcaagtcacagctcattgtacatcaggggattcacacaggagtaaagccctatgggtgtattcagtgtggtaaaggattcagtttgaaatcacagctcattgtacatcagagaagtcacacaggaatgaaaccttatgtatgcaatgaatgtggcaaagccttcaggagcaagtcataccttattatacatacaaggactcatacaggagaaaaactccatgaatgcaacaattgtgggaaagccttcagttttaaatcacagctcattatacatcagaggattcatacaggagagaacccctatgaatgccatgaatgtgggaaagccttcagtcggaaataccagcttatttcacaccagagaactcatgcaggagagaagccttatgaatgcaccgactgtggaaaggcttttggtttaaagtcacagcttattatacaccagagaactcatacaggggagaaaccatttgaatgtagtgagtgtcagaaagcctttaatacaaagtcaaacctgattgtacatcagagaactcatacaggagagaaaccctatagttgtaatgaatgtggaaaagcctttacgttcaaatcacagctcattgtacataaaggagtgcacactggagtaaaaccctatggatgcagtcaatgtgcaaaaacctttagtttgaagtcccagctcattgtacatcagagaagtcacacaggagtaaaaccatatggatgcagtgagtgtgggaaagccttcaggagcaagtcataccttattatacatatgagaactcatacaggagagaaaccacatgagtgcagggaatgcgggaaatcctttagtttcaattcacaactcattgtgcatcagagaattcacacaggagaaaatccctatgaatgcagtgaatgtgggaaagcctttaataggaaagaccagctcatttcacatcagcgaactcatgcaggggaaaagccttatgggtgcagtgaatgtgggaaagcttttagcagcaagtcatacctaattatacacatgagaactcattcaggtgaaaaaccatatgaatgtaatgaatgtgggaaagccttcatttggaaatcactactcattgtacatgagcgaactcatgcaggggtcaacccttataaatgcagtcaatgtgagaaatccttcagtgggaaattacgccttcttgtacaccagagaatgcacacaagagagaaaccatatgaatgcagtgagtgtggaaaagccttcattaggaattctcaactcattgtacatcaaagaactcattcaggagagaaaccctatgggtgcaatgaatgtgggaaaaccttctctcaaaaatcaattctcagtgcacatcagagaacacatacaggagagaagccttgtaagtgcactgaatgtgggaaagccttttgttggaagtcacagctcattatgcatcagagaactcatgtagatgacaaacattgataattttacgaaactctgaaaagtggattcacaagagatagaaacaatcatatataaagagaaactctgtaagtggaatcatcttgtcatcttccagaaaactcatactgaatagaaactttatgaatgcacagcatatggaaaggcatccacagaaagctgttctttacatgcaaaaagatagtagacaatacacaggaaaactgaatttagtaaccactctgaaaatttttagcagcaagtcatacctttttttaaaaagttcatacaggtgaggaaccatgttaaacgttgtaaagtcattttactaaaataagattcacaaagaggaaacttcatgaaccagatgaatatagaatagacttctttgaaattcatagtttacagaattttaatgagagaaattattgagctaatgaatggcagaattaacaaaattacaaacattttatgtatcggaagcatataccttggagggaccatgctataagggaaagtgtaaatctagaaatgagaaacccctagggaaaaaatatatataggagtgaacatcttatgaatgtaccaaataaaccacagctggactgttaacctcaccttagaagcttcattctaaaaaaaaaaaaaaaaaaaaaaaaaaaaa

SEQ ID NO: 201963 - DNA, 13475 bp, Homo sapiens
  Payload ID: 19841
  Gene Name: zinc finger protein 268
  Uniprot ID: Q14587
  ENST ID: ENST00000536435
  CDS Start-End: 331-3174
ccggcgcgggagtaactcctcgcagaggcctctgggagttgtagtttttttgcctttgcctctccatgacgcaattcctgtgcgacatacgtagcggccgccattgttccgcgccgatggcgagatccttgttcctcagatagcgttcatcgcccgtcgtggtcaacgggccagccgagtctggagtggttgcgaacccttctggctgcagatctggaggtggaggcagtaccctggactctattctgctgccccttcagggtttggaggagccggagcatccctcgcgtcctgtcacttccagcgaggcacacaaaactgaccgtagggatggccaccagggtccggacagcttctatttgggtcccacctctccaagaacgaaacagttcatgggataggatcagaaagctccaaggtcaggaatccatcttgggccaagggactcctggtctgcaacctctccctggaacacccaggcagaagcagaagagtcgcagaatagagaaagtcctagagtggctgtttatttcccaagagcagccaaaaatcaccaagtcctggggacctttgtcattcatggatgtgtttgtggattttacctgggaggagtggcagctgctagacccagcacagaagtgcctgtacaggagtgtgatgttggagaactatagcaacctggtgtccctagggtaccaacacaccaaacctgatatcatcttcaagttggaacaaggagaagagctgtgtatggtgcaggcccaagttccaaatcagacctgtccaaacacagtctggaaaattgatgatcttatggattggcatcaggaaaataaagacaagctgggaagtacggcaaaaagctttgaatgcactacatttggaaaactatgtcttcttagtacaaagtatctttcaagacaaaaacctcataaatgtggcacgcatggaaagagtttgaaatatatagatttcactagtgattatgctagaaataatcctaatgggtttcaggtacatggaaaatcattcttccattctaaacatgagcaaactgttattggaataaaatactgtgaaagtattgaatctggaaaaaccgtcaataagaaatcgcaacttatgtgccaacaaatgtatatgggcgaaaaaccctttggatgcagctgttgtgagaaagccttcagcagcaagtcataccttctagtgcatcagcaaactcatgccgaagagaaaccctatggttgtaatgaatgtgggaaagacttcagtagtaaatcatacctcattgtacatcagagaattcatacaggagagaaactacatgaatgcagtgaatgcaggaaaacattcagtttccattcacagcttgttatacatcagagaattcacacaggtgagaatccctatgagtgctgtgaatgtgggaaagtcttcagtaggaaagaccagcttgtttcacaccagaaaactcattcaggacagaaaccatatgtgtgtaatgaatgtgggaaagcttttggtttaaaatcacagctcattatacatgaaagaattcatacaggagagaaaccatatgaatgcaatgaatgtcagaaagcctttaatacaaagtcaaaccttatggtacatcagagaacccatacaggggagaaaccttatgtttgtagtgattgtggaaaagcctttacattcaagtcacagctcattgtacatcaggggattcacacaggagtaaagccctatgggtgtattcagtgtggtaaaggattcagtttgaaatcacagctcattgtacatcagagaagtcacacaggaatgaaaccttatgtatgcaatgaatgtggcaaagccttcaggagcaagtcataccttattatacatacaaggactcatacaggagaaaaactccatgaatgcaacaattgtgggaaagccttcagttttaaatcacagctcattatacatcagaggattcatacaggagagaacccctatgaatgccatgaatgtgggaaagccttcagtcggaaataccagcttatttcacaccagagaactcatgcaggagagaagccttatgaatgcaccgactgtggaaaggcttttggtttaaagtcacagcttattatacaccagagaactcatacaggggagaaaccatttgaatgtagtgagtgtcagaaagcctttaatacaaagtcaaacctgattgtacatcagagaactcatacaggagagaaaccctatagttgtaatgaatgtggaaaagcctttacgttcaaatcacagctcattgtacataaaggagtgcacactggagtaaaaccctatggatgcagtcaatgtgcaaaaacctttagtttgaagtcccagctcattgtacatcagagaagtcacacaggagtaaaaccatatggatgcagtgagtgtgggaaagccttcaggagcaagtcataccttattatacatatgagaactcatacaggagagaaaccacatgagtgcagggaatgcgggaaatcctttagtttcaattcacaactcattgtgcatcagagaattcacacaggagaaaatccctatgaatgcagtgaatgtgggaaagcctttaataggaaagaccagctcatttcacatcagcgaactcatgcaggggaaaagccttatgggtgcagtgaatgtgggaaagcttttagcagcaagtcatacctaattatacacatgagaactcattcaggtgaaaaaccatatgaatgtaatgaatgtgggaaagccttcatttggaaatcactactcattgtacatgagcgaactcatgcaggggtcaacccttataaatgcagtcaatgtgagaaatccttcagtgggaaattacgccttcttgtacaccagagaatgcacacaagagagaaaccatatgaatgcagtgagtgtggaaaagccttcattaggaattctcaactcattgtacatcaaagaactcattcaggagagaaaccctatgggtgcaatgaatgtgggaaaaccttctctcaaaaatcaattctcagtgcacatcagagaacacatacaggagagaagccttgtaagtgcactgaatgtgggaaagccttttgttggaagtcacagctcattatgcatcagagaactcatgtagatgacaaacattgataattttacgaaactctgaaaagtggattcacaagagatagaaacaatcatatataaagagaaactctgtaagtggaatcatcttgtcatcttccagaaaactcatactgaatagaaactttatgaatgcacagcatatggaaaggcatccacagaaagctgttctttacatgcaaaaagatagtagacaatacacaggaaaactgaatttagtaaccactctgaaaatttttagcagcaagtcatacctttttttaaaaagttcatacaggtgaggaaccatgttaaacgttgtaaagtcattttactaaaataagattcacaaagaggaaacttcatgaaccagatgaatatagaatagacttctttgaaattcatagtttacagaattttaatgagagaaattattgagctaatgaatggcagaattaacaaaattacaaacattttatgtatcggaagcatataccttggagggaccatgctataagggaaagtgtaaatctagaaatgagaaacccctagggaaaaaatatatataggagtgaacatcttatgaatgtaccaaataaaccacagctggactgttaacctcaccttagaagcttcattctaaaaaaaaaaaaaaaaaaaaaaaaaaaaaccaacctgttattatatcttaatattaattttgaagaattatttcttttaggaatcattttaagaaattttattccaggtgttccaaaatttcaggaaaaggtttgagaaaattctcaattataaataataagatacagattatttcattgtacaagtgaatctagtaaggaggttaagaataagaaataacatcccagagcctacagggatatttagatatcttcctatgtgtactacataatatgaattttgcagtttggcattttacttgcgaatgccatatgtgagacaaaaatcatcttccagagatttcagtatctctgatactgacaatatctctgatatgacaatatcatcttccagagatttctactctgcataccaacattgtttctttgtgtcttaccaaatgcaacttgttactagaatatgacttactaaaaatgcatttccacactgcaaacattttttagggctatcttctgccctttggaagcagtcttggcagcaacctctttagtaatcaatataaggcacacttcatgtgtttgtgtagcctggaatctattctaccttcacaggttagaacatcttgatttcctcttaacgaaacattccctaacggtgtatgtagtcatgagggaaccaccattcaagatgccctgctcaggacttggcatgagcactatggtcagctgaggctcagaactgtacattgttaatgggtttttcaagttcagaaaagcaacatgagcttttgttctgtggtagcatgttgatgtaataagtagctatttcaatagaggttcccagaacagcttttgttactgtcattttcttaactttgttcacttgtcttttattttgagctattgggtgtgcttttaatacattccttgtttgattgcattagccattgtgtatcttttgcatacagcttactaaatcagatggcttcagaaatgggtggtagaggagtaggcagaaacttgcaaggatatgtggatatttggaaatggttgtttcccaagacaggatggaagtcttttaagcaagaaacttggcccatgctatgaagtcatgaaatgaattgttggcatcatgtgctcactgaggctttggggaaatggataagttgtcattgaaaaattttaaacagaattctggagtggtcaagaggggaatgcttttgatacccatgtataacatggagaataatgatcttaaaacttcaatttaagattatgtgtcagtgatactacttagttacatgtagctatagagtcacagtggtgaaaaactctgccagttgcttactcacaaagttagttttcttcactacctcatcaggtttgttatgtgagtgggcattaatctgggaagagtgggaccctgccagttagattagggctatcttggaggaatatgcggattcaatactgcaaatatttctgaaacaccttctgctttgtactctattagatacccaaagaaattttcatccttgaagcggaggaatttaatgatacctgaatgcctaactgttgtattctgcttatacagaatccaatctcaagatacttggggtgaagaatgatgattcacagaagggaagggacatcttacataaacaaataatcgcagatacttgctaaagtgtatcccccaatctgggaaatactgtaaaggtgtatattattattgatgtaccaaagaagacagaataaattcataagagaaagtttatattcagtttactactacctagggttagattttagtttgttgttttttcagatgcaaatctacatgcagccttgcctggtagaagccagaagtgttgacagtattgaggacagcactcacatactgtgggaaagaataatacttgattaggacttattatttaatgaaatgaaaattttacaaaacagaaattgagttactggtttgtaaatctatctagtccttctaccccagccccagaaaagaaagacattccagagacttttcaggaatagttattataaggaaaatccaaggaaaaataaccccaatattttacaacttccccatcaaatagaaatttaggagaaaaaatgacttgcaaaccatatttgtgaacataggtttaaaaatccatatttgtgaacataggtttaaaaatccatatttgtgaacataggtttaaaaattctaaatggaattatagcaaaccaatgtatagctaacaagaaagtcatgatattaggtttaacagactattagtggatccagcatcctttgttcattaccagcagaatcactattatttataatggcagtatgcccacttaaaaagagatatatggggccaggcacggtggctcacacctataatcccagcacttcaggaggctgagatggtggatcacctgaggtcaggagtttgagaccagcctggccaacatggtgaaacccctctctactaaaaatacaaaaaaatagcagggcatggtaactgacacctataatcccagctacttgggaggctgggacgggagaatcacttgaatctaggaggcggaagttgcagtgagctgagatcgtaccactgtactccaccctgggtgacagaactagaccctgtctcaaaaaacagaagagtatgtttggaagatttaatattagaaaatattttaattaactaccagataaaactcataaggattatctcagtatatgctgataaatcacttgatggaatttaacacccatagatgacactaaaatactattaagttgggaattaaaattaactcctgtaacttggtagggaatatatgttctgaaaacacaaatgtcatacttaatgataaaatagtagaaagattcctttaaagtaaaattagccaggtgcagtggctcatccatgtaataccagcacttgggaaggctgaggctggaggattgctggaacccaggagttcgagacaagcctgaccaatatagggagaccctgtctgtacaaaaactttttaaaaagattagccaggtgtggtcaggcgccgtggctcatgcctgtaatcccagcactttgggaggccgaggtgggcagatcacttgaggtcaggatttcaagaccagtgtggctaacatggtgaaaccccgtctctactaaaaatacaaaagtcagccaggtgtggtggcacgtgcctgtaatcccatctactcgggaggctgaggcagaagaattgcttgaacctaggaggtggcagttgcagtgagccaagattgcaccactgcactccaggctgggcgacagaacaagcctccatctcaaaaaaaagatcagccaggtgtagtggcaagtgccggtagtcccacctactgaggaggctgaggcaggaggttagcttgagtccagtagttcaaggctacagtgagctatgatcatgcccctgcactccatcctgggcaacaaagtgagaccctgtctgtaaaaaacaaagcaaaattacaagaatgcgcatcacttttatgaaatgagtaacatctagccaaggtgtgaaaacaaggaatgtgaggaattagggatgggtgcagaaacaactgccatgaattggagatgtgatcgtgtaattaggaaacccaaaataaaccacaaacaaatgtttggaactgccagtagagtagcaagtatgcagttgtcagtattcatggaggacccccccgcaaccacagatactccctgtggatgctcaagctccttatatggcatagtatttgcatttttttttttttttttgagatggagtctcgctgtattgccaggctggagtgcagtggtgtgttcttggctcactgcaacctctgcctcctgggttcaagcaattctcctgcctcagcctccctagtagctggaattacaggcacacgccaccacgcccagctaatttttgtgtttttagtagagatggggtttcaccatgttggccaggctggtcttgaactcctgacctcgtgatccaccctcagcctcccaaagtgctgggattacaggtgtgagccactggtctgtattgatttttcttaattctttgctaaagggccaggtagagttatttatttcttgtagagatggggttttaccatgttttccagtctggtttcaaactcctgggctcaagcagtccacctgccttggcctcccaaagtgctaggattacaggtgtgagccaagcacccagccataaatcttaaataaattctgattttggtataaatgatatatttaaatttaaatgaagttgcaagttttaacatgtctactctttaattttcaacattgtttcaactacttgttagaaacacaggccattaaaacattaataaaaaggctgggcatggtggctcatgcctgtaatctcagcattttgtgaggctgaggcaggtggatgacttgaggtcaggagttcgagaccagcctggtgaaaccccgtctctactaaaaatacaaaaattggccagctgtggtggcatgcatctataatccaagctactcaggagaattgcttgaactggagaggcggaggttgcagtgagctgagattgtgccattgcactccagcccgggcagcagagtgagactccttcaaaaaaaattaataaaagcaagcacatagggtgcacatttgcccttccctcttgggatccagggtgatcccacaggtgctgttcatccccaactttgacctggactgttgcagtgttttgtcgcagtgtttctccctttttttgtactgggatttctccccagaaacaaacccatatgtataaaaagtagttgggcttgctataaagatgactagtggaaacctcaatagaggtacgatttcctaaaataaatcttgttcagatattacagggcaaagtgaaacagcaaagctccctcctcagcactcagggtgcaggcctcacttttcctcatcttttcctcctgtggcctccatgtatcccaaaggtgagatgacatcgccccagattggtccggaaagtgcactggtcgtcactgtgggtgtaccctacaggagtcttcagatatggaagctctggatctcactgtgatgtatccccctagggggtccccaggttgtgaggaaaaggaagctttagtcctcactgtggttgcatcccccaccacgggtcagtcctgaggaggatactctggtcatcactgtgatctacctcccaggggtccccaggttggtcctgaggagaaggaagctcagaacctcactgtggatttgccccactagggtccctaggtcagtcctgaagagaaacaagctccagtcttcactgtggttgtgccccacagtggtcctcaggttggccagtggagaaggaagctctggttctcagtgtgatgcatcccccaggttggtcctgagatgaggtaaattctggtcatcactgtgaagtgccctcgggggtctccgggtcctgagtagaagcaaggtctgtttgtcactgtggattcccccctgccaagggtccccaggtcagtcctgaggagaaggcagctcagtctttactgtgatgcagcctctagtgatccccaggtcctgagtagaaggaaggcctggtcctctgtggattcaacccagaggtctgtgagcagaatgcaggtactgcaagcaggctagacaaggtgtgtgcttgcaccccttccttactacctaggcacagtgttggatggtcagtgcttcctgttttgtgatggccatgtgccccctcttgcagtcccagtgaacccctgaaattcaatcttacgattttccatgccataattttggaaaacgaaactgaaatagagtccatcattccatgccttaattggaatggatagagataataaaaggcaaagtagatggccatagacaaaagtcaagtgatttcctatatatttgaaataatgtatagcaataattggaatttgtaatgaataaaatcattcaaaaaaatctgaaaaagtgtttgtatgcaaaatataaaaaaaaaaccctaaaattgaacaagaagacaacccaattaaaaatggggacagatccaaatacatactttccaaagatatacagatggtggccaggcacggtggctcacgcctgtaatcccagcactttgggaggccgaggcgggcagatcacctgaggtccggagttcgagaccagcctgaccaacatggagaaaccctgtctctactaaaaatacaaaattagccaggcgtggtggcgctactctgccaccaagtggtagctactccggaggcggaggcaggagaatggcttgaacccgggaggcggaggttgctgtgagccgagatcgcgccattgcactccagcctgggcaacaagagtgaaactccgtctcaaaaaaaaaaaaaagaagatatacagatggcaaataagcataccaaataatgctcagtgacacttgtcatgagggaaaagcaaattaaaacaacgagatagcaccgcacatctattaaagtgactataatctaaaaataagtaaatttgcaattgcaacaggaactctcattcattgctggtgcaatgcataatagtatagccactttggaagatagtttgacttttccccaaagctaaacaaagcttcacaatatgagccaacaatcacactcctaggtatttagataactgctttgaaaacataggagtttgatctaaacaaaacccagcatgtactcacgtacagcagctcttttcataacagacaaatactttaaggaatcaggataaccttcaataggtgaatgactaactaggctggggtacatccatgcaatggagtcctgttcagcaagagcaagctctgaggccatgcaggacatggatgaatctgataggcatattgctaagtgaaagagaccagtgtgaaaaggctgtatgatcctatttctatgatgttatggaaaagcagaaactacaggggtagcaaacatatctgtgattgatgacggtttgtagagggcagggagtgagttaaataggaggatataatgatagaaacaggcacaaatgggcctttggagagtgtactccctctgcttggtgaaattatgctgggtgtgtgtggaagagcctgggatgtataatgccagcatgaacaaaaaggccacttatcactccaggagagcagggtgttctttcatcacacatgaaattatttcaggatcagttccaagggagactttcatgtgtgattttatatatatatatatatatatatatatatatatatatatatatatatatatatgtatatatacacacacacatacacacatatatacacatatatatacacatatacacatatatatacacatatatataataagaacatttaccattttaactatttttaagtgtacacttcagtggcatgaagtacattatttccattattgtgcaactatcattttacattccaccagcagtgcacaaggcttccaatttctccacatacttgccaatattaattagtttgtttctctctcatttcataggcatgatcataactcactgcagccccaacctcctgggctcaagggatccttccacctcagcctcctgggtagctggaactacaggtgccactacacccaaatagttttttggtttttttgaaatggagtttcactctgtcacccaggctggagtgcagtggcaccatttcagctcactgcaacctccgcctcctaggtttaagtgattctccttcctcggcctcctgagtagctgggattacaggcatgtgccaccatgtatggctattttttgtatttttagtagagacagggtttcaccatgttggccaggccaggctagtctcaaactcctgtcctcaagtgatccacttaccttggcctcccaaagtgctgggattacaggcttgaaccactgcacttggcctccatattttttataatagccactctaacatgtatgaaatggtatctcattgtggttttgattttcctttacctaatggctagtgatgttgaaaatcttttcatgtacttcttggcactggatttggcaatgatttattggatatgacaccagaagcatgggaaacaaaagaaaaaataggtaaattggacttcaccaaaattgaaaactttcggcatcagtggacactatcaagaaagtgaaaaggagctgggtgtggtggctcacgcctgtaattccagcactttgggaggccaaggtgggaggatcacttgaggtcaggagtgcgagaccagcctggttaacttggtgaaaccacgtctctactaaaaataaaaaaaaagagaaaaaaaaaagccgggtgtggtggcatgtgcctgtaatcccagcaactcaggaagctgaggcaggaggatcgcttgaagctgtgaggtggaggttgcagtgagccgagatcatgctactgcactccagcccaggtgacagagcaagaaagcaaaattccatctcaaaaaaaaaaaaaaggccgggtgtggtggctcacgcctgtaatcctagcactttgggaggctgaggcaggtggatcacgaggtcaggagatcgaaaccatcctggctaatgtggtgaaaccctgtctctacaaaaaaatacaaaaaattagccaggctggtagtggaagcctgtagtcccagctacttgggaggctgaggaaggagaatggcgtgaacctggaaccagtgagcccagatctcaccactgcactccagcctgggcgacagagcgagactccgtctcaaaaaaaaaaaaggtgaatataggagaaaagacactgtaaaataatatacctgataagggtctagtatccagaacatataaagaactcttacaacccaacaacaaaaagacaacccaatatcaaaatgggcagaggacttgaagagacttttctgtaaagaagatatgcaaatagcatatgaaacgatactcaacatcactagccatcatggaaatataaatcaaaaatacaatgagataacactccatacccatcagaatgtcttattattttaaaaacaaaccagaaacaagtattgacaaagaagtggagaaatgtgaacaccgctgtaaaatggtaaagctgctatgactgacccttgctacaacgtggaggaacctcagaaacattgtgctgagaacccagcacaaggccacacacctgtaatcccagctactcgggaggctgaggtgggagggtcgcttgagcctgggagttcaagtccagtctgggcagcatagcaagactccatgtctacaaagataaaaataaaagcaatgtgcagaaagaggctggccacaaaaaggtcacatactgtatgataccacttatatgaaatacccagaatgggtaaatccaaagagagcatattggtggttgtcaagggtcggagggaggatgaaatgtgtgacagctgcttaatggatggaggatttcctttggggtgatgaaactattttggaactaagaggtggtggctgcacaatgttgtgcatggactaaatgtcacagaaatgtacatttttaaaagttaattttatattgtgtaaattttacctcaataaaaaaatctagtccacagc

SEQ ID NO: 201964 - DNA, 572 bp, Homo sapiens
  Payload ID: 19841
  Gene Name: zinc finger protein 268
  ENST ID: ENST00000541975
  CDS Start-End: 468-572
gcgagatccttgttcctcagatagcgttcatcgcccgtcgtggtcaacgggccagccgagtctggagtggttgcgaacccttctggctgcagatctggaggtggaggcagtaccctggactctattctgctgccccttcagggtttggaggagccggagcatccctcgcgtcctgtcacttccagcgaggcacacaaaactgaccgtagggatggccaccagggtccggacagcttctatttggtccacaggtcccacctctccaagaacgaaacagttcatgggataggatcagaaagctccaaggtcaggaatccatcttgggccaagggactcctggtctgcaacctctccctggaacacccaggcagaagcagaagagtcgcagaatagagaaagtcctagagtggctgtttatttcccaagagcagccaaaaatcaccaagtcctggggacctttgtcattcatggatgtgtttgtggattttacctgggaggagtggcagctgctagacccagcacagaagtgcctgtacaggagtgtgatgttggagaactatagcaacctggtg

SEQ ID NO: 201965 - DNA, 612 bp, Homo sapiens
  Payload ID: 19841
  Gene Name: zinc finger protein 268
  ENST ID: ENST00000591951
  CDS Start-End: 1-334
gtcattcatggatgtgtttgtggattttacctgggaggagtggcagctgctagacccagcacagaagtgcctgtacaggagtgtgatgttggagaactatagcaacctggtgtccctagggtaccaacacaccaaacctgatatcatcttcaagttggaacaaggagaagagctgtgtatggtgcaggcccaagttccaaatcagacctgtccaattttgaaggctggaaagtccaaagccaaggtgctggcaggtttggtgtctggtgagggcctgctctgtgcttccaagatgacgccttgttgctgcatcctctggagtctggaaaattgatgatcttatggattggcatcaggaaaataaagacaagctgggaagtacggcaaaaagctttgaatgcactacatttggaaaactatgtcttcttagtacaaagtatctttcaagacaaaaacctcataaatgtggcacgcatggaaagagtttgaaatatatagatttcactagtgattatgctagaaataatcctaatgggtttcaggtacatggaaaatcattcttccattctaaacatgagcaaactgttattggaataaaatactgtgaaagta

SEQ ID NO: 201966 - DNA, 559 bp, Homo sapiens
  Payload ID: 19841
  Gene Name: zinc finger protein 268
  Uniprot ID: Q14587
  ENST ID: ENST00000588312
  CDS Start-End: 120-254
atctggaggtggaggcagtaccctggactctattctgctgccccttcagggtttggaggagccggagcatccctcgcgtcctgtcacttccagcgaggcacacaaaactgaccgtagggatggccaccagggtccggacagcttctatttggggtaccaacacaccaaacctgatatcatcttcaagttggaacaaggagaagagctgtgtatggtgcaggcccaagttccaaatcagacctgtccaattttgaaggctggaaagtccaaagccaaggtgctggcaggtttggtgtctggtgagggcctgctctgtgcttccaagatgacgccttgttgctgcatcctctggagacacagtctggaaaattgatgatcttatggattggcatcaggaaaataaagacaagctgggaagtacggcaaaaagctttgaatgcactacatttggaaaactatgtcttcttagtacaaagtatctttcaagacaaaaacctcataaatgtggcacgcatggaaagagtttgaaatatatagatttcactagtgattatgctag

SEQ ID NO: 201967 - DNA, 717 bp, Homo sapiens
  Payload ID: 19841
  Gene Name: zinc finger protein 268
  ENST ID: ENST00000500625
  CDS Start-End: 434-717
cggccgccattgttccgcgccgatggcgagatccttgttcctcagatagcgttcatcgcccgtcgtggtcaacgggccagccgagtctggagtggttgcgaacccttctggctgcagatctggagcatccctcgcgtcctgtcacttccagcgaggcacacaaaactgaccgtagggatggccaccagggtccggacagcttctatttggtccacaggtcccacctctccaagaacgaaacagttcatgggataggatcagaaagctccaaggtcaggaatccatcttgggccaagggactcctggtctgcaacctctccctggaacacccaggcagaagcagaagagtcgcagaatagagaaagtcctagagtggctgtttatttcccaagagcagccaaaaatcaccaagtcctggggacctttgtcattcatggatgtgtttgtggattttacctgggaggagtggcagctgctagacccagcacagaagtgcctgtacaggagtgtgatgttggagaactatagcaacctggtgtccctagggtaccaacacaccaaacctgatatcatcttcaagttggaacaaggagaagagctgtgtatggtgcaggcccaagttccaaatcagacctgtccaaacacagtctggaaaattgatgatcttatggattggcatcaggaaaataaagacaagctgggaagtacggcaaaaag

SEQ ID NO: 201968 - DNA, 759 bp, Homo sapiens
  Payload ID: 19841
  Gene Name: zinc finger protein 268
  Uniprot ID: Q14587
  ENST ID: ENST00000539248
  CDS Start-End: 229-636
attgttccgcgccgatggcgagatccttgttcctcagatagcgttcatcgcccgtcgtggtcaacgggccagccgagtctggagtggttgcgaacccttctggctgcagatctggaggtggaggcagtaccctggactctattctgctgccccttcagggtttggaggagccggagcatccctcgcgtcctgtcacttccagcgaggcacacaaaactgaccgtagggatggccaccagggtccggacagcttctatttgggtcccacctctccaagaacgaaacagttcatgggataggatcagaaagctccaaggtcaggaatccatcttgggccaagggactcctggtctgcaacctctccctggaacacccaggcagaagcagaagagtcgcagaatagagaaagtcctagagtggctgtttatttcccaagagcagccaaaaatcaccaagtcctggacacagtctggaaaattgatgatcttatggattggcatcaggaaaataaagacaagctgggaagtacggcaaaaagctttgaatgcactacatttggaaaactatgtcttcttagtacaaagtatctttcaagacaaaaacctcataaatgtggcacgcatggaaagagtttgaaatatatagatttcactagtgattatgctagaaataatcctaatgggtttcaggtacatggaaaatcattcttccattctaaacatgagcaaactgttattggaataaaatactgtgaaagta

SEQ ID NO: 201969 - DNA, 686 bp, Homo sapiens
  Payload ID: 19841
  Gene Name: zinc finger protein 268
  ENST ID: ENST00000592241
  CDS Start-End: 120-500
atctggaggtggaggcagtaccctggactctattctgctgccccttcagggtttggaggagccggagcatccctcgcgtcctgtcacttccagcgaggcacacaaaactgaccgtagggatggccaccagggtccggacagcttctatttggggacctttgtcattcatggatgtgtttgtggattttacctgggaggagtggcagctgctagacccagcacagaagtgcctgtacaggagtgtgatgttggagaactatagcaacctggtgtccctagggtaccaacacaccaaacctgatatcatcttcaagttggaacaaggagaagagctgtgtatggtgcaggcccaagttccaaatcagacctgtccaattttgaaggctggaaagtccaaagccaaggtgctggcaggtttggtgtctggtgagggcctgctctgtgcttccaagatgacgccttgttgctgcatcctctggagacacagtctggaaaattgatgatcttatggattggcatcaggaaaataaagacaagctgggaagtacggcaaaaagctttgaatgcactacatttggaaaactatgtcttcttagtacaaagtatctttcaagacaaaaacctcataaatgtggcacgcatggaaagagtttgaaatatatagatttcactagtgattatgctag

SEQ ID NO: 201970 - DNA, 583 bp, Homo sapiens
  Payload ID: 19841
  Gene Name: zinc finger protein 268
  ENST ID: ENST00000611984
  CDS Start-End: 218-583
ccgatggcgagatccttgttcctcagatagcgttcatcgcccgtcgtggtcaacgggccagccgagtctggagtggttgcgaacccttctggctgcagatctggaggtggaggcagtaccctggactctattctgctgccccttcagggtttggaggagccggagcatccctcgcgtcctgtcacttccagcgaggcacacaaaactgaccgtagggatggccaccagggtccggacagcttctatttggggacctttgtcattcatggatgtgtttgtggattttacctgggaggagtggcagctgctagacccagcacagaagtgcctgtacaggagtgtgatgttggagaactatagcaacctggtgtccctagggtaccaacacaccaaacctgatatcatcttcaagttggaacaaggagaagagctgtgtatggtgcaggcccaagttccaaatcagacctgtccaattttgaaggctggaaagtccaaagccaaggtgctggcaggtttggtgtctggtgagggcctgctctgtgcttccaagatgacgccttgttgctgcatcctctggaggtga

SEQ ID NO: 201971 - DNA, 2000 bp, Homo sapiens
  Payload ID: 19842
  Gene Name: zinc finger protein 273
  Uniprot ID: Q14593
  ENST ID: ENST00000476120
  CDS Start-End: 72-1781
ggcttccgggatttggcggggcctttgtctctcgctgcagtcgcagctccaggtctcgtcttcactgctctatgtcctctgctcctagaggtccaccttctgtggccccgttacctgcaggtattgggagatccacagctaagacgccaggactccctggaagcctagaaatgggaccactgacatttagggatgtggccatagaattctctctggaggagtggcaatgcctggacacttcacagcagaatttgtataggaatgtgatgttagataactacagaaacctggtcttcctgggtattgctgtctctaagccagacctgatcacttgtctggagcaaggaaaagagccctgcaatatgaagagacatgcgatggtagccaaacccccagttgtgtgttctcattttgcccaagacctttggccaaagcagggcttaaaagattcttttcaaaaagtgatactgagaagatatggaaaatatggacatgagaatttacaattaagaaaaggctgtaaaagtgcggatgagcataaggtgcacaaaagaggttataatggacttaaccaatgtttgacaactacccagagcaaaatatttcaatgtgataaatatgttaaagtccttcataaattctcaaattcaaatatacataagaaaagacaaactggaaagaaacctttcaaatgtaaagaatgtggcaaatcatgttgcatactttcacaactaactcagcataagaaaactgctactagagtgaatttctacaaatgtaagacatgtggaaaagcctttaaccagttctcaaatcttactaaacataagataattcatcctgaagtgaatccctacaaatgtgaagaatgtggcaaagcctttaaccagtccttaactcttactaaacataaaaaaattcatactgaagagaaaccttacaaatgtgaagattgtggcaaagtctttagtgtattttcagtccttactaaacataagataattcatacaggaacaaaaccctacaattgtgaagaatgtggcaaaggctttagtatattctcaacccttactaaacataagataattcatactggagagaaaccctacaaatgcaatgaatgtggtaaagcctttaactggtcctcaactcttactaaacataagagaattcatactggagagaaaccctacaaatgtgaagaatgtggcaaagcttttaaccagtcctcaacccttactagacataagatagttcatactggagagaaaccctacaaatgtgaagaatgtggtaaagcctttaaacggtccacaactcttactaaacataagagaatttatactaaagagaaaccatacaaatgtgaagaatgtggaaaagcctttagtgtattctcaacccttactaaacataagataattcatactggagcaaaaccttacaaatgtgaagaatgtggcagtgcctttagggcattctcaacccttactgaacataagagagttcatactggagagaaaccttacaaatgcaatgaatgtggtaaagcctttaactggtcctcaactcttactaaacataagagaattcatactggagagaagccctacaaatgtgaagaatgtggcaaagcttttaaccggtcctcaaaccttactcgacataagaaaattcatactggagagaaaccatacaaacctaaaagatgtgacagtgcttttgacaacaccccaaacttttctagacataaaagaaatcatatgggtgagaaatcctagaaatgtgaagaatgtgacaaagcctttaagcggttgtcacacttgattgtatataagataattcatactggagaaaactcccagaagtggagttttccttattgcacaggaaagcatttatacttgagaaaaattgtataaagaatggaaaagtcattaatatctgctcatatcttaacatcagcgagttggtatttaataaaagcattatcaatgaaa

SEQ ID NO: 201972 - DNA, 3757 bp, Homo sapiens
  Payload ID: 19842
  Gene Name: zinc finger protein 273
  ENST ID: ENST00000395375
  CDS Start-End: 31-231
cgcagctccaggtctcgtcttcactgctctatgtcctctgctcctagaggtccaccttctgtggccccgttacctgcaggtattgggagatccacagctaagacgccaggactccctggaagcctagaaatggccagaaaaactgggaaaatcacaggctcttccacttactggatgtttgacaaaatattcttcttgggccaaaaacattggcattactgggaccactgacatttagggatgtggccatagaattctctctggaggagtggcaatgcctggacacttcacagcagaatttgtataggaatgtgatgttagataactacagaaacctggtcttcctgggtattgctgtctctaagccagacctgatcacttgtctggagcaaggaaaagagccctgcaatatgaagagacatgcgatggtagccaaacccccagttgtgtgttctcattttgcccaagacctttggccaaagcagggcttaaaagattcttttcaaaaagtgatactgagaagatatggaaaatatggacatgagaatttacaattaagaaaaggctgtaaaagtgcggatgagcataaggtgcacaaaagaggttataatggacttaaccaatgtttgacaactacccagagcaaaatatttcaatgtgataaatatgttaaagtccttcataaattctcaaattcaaatatacataagaaaagacaaactggaaagaaacctttcaaatgtaaagaatgtggcaaatcatgttgcatactttcacaactaactcagcataagaaaactgctactagagtgaatttctacaaatgtaagacatgtggaaaagcctttaaccagttctcaaatcttactaaacataagataattcatcctgaagtgaatccctacaaatgtgaagaatgtggcaaagcctttaaccagtccttaactcttactaaacataaaaaaattcatactgaagagaaaccttacaaatgtgaagattgtggcaaagtctttagtgtattttcagtccttactaaacataagataattcatacaggaacaaaaccctacaattgtgaagaatgtggcaaaggctttagtatattctcaacccttactaaacataagataattcatactggagagaaaccctacaaatgcaatgaatgtggtaaagcctttaactggtcctcaactcttactaaacataagagaattcatactggagagaaaccctacaaatgtgaagaatgtggcaaagcttttaaccagtcctcaacccttactagacataagatagttcatactggagagaaaccctacaaatgtgaagaatgtggtaaagcctttaaacggtccacaactcttactaaacataagagaatttatactaaagagaaaccatacaaatgtgaagaatgtggaaaagcctttagtgtattctcaacccttactaaacataagataattcatactggagcaaaaccttacaaatgtgaagaatgtggcagtgcctttagggcattctcaacccttactgaacataagagagttcatactggagagaaaccttacaaatgcaatgaatgtggtaaagcctttaactggtcctcaactcttactaaacataagagaattcatactggagagaagccctacaaatgtgaagaatgtggcaaagcttttaaccggtcctcaaaccttactcgacataagaaaattcatactggagagaaaccatacaaacctaaaagatgtgacagtgcttttgacaacaccccaaacttttctagacataaaagaaatcatatgggtgagaaatcctagaaatgtgaagaatgtgacaaagcctttaagcggttgtcacacttgattgtatataagataattcatactggagaaaactcccagaagtggagttttccttattgcacaggaaagcatttatacttgagaaaaattgtataaagaatggaaaagtcattaatatctgctcatatcttaacatcagcgagttggtatttaataaaagcattatcaatgaaattactgtcaaaagatctttcagacaatataagcctgcaaagtgcagcagagtatttattttgaagagaaacattaaaagtacaaagaggtttgtagtacctttgtttgtatcatagatcttattgtacacattttgtaccagagaaaaaccctgaagcagttgttcaaactttgttcaataccaggaaatttatattggagaaaaaccctatgagtgtaatgaatttggaaaaatatttttttcaacaacagcttagaaaacatgggaggaattacactaaaatatatttttgcaaatgcagcagtaaatatgaaagaaatgatccaaagttaggtttatataaatatcagagaattcacaatacagatatctaagatactgacacttcagacattacacaaaatcagagtgctgagtacagaaagttatccaaaacaaaagttggtagataactaatagtgaacaagtttttggcagaggtatatttacattcagagtacacttttctttggaaaaaattacaggttttttgaaaagtgaataatgtaattcaactctcaaattcatggtttttttttttttggttttggttttgggttttttgtttgtttgtttgtttgtttttgagacggagtttcactcttgttgcccaggctggagtgcaatggcgtgatctcagctcaccgcaacctctgcctcccagattcaagcaattctcctgcctcagcctccctagtagctgggattacaggcatgtgccacacctggctaatttttgtggttttagtagagacagggtttctccatgttggtcagtctggtctcaaactcccaacctcaggtgatatgcccgcctcggcctcccaaaatgttgggattacaggcatgagccactgcacccggcgcatgttttttcttcattcctattgtattcacatgtgaaagcatgtgatcaacttgctgcatcaaagatatgagatttttttttttattaggtgggcattatttatgaccttttctgtggaagagtaagaacattaaaatgaaagatgcatgatgaaaatctaagtagagaggctcttgtggttaactgataatattgagtgatgcatgaggtaggtgttcagagtaatattctgcattatagtgaaaaatttttaatattaaaattcaattatatcattttatgaattgtgcttttcataatgcagtacatttcaaaatttttagattatgtatgaacttagatttttaaacatgttttaacatgttaagacttgtgcattcagtgaagcgttattatgccacaaactaacctacctcaccttactcaatggtgtaggtaaaagatgatagcaatatattatttggttacatagtggactaacatttttagtaatctcttttgccagtggctttaaactgcagataagttaaatattcccataggttttacatttatattttttcttatttaaatttattgttcttatttttcatgggtacatagtatgtttttatgctgtatatggcatgttttgatacaggtatataatatgtaataatcacatcagggtaaatgaggtatcccttactagcatttatcctttgtattttattttaaaatgtacaactaaattgttatggactacagggttatttttatggtcataataaaaattacaaaagtatgaataaaatacataca

SEQ ID NO: 201973 - DNA, 2678 bp, Homo sapiens
  Payload ID: 19843
  Gene Name: zinc finger protein 274
  Uniprot ID: Q96GC6
  ENST ID: ENST00000345813
  CDS Start-End: 402-2267
gtccagcgcctttcctttctccagcttctgctctgccccaagagtggtcgccttcgtggcagggcacgactctctcccagctcgggtcgccgcccacattagtgtggggccctgcggcctagcgtccctcaccagaggcctccccttgcctagctggaccgccgagggacatcgacgagtatcctcctcctgctgtccccggcttcgcctgccgcccctaaccggccagtcaagatggccgccgctgggtgaggcaagctggcgcgccgcgggggcgtctgggagttgtagttcgggacggcgggctgacgcacttcgccgccggccgacgggcgccattgtgcggcgcgcgccgggactctgcccacttccaccagagacacattgagaaggaggaaactatggcctccaggcttccgacggcctggtcctgtgaaccagtgacctttgaagatgtaacactgggttttaccccggaagagtggggactgctggacctcaaacagaagtccctgtacagggaagtgatgctggagaactacaggaacctggtctcagtggagtatcctgagctccagctggaccctaaattggatcctcttcctgctgagagtcccctaatgaacattgaggttgttgaggtcctcacactgaaccaggaggtggctggtccccggaatgcccagatccaggccctatatgctgaagatggaagcctgagtgcagatgcccccagtgagcaggtccaacagcagggcaagcatccaggtgaccctgaggccgcgcgccagaggttccggcagttccgttataaggacatgacaggtccccgggaggccctggaccagctccgagagctgtgtcaccagtggctacagcctaaggcacgctccaaggagcagatcctggagctgctggtgctggagcagttcctaggtgcactgcctgtgaagctccggacatgggtggaatcgcagcacccagagaactgccaagaggtggtggccctggtagagggtgtgacctggatgtctgaggaggaagtacttcctgcaggacaacctgccgagggcaccacctgctgcctcgaggtcactgcccagcaggaggagaagcaggaggatgcagccatctgcccagtgacagtgctccctgaggagccagtgaccttccaggatgtggctgtggacttcagccgggaggagtgggggctgctgggcccgacacagaggaccgagtaccgcgatgtgatgctggagacctttgggcacctggtctctgtggggtgggagactacactggaaaataaagagttagctccaaattctgacattcctgaggaagaaccagcccccagcctgaaagtacaagaatcctcaagggattgtgccttgtcctctacattagaagataccttgcagggtggggtccaggaagtccaagacacagtgttgaagcagatggagtctgctcaggaaaaagaccttcctcagaagaagcactttgacaaccgtgagtcccaggcaaacagtggtgctcttgacacaaaccaagtttcgctccagaaaattgacaaccctgagtcccaggcaaacagtggcgctcttgacacaaaccaagttttgctccacaaaattcctcctagaaaacgattgcgcaaacgtgactcacaagttaaaagtatgaaacataattcacgtgtaaaaattcatcagaagagctgtgaaaggcaaaaggccaaggaaggcaatggttgtaggaaaaccttcagtcggagtactaaacagattacgtttataagaattcacaaggggagccaagtttgccgatgcagtgaatgtggtaaaatattccggaacccaagatacttttctgtgcataagaaaatccataccggagagaggccctatgtgtgtcaagactgtgggaaaggatttgttcagagctcttccctcacacagcatcagagagttcattctggagagagaccatttgaatgtcaggagtgtgggaggaccttcaatgatcgctcagccatctcccagcacctgaggactcacactggcgctaagccctacaagtgtcaggactgtggaaaagccttccgccagagctcccacctcatcagacatcagaggactcacaccggggagcgcccatatgcatgcaacaaatgtggaaaggccttcacccagagctcacaccttattgggcaccagagaacccacaataggacaaagcgaaagaagaaacagcctacctcatagctctcaagccagttgaagaaaccttgccttttcagcttgaccctgcaatataacatgcacaggcctgcttgtgaatcaggactgaatgtgaaagggaagtattgagtgaggacattcccaaaaccaaaggacaactgaggagactgcccagcacataatgaataaataagaaaatgagtgaggagttattaacatcatttggaaaaaagatttcccattcacttgatattgtttgttcactcatttagtcattaaaagtgagattaataaaatctgaaaatgttatataataactttaaaaagccaggtaattaataatctgcactgatattacatccacagtaccacagtatttatgtgtatgaattaaggattaaaagataatgtggataaataaactattgatctatg

SEQ ID NO: 201974 - DNA, 2447 bp, Homo sapiens
  Payload ID: 19843
  Gene Name: zinc finger protein 274
  ENST ID: ENST00000326804
  CDS Start-End: 203-2038
gtgcggcgcgcgccgggactctgcccacttccaccagagacacattgagaaggaggaaactatggcctccaggcttccgacggcctggtcctgtaatctggatttttaggaaccagtgacctttgaagatgtaacactgggttttaccccggaagagtggggactgctggacctcaaacagaagtccctgtacagggaagtgatgctggagaactacaggaacctggtctcagtggaacatcagctttccaaaccagatgtggtatctcagttagaggaggcagaagatttctggccagtggagagaggaattcctcaagacaccattccagagtatcctgagctccagctggaccctaaattggatcctcttcctgctgagagtcccctaatgaacattgaggttgttgaggtcctcacactgaaccaggaggtggctggtccccggaatgcccagatccaggccctatatgctgaagatggaagcctgagtgcagatgcccccagtgagcaggtccaacagcagggcaagcatccaggtgaccctgaggccgcgcgccagaggttccggcagttccgttataaggacatgacaggtccccgggaggccctggaccagctccgagagctgtgtcaccagtggctacagcctaaggcacgctccaaggagcagatcctggagctgctggtgctggagcagttcctaggtgcactgcctgtgaagctccggacatgggtggaatcgcagcacccagagaactgccaagaggtggtggccctggtagagggtgtgacctggatgtctgaggaggaagtacttcctgcaggacaacctgccgagggcaccacctgctgcctcgaggtcactgcccagcaggaggagaagcaggaggatgcagccatctgcccagtgacagtgctccctgaggagccagtgaccttccaggatgtggctgtggacttcagccgggaggagtgggggctgctgggcccgacacagaggaccgagtaccgcgatgtgatgctggagacctttgggcacctggtctctgtggggtgggagactacactggaaaataaagagttagctccaaattctgacattcctgaggaagaaccagcccccagcctgaaagtacaagaatcctcaagggattgtgccttgtcctctacattagaagataccttgcagggtggggtccaggaagtccaagacacagtgttgaagcagatggagtctgctcaggaaaaagaccttcctcagaagaagcactttgacaaccgtgagtcccaggcaaacagtggtgctcttgacacaaaccaagtttcgctccagaaaattgacaaccctgagtcccaggcaaacagtggcgctcttgacacaaaccaagttttgctccacaaaattcctcctagaaaacgattgcgcaaacgtgactcacaagttaaaagtatgaaacataattcacgtgtaaaaattcatcagaagagctgtgaaaggcaaaaggccaaggaaggcaatggttgtaggaaaaccttcagtcggagtactaaacagattacgtttataagaattcacaaggggagccaagtttgccgatgcagtgaatgtggtaaaatattccggaacccaagatacttttctgtgcataagaaaatccataccggagagaggccctatgtgtgtcaagactgtgggaaaggatttgttcagagctcttccctcacacagcatcagagagttcattctggagagagaccatttgaatgtcaggagtgtgggaggaccttcaatgatcgctcagccatctcccagcacctgaggactcacactggcgctaagccctacaagtgtcaggactgtggaaaagccttccgccagagctcccacctcatcagacatcagaggactcacaccggggagcgcccatatgcatgcaacaaatgtggaaaggccttcacccagagctcacaccttattgggcaccagagaacccacaataggacaaagcgaaagaagaaacagcctacctcatagctctcaagccagttgaagaaaccttgccttttcagcttgaccctgcaatataacatgcacaggcctgcttgtgaatcaggactgaatgtgaaagggaagtattgagtgaggacattcccaaaaccaaaggacaactgaggagactgcccagcacataatgaataaataagaaaatgagtgaggagttattaacatcatttggaaaaaagatttcccattcacttgatattgtttgttcactcatttagtcattaaaagtgagattaataaaatctgaaaatgttatataataactttaaaaagccaggtaattaataatctgcactgatattacatccacagtaccacagtatttatgtgtatgaattaaggattaaaagataatgtggataaataaactattgatcta

SEQ ID NO: 201975 - DNA, 2539 bp, Homo sapiens
  Payload ID: 19843
  Gene Name: zinc finger protein 274
  Uniprot ID: Q96GC6
  ENST ID: ENST00000424679
  CDS Start-End: 474-2120
cgcccccaccgccacccaaccaagcatcacccattccagcacttccggcctgacccctgtccagcgcctttcctttctccagcttctgctctgccccaagagtggtcgccttcgtggcagggcacgactctctcccagctcgggtcgccgcccacattagtgtggggccctgcggcctagcgtccctcaccagaggcctccccttgcctagctggaccgccgagggacatcgacgagtatcctcctcctgctgtccccggcttcgcctgccgcccctaaccggccagtcaagatggccgccgctgggtgaggcaagctggcgcgccgcgggggcgtctgggagttgtagttcgggacggcgggctgacgcacttcgccgccggccgacgggcgccattgtgcggcgcgcgccggagtatcctgagctccagctggaccctaaattggatcctcttcctgctgagagtcccctaatgaacattgaggttgttgaggtcctcacactgaaccaggaggtggctggtccccggaatgcccagatccaggccctatatgctgaagatggaagcctgagtgcagatgcccccagtgagcaggtccaacagcagggcaagcatccaggtgaccctgaggccgcgcgccagaggttccggcagttccgttataaggacatgacaggtccccgggaggccctggaccagctccgagagctgtgtcaccagtggctacagcctaaggcacgctccaaggagcagatcctggagctgctggtgctggagcagttcctaggtgcactgcctgtgaagctccggacatgggtggaatcgcagcacccagagaactgccaagaggtggtggccctggtagagggtgtgacctggatgtctgaggaggaagtacttcctgcaggacaacctgccgagggcaccacctgctgcctcgaggtcactgcccagcaggaggagaagcaggaggatgcagccatctgcccagtgacagtgctccctgaggagccagtgaccttccaggatgtggctgtggacttcagccgggaggagtgggggctgctgggcccgacacagaggaccgagtaccgcgatgtgatgctggagacctttgggcacctggtctctgtggggtgggagactacactggaaaataaagagttagctccaaattctgacattcctgaggaagaaccagcccccagcctgaaagtacaagaatcctcaagggattgtgccttgtcctctacattagaagataccttgcagggtggggtccaggaagtccaagacacagtgttgaagcagatggagtctgctcaggaaaaagaccttcctcagaagaagcactttgacaaccgtgagtcccaggcaaacagtggtgctcttgacacaaaccaagtttcgctccagaaaattgacaaccctgagtcccaggcaaacagtggcgctcttgacacaaaccaagttttgctccacaaaattcctcctagaaaacgattgcgcaaacgtgactcacaagttaaaagtatgaaacataattcacgtgtaaaaattcatcagaagagctgtgaaaggcaaaaggccaaggaaggcaatggttgtaggaaaaccttcagtcggagtactaaacagattacgtttataagaattcacaaggggagccaagtttgccgatgcagtgaatgtggtaaaatattccggaacccaagatacttttctgtgcataagaaaatccataccggagagaggccctatgtgtgtcaagactgtgggaaaggatttgttcagagctcttccctcacacagcatcagagagttcattctggagagagaccatttgaatgtcaggagtgtgggaggaccttcaatgatcgctcagccatctcccagcacctgaggactcacactggcgctaagccctacaagtgtcaggactgtggaaaagccttccgccagagctcccacctcatcagacatcagaggactcacaccggggagcgcccatatgcatgcaacaaatgtggaaaggccttcacccagagctcacaccttattgggcaccagagaacccacaataggacaaagcgaaagaagaaacagcctacctcatagctctcaagccagttgaagaaaccttgccttttcagcttgaccctgcaatataacatgcacaggcctgcttgtgaatcaggactgaatgtgaaagggaagtattgagtgaggacattcccaaaaccaaaggacaactgaggagactgcccagcacataatgaataaataagaaaatgagtgaggagttattaacatcatttggaaaaaagatttcccattcacttgatattgtttgttcactcatttagtcattaaaagtgagattaataaaatctgaaaatgttatataataactttaaaaagccaggtaattaataatctgcactgatattacatccacagtaccacagtatttatgtgtatgaattaaggattaaaagataatgtggataaataaactattgatctatgtctgtgta

SEQ ID NO: 201976 - DNA, 544 bp, Homo sapiens
  Payload ID: 19843
  Gene Name: zinc finger protein 274
  ENST ID: ENST00000594839
  CDS Start-End: 234-544
gactctgcccacttccaccagagacacattgagaaggaggaaactatggcctccaggcttccgacggcctggtcctgtaacatcagctttccaaaccagatgtggtatctcagttagaggaggcagaagatttctggccagtggagagaggaattcctcaagacaccattccagagtatcctgagctccagctggaccctaaattggatcctcttcctgctgagagtcccctaatgaacattgaggttgttgaggtcctcacactgaaccaggaggtggctggtccccggaatgcccagatccaggccctatatgctgaagatggaagcctgagtgcagatgcccccagtgagcaggtccaacagcagggcaagcatccaggtgaccctgaggccgcgcgccagaggttccggcagttccgttataaggacatgacaggtccccgggaggccctggaccagctccgagagctgtgtcaccagtggctacagcctaaggcacgctccaaggagcagatcctggagctgctggtgctggagcagtt

SEQ ID NO: 201977 - DNA, 709 bp, Homo sapiens
  Payload ID: 19843
  Gene Name: zinc finger protein 274
  ENST ID: ENST00000597528
  CDS Start-End: 473-709
agaaccgttagttgggggcgagcgcggcctctgcattttccgccgagctcgggtaccctgagccggccgtgcctgcagtcctcccgccgctctgtgggatggggtcggtgacccggaaccccgaggggagacagtgctttcggggcgccgcggtggagagaacagatcgcctccggaagcgtggggtctgggccagggaggcgatcccctccgatgcgcgggacagaggaggctcggtgtcctctcggggaggggaaaactggtcctatccagtcctgtgggagtcctatgactcactctgggcgttttccagtttgggtggacttgtcatttcccgctgagggagccgttcctgggcggaggctgcggtagctccccagcggacaccttaagcctctccctcccctcccaacttcggtttcctcaggactctgcccacttccaccagagacacattgagaaggaggaaactatggcctccaggcttccgacggcctggtcctgtgaaccagtgacctttgaagatgtaacactgggttttaccccggaagagtggggactgctggacctcaaacagaagtccctgtacagggaagtgatgctggagaactacaggaacctggtctcagtggaacatcagctttccaaaccagatgtggtatctcagttagaggaggcagaagatttctggccagtggagagaggaatt

SEQ ID NO: 201978 - DNA, 2559 bp, Homo sapiens
  Payload ID: 19843
  Gene Name: zinc finger protein 274
  Uniprot ID: Q96GC6
  ENST ID: ENST00000610905
  CDS Start-End: 189-2150
gcgaaacctgcgtccgtcgggggctgcgctgggcgggtccagaaccgttagttgggggcgagcgcggcctctgcattttccgccgagctcgggtaccctgagccggccgtgcctgcagtcctcccgccgctctgtgggatggggactctgcccacttccaccagagacacattgagaaggaggaaactatggcctccaggcttccgacggcctggtcctgtgaaccagtgacctttgaagatgtaacactgggttttaccccggaagagtggggactgctggacctcaaacagaagtccctgtacagggaagtgatgctggagaactacaggaacctggtctcagtggaacatcagctttccaaaccagatgtggtatctcagttagaggaggcagaagatttctggccagtggagagaggaattcctcaagacaccattccagagtatcctgagctccagctggaccctaaattggatcctcttcctgctgagagtcccctaatgaacattgaggttgttgaggtcctcacactgaaccaggaggtggctggtccccggaatgcccagatccaggccctatatgctgaagatggaagcctgagtgcagatgcccccagtgagcaggtccaacagcagggcaagcatccaggtgaccctgaggccgcgcgccagaggttccggcagttccgttataaggacatgacaggtccccgggaggccctggaccagctccgagagctgtgtcaccagtggctacagcctaaggcacgctccaaggagcagatcctggagctgctggtgctggagcagttcctaggtgcactgcctgtgaagctccggacatgggtggaatcgcagcacccagagaactgccaagaggtggtggccctggtagagggtgtgacctggatgtctgaggaggaagtacttcctgcaggacaacctgccgagggcaccacctgctgcctcgaggtcactgcccagcaggaggagaagcaggaggatgcagccatctgcccagtgacagtgctccctgaggagccagtgaccttccaggatgtggctgtggacttcagccgggaggagtgggggctgctgggcccgacacagaggaccgagtaccgcgatgtgatgctggagacctttgggcacctggtctctgtggggtgggagactacactggaaaataaagagttagctccaaattctgacattcctgaggaagaaccagcccccagcctgaaagtacaagaatcctcaagggattgtgccttgtcctctacattagaagataccttgcagggtggggtccaggaagtccaagacacagtgttgaagcagatggagtctgctcaggaaaaagaccttcctcagaagaagcactttgacaaccgtgagtcccaggcaaacagtggtgctcttgacacaaaccaagtttcgctccagaaaattgacaaccctgagtcccaggcaaacagtggcgctcttgacacaaaccaagttttgctccacaaaattcctcctagaaaacgattgcgcaaacgtgactcacaagttaaaagtatgaaacataattcacgtgtaaaaattcatcagaagagctgtgaaaggcaaaaggccaaggaaggcaatggttgtaggaaaaccttcagtcggagtactaaacagattacgtttataagaattcacaaggggagccaagtttgccgatgcagtgaatgtggtaaaatattccggaacccaagatacttttctgtgcataagaaaatccataccggagagaggccctatgtgtgtcaagactgtgggaaaggatttgttcagagctcttccctcacacagcatcagagagttcattctggagagagaccatttgaatgtcaggagtgtgggaggaccttcaatgatcgctcagccatctcccagcacctgaggactcacactggcgctaagccctacaagtgtcaggactgtggaaaagccttccgccagagctcccacctcatcagacatcagaggactcacaccggggagcgcccatatgcatgcaacaaatgtggaaaggccttcacccagagctcacaccttattgggcaccagagaacccacaataggacaaagcgaaagaagaaacagcctacctcatagctctcaagccagttgaagaaaccttgccttttcagcttgaccctgcaatataacatgcacaggcctgcttgtgaatcaggactgaatgtgaaagggaagtattgagtgaggacattcccaaaaccaaaggacaactgaggagactgcccagcacataatgaataaataagaaaatgagtgaggagttattaacatcatttggaaaaaagatttcccattcacttgatattgtttgttcactcatttagtcattaaaagtgagattaataaaatctgaaaatgttatataataactttaaaaagccaggtaattaataatctgcactgatattacatccacagtaccacagtatttatgtgtatgaattaaggattaaaagataatgtggataaataaactattgatcta

SEQ ID NO: 201979 - DNA, 2538 bp, Homo sapiens
  Payload ID: 19843
  Gene Name: zinc finger protein 274
  Uniprot ID: Q96GC6
  ENST ID: ENST00000617501
  CDS Start-End: 179-2140
ggccagtcaagatggccgccgctgggtgaggcaagctggcgcgccgcgggggcgtctgggagttgtagttcgggacggcgggctgacgcacttcgccgccggccgacgggcgccattgtgcggcgcgcgccgggactctgcccacttccaccagagacacattgagaaggaggaaactatggcctccaggcttccgacggcctggtcctgtgaaccagtgacctttgaagatgtaacactgggttttaccccggaagagtggggactgctggacctcaaacagaagtccctgtacagggaagtgatgctggagaactacaggaacctggtctcagtggaacatcagctttccaaaccagatgtggtatctcagttagaggaggcagaagatttctggccagtggagagaggaattcctcaagacaccattccagagtatcctgagctccagctggaccctaaattggatcctcttcctgctgagagtcccctaatgaacattgaggttgttgaggtcctcacactgaaccaggaggtggctggtccccggaatgcccagatccaggccctatatgctgaagatggaagcctgagtgcagatgcccccagtgagcaggtccaacagcagggcaagcatccaggtgaccctgaggccgcgcgccagaggttccggcagttccgttataaggacatgacaggtccccgggaggccctggaccagctccgagagctgtgtcaccagtggctacagcctaaggcacgctccaaggagcagatcctggagctgctggtgctggagcagttcctaggtgcactgcctgtgaagctccggacatgggtggaatcgcagcacccagagaactgccaagaggtggtggccctggtagagggtgtgacctggatgtctgaggaggaagtacttcctgcaggacaacctgccgagggcaccacctgctgcctcgaggtcactgcccagcaggaggagaagcaggaggatgcagccatctgcccagtgacagtgctccctgaggagccagtgaccttccaggatgtggctgtggacttcagccgggaggagtgggggctgctgggcccgacacagaggaccgagtaccgcgatgtgatgctggagacctttgggcacctggtctctgtggggtgggagactacactggaaaataaagagttagctccaaattctgacattcctgaggaagaaccagcccccagcctgaaagtacaagaatcctcaagggattgtgccttgtcctctacattagaagataccttgcagggtggggtccaggaagtccaagacacagtgttgaagcagatggagtctgctcaggaaaaagaccttcctcagaagaagcactttgacaaccgtgagtcccaggcaaacagtggtgctcttgacacaaaccaagtttcgctccagaaaattgacaaccctgagtcccaggcaaacagtggcgctcttgacacaaaccaagttttgctccacaaaattcctcctagaaaacgattgcgcaaacgtgactcacaagttaaaagtatgaaacataattcacgtgtaaaaattcatcagaagagctgtgaaaggcaaaaggccaaggaaggcaatggttgtaggaaaaccttcagtcggagtactaaacagattacgtttataagaattcacaaggggagccaagtttgccgatgcagtgaatgtggtaaaatattccggaacccaagatacttttctgtgcataagaaaatccataccggagagaggccctatgtgtgtcaagactgtgggaaaggatttgttcagagctcttccctcacacagcatcagagagttcattctggagagagaccatttgaatgtcaggagtgtgggaggaccttcaatgatcgctcagccatctcccagcacctgaggactcacactggcgctaagccctacaagtgtcaggactgtggaaaagccttccgccagagctcccacctcatcagacatcagaggactcacaccggggagcgcccatatgcatgcaacaaatgtggaaaggccttcacccagagctcacaccttattgggcaccagagaacccacaataggacaaagcgaaagaagaaacagcctacctcatagctctcaagccagttgaagaaaccttgccttttcagcttgaccctgcaatataacatgcacaggcctgcttgtgaatcaggactgaatgtgaaagggaagtattgagtgaggacattcccaaaaccaaaggacaactgaggagactgcccagcacataatgaataaataagaaaatgagtgaggagttattaacatcatttggaaaaaagatttcccattcacttgatattgtttgttcactcatttagtcattaaaagtgagattaataaaatctgaaaatgttatataataactttaaaaagccaggtaattaataatctgcactgatattacatccacagtaccacagtatttatgtgtatgaattaaggattaaaagataatgtggataaataaa

SEQ ID NO: 201980 - DNA, 5920 bp, Homo sapiens
  Payload ID: 19844
  Gene Name: zinc finger protein 275
  Uniprot ID: Q9NSD4
  ENST ID: ENST00000370249
  CDS Start-End: 1372-2502
ctctgtctcttgccccagcatgacacacggcagagtatgaaccccagctgctgccttcctaccctccctctgcttctcttctggaggctgccaaggattggatgtccactgggcttggagttccaatcatccaggtggggaagctgagtttccatccaggaaagtgattgaatggaggtcccttggaaagacgagaggccaggtccatggcccagggatcctagtgcttgatcaggttctcttttcaggacttcttggagctgtggttaggcctccatgttagcaacagacacccactccagaccctcacctcttgaccctggcattactggcgctgcccctgcctcattctaaaatagatggaaagactgatgagccctgggaattctttcaggatttggtgacatttgatgatgtggcatggtacctcaccacaagggagtggtttaagctggaccctgaacagagggcactggaatattatgggaacgtgacctctgtgggtaaggatgtcccagcccttcctcaaattcaccaccttcttggagtggggcaggggacacatggctacccccacagaagctcaccttctccctgggttgtggggaaacacaatgggtctgccacacctgatatgtcagagtagtatgagctcccccaactcctcttggcatggaaagaacccctctcagtcttttactgggaaagaaattagaacactgccactgtaatgtagaatgcccttttcattttaatgcacaaattatgcaaattgcatggccatttggtttgagtttatttgtgagaaaggttgacgtgatcaagatcttgttcacccattaggggtctgcatgtgtgcagtggggaggaggttttaggaggagagacgttgggagtcagatttgggagctgtcgaagtccacgtgtctgggaagagcatgaagttaaatgtgtgagctctgagtgggtggacagagagaagacagggtgaagatcacctcctcagggtggccacttgatactccacagagcctccccaaggtgggcccagaggctgccttcctcaagctcctggaaggagcctgaccttgggaaacacctttgaactgaatgaatgacttgcctaaagcctggtctttgaagattgaagggggttccccttcaaaggccttgcctatgttcctccactattctcatgtcatctctggctgttgccataaccaatctcctttcccatgagcaggcgttcctgttttaaatcctgccttggtccctcacctggcacaaggacaagtgctactggtgtcagacccatcgcccaacactgatcctgctaagtactctgaaagcacctccgcgacccgacaccagatgaagggggaagatgcccagccacaggagatggcgtccacaagcttcccaagggccagtggtcccagtcctgaattcagacagcacggggactctgacgggaagagagggagcccacagaatctgcccatagaacatcattttgcttgtaaagagtgtggggacacctttcggcttaaagtcctgcttgtccagcaccagagagtccacagtgaggagaagggctgggaatgtggcgactgcgggaaggtctttaggggggtggcggagtttaatgagcacaggaaaagccacgtagctgcggagccccagcccggccccagtagggccctggagaatgccgcggagaagagggagcagatggagagggaggcaaagcccttcgagtgcgaggagtgcggaaaacggtttaagaagaatgcaggcctgagtcagcatctgagggtccacagcagagagaagccctttgattgcgaggaatgcgggcggtcgttcaaagtcaacacccacctcttccgacatcagaaacttcacacttcggaaaagcctttcgcctgcaaggcgtgcagcagggatttcctggatcgccaggagcttctcaagcaccagcgcatgcacactggccacctgcccttcgactgcgacgactgcggcaagtccttccgaggggtcaacgggctggccgagcaccagcgcatccacagtggggccaagccatacgggtgtccccactgcggcaagctcttccgaaggagctcggagctcaccaagcaccggcggatccacacgggcgagaagccctacgcctgcggccagtgcggcaaggccttccgccagagctccagcctcctggagcacgcacgcatccacagtggcgagcggccctacgcatgcggcgagtgtggcaaggccttccgtgggccctctgacctcatcaagcaccggcgcatccacagcggactgaaaccctatgagtgcgacaaatgcggcaaggccttccgccggagctccggcctcagtcgccaccggcggatccacagtggggcgcggcgctgcgaatgcagccagtgtggccgcgtgttcaagaggcgctcggcactgcagaagcatcagccaacccaccacgagtagaaacgccctgtggtcccgcgggacagggacggagtccccagaggggatggcagagtcaaaggagatgaacagttttgtagcgcttatatattttgtcttccaaaaggttgagaccgatttatactgccaccagcaatttataagtgttacgttatgcccatcaagagtagcttgtaccatttaacttagtttggctagtttaactggtaggaagtaccatcaaggtatttcagtccacatgccttgaatccaagaatgagagaggacaaatctggatgtggggtagggaggggcttagaggtcatcaactccaagctccccccgccccagagaaacacacagagctgttccacgatggcgtcctcataatgtgatcccagctttcctgaagagaacgttgccctcatgatttttggcctacttgaatttataaatttttagggatgtaaatagaacactcaaatgtcttaaaatatttaatttattaatttagttatacatacatactgtaaatcacatattatataaaataatatattaatttagaaaataccccatttttgccaccctccctttcacgaaatcattttactctgactcctcaccgtcttcaccaacatgggaaccctgtttgagtcatcagacagtttcaagacacacccagtcacttccatccgagctctgcacggtcgctcagtgacgatcccttcatgaggctctcattagaaattttctcccaagccataagaccatatttgcagaacattaggacgatttctcttgtcgttttttaatctgtcctgtgactgtacaatataaccacttaaggtcatactttttcaaacaacctttaaacgtcttttcttttaaagcacccaaaatgtcattgtgaggccaaacgcctagtaacagttactgaatctgggttaaatgtcggtatctttttttcttaaaccatttcaatttggtgtcccctatacatatccaaaactagcatcgattggggttgttttgaactaatgggtcttgtcctcaagcagcactattttgttcaaaataaaatagttgagagcatgcccctaagaagagatacatctcaaggactcaagtgcagggtgacgcctccttttggaaatgagcctctcctggtatcaggcctagatggtacttctccagccttccgtttcttgttctataaaacaggggtgatcacagcacctacctccgaaggttatcacgaggactgccatcgtggctgcagagtgccaggaccaccggcctggtatggaggtacacactcagtgaaggccatctgctgtcattgtcattgtcatagttattgccgtcattctgtggcttgtcaattccagaactggggatagaccccaggcctcctgaccaccagtctcatctttctcttatgcgatgacttaaatggtgtttctgttttttgcatgcaaatggtccgttcatctcctttgactagttatcaacttaccttcggatatattaactttatgtagcagttctttctatattgatggtgatgttctcttttccaattttattgctttgctttttgtagcagttttattacgtttttgttgtgaaagcttttaatttttacatatccaagcattcattttttgtccactcagtcataactttcattgcttctgtagctagatatgatgacattttctctagaattttaattacaaacaaaaagctgcaaccccagcccatcagaaggtgagtacaccaggtgggcaggctggatggaaatgggccagagaagcaggctctttcctcatccgagatgcggactccctgtctatctgtgggcaccacttgactatccaacctgaccactgcggcacactggagatgctcccatcatagattagccagaactctgtgactgctcatcattatagaccccgccagcagcagtggggcttggcctcacctagatcaatggagtggtccaaacttggtctgggagcaagcagcccagccatcctttgagctcctgggagccttggcaatgctccgagtggattcagtgactgagcagcagattcacccaagaaacatctccttggacacaagaagacttgcctagaccacatcctcctttcagccggtgactctagaactagaaagagattggttcataggcttctgctgtgggcagctaggggaaaattcacccatgtgttctggcatcacttcctatagccacacctaagtgagggcaacagagcagaggctcggagaggaaccctgcccctccgatggcttgtgcgttatgctgatagaagctggcagcactgccctgggctatgatttgcaacagccatgcccaggaggagcactaaagcaaaggtttggagggcagtggaacccttctgaaagcctgtgtggcatagaagtagaagctggtcctcctgggtctgagctaccatttccagtgggctcccccaagaggaacagcagcaagggctagcgaggaacctgcccctccagtggcccacagaagccacagatagaagccagccccaccagggctgtgctgtgacttcccagcagctgtggctggggacagggacactaggagggcctggcaaggaagtgtgcccttctcgtgggcccaccaaggctgaggcagagcttcctagcagacacaacttggaagggcttctcaggcacccatcctgacccccaggctggagaggagccaaaagcacttgttacatagtgattccttttgccctgtgggcctcagttcttgcagtagttgtgaatctgtgtctgaaatcactactttcttctcggatcctttttctcttttcgagttgttaggatgtgttttgtacagctgtcatttgataaagaaggttgacctctaccaggggcaagtctggcacctttacctagaagtactctgccatgtcttgcccgttcatttatcgtttgttgggtttcatgagggatcccattgaagtagatcccttttatgaagggatcccattgaatgcagcattaactcagaacgtagcataaagtcgtcactgctcccagctgggacgtggtgtcttggcatcccttcctgccgtccttgactctttcccatcttcagttctataattttctcccaaacaaatgctcttttagagttaacactaaagatctggtctttgccgtcaaggttgacagaacagctgttcatggtgtttgcggtgaaacccgtgttctctttcaatgcagtctgtggctttaacgtgtgtcctgtaatttcgccaagatcatttcttgcctctggtaacttgggggtggatttccttgggctctctaggtgtactgctatgtcagatgcaaaatgtcacccagcttcctgtcacatatccttgtctgt

SEQ ID NO: 201981 - DNA, 6320 bp, Homo sapiens
  Payload ID: 19844
  Gene Name: zinc finger protein 275
  ENST ID: ENST00000370251
  CDS Start-End: 178-1167
aaacgcgccgcggggctgttagctcggctgggcacgggcggctccgtggcgcttcctgccacgccaggcctgcctgggccgcgccagcgccgctccaccgagggccgcgcgtcggccgccgccgggcctggatggggccttacctgccaggctgatcccttggagtagttctgaggcatgatgagtcatccgtgtgtgtctcttttgggcgttcctgttttaaatcctgccttggtccctcacctggcacaaggacaagtgctactggtgtcagacccatcgcccaacactgatcctgctaagtactctgaaagcacctccgcgacccgacaccagatgaagggggaagatgcccagccacaggagatggcgtccacaagcttcccaagggccagtggtcccagtcctgaattcagacagcacggggactctgacgggaagagagggagcccacagaatctgcccatagaacatcattttgcttgtaaagagtgtggggacacctttcggcttaaagtcctgcttgtccagcaccagagagtccacagtgaggagaagggctgggaatgtggcgactgcgggaaggtctttaggggggtggcggagtttaatgagcacaggaaaagccacgtagctgcggagccccagcccggccccagtagggccctggagaatgccgcggagaagagggagcagatggagagggaggcaaagcccttcgagtgcgaggagtgcggaaaacggtttaagaagaatgcaggcctgagtcagcatctgagggtccacagcagagagaagccctttgattgcgaggaatgcgggcggtcgttcaaagtcaacacccacctcttccgacatcagaaacttcacacttcggaaaagcctttcgcctgcaaggcgtgcagcagggatttcctggatcgccaggagcttctcaagcaccagcgcatgcacactggccacctgcccttcgactgcgacgactgcggcaagtccttccgaggggtcaacgggctggccgagcaccagcgcatccacagtggggccaagccatacgggtgtccccactgcggcaagctcttccgaaggagctcggagctcaccaagcaccggcggatccacacgggcgagaagccctacgcctgcggccttccgtgggccctctgacctcatcaagcaccggcgcatccacagcggactgaaaccctatgagtgcgacaaatgcggcaaggccttccgccggagctccggcctcagtcgccaccggcggatccacagtggggcgcggcgctgcgaatgcagccagtgtggccgcgtgttcaagaggcgctcggcactgcagaagcatcagccaacccaccacgagtagaaacgccctgtggtcccgcgggacagggacggagtccccagaggggatggcagagtcaaaggagatgaacagttttgtagcgcttatatattttgtcttccaaaaggttgagaccgatttatactgccaccagcaatttataagtgttacgttatgcccatcaagagtagcttgtaccatttaacttagtttggctagtttaactggtaggaagtaccatcaaggtatttcagtccacatgccttgaatccaagaatgagagaggacaaatctggatgtggggtagggaggggcttagaggtcatcaactccaagctccccccgccccagagaaacacacagagctgttccacgatggcgtcctcataatgtgatcccagctttcctgaagagaacgttgccctcatgatttttggcctacttgaatttataaatttttagggatgtaaatagaacactcaaatgtcttaaaatatttaatttattaatttagttatacatacatactgtaaatcacatattatataaaataatatattaatttagaaaataccccatttttgccaccctccctttcacgaaatcattttactctgactcctcaccgtcttcaccaacatgggaaccctgtttgagtcatcagacagtttcaagacacacccagtcacttccatccgagctctgcacggtcgctcagtgacgatcccttcatgaggctctcattagaaattttctcccaagccataagaccatatttgcagaacattaggacgatttctcttgtcgttttttaatctgtcctgtgactgtacaatataaccacttaaggtcatactttttcaaacaacctttaaacgtcttttcttttaaagcacccaaaatgtcattgtgaggccaaacgcctagtaacagttactgaatctgggttaaatgtcggtatctttttttcttaaaccatttcaatttggtgtcccctatacatatccaaaactagcatcgattggggttgttttgaactaatgggtcttgtcctcaagcagcactattttgttcaaaataaaatagttgagagcatgcccctaagaagagatacatctcaaggactcaagtgcagggtgacgcctccttttggaaatgagcctctcctggtatcaggcctagatggtacttctccagccttccgtttcttgttctataaaacaggggtgatcacagcacctacctccgaaggttatcacgaggactgccatcgtggctgcagagtgccaggaccaccggcctggtatggaggtacacactcagtgaaggccatctgctgtcattgtcattgtcatagttattgccgtcattctgtggcttgtcaattccagaactggggatagaccccaggcctcctgaccaccagtctcatctttctcttatgcgatgacttaaatggtgtttctgttttttgcatgcaaatggtccgttcatctcctttgactagttatcaacttaccttcggatatattaactttatgtagcagttctttctatattgatggtgatgttctcttttccaattttattgctttgctttttgtagcagttttattacgtttttgttgtgaaagcttttaatttttacatatccaagcattcattttttgtccactcagtcataactttcattgcttctgtagctagatatgatgacattttctctagaattttaattacaaacaaaaagctgcaaccccagcccatcagaaggtgagtacaccaggtgggcaggctggatggaaatgggccagagaagcaggctctttcctcatccgagatgcggactccctgtctatctgtgggcaccacttgactatccaacctgaccactgcggcacactggagatgctcccatcatagattagccagaactctgtgactgctcatcattatagaccccgccagcagcagtggggcttggcctcacctagatcaatggagtggtccaaacttggtctgggagcaagcagcccagccatcctttgagctcctgggagccttggcaatgctccgagtggattcagtgactgagcagcagattcacccaagaaacatctccttggacacaagaagacttgcctagaccacatcctcctttcagccggtgactctagaactagaaagagattggttcataggcttctgctgtgggcagctaggggaaaattcacccatgtgttctggcatcacttcctatagccacacctaagtgagggcaacagagcagaggctcggagaggaaccctgcccctccgatggcttgtgcgttatgctgatagaagctggcagcactgccctgggctatgatttgcaacagccatgcccaggaggagcactaaagcaaaggtttggagggcagtggaacccttctgaaagcctgtgtggcatagaagtagaagctggtcctcctgggtctgagctaccatttccagtgggctcccccaagaggaacagcagcaagggctagcgaggaacctgcccctccagtggcccacagaagccacagatagaagccagccccaccagggctgtgctgtgacttcccagcagctgtggctggggacagggacactaggagggcctggcaaggaagtgtgcccttctcgtgggcccaccaaggctgaggcagagcttcctagcagacacaacttggaagggcttctcaggcacccatcctgacccccaggctggagaggagccaaaagcacttgttacatagtgattccttttgccctgtgggcctcagttcttgcagtagttgtgaatctgtgtctgaaatcactactttcttctcggatcctttttctcttttcgagttgttaggatgtgttttgtacagctgtcatttgataaagaaggttgacctctaccaggggcaagtctggcacctttacctagaagtactctgccatgtcttgcccgttcatttatcgtttgttgggtttcatgagggatcccattgaagtagatcccttttatgaagggatcccattgaatgcagcattaactcagaacgtagcataaagtcgtcactgctcccagctgggacgtggtgtcttggcatcccttcctgccgtccttgactctttcccatcttcagttctataattttctcccaaacaaatgctcttttagagttaacactaaagatctggtctttgccgtcaaggttgacagaacagctgttcatggtgtttgcggtgaaacccgtgttctctttcaatgcagtctgtggctttaacgtgtgtcctgtaatttcgccaagatcatttcttgcctctggtaacttgggggtggatttccttgggctctctaggtgtactgctatgtcagatgcaaaatgtcacccagcttcctgtcacatatccttgtctgtgcattcatgcatctacctcattccggttttctttctaatctcatgtattcctgttgtgaggaaatgtgttcttttcccgatccttttgtagttcatacacatgacaattgggtttccacgcacgtgcatgagatgttcctccttcaaaccttgttactatgtcagcacattaactgcctggcatggaaaaagaaaaaaaaaaaagaaatatgttcttttcctaccatttgaaaaaaatcctccattgcttttattagagttttgaatacttgtgaaaattttcaaaagaaagtaattgattaccatttttgctgcttattacgatgagctgtgtccattagctgtgtcaccccactcttgcatttccagaatagtccctacccaattgcagcgggcatgtttttgagtggtgttgcattccatgtgcttgattttgtcctagaactggcacagcgcctgccctacctgcagccctgggttgtggccctgttgcgtaccatgtgatttgccaccccgcttctaggccatattaattcagccagaactgaacacctgacccaagggcagcaagcaatcatcagagcatagagctgacagaacatgatggaccacggacaccaccaggccttccagatctgaaatgcaaacaaggaaacagaagcttctaggcatcagaaggtgtggggagcagcacagtactcagaggagtgaggagcgtggcgcctgctgggaggaaggcctggccatggtatgttcttggatttctggcagcagccctcattggtccacgtgcgtccccactacagactccttgacttgagccagcttgagtgggtctctactcttttctattgtgttttgccacttggctgcttcctggccaagtcgcacctgactgcatgaacacctgttcaaacgtgtgttctctgttctctaagatgggtgaaagtcgatgccttctagtctcagtgaatttaacctgtgattttatgtctacgtatattgttcctttactgaacccaccacatgcgggccataaaatgagtgaaatcacagtgcaccctgttctcttatttttgaagtgtttcacgatttccagcatgtccatcagatggggggattgctaacttctctcttactcatgtacttacattctgtagttctcattgcatcactttggatgtttactttgaaaagcagaaactgtctctttaaacttggccctcaatgtcatttgcgtatctctgagaacaatagctatgtcccaccccagtttgtatttccgttggttgttggcacttttttctcattcccccatctcattaccttgtctgttttctggcactcactataatcagccttgcactagagctgtttgtggacttggcttcaccccctcctcctcagccctcccccacccattaaattgtgagctcttagaagacaggggtggcctttcatgtctgatcccctaccaaatctagcacagtgccttgcatcaagtagatttcaataaatatatgttaaatggca

SEQ ID NO: 201982 - DNA, 4589 bp, Homo sapiens
  Payload ID: 19845
  Gene Name: zinc finger protein 276
  Uniprot ID: Q8N554
  ENST ID: ENST00000289816
  CDS Start-End: 313-1932
gcacttccggcgacgggccccctccgcgcgtactgcgggccccacgggtgttagtggcgggggcggcagagtccgggtgggttgtcgcgacggagccgggcctcttcgccgtcttgagacggggctggcgagaagggcccctcacggagttgccatgggcgtctaaccgcggcagccaggcccctctctacgtgagaccccggcccccctcccctttctgcagcccgcccgccacctgcgcgccgcgtggcctccgccggcgcctgcccgccccgcgcctccgtctcccacggagcaggccgggctctcgccatgggtcactgtcgcctctgccacgggaagttttcctcgagaagcctgcgcagcatctccgagagggcgcctggagcgagcatggagaggccatccgcagaggagcgcgtgctcgtacgggacttccagcgcctgcttggtgtggctgtccgccaggaccccaccttgtctccgtttgtctgcaagagctgccacgcccagttctaccagtgccacagccttctcaagtccttcctgcagagggtcaacgcctccccggctggtcgccggaagccttgtgcaaaggtcggtgcccagcccccaacaggggcagaggagggagcgtgtctggtggatctgatcacatccagcccccagtgcctgcacggcttggtggggtgggtgcatggacatgcggccagctgcggggccctgccccaccttcagaggacactgtcctccgagtactgcggcgtcatccaggtcgtgtggggctgcgaccagggccacgactacaccatggataccagctccagctgcaaggccttcttgctggacagtgcgctggcagtcaagtggccatgggacaaagagacggcgccacggctgccccagcaccgagggtggaaccctggggatgcccctcagacctcccagggtagagggacagggaccccagttggggctgagaccaagaccctgcccagcacggatgtggcccagcctccttcggacagcgacgcggtggggcccaggtcgggcttcccacctcagccaagcctgcccctttgcagggccccagggcagttgggtgagaagcagcttccatcttcaacctcggatgatcgggtaaaagacgagttcagtgacctttctgagggagacgtcttgagtgaagatgaaaatgacaagaagcaaaatgcccagtcttcggacgagtcctttgagccttacccagaaaggaaagtctctggtaagaagagtgaaagcaaagaagccaagaagtctgaagaaccaagaattcggaagaagccgggacccaagcccggatggaagaagaagcttcgttgtgagagggaggagcttcccaccatctacaagtgtccttaccagggctgcacggccgtgtaccgaggcgctgacggcatgaagaagcacatcaaggagcaccacgaggaggtccgggagcggccctgcccccaccctggctgcaacaaggttttcatgatcgaccgctacctgcagcgccacgtgaagctcatccacacagaggtgcggaactatatctgtgacgaatgtggacaaaccttcaagcagcggaagcaccttctcgtccaccaaatgcgacattcgggagccaagcctttgcagtgtgaggtctgtgggttccagtgcaggcagcgggcatccctcaagtaccacatgaccaaacacaaggctgagactgagctggactttgcctgtgaccagtgtggccggcggtttgagaaggcccacaacctcaatgtacacatgtccatggtgcacccgctgacacagacccaggacaaggccctgcccctggaggcggaaccaccacctgggccaccgagcccctctgtgaccacagagggccaggcggtgaagcccgaacccacctgaggacggcagtgaggatgagcacctctagcagcctggactccgcagtggctgtgtcagcctcacccttcgtgtgcacccgcatgggagggtcggagggtgctgcccgcccttggtgctggaggcgggcttggtgtccggctcaagtagccttcctctgctctgggaccagtggtttattttcccgcaaacgctgagtgactcggggccggacagttcataaataattgattcctttccccactaaagcagtcgaggagatttgtaatccactttttagtgcaacaagagctccatgttatgcttgtaataaattatttacacgggagctgggctggtgtgcagtggcaggtcccgtcagaagagatgaggctcctgggacaggtcagcgtcaggggcagcctgctgtctgctctggagggcggcgctcacctctgggtcgcagtccccacgatcagccagcagctgtgagagaggagcaggtcctcagcccatgccgcccactaggcctcagaccacaggggaggggctctggcagaaatagtcgagttgtattgccagccaggcaggcacatggcccaggcagctgtcaattctcatgtcccccacatggcccaaggtgggcatcttgacgttacctctgccacgtgtgagaagctctttttcgggcaccgaggtattaactgcagcagaaaaagacgagcttttgttatcagttccacggggttgccctagagagaaaacaggcaaactcacaggttagaagacatacagaaacagggctggtgtgtcccccatagtctgcatgctgtgccggaacattctttggcagaaggagcctccggctggggggagctcccctggaggtgggactggcccttgcacctgcctgacccttgagctccaggctcctgccagctggaggtgaaactgtgcttgtatccccagccacgaagagctggaccagcttcaagtacatgtccacagcaacatgcaggaaggcctcttccctgatggccgcgtcttcatggaagtaggagagaagactagaggtaaagacatagtgacaaatggctacagactgctggaaaggtagcaggtgatgccaagggatactgctcatctgtggagcagaggcacagacaacccttcccatctggcgggacccagaggtgctgagatgggggtctgggaaacactgcccagccctgaccagccctgtgggtggaggtacctgtaaaaagcgaaaggcagcagcctggtgtgctgatccggggccacacggaggaggagccgccccagcctgaggtctgcaacaccaagaagtggctcaggcaactctggacatctctgcctattatcagtgctggggacacccctgggggtcgggacgtgtaccctgggaggcctggctgtggggatagtgtggggcgaacagcctgagctgaggatacccaggtacctgtcagcagctgggagaggatgggggggtcgacctcttgcaggagggtgggtgtggtgcagagagaggcagtccccatgataggcccattggtcctggggttgaccagtgagccagtaaattatcttattgctttaaacaagtttgtgcttaatctgtcccaactaaaatggagcttataaacttacttagcaaggaacctcaaggagggctcgttcttaaccatttgcaagatgcctctgaaaagagcggccctccgcatttgtgcctcagcagcgtgtttcttaccactctctgtcaactgaaagagtgccagccaggatatcttcctcttctctaaacactcgaggattgctgcacaaacgtggaaagcctttggcaggtctgtggtgctctgtaaaccgcaggagaccaaccctgagaatggccgacctggtgctcccatgggtaggagggtacagccctcagcacagaagagggcatttcctctttgcttattgtaagtcttaaaactggtgacagttttacctatagaaggtaatactgggcctctggacagaagaggctcaggtaggaggccagggacttcgagcacccacaccaaggctgctgcaccacgtcctcaaataagacattaaaagaaaggcccacaggccggatgcagtggctcatgcctgtaatcccaacactttgggaggccgaggtcggcggatcactgaggccagttcaagaccagcctggcaatatggtgaaaccccgtctctactaaaaatacaaaaattagccgggtgtgacagactcacgcctgtaatcccagctactcgggaggctgatgcaggagaattgcttgaacccaggaggctgaggttgcagtgagctgagatcacaccactgcactccagcctgggtgacagagtgagacccccatctcaaaaaaaaaaaaaaaaaacccacggcctgggagttctcactcacacttccgcaaacacaaggagctcctgagctagtctggaaaccctgacttggaagctggctgcctggtgcccctgcctggcccacagtgggagaggacaccttggctggtaaggtctgacttacatttgaggtcagatgtgacgacagcaggcccatcaaggagaagaagaaaaggaaaaccaatagctgtaaataaaaacgtgcacttattattacattaaaa

SEQ ID NO: 201983 - DNA, 2267 bp, Homo sapiens
  Payload ID: 19845
  Gene Name: zinc finger protein 276
  Uniprot ID: Q8N554
  ENST ID: ENST00000443381
  CDS Start-End: 98-1942
ctcgcttccagcgcgccgagcggagcctaacgccgggtcctctaggaacctcgggccgggcagcacccgcgggattctgctggcgtcctccgctgccatgaagcgggaccggctgggccgcttcctgtctcctgggtcgtcccgacagtgcggggcctcggacggcggcggcggcgtcagccggactcggggccgcccttcccttagcggtgggccgagggtggacggggcgacggcgcggcgcgcctggggcccggtggggtcctgcggggacgcgggcgaggacggcgcggacgaggcaggagcaggccgggctctcgccatgggtcactgtcgcctctgccacgggaagttttcctcgagaagcctgcgcagcatctccgagagggcgcctggagcgagcatggagaggccatccgcagaggagcgcgtgctcgtacgggacttccagcgcctgcttggtgtggctgtccgccaggaccccaccttgtctccgtttgtctgcaagagctgccacgcccagttctaccagtgccacagccttctcaagtccttcctgcagagggtcaacgcctccccggctggtcgccggaagccttgtgcaaaggtcggtgcccagcccccaacaggggcagaggagggagcgtgtctggtggatctgatcacatccagcccccagtgcctgcacggcttggtggggtgggtgcatggacatgcggccagctgcggggccctgccccaccttcagaggacactgtcctccgagtactgcggcgtcatccaggtcgtgtggggctgcgaccagggccacgactacaccatggataccagctccagctgcaaggccttcttgctggacagtgcgctggcagtcaagtggccatgggacaaagagacggcgccacggctgccccagcaccgagggtggaaccctggggatgcccctcagacctcccagggtagagggacagggaccccagttggggctgagaccaagaccctgcccagcacggatgtggcccagcctccttcggacagcgacgcggtggggcccaggtcgggcttcccacctcagccaagcctgcccctttgcagggccccagggcagttgggtgagaagcagcttccatcttcaacctcggatgatcgggtaaaagacgagttcagtgacctttctgagggagacgtcttgagtgaagatgaaaatgacaagaagcaaaatgcccagtcttcggacgagtcctttgagccttacccagaaaggaaagtctctggtaagaagagtgaaagcaaagaagccaagaagtctgaagaaccaagaattcggaagaagccgggacccaagcccggatggaagaagaagcttcgttgtgagagggaggagcttcccaccatctacaagtgtccttaccagggctgcacggccgtgtaccgaggcgctgacggcatgaagaagcacatcaaggagcaccacgaggaggtccgggagcggccctgcccccaccctggctgcaacaaggttttcatgatcgaccgctacctgcagcgccacgtgaagctcatccacacagaggtgcggaactatatctgtgacgaatgtggacaaaccttcaagcagcggaagcaccttctcgtccaccaaatgcgacattcgggagccaagcctttgcagtgtgaggtctgtgggttccagtgcaggcagcgggcatccctcaagtaccacatgaccaaacacaaggctgagactgagctggactttgcctgtgaccagtgtggccggcggtttgagaaggcccacaacctcaatgtacacatgtccatggtgcacccgctgacacagacccaggacaaggccctgcccctggaggcggaaccaccacctgggccaccgagcccctctgtgaccacagagggccaggcggtgaagcccgaacccacctgaggacggcagtgaggatgagcacctctagcagcctggactccgcagtggctgtgtcagcctcacccttcgtgtgcacccgcatgggagggtcggagggtgctgcccgcccttggtgctggaggcgggcttggtgtccggctcaagtagccttcctctgctctgggaccagtggtttattttcccgcaaacgctgagtgactcggggccggacagttcataaataattgattcctttccccactaaagcagtcgaggagatttgtaatccactttttagtgcaacaagagctccatgttatgcttgtaataaattatttacacggga

SEQ ID NO: 201984 - DNA, 588 bp, Homo sapiens
  Payload ID: 19845
  Gene Name: zinc finger protein 276
  ENST ID: ENST00000563541
  CDS Start-End: 1-283
atgggacaaagagacggcgccacggctgccccagcaccgagggtggaaccctggggatgcccctcagacctcccagggtagagggacagggaccccagttggggctgagaccaagaccctgcccagcacggatgtggcccagcctccttcggacagcgacgcggtggggcccaggtcgggcttcccacctcagccaagcctgcccctttgcagggccccagggcagttgggtgagaagcagcttccatcttcaacctcggatgatcggagacgtcttgagtgaagatgaaaatgacaagaagcaaaatgcccagtcttcggacgagtcctttgagccttacccagaaaggaaagtctctggtaagaagagtgaaagcaaagaagccaagaagtctgaagaaccaagaattcggaagaagccgggacccaagcccggatggaagaagaagcttcgttgtgagaggtgatgcctgcaacgcgaggctcgccctgcctgtcggggccggggctccatgcatgctcttcattgcagggaggagcttcccaccatctacaagtgtccttaccagggctgcacggccgtgtacc

SEQ ID NO: 201985 - DNA, 1826 bp, Homo sapiens
  Payload ID: 19845
  Gene Name: zinc finger protein 276
  ENST ID: ENST00000562530
  CDS Start-End: 204-1046
aaatctaccatctctgcccagaaaaatgcacgaacgcacggacctgcccgtcactcggattttggaaggtggcctggcggaccctcctgctacatctcctctacaggtggagcccaggctgtgatgcaccggctcagcgagcggagtggaaagccaaggtccgcaggatctgagctgtccaaggagcaggccgggctctcgccatgggtcactgtcgcctctgccacgggaagttttcctcgagaagcctgcgcagcatctccgagagggcgcctggagcgagcatggagaggccatccgcagaggagcgcgtgctcgtacgggacttccagcgcctgcttggtgtggctgtccgccaggaccccaccttgtctccgtttgtctgcaagagctgccacgcccagttctaccagtgccacagccttctcaagtccttcctgcagagggtcaacgcctccccggctggtcgccggaagccttgtgcaaaggtcggtgcccagcccccaacaggggcagaggagggagcgtgtctggtggatctgatcacatccagcccccagtgcctgcacggcttggtggggtgggtgcatggacatgcggccagctgcggggccctgccccaccttcagaggacactgtcctccgagtactgcggcgtcatccaggtcgtgtggggctgcgaccagggccacgactacaccatggataccagctccagctgcaaggccttcttgctggacagtgcgctggcagtcaagtggccatgggacaaagagacggcgccacggctgccccagcaccgagggtggaaccctggggatgcccctcagacctcccagggtagagggacagggaccccagttggggctgagaccaagaccctgcccagcacggatgtggcccagcctccttcggacagcgacgcggtggggcccaggtcgggcttcccacctcagccaagcctgcccctttgcagggccccagggcagttgggtgagaagcagcttccatcttcaacctcggatgatcggagacgtcttgagtgaagatgaaaatgacaagaagcaaaatgcccagtcttcggacgagtcctttgagccttacccagaaaggaaagtctctggtaagaagagtgaaagcaaagaagccaagaagtctgaagaaccaagaattcggaagaagccgggacccaagcccggatggaagaagaagcttcgttgtgagagggaggagcttcccaccatctacaagtgtccttaccagggctgcacggccgtgtaccgaggcgctgacggcatgaagaagcacatcaaggagcaccacgaggaggtccgggagcggccctgcccccaccctggctgcaacaaggttttcatgatcgaccgctacctgcagcgccacgtgaagctcatccacacagaggtgcggaactatatctgtgacgaatgtggacaaaccttcaagcagcggaagcaccttctcgtccaccaaatgcgacattcgggagccaagcctttgcagtgtgaggtctgtgggttccagtgcaggcagcgggcatccctcaagtaccacatgaccaaacacaaggctgagactgagctggactttgcctgtgaccagtgtggccggcggtttgagaaggcccacaacctcaatgtacacatgtccatggtgcacccgctgacacagacccaggacaaggccctgcccctggaggcggaaccaccacctgggccaccgagcccctctgtgaccacagagggccaggcggtgaagcccgaacccacctgaggacggcagtgaggatgagcacctctagcagcctg

SEQ ID NO: 201986 - DNA, 2203 bp, Homo sapiens
  Payload ID: 19845
  Gene Name: zinc finger protein 276
  ENST ID: ENST00000568064
  CDS Start-End: 291-1592
tccgcgcgtactgcgggccccacgggtgttagtggcgggggcggcagagtccgggtgggttgtcgcgacggagccgggcctcttcgccgtcttgagacggggctggcgagaagggcccctcacggagttgccatgggcgtctaaccgcggcagccaggcccctctctacgtgagaccccggcccccctcccctttctgcagcccgcccgccacctgcgcgccgcgtggcctccgccggcgcctgcccgccccgcgcctccgtctcccacggagcaggccgggctctcgccatgggtcactgtcgcctctgccacgggaagttttcctcgagaagcctgcgcagcatctccgagagggcgcctggagcgagcatggagaggccatccgcagaggagcgcgtgctcgtacgggacttccagcgcctgcttggtgtggctgtccgccaggaccccaccttgtctccgtttgtctgcaagagctgccacgcccagttctaccagtgccacagccttctcaagtccttcctgcagagggtcaacgcctccccggctggtcgccggaagccttgtgcaaaggtcggtgcccagcccccaacaggggcagaggagggagcgtgtctggcccccagtgcctgcacggcttggtggggtgggtgcatggacatgcggccagctgcggggccctgccccaccttcagaggacactgtcctccgagtactgcggcgtcatccaggtcgtgtggggctgcgaccagggccacgactacaccatggataccagctccagctgcaaggccttcttgctggacagtgcgctggcagtcaagtggccatgggacaaagagacggcgccacggctgccccagcaccgagggtggaaccctggggatgcccctcagacctcccagggtagagggacagggaccccagttggggctgagaccaagaccctgcccagcacggatgtggcccagcctccttcggacagcgacgcggtggggcccaggtcgggcttcccacctcagccaagcctgcccctttgcagggccccagggcagttgggtgagaagcagcttccatcttcaacctcggatgatcggagacgtcttgagtgaagatgaaaatgacaagaagcaaaatgcccagtcttcggacgagtcctttgagccttacccagaaaggaaagtctctggtaagaagagtgaaagcaaagaagccaagaagtctgaagaaccaagaattcggaagaagccgggacccaagcccggatggaagaagaagcttcgttgtgagagggaggagcttcccaccatctacaagtgtccttaccagggctgcacggccgtgtaccgaggcgctgacggcatgaagaagcacatcaaggagcaccacgaggaggtccgggagcggccctgcccccaccctggctgcaacaaggttttcatgatcgaccgctacctgcagcgccacgtgaagctcatccacacagaggtgcggaactatatctgtgacgaatgtggacaaaccttcaagcagcggaagcaccttctcgtccaccaaatgcgacattcgggagccaagcctttgcagtaagtgtgagtcaggaccccctcccagggctgtggccctcgcaccttcttatctgcctctgtcccccaggtgtgaggtctgtgggttccagtgcaggcagcgggcatccctcaagtaccacatgaccaaacacaaggctgagactgagctggactttgcctgtgaccagtgtggccggcggtttgagaaggcccacaacctcaatgtacacatgtccatggtgcacccgctgacacagacccaggacaaggccctgcccctggaggcggaaccaccacctgggccaccgagcccctctgtgaccacagagggccaggcggtgaagcccgaacccacctgaggacggcagtgaggatgagcacctctagcagcctggactccgcagtggctgtgtcagcctcacccttcgtgtgcacccgcatgggagggtcggagggtgctgcccgcccttggtgctggaggcgggcttggtgtccggctcaagtagccttcctctgctctgggaccagtggtttattttcccgcaaacgctgagtgactcggggccggacagttcataaataattgattcctttccccactaaagcagtcgaggagatttgtaatccactttt

SEQ ID NO: 201987 - DNA, 2206 bp, Homo sapiens
  Payload ID: 19845
  Gene Name: zinc finger protein 276
  ENST ID: ENST00000568295
  CDS Start-End: 69-1136
acgccgggtcctctaggaacctcgggccgggcagcacccgcgggattctgctggcgtcctccgctgccatgaagcgggaccggctgggccgcttcctgtctcctgggtcgtcccgacagtgcggggcctcggacggcggcggcggcgtcagccggactcggggccgcccttcccttagcggtgggccgagggtggacggggcgacggcgcggcgcgcctggggcccggtggggtcctgcggggacgcgggcgaggacggcgcggacgaggcaggagcaggccgggctctcgccatgggtcactgtcgcctctgccacgggaagttttcctcgagaagcctgcgcagcatctccgagagggcgcctggagcgagcatggagaggccatccgcagaggagcgcgtgctcgtacgggacttccagcgcctgcttggtgtggctgtccgccaggaccccaccttgtctccgtttgtctgcaagagctgccacgcccagttctaccagtgccacagccttctcaagtccttcctgcagagggtcaacgcctccccggctggtcgccggaagccttgtgcaaaggtcggtgcccagcccccaacaggggcagaggagggagcgtgtctggtggatctgatcacatccagcccccagtgcctgcacggcttggtggggtgggtgcatggacatgcggccagctgcggggccctgccccaccttcagaggacactgtcctccgagtactgcggcgtcatccaggtcgtgtggggctgcgaccagggccacgactacaccatggataccagctccagctgcaaggccttcttgctggacagtgcgctggcagtcaagtggccatgggacaaagagacggcgccacggctgccccagcaccgagggtggaaccctggggatgcccctcagacctcccagggtagagggacagggaccccagttggggctgagaccaagaccctgcccagcacggatgtggcccagcctccttcggacagcgacgcggtggggcccaggtcgggcttcccacctcagccaagcctgcccctttgcagggccccagggcagttgggtgagaagcagcttccatcttcaacctcggatgatcggagacgtcttgagtgaagatgaaaatgacaagaagcaaaatgcccagtcttcggacgagtcctttgagccttacccagaaaggaaagtctctggtaagaagagtgaaagcaaagaagccaagaagtctgaagaaccaagaattcggaagaagccgggacccaagcccggatggaagaagaagcttcgttgtgagagggaggagcttcccaccatctacaagtgtccttaccagggctgcacggccgtgtaccgaggcgctgacggcatgaagaagcacatcaaggagcaccacgaggaggtccgggagcggccctgcccccaccctggctgcaacaaggttttcatgatcgaccgctacctgcagcgccacgtgaagctcatccacacagaggtgcggaactatatctgtgacgaatgtggacaaaccttcaagcagcggaagcaccttctcgtccaccaaatgcgacattcgggagccaagcctttgcagtgtgaggtctgtgggttccagtgcaggcagcgggcatccctcaagtaccacatgaccaaacacaaggctgagactgagctggactttgcctgtgaccagtgtggccggcggtttgagaaggcccacaacctcaatgtacacatgtccatggtgcacccgctgacacagacccaggacaaggccctgcccctggaggcggaaccaccacctgggccaccgagcccctctgtgaccacagagggccaggcggtgaagcccgaacccacctgaggacggcagtgaggatgagcacctctagcagcctggactccgcagtggctgtgtcagcctcacccttcgtgtgcacccgcatgggagggtcggagggtgctgcccgcccttggtgctggaggcgggcttggtgtccggctcaagtagccttcctctgctctgggaccagtggtttattttcccgcaaacgctgagtgactcggggccggacagttcataaataattgattcctttccccactaaagcagtcgaggagatttgtaatccactttttagtgcaacaagagctccatgttatgcttgtaataaattatttacacggga

SEQ ID NO: 201988 - DNA, 1849 bp, Homo sapiens
  Payload ID: 19846
  Gene Name: zinc finger protein 277
  Uniprot ID: Q9NRM2
  ENST ID: ENST00000361822
  CDS Start-End: 130-1482
gtccagagcgcggcgtaggtgtggagaaaacattacgtcgacggggagttcgcctccagtagcgtttctactggtgccaccccgcctccgacccgccctgcggccctcccttttcttttctgccgggtaatggctgcttccaagacccagggggctgtcgcccgaatgcaggaagaccgtgatgggagctgcagcacagtcgggggtgtaggttatggggacagtaaggattgtatcctggagccgctttccctgccagaaagtccaggtggcaccaccactttagaaggttctccatctgtgccttgtattttctgtgaagaacattttcctgtggctgaacaagacaaacttctgaagcacatgattattgagcataagattgtcatagctgatgtcaagttggttgctgatttccaaaggtacattttatattggaggaaaaggttcactgaacagcccatcacagatttttgtagtgtaataagaattaattccactgctccatttgaagaacaagagaattattttttgttatgtgacgttttaccagaagatagaattcttagagaagagcttcagaaacagagactgagagaaattctggaacaacagcagcaagaacgaaatgataccaattttcatggcgtttgtatgttttgcaatgaagaattccttggaaacagatctgttattttgaaccacatggccagagaacatgctttcaacattggattgccagacaacattgtaaactgcaatgaatttttgtgtacattacagaaaaagcttgacaatttgcagtgcttgtactgtgagaagaccttcagggacaaaaatacacttaaagatcacatgaggaaaaaacagcatcgtaagattaatcctaagaacagagaatatgacagattttatgtcatcaattatttggaacttggaaaatcgtgggaagaagttcagttggaagatgatcgggagttgctggaccatcaggaagatgactggtctgattgggaagaacaccctgcctctgcagtctgcttattttgtgaaaagcaagcagaaacaattgagaagttgtatgtccacatggaggatgcacacgaatttgatcttctcaaaataaagtcagaacttggattaaatttctatcagcaagtgaaactggtcaattttattcggaggcaagttcaccaatgcagatgttatggctgccatgtgaagttcaaatccaaagcagacttaagaactcacatggaagaaactaaacacacttcgctgctccccgatagaaagacgtgggatcaactggagtattattttccaacctatgaaaatgacactctcctgtgtacactatctgacagtgaaagtgacctgacagctcaggaacaaaatgaaaatgttcccatcatcagtgaagatacatctaaactgtatgctttgaaacaaagcagtattttgaaccagttgctactataagagtacttgaaaacctagaagaaactaccacagaagcaatttttcatgtttttctcctatgagacagatatgaaagaacaatttaaatttgaacatcaacaaaagattggtccttggtgaaataaacttttcaaaaatgaatgttcttttcaaaaaataaagtagaaaaatgcacttactaagaacatgaaaaaaaatgaagtaggaaaataagatgaagactttgtattttggctgtaaagttttattgtgtgatcatcttaaattatctcacttcattaaactcataattatatatagaagtatatgtcaattacaaagaaatgaaatgttcaaattatttataaacctgatttttcaatcagta

SEQ ID NO: 201989 - DNA, 1736 bp, Homo sapiens
  Payload ID: 19846
  Gene Name: zinc finger protein 277
  ENST ID: ENST00000361946
  CDS Start-End: 23-175
cccttttcttttctgccgggtaatggctgcttccaagacccagggggctgtcgcccgaatgcaggaagaccgtgatgggagctgcagcacagtcgggggtgtaggttatggggtaaggattgtatcctggagccgctttccctgccagaaagtccaggtggcaccaccactttagaaggttctccatctgtgccttgtattttctgtgaagaacattttcctgtggctgaacaagacaaacttctgaagcacatgattattgagcataagattgtcatagctgatgtcaagttggttgctgatttccaaaggtacattttatattggaggaaaaggttcactgaacagcccatcacagatttttgtagtgtaataagaattaattccactgctccatttgaagaacaagagaattattttttgttatgtgacgttttaccagaagatagaattcttagagaagagcttcagaaacagagactgagagaaattctggaacaacagcagcaagaacgaaatgataccaattttcatggcgtttgtatgttttgcaatgaagaattccttggaaacagatctgttattttgaaccacatggccagagaacatgctttcaacattggattgccagacaacattgtaaactgcaatgaatttttgtgtacattacagaaaaagcttgacaatttgcagtgcttgtactgtgagaagaccttcagggacaaaaatacacttaaagatcacatgaggaaaaaacagcatcgtaagattaatcctaagaacagagaatatgacagattttatgtcatcaattatttggaacttggaaaatcgtgggaagaagttcagttggaagatgatcgggagttgctggaccatcaggaagatgactggtctgattgggaagaacaccctgcctctgcagtctgcttattttgtgaaaagcaagcagaaacaattgagaagttgtatgtccacatggaggatgcacacgaatttgatcttctcaaaataaagtcagaacttggattaaatttctatcagcaagtgaaactggtcaattttattcggaggcaagttcaccaatgcagatgttatggctgccatgtgaagttcaaatccaaagcagacttaagaactcacatggaagaaactaaacacacttcgctgctccccgatagaaagacgtgggatcaactggagtattattttccaacctatgaaaatgacactctcctgtgtacactatctgacagtgaaagtgacctgacagctcaggaacaaaatgaaaatgttcccatcatcagtgaagatacatctaaactgtatgctttgaaacaaagcagtattttgaaccagttgctactataagagtacttgaaaacctagaagaaactaccacagaagcaatttttcatgtttttctcctatgagacagatatgaaagaacaatttaaatttgaacatcaacaaaagattggtccttggtgaaataaacttttcaaaaatgaatgttcttttcaaaaaataaagtagaaaaatgcacttactaagaacatgaaaaaaaatgaagtaggaaaataagatgaagactttgtattttggctgtaaagttttattgtgtgatcatcttaaattatctcacttcattaaactcataattatatatagaagtatatgtcaattacaaagaaatgaaatgttcaaattatttataaacctgatttttcaatcag

SEQ ID NO: 201990 - DNA, 617 bp, Homo sapiens
  Payload ID: 19846
  Gene Name: zinc finger protein 277
  ENST ID: ENST00000425229
  CDS Start-End: 20-617
ttttcttttctgccgggtaatggctgcttccaagacccagggggctgtcgcccgaatgcaggaagaccgtgatgggagctgcagcacagtcgggggtgtaggttatggggacagtaaggattgtatcctggagccgctttccctgccagaaagtccaggtggcaccaccactttagaaggttctccatctgtgccttgtattttctgtgaagaacattttcctgtggctgaacaagacaaacttctgaagcacatgattattgagcataagattgtcatagctgatgtcaagttggttgctgatttccaaagatctgttattttgaaccacatggccagagaacatgctttcaacattggattgccagacaacattgtaaactgcaatgaatttttgtgtacattacagaaaaagcttgacaatttgcagtgcttgtactgtgagaagaccttcagggacaaaaatacacttaaagatcacatgaggaaaaaacagcatcgtaagattaatcctaagaacagagaatatgacagattttatgtcatcaattatttggaacttggaaaatcgtgggaagaagttcagttggaagatgatcgggagttgctggaccatc

SEQ ID NO: 201991 - DNA, 1075 bp, Homo sapiens
  Payload ID: 19846
  Gene Name: zinc finger protein 277
  ENST ID: ENST00000450657
  CDS Start-End: 17-889
tcttttctgccgggtaatggctgcttccaagacccagggggctgtcgcccgaatgcaggaagaccgtgatgggagctgcagcacagtcgggggtgtaggttatggggacagtaaggattgtatcctggagccgctttccctgccagaaagtccaggtggcaccaccactttagaaggttctccatctgtgccttgtattttctgtgaagaacattttcctgtggctgaacaagacaaacttctgaagcacatgattattgagcataagattgtcatagctgatgtcaagttggttgctgatttccaaaggtacattttatattggaggaaaaggttcactgaacagcccatcacagatttttgtagtgtaataagaattaattccactgctccatttgaagaacaagagaattattttttgttatgtgacgttttaccagaagatagaattcttagagaagagcttcagaaacagagactgagagaaattctggaacaacagcagcaagaacgaaatgataccaattttcatggcgtttgtatgttttgcaatgaagaattccttggaaacagatctgttattttgaaccacatggccagagaacatgctttcaacattggattgccagacaacattgtaaactgcaatgaatttttgtgtacattacagaaaaagcttgacaatttgcagtgcttgtactgtgagaagaccttcagggacaaaaatacacttaaagatcacatgaggaaaaaacagcatcgtaagattaatcctaagaacagagaatatgacagattttatgtcatcaattatttggtaaggctttcttttcataacttaaaatttgattgcagtactgcaaacaaaatctttctgaggaccaactaatatttgaataagcaattattgcaaaagtcaaaatgtaattgaggggcacattcaagtagtgattagctttgaaatggttagagtacaagacatttgatttgacttgtcttttatttgacagtgtttatgtagtaaaaatgtcatgtctctagaactcacagtcatcttgaccaaaaaaaaaaaaaa

SEQ ID NO: 201992 - DNA, 891 bp, Homo sapiens
  Payload ID: 19846
  Gene Name: zinc finger protein 277
  ENST ID: ENST00000457808
  CDS Start-End: 21-344
cttttcttttctgccgggtaatggctgcttccaagacccagggggctgtcgcccgaatgcaggaagaccgtgatgggagctgcagcacagtcgggggtgtaggttatggggacagtaaggattgtatcctggagccgctttccctgccagaaagtccaggtggcaccaccactttagaaggttctccatctgtgccttgtattttctgtgaagaacattttcctgtggctgaacaagacaaacttctgaagcacatgattattgagcataagattgtcatagctgatgtcaagttggttgctgatttccaaagaagaacaagagaattattttttgttatgtgacgttttaccagaagatagaattcttagagaagagcttcagaaacagagactgagagaaattctggaacaacagcagcaagaacgaaatgataccaattttcatggcgtttgtatgttttgcaatgaagaattccttggaaacagatctgttattttgaaccacatggccagagaacatgctttcaacattggattgccagacaacattgtaaactgcaatgaatttttgtgtacattacagaaaaagcttgacaatttgcagtgcttgtactgtgagaagaccttcagggacaaaaatacacttaaagatcacatgaggaaaaaacagcatcgtaagattaatcctaagaacagagaatatgacagattttatgtcatcaattatttggaacttggaaaatcgtgggaagaagttcagttggaagatgatcgggagttgctggaccatcaggaagatgactggtctgattgggaagaacaccctgcctctgcagtctgcttattttgtgaaaagcaagcagaaacaattgagaagttgtatgtccac

SEQ ID NO: 201993 - DNA, 2218 bp, Homo sapiens
  Payload ID: 19846
  Gene Name: zinc finger protein 277
  ENST ID: ENST00000421043
  CDS Start-End: 21-317
cttttcttttctgccgggtaatggctgcttccaagacccagggggctgtcgcccgaatgcaggaagaccgtgatgggagctgcagcacagtcgggggtgtaggttatggggacagtaaggattgtatcctggagccgctttccctgccagaaagtccaggtggcaccaccactttagaaggttctccatctgtgccttgtattttctgtgaagaacattttcctgtggctgaacaagacaaacttctgaagcacatgattattgagcataagattgtcatagctgatgtcaagttggttgctgatttccaaaggtaagttctgtttttgtccttaaaagaattaaatttgaccatgtgtggtggctcatgtctgtaatcctagtactttgggaggccaaagtgggaggatcacccgaggccagtagtagttcaagatgccagctctaaaaacaaaatttaaaaattatctaggatcaatggcatgcacctgtagttccagctacttgggaggttgaggcaggagggctgcttgcacccatgagttcgaggctgcagtgagttatggttataccattgcactccagcctgggtgacagaatgagaccctgtctcttaagaaagagaattaaatgtattgtttgttaaaggagtgacataatctatatataaaataattcccatacaaatatgaaaattcatattcattttcaggtttctccttagacttaaaaaaaaaaactttacaactcttttgtacttctgagactttttttttttttttgagatggagttttgctattgtcacccaggctggagtgcagtggcacgatctcagcttgttgcaacttctgcctcccatgttcaagcgattctcctgcctcagcctcctgagtagctgggattacaggcacctgccaccacgcccagctaatttttgtattcttagtagagatggggtttcaccatgttggccaggcctgtctcgaactcctgagctcaggtgatctgcccacctcagcctcccacagtgctgggattacaggcatgagccactgcacccagccaacttctcagactttaaaaaaatctttacattatttttcttgagtctgtaagtttgagaatgtcacatactaatttattttctataagttctctaaagagatgaactttccaaagagtagataatactcactttgcagcattccatgacattgtagatcttattgatgtctcccagattatgtctcatgttttaggccatagacattctctgagtgggtccttccagtaattccagaatagacttggcaacaggacactcaaaaggcagtgtttgggaatgggatccttggagactttcaagccaaaaggatattgcccaaacaaatctcagtttaaatgttgtgatgaggttgattccttttttcccaatttataatttctggaagtagttgtccaagagaaataccttccctgtatagttactgaaagcataaaatttggtgtatctggtaaggtcccattttgaggtattctgtcctgatttccccataaaacattgtagtagcccagacattgaatacccctgcatctaaactctgtttctcccaggccatataaaacattcctagcaaacagcttctttcttatgataggtcttgcaaaagagcaagctgtattattaagagctgactatgaaagtaggaaagcctggggttgagtgcaggctttcacacttcctaatcttgtgatttcctgccaagctacctaactactctaagcattgattttctcatctataaaatgggggtaacaccagccctcatggttattgaatattacataaaacaaagtatggaatgtgagggcgatctggctgtgacatctgtcaccccattaatcgccagggttgattcggctgatctggctggctaagtggctgtccccttcctccctcaccactccatgttcatgcctcccaaagctgtgttctcagtcaaagaggacaaccatctccactagaagaggaccagtctttggtcaagggtatacgagtagctgcgcttccctgctggaacctccagacaagctctcaagtccatttgtaggagaacatagggtagtcaagcttccaagattccagacacatccaaatgaagtgctgcatgtggcagtctgcctttcttaaaaaaaaaaaaaaaaaaaaaaaaaaaa

SEQ ID NO: 201994 - DNA, 651 bp, Homo sapiens
  Payload ID: 19846
  Gene Name: zinc finger protein 277
  ENST ID: ENST00000421864
  CDS Start-End: 1-357
agtgactggtctgattgggaagaacaccctgcctctgcagtctgcttattttgtgaaaagcaagcagaaacaattgagaagttgtatgtccacatggaggatgcacacgaatttgatcttctcaaaataaagtcagaacttggattaaatttctatcagcaagtgaaactggtcaattttattcggaggtattattttccaacctatgaaaatgacactctcctgtgtacactatctgacagtgaaagtgacctgacagctcaggaacaaaatgaaaatgttcccatcatcagtgaagatacatctaaactgtatgctttgaaacaaagcagtattttgaaccagttgctactataagagtacttgaaaacctagaagaaactaccacagaagcaatttttcatgtttttctcctatgagacagatatgaaagaacaatttaaatttgaacatcaacaaaagattggtccttggtgaaataaacttttcaaaaatgaatgttcttttcaaaaaataaagtagaaaaatgcacttactaagaacatgaaaaaaaatgaagtaggaaaataagatgaagactttgtattttggctgtaaagttttattgtgtgatcatcttaaattatctcacttcattaaactcataattat

SEQ ID NO: 201995 - DNA, 650 bp, Homo sapiens
  Payload ID: 19847
  Gene Name: zinc finger protein 28
  ENST ID: ENST00000339844
  CDS Start-End: 295-534
ctatatatgcaaaccctttgggatggccactaaatttgtcacagagtatggtaacgtggttgactgaaccacagccatgaaagtgagcttccagctcttctgctgttgcaccgcagtccacattgccagcattgatggaacgggcatcagcctccatcttctcctcaatggacgtgatcactgggccagcattgcctggagggtctattgacattcagggacgtggccatagaattctctcaggaggagtggaaatgcctggaccctgctcagaggactctttacagggatgtgatgctggagaattataggaacctggtctccctggattttcggtctgtcacccaggctaaagtgcagtggtgtcacctcggctcactgcaacctccacttcccaggttcaagcaattctcctgcctcagccttccaagtagctgggactacagggcaaggcaatacagaagcgttccacacagggacattgcaaagacaagcaagtcatcacattggagatttttgcttccagaaaattgagaaagacattcatggcttccagtttcagtggaaagaagatgaaacaaatgaccatgcagcacccatgacagaaatcaaagagttgactggtagtacaggccaacatgatcaaaggc

SEQ ID NO: 201996 - DNA, 1827 bp, Homo sapiens
  Payload ID: 19847
  Gene Name: zinc finger protein 28
  ENST ID: ENST00000391783
  CDS Start-End: 190-1827
aggcctggtttctgtcctgcgcgcgcagattcgcgcagaccaggaagcggatcccgtggaatgacggtgacgccgcggcgggcggattgacttctaaagaatcttggtacgtgaggaagaaacccagaagaggaagaggaaagcaaaggagtcagggatggctcttcctcagatatctcttccaaatgcatgatgaagacattcttctcaacagggcaaggcaatacagaagcgttccacacagggacattgcaaagacaagcaagtcatcacattggagatttttgcttccagaaaattgagaaagacattcatggcttccagtttcagtggaaagaagatgaaacaaatgaccatgcagcacccatgacagaaatcaaagagttgactggtagtacaggccaacatgatcaaaggcatgctggaaacaagcatattaaagatcagcttggattaagctttcattcgcatctgcctgaactgcacatatttcagcctgaagggaaaattggtaatcaagttgagaagtctatcaacaatgcttcctcagtttcaacatcccaaagaatttgttgtaggcccaaaacccatatttctaataagtatggaaataattccctccattcttcattactcacacaaaaacggaatgtacacatgagagaaaaatctttccaatgtattgagagtggcaaatcctttaattgtagctcacttttaaaaaaacatcagataacccacttagaagagaaacaatgtaaatgtgatgtatatggcaaggtatttaatcagaagcgataccttgcatgccatcgtagatctcacattgatgagaaaccttacaagtgtaatgagtgtggcaagatctttggtcacaatacatccctcttccttcacaaggcgcttcatactgcagacaaaccttatgaatgtgaagaatgtgacaaagttttcagtcgcaaatcacaccttgaaacacataagataatttatactggagggaaaccatacaaatgtaaggtttgtgacaaagctttcacatgtaattcatacctagcaaaacatactataattcacactggagagaaaccttacaagtgtaatgaatgtggcaaggtttttaatcgactgtcaacccttgcacgccatcgtaggcttcatactggagagaaaccttatgaatgtgaagaatgtgaaaaagttttcagtcgcaaatcacatcttgaaagacataagaggattcatactggagagaaaccatacaaatgtaaggtttgtgacaaggcttttgcatataattcatacctggcaaaacatagtataattcacactggagagaagccttacaagtgtaatgaatgtggcaaggtttttaatcaacaatcaactcttgcacgccatcatagacttcatactgcagagaaaccatacaaatgtgaagaatgtgacaaagttttcaggtgcaaatcacaccttgaaagacataggaggattcatactggagagaaaccatacaaatgtaaggtttgtgacaaggctttccggagtgattcatgccttacagaacatcagagagttcatactggagagaaaccatacatgtgtaatgaatgtggcaaggtttttagtacaaaagcaaaccttgcatgtcatcataaacttcatactgcagagaaaccgtacaaatgtgaagaatgtgagaaagttttcagtcgcaaatcacacatggaaagacataggaggattcatactggagagaaaccgtacaaatgtaaggtttgtgacaaggctttccggagggattcacacctggcacaacatcagaga

SEQ ID NO: 201997 - DNA, 4556 bp, Homo sapiens
  Payload ID: 19847
  Gene Name: zinc finger protein 28
  Uniprot ID: P17035
  ENST ID: ENST00000457749
  CDS Start-End: 121-2277
gaccaggaagcggatcccgtggaatgacggtgacgccgcggcgggcggattgacttctaaagaatcttggtacgtgaggaagaaacccagaagaggaagaggaaagcaaaggagtcagggatggctcttcctcagggtctattgacattcagggacgtggccatagaattctctcaggaggagtggaaatgcctggaccctgctcagaggactctttacagggatgtgatgctggagaattataggaacctggtctccctggatatctcttccaaatgcatgatgaagacattcttctcaacagggcaaggcaatacagaagcgttccacacagggacattgcaaagacaagcaagtcatcacattggagatttttgcttccagaaaattgagaaagacattcatggcttccagtttcagtggaaagaagatgaaacaaatgaccatgcagcacccatgacagaaatcaaagagttgactggtagtacaggccaacatgatcaaaggcatgctggaaacaagcatattaaagatcagcttggattaagctttcattcgcatctgcctgaactgcacatatttcagcctgaagggaaaattggtaatcaagttgagaagtctatcaacaatgcttcctcagtttcaacatcccaaagaatttgttgtaggcccaaaacccatatttctaataagtatggaaataattccctccattcttcattactcacacaaaaacggaatgtacacatgagagaaaaatctttccaatgtattgagagtggcaaatcctttaattgtagctcacttttaaaaaaacatcagataacccacttagaagagaaacaatgtaaatgtgatgtatatggcaaggtatttaatcagaagcgataccttgcatgccatcgtagatctcacattgatgagaaaccttacaagtgtaatgagtgtggcaagatctttggtcacaatacatccctcttccttcacaaggcgcttcatactgcagacaaaccttatgaatgtgaagaatgtgacaaagttttcagtcgcaaatcacaccttgaaacacataagataatttatactggagggaaaccatacaaatgtaaggtttgtgacaaagctttcacatgtaattcatacctagcaaaacatactataattcacactggagagaaaccttacaagtgtaatgaatgtggcaaggtttttaatcgactgtcaacccttgcacgccatcgtaggcttcatactggagagaaaccttatgaatgtgaagaatgtgaaaaagttttcagtcgcaaatcacatcttgaaagacataagaggattcatactggagagaaaccatacaaatgtaaggtttgtgacaaggcttttgcatataattcatacctggcaaaacatagtataattcacactggagagaagccttacaagtgtaatgaatgtggcaaggtttttaatcaacaatcaactcttgcacgccatcatagacttcatactgcagagaaaccatacaaatgtgaagaatgtgacaaagttttcaggtgcaaatcacaccttgaaagacataggaggattcatactggagagaaaccatacaaatgtaaggtttgtgacaaggctttccggagtgattcatgccttacagaacatcagagagttcatactggagagaaaccatacatgtgtaatgaatgtggcaaggtttttagtacaaaagcaaaccttgcatgtcatcataaacttcatactgcagagaaaccgtacaaatgtgaagaatgtgagaaagttttcagtcgcaaatcacacatggaaagacataggaggattcatactggagagaaaccgtacaaatgtaaggtttgtgacaaggctttccggagggattcacacctggcacaacatcagagagttcatactggagagaaaccttacaagtgtaatgagtgtggcaagaccttccgtcagacatcatcgcttataatccatcgtaggcttcatactggagagaaaccttacaagtgtaatgagtgtggcaagaccttcagtcagatgtcatccctcgtataccatcataggcttcatagtggagagaaaccttacaagtgtaatgaatgtggcaaggtttttaatcaacaagcacaccttgcacagcatcagagagttcatactggagagaaaccttacaagtgtaatgagtgtggcaagaccttcagtcagatgtcaaaccttgtataccatcatagacttcatagtggagagaaaccttgaaagtgtaatgagtgtggcaagaccttcagtcagatgtcaaaccttgtataccatcatagacttcatagtggagagaaaccttaaaagtgtaatgagtgtggcaacaccttccatcacaattcaacccttgtaagtcacaaagccattcatactggagagaaactttacaagtgtaatgaatgtggcaaggtttttaatcaaaaaacaacccttgcacgtcatcatagaattcatactgcagagaaactttacaaataggaagaatgtgacaaagttttcggttgcaaatcaaaccttgaaacacataagaaaatgcatgctgaagagaaaccacacagatgtaaggtttatgacaagatttttgaatataattcatacctggcaaaacatattagaattcaaactggagagaaaccttacaaatgtgatgagtgtggcaacacctttggtcaaaattcataccttgtaattcaaaaggcaattcgtattggagagaaaccctacaagtgtaatgaatgtggcatagtttttaatcaacagtcacaccttgcaagtcatcatagtcttcatactgcagagaaatcttacaaatgtgaagactgtgacaaagttgtcagtcacaaatcacagcttgaaagacaggagaattcatactggagaaaaaacatacaaatgtaaggtttgtaacaaggcttttgggagtgattcacacctggcacaccatactagaattcacactggagagaaaccttacaagtgcaatgagtgtggcaaagcctttagtgggcagtcaccacttattcaccatcaagcaatccatagtatagggaaacttgactaatataatgattgtcacaaagttttcagtaatgctacaaccattgcaaatcattggagaatccataatgagagatcttacaagtgtaataaatgtgacagatttttcagatatcgttcatatattgctattcatcatcgaactcatgctggagagaaaccttataaatgtcatgattgtggcaaggtcttcagtcaagtttcatcctatgcaaaacataggaggattcatacaggagagaaactcacaagtgtgatgattgtggcaaagcgtttacttcacattcacacctcaatagacatcagagaatccatgctggacagaaatcttacaaatgtcatcagtgtggtaaggtcttcagtccgagatcactccttgcagaccatcagacaattccttttggagacagttgtttcaaatgccattagtatagcaagccatcaagcattaattgacattacagttaaatgagcactgacctgagtttgagttgacttaacattgagtttaagcattaattgacattaaactgtttatgttaagaggactgggctgggcactgtggctcacgcctgcaatgccagcactttgagaggccaagactggtaggtcactggaggttaagagtttgagaacagcctggccaacagacgggagccacttttcccagcctgtgttttcatttctattctttctttcttttttcttttttttgtttttgtttttgagatggagtctcttgctctgtcatccaggttggagtgcagtggcatgatcttgactcactacaacctccgcctcccaggttcaagcgatcctcctgcctcagtctcctgactagctgggactacaggtgcatgccaccacacctggataattttttgtatttttagtagagactgggtttcgctgtgttagcctggatggtctcgattttctgatcttatgattcacccacctctacctcccgaagtgctgagattatgggcgtgagccaccgtgactggcctgttttttgtttctttaacaaaaagttatggggatttctatgagtattgtgttgaatctaaatcacattcggttatataatcattgagcaatactaatttttccaatcagtatggattgtatgtgtatttatatgtttttaatcattttgatcaatgtttgtagatttcaaggtacaaacttctcacctttatatgtttattcctaaatatttcttactttaagctctttagcaaatggaagtggtttttaattttattttaaaattatttaatgttaatgtatggaaattcaactaatttttggtgctattattctattctgcaaatacactgaatatgtttattagttccagttgtattttggttgactgtgattttcttcacagatcatgtcatctacaaacaaataaaatttgacttctttctttctg

SEQ ID NO: 201998 - DNA, 5171 bp, Homo sapiens
  Payload ID: 19847
  Gene Name: zinc finger protein 28
  Uniprot ID: P17035
  ENST ID: ENST00000438150
  CDS Start-End: 895-2892
tgtatctgtccttttattaattaattactttatgtatttatgagactgagttttgctgttgtcacccaggctgaagtacgatgctgcgatctcagctcactgcaacctctgcctctcgggtacaaccgattctcctgcctcaggcccctgagaagctgggattacagatatgcaccaccacacccatctaattttgtatttttagtagagactgtttctttttgttggccaggctggactcgaactcctgacctcaggtgatctgcccagctcatcctcccaaagtgttgggattacaggcatgaaccacgatgcttggcctatctgtttttactacctttactggagaactttatttatttatttatttatttatttttattattattatttttgagatggagtctcactctgtcgcccaggccggagtgcagtggtgtgatctctgctcactgcaacctccaccttctgggttcaagcaattctccttcctcagcctcccgagtagctgcaactacaagtgtgcaccactacacccagctaagttttgtatttttagtagagatggggttccaccatgttggttggccaggatagtctcaatctcctgacctggtgatctgccagcctcagcctcccaaagtgctgggattattggcgtgaaccaccacaccaggcctggagaactttatatatgcttgtgggttggagttactctttagccttctttcatttcttttttttttttctttgagacagattttcggtctgtcacccaggctaaagtgcagtggtgtcacctcggctcactgcaacctccacttcccaggttcaagcaattctcctgcctcagccttccaagtagctgggactacagatatctcttccaaatgcatgatgaagacattcttctcaacagggcaaggcaatacagaagcgttccacacagggacattgcaaagacaagcaagtcatcacattggagatttttgcttccagaaaattgagaaagacattcatggcttccagtttcagtggaaagaagatgaaacaaatgaccatgcagcacccatgacagaaatcaaagagttgactggtagtacaggccaacatgatcaaaggcatgctggaaacaagcatattaaagatcagcttggattaagctttcattcgcatctgcctgaactgcacatatttcagcctgaagggaaaattggtaatcaagttgagaagtctatcaacaatgcttcctcagtttcaacatcccaaagaatttgttgtaggcccaaaacccatatttctaataagtatggaaataattccctccattcttcattactcacacaaaaacggaatgtacacatgagagaaaaatctttccaatgtattgagagtggcaaatcctttaattgtagctcacttttaaaaaaacatcagataacccacttagaagagaaacaatgtaaatgtgatgtatatggcaaggtatttaatcagaagcgataccttgcatgccatcgtagatctcacattgatgagaaaccttacaagtgtaatgagtgtggcaagatctttggtcacaatacatccctcttccttcacaaggcgcttcatactgcagacaaaccttatgaatgtgaagaatgtgacaaagttttcagtcgcaaatcacaccttgaaacacataagataatttatactggagggaaaccatacaaatgtaaggtttgtgacaaagctttcacatgtaattcatacctagcaaaacatactataattcacactggagagaaaccttacaagtgtaatgaatgtggcaaggtttttaatcgactgtcaacccttgcacgccatcgtaggcttcatactggagagaaaccttatgaatgtgaagaatgtgaaaaagttttcagtcgcaaatcacatcttgaaagacataagaggattcatactggagagaaaccatacaaatgtaaggtttgtgacaaggcttttgcatataattcatacctggcaaaacatagtataattcacactggagagaagccttacaagtgtaatgaatgtggcaaggtttttaatcaacaatcaactcttgcacgccatcatagacttcatactgcagagaaaccatacaaatgtgaagaatgtgacaaagttttcaggtgcaaatcacaccttgaaagacataggaggattcatactggagagaaaccatacaaatgtaaggtttgtgacaaggctttccggagtgattcatgccttacagaacatcagagagttcatactggagagaaaccatacatgtgtaatgaatgtggcaaggtttttagtacaaaagcaaaccttgcatgtcatcataaacttcatactgcagagaaaccgtacaaatgtgaagaatgtgagaaagttttcagtcgcaaatcacacatggaaagacataggaggattcatactggagagaaaccgtacaaatgtaaggtttgtgacaaggctttccggagggattcacacctggcacaacatcagagagttcatactggagagaaaccttacaagtgtaatgagtgtggcaagaccttccgtcagacatcatcgcttataatccatcgtaggcttcatactggagagaaaccttacaagtgtaatgagtgtggcaagaccttcagtcagatgtcatccctcgtataccatcataggcttcatagtggagagaaaccttacaagtgtaatgaatgtggcaaggtttttaatcaacaagcacaccttgcacagcatcagagagttcatactggagagaaaccttacaagtgtaatgagtgtggcaagaccttcagtcagatgtcaaaccttgtataccatcatagacttcatagtggagagaaaccttgaaagtgtaatgagtgtggcaagaccttcagtcagatgtcaaaccttgtataccatcatagacttcatagtggagagaaaccttaaaagtgtaatgagtgtggcaacaccttccatcacaattcaacccttgtaagtcacaaagccattcatactggagagaaactttacaagtgtaatgaatgtggcaaggtttttaatcaaaaaacaacccttgcacgtcatcatagaattcatactgcagagaaactttacaaataggaagaatgtgacaaagttttcggttgcaaatcaaaccttgaaacacataagaaaatgcatgctgaagagaaaccacacagatgtaaggtttatgacaagatttttgaatataattcatacctggcaaaacatattagaattcaaactggagagaaaccttacaaatgtgatgagtgtggcaacacctttggtcaaaattcataccttgtaattcaaaaggcaattcgtattggagagaaaccctacaagtgtaatgaatgtggcatagtttttaatcaacagtcacaccttgcaagtcatcatagtcttcatactgcagagaaatcttacaaatgtgaagactgtgacaaagttgtcagtcacaaatcacagcttgaaagacaggagaattcatactggagaaaaaacatacaaatgtaaggtttgtaacaaggcttttgggagtgattcacacctggcacaccatactagaattcacactggagagaaaccttacaagtgcaatgagtgtggcaaagcctttagtgggcagtcaccacttattcaccatcaagcaatccatagtatagggaaacttgactaatataatgattgtcacaaagttttcagtaatgctacaaccattgcaaatcattggagaatccataatgagagatcttacaagtgtaataaatgtgacagatttttcagatatcgttcatatattgctattcatcatcgaactcatgctggagagaaaccttataaatgtcatgattgtggcaaggtcttcagtcaagtttcatcctatgcaaaacataggaggattcatacaggagagaaactcacaagtgtgatgattgtggcaaagcgtttacttcacattcacacctcaatagacatcagagaatccatgctggacagaaatcttacaaatgtcatcagtgtggtaaggtcttcagtccgagatcactccttgcagaccatcagacaattccttttggagacagttgtttcaaatgccattagtatagcaagccatcaagcattaattgacattacagttaaatgagcactgacctgagtttgagttgacttaacattgagtttaagcattaattgacattaaactgtttatgttaagaggactgggctgggcactgtggctcacgcctgcaatgccagcactttgagaggccaagactggtaggtcactggaggttaagagtttgagaacagcctggccaacagacgggagccacttttcccagcctgtgttttcatttctattctttctttcttttttcttttttttgtttttgtttttgagatggagtctcttgctctgtcatccaggttggagtgcagtggcatgatcttgactcactacaacctccgcctcccaggttcaagcgatcctcctgcctcagtctcctgactagctgggactacaggtgcatgccaccacacctggataattttttgtatttttagtagagactgggtttcgctgtgttagcctggatggtctcgattttctgatcttatgattcacccacctctacctcccgaagtgctgagattatgggcgtgagccaccgtgactggcctgttttttgtttctttaacaaaaagttatggggatttctatgagtattgtgttgaatctaaatcacattcggttatataatcattgagcaatactaatttttccaatcagtatggattgtatgtgtatttatatgtttttaatcattttgatcaatgtttgtagatttcaaggtacaaacttctcacctttatatgtttattcctaaatatttcttactttaagctctttagcaaatggaagtggtttttaattttattttaaaattatttaatgttaatgtatggaaattcaactaatttttggtgctattattctattctgcaaatacactgaatatgtttattagttccagttgtattttggttgactgtgattttcttcacagatcatgtcatctacaaacaaataaaatttgacttctttctttctg

SEQ ID NO: 201999 - DNA, 684 bp, Homo sapiens
  Payload ID: 19847
  Gene Name: zinc finger protein 28
  ENST ID: ENST00000594602
  CDS Start-End: 103-492
gtggaatgacggtcacgccgcggcgggcggattgacttctaaagaatcttggtacgtgaggaagaaacccagaagaggaagaggaaagcaaaggagtcagggatggctcttcctcagggtctattgacattcagggacgtggccatagaattctctcaggaggagtggaaatgcctggaccctgctcagaggactctttacagggatgtgatgctggagaattataggaacctggtctccctggattttcggtctgtcacccaggctaaagtgcagtggtgtcacctcggctcactgcaacctccacttcccaggttcaagcaattctcctgcctcagccttccaagtagctgggactacagatatctcttccaaatgcatgatgaagacattcttctcaacagggcaaggcaatacagaagcgttccacacagggacattgcaaagacaagcaagtcatcacattggagatttttgcttccagaaaattgagaaagacattcatggcttccagtttcagtggaaagaagatgaaacaaatgaccatgcagcacccatgacagaaatcaaagagttgactggtagtacaggccaacatgatcaaaggcatgctggaaacaagcatattaaagatcagcttggattaagctttcattcgcatctgcctgaactgcacatatttca

SEQ ID NO: 202000 - DNA, 628 bp, Homo sapiens
  Payload ID: 19847
  Gene Name: zinc finger protein 28
  ENST ID: ENST00000596559
  CDS Start-End: 103-628
gtggaatgacggtcacgccgcggcgggcggattgacttctaaagaatcttggtacgtgaggaagaaacccagaagaggaagaggaaagcaaaggagtcagggatggctcttcctcagattttcggtctgtcacccaggctaaagtgcagtggtgtcacctcggctcactgcaacctccacttcccaggttcaagcaattctcctgcctcagccttccaagtagctgggactacagatatctcttccaaatgcatgatgaagacattcttctcaacagggcaaggcaatacagaagcgttccacacagggacattgcaaagacaagcaagtcatcacattggagatttttgcttccagaaaattgagaaagacattcatggcttccagtttcagtggaaagaagatgaaacaaatgaccatgcagcacccatgacagaaatcaaagagttgactggtagtacaggccaacatgatcaaaggcatgctggaaacaagcatattaaagatcagcttggattaagctttcattcgcatctgcctgaactgcacatatttcagcctgaagggaaaattggtaatcaagttgagaagtctatcaacaatgcttcctcagtttcaacatcccaaa

SEQ ID NO: 202001 - DNA, 2148 bp, Homo sapiens
  Payload ID: 19848
  Gene Name: zinc finger protein 280A
  Uniprot ID: P59817
  ENST ID: ENST00000302097
  CDS Start-End: 254-1882
agaaaggactttgaagagcaagcggcgttgttcgcctgcggaagcagtgctgccggtctctggacaaatttctccgggaggtggagacaaggaagctccagcttcgctttcccttgcggcccagagtggaacatactgagctgcactgaatcatctggatgcactcgcaactttaggaactggtggcaatttgtaaaaagacagctctggaagttgaagagaccagtggcttcaagcaaaaagtaaattgaaaatgggagatatctttttgtgtaagaaagtggaatcaccaaagaagaatttgagagaatccaaacaaagggaggaggatgatgaagatccagatctgatctatgttggggtggagcatgtacatagagatgctgaagttctctttgtcgggatgatttcaaattcaaaaccagtcgtttcaaacattttgaacagagtcaccccaggctcaaattcaagaagaaagaaaggccacttccgtcaatatcctgctcacgtgtcgcagcctgcaaatcatgtgacctctatggcaaaagccatcatgccggtttctctgtctgaggggcgatcgacagatagtcctgtcactatgaagtcttcatctgaacctggttataaaatgagctcaccacaagttgtttctcccagttcctcagactcgctccccccagggactcagtgtctagttggagctatggtctctggaggaggcagaaatgagagttctcctgattcaaagcgactttccacttcagatataaacagcagagattccaaaagggttaaactcagggatggaatcccaggggtaccttctttagctgtggtcccttcagatatgtcttctacaataagcacaaatacaccctcacaggggatctgcaactcatcaaaccatgttcagaatggagtaacatttccttggcctgatgctaatggaaaggcacatttcaatcttacagatccagagagagcaagtgagtctgccctggcaatgacagacatttcaagtctagcaagtcaaaacaagacctttgatcccaagaaagaaaatcccatcgtgttacttagcgacttttactatggacagcataaaggagatgggcagccggaacagaagactcacaccacctttaaatgcctcagctgcgtgaaagttctaaaaaatattaagtttatgaatcacatgaagcatcatttggaatttgagaagcagaggaacgacagctgggaagaccacaccacctgccagcactgccaccggcagtttcccactcccttccagctacagtgtcacattgatagtgtacacatcgccatggggccctctgctgtctgtaaaatctgtgaattgtcatttgaaacagatcaggtcctcttacaacacatgaaggaccatcataagcctggcgaaatgccttatgtgtgccaggtttgccattacagatcgtcggtctttgctgatgtggaaacacattttagaacgtgccatgaaaacacaaagaatttgctttgtctgttttgtctcaaacttttcaaaactgcaataccatacatgaatcattgttggaggcacagcagaaggagggtccttcagtgttccaagtgccggctacagtttttgacgttgaaggaggaaatagagcacaaaaccaaggaccatcaaacatttaaaaagccggagcaactgcaagggttgcctagtgaaacaaaagttattattcaaacttcagttcagccaggatcaagtggtatggcttccgttattgttagcaacactgaccctcagtcttctcctgtaaaaactaaaaagaagacggctatgaacactagagattccagactcccttgcagcaaggattctagctgaaaatatgttcgactgacttccaggagttccgaaaggcagaagtgaggctaggccatatgtgcattgtggctgtagatgctagcaagcaatgtcatcaactgtcaggttgttttttacagtgacatctcatcagctccctattgtcaagaagtagctccaaagtctttgagccctttcccagtcaaatgctcccaacagggcatcccttattctgacctcagaggtttttcttgttcatgaactttaaataaatggaatcacacaaa

SEQ ID NO: 202002 - DNA, 2148 bp, Homo sapiens; identical to SEQ ID NO: 202001
  Payload ID: 19848
  Gene Name: zinc finger protein 280A
  ENST ID: ENST00000620282
  CDS Start-End: 254-1882

SEQ ID NO: 202003 - DNA, 3714 bp, Homo sapiens
  Payload ID: 19849
  Gene Name: zinc finger protein 280B
  ENST ID: ENST00000616997
  CDS Start-End: 71-1702
aggtggcagtttatataaaggaagcattgggacttgtggccccaccattcaggaataaaaaaattagaaaatggaacaatcatgtgaggaagagaaagagcctgaaccacagaagaacatacaagaaaccaaacaagtagatgacgaagatgctgagctcatctttgttggtgtggaacatgtaaatgaagatgctgagctaatctttgttggggtgacttcaaattcaaaaccagtcgtttcaaacattttgaacagagtcaccccgggttcatggtcaaggagaaaaaagtatgatcaccttagaaaagatactgctcgcaaattgcagcctaaaagtcatgagaccgttacatcagaagcagtgaccgtcctgccagcttcccaacttgaatcgagatcaacagatagtcctattattattgagcctttgtctaaacctgattatagaaatagttcaccacaagttgtgcctaataactcttcagaattaccttctcctttgattacattcacagattcattgcatcatccagtaagtacagcactttcagtaggaggtataaatgaaagtcctcgtgtatcaaagcaactttccactttcgaagtaaacagcataaatcccaaaagggctaaactcagggatggaattatagaaggaaattcttcagcttcattcccttcagatacctttcatacaatgaatactcagcaaagtacaccctcaaataatgttcatacctcattaagccatgttcagaatggagcaccttttccagcagcttttccaaaggacaatatccatttcaagcctataaatacaaatcttgatagggcaaatgaattggcaaaaacagacattttgagtctaacaagtcaaaacaagacctttgatcccaagaaagaaaatcccattgtgttacttagtgacttttactatggacagcataaaggagaagggcagccggaacagaagactcacaccacctttaaatgcctcagctgcgtgaaagttctaaaaaatgttaagtttatgaatcacgtgaagcatcatttggaatttgagaagcagaggaacgacagctgggaaaaccacaccacctgccagcactgccaccggcagtttcccactcccttccagctacagtgtcacatcgaaaatgtccacactgcccaggagccctctactgtctgtaaaatctgtgaattgtcatttgaaacagatcaggtcctcttacaacacatgaaggaccatcataagcctggcgaaatgccctatgtgtgccaggtttgccattatagatcgtcggtctttgctgatgtagaaacacattttagaacgtgccatgaaaacacaaagaatttgctttgtcccttttgtctcaaaattttcaaaacagcaacaccatacatgtgtcattataggggccactggggaaagagtgcacaccagtgttccaagtgccggctacagtttttaactttcaaggagaaaatggagcacaagacccagtgtcatcaaatgtttaagaagcctaagcaactagaaggattacctcctgaaacaaaagttactattcaagtgtcgctggaacctcttcagccaggatcagtggatgtagcatccataactgtgagcacatctgactctgaaccatcactccccaggtctaaaagcaaaatttcaaaaaagtcccattaattctagtttcagtaaatctaaagcaagtatttcaaaccaaattaaaaaacctcataaaacaaaaaatacaaaccatacattattcagtagcaccaaaaatagtgaaactagtggattatatatgactttttaaacaagattcaggatatatattatttgatctgaattttgaggtattattttaaaacatctggttttcatgttaactgtatctggcttaacacataaaaggtgtttgtgtgtgtgtgtgagagagagaaaaaggtattaatttatttttttaattttaatttttttttttttttttttttttttttttactttagagacagggtctcactgttacccaggctggagtgcagtggcgtgatcctagctcactgcaaccttgaacttccaggctcaagcattcctccgcctcagcctttggagagtagctaggactacaggcgcagccaccacacccagctaattttttattttaattttttgtagcgatggaatcttgttatgtcgcccagggtggtctcgaactcctgaccttaggggagcctcctgcctcagcctccccaagtgctgggttgtgtgagtcactgcccctggcacctatttattgttttggtatttcatgttactcctaagcttgaaagctcttttttctatatacagaattcatagaatttttgaaatacttagttttctttacagctttttccatgcattcagcatttcatggttaactctagtcagactggaatggctttgttatgccctggcccacttgctgccgaattcccagaagtgcctctgctgtgctggcataaaataacctgaaaagattctgaaaagccaggatgtggaattgaaagagaagctgctgcgtgagcagagaccaagaaggcggaggggctgtttcacagtattctggagtaccttttgagtattggttcctgaacatcagcagtcttggctgcctctgtggactcccggagttgtctccctgcttgtgttctggtgccatcctttgttcctccacccctgaccaaggtgcccagcagcctgtcttcaccagtcaaggaatccgccatcttggctgtagacatacataggtctggagaaatctctccctttttccttgatttctttttaaaggtaccttatctctccccactcctttcttccctcctcaatctagttaaatttcctaagctttcacaaaaatccgggaagagataattaagagcttagcatccctcttagagtagaaggcagtacagataacaaagaagttgtgagtatattatctacattttagaaaattttctgactctagatccatagattctgttgtatttatttgccggacactcatttgattgatttgcaccttgaacactatactaggtcttttcagttacgttgcttgggttaagacactttgctaaaattacagcctgaatcctttctttagttgaagaaagggtatgtgtgtgcaagtgggtgtgtgtgtgccagtttttcttgtctcaggtagatactcccactgtgtataaatagatctacagacttttcatacttacctcccgtattctgtttctgtggtaaaaatatgaagtgttttagttgtatgttgagtgattggttggtattatcaacactgttgtttgcagtctcattaaagcatgctcttaaggagtacatatggtcattaattgccaactgtagattccagtgatctggcccctgcctacctccttcctctctttttcattctctgtcatgcttctccactgttttccccaatgatgcactattttgacacactggccttgctattccttaagcaaatcacattcttcccaatccaaagactttgcacatgctgttgtctttcttagaatgcccttcccctaggcctgcatggcttgctacctcacttaattgtttgacacttcctttggttcattgagcttcaaggctcttaaaatgccactgacaatgagatctccctt

SEQ ID NO: 202004 - DNA, 3981 bp, Homo sapiens
  Payload ID: 19849
  Gene Name: zinc finger protein 280B
  Uniprot ID: Q86YH2
  ENST ID: ENST00000619852
  CDS Start-End: 323-1954
gccggctgtgccccgggagcgcctccggggctggtgcgtggccggcagctcgcgaacagcagctgatccggactggatgtgaccttctgcctggaatagctcaagttcttaaaagttgcgttgtaataaacctgaggctgggaagttcaagatcaagatgctggacgatttggttccttagtgaaggctctcttcctggctggtggatgacagccttcttgctgtgttctcacatgacagaaagaggaagcaaggtggcagtttatataaaggaagcattgggacttgtggccccaccattcaggaataaaaaaattagaaaatggaacaatcatgtgaggaagagaaagagcctgaaccacagaagaacatacaagaaaccaaacaagtagatgacgaagatgctgagctcatctttgttggtgtggaacatgtaaatgaagatgctgagctaatctttgttggggtgacttcaaattcaaaaccagtcgtttcaaacattttgaacagagtcaccccgggttcatggtcaaggagaaaaaagtatgatcaccttagaaaagatactgctcgcaaattgcagcctaaaagtcatgagaccgttacatcagaagcagtgaccgtcctgccagcttcccaacttgaatcgagatcaacagatagtcctattattattgagcctttgtctaaacctgattatagaaatagttcaccacaagttgtgcctaataactcttcagaattaccttctcctttgattacattcacagattcattgcatcatccagtaagtacagcactttcagtaggaggtataaatgaaagtcctcgtgtatcaaagcaactttccactttcgaagtaaacagcataaatcccaaaagggctaaactcagggatggaattatagaaggaaattcttcagcttcattcccttcagatacctttcatacaatgaatactcagcaaagtacaccctcaaataatgttcatacctcattaagccatgttcagaatggagcaccttttccagcagcttttccaaaggacaatatccatttcaagcctataaatacaaatcttgatagggcaaatgaattggcaaaaacagacattttgagtctaacaagtcaaaacaagacctttgatcccaagaaagaaaatcccattgtgttacttagtgacttttactatggacagcataaaggagaagggcagccggaacagaagactcacaccacctttaaatgcctcagctgcgtgaaagttctaaaaaatgttaagtttatgaatcacgtgaagcatcatttggaatttgagaagcagaggaacgacagctgggaaaaccacaccacctgccagcactgccaccggcagtttcccactcccttccagctacagtgtcacatcgaaaatgtccacactgcccaggagccctctactgtctgtaaaatctgtgaattgtcatttgaaacagatcaggtcctcttacaacacatgaaggaccatcataagcctggcgaaatgccctatgtgtgccaggtttgccattatagatcgtcggtctttgctgatgtagaaacacattttagaacgtgccatgaaaacacaaagaatttgctttgtcccttttgtctcaaaattttcaaaacagcaacaccatacatgtgtcattataggggccactggggaaagagtgcacaccagtgttccaagtgccggctacagtttttaactttcaaggagaaaatggagcacaagacccagtgtcatcaaatgtttaagaagcctaagcaactagaaggattacctcctgaaacaaaagttactattcaagtgtcgctggaacctcttcagccaggatcagtggatgtagcatccataactgtgagcacatctgactctgaaccatcactccccaggtctaaaagcaaaatttcaaaaaagtcccattaattctagtttcagtaaatctaaagcaagtatttcaaaccaaattaaaaaacctcataaaacaaaaaatacaaaccatacattattcagtagcaccaaaaatagtgaaactagtggattatatatgactttttaaacaagattcaggatatatattatttgatctgaattttgaggtattattttaaaacatctggttttcatgttaactgtatctggcttaacacataaaaggtgtttgtgtgtgtgtgtgagagagagaaaaaggtattaatttatttttttaattttaatttttttttttttttttttttttttttttactttagagacagggtctcactgttacccaggctggagtgcagtggcgtgatcctagctcactgcaaccttgaacttccaggctcaagcattcctccgcctcagcctttggagagtagctaggactacaggcgcagccaccacacccagctaattttttattttaattttttgtagcgatggaatcttgttatgtcgcccagggtggtctcgaactcctgaccttaggggagcctcctgcctcagcctccccaagtgctgggttgtgtgagtcactgcccctggcacctatttattgttttggtatttcatgttactcctaagcttgaaagctcttttttctatatacagaattcatagaatttttgaaatacttagttttctttacagctttttccatgcattcagcatttcatggttaactctagtcagactggaatggctttgttatgccctggcccacttgctgccgaattcccagaagtgcctctgctgtgctggcataaaataacctgaaaagattctgaaaagccaggatgtggaattgaaagagaagctgctgcgtgagcagagaccaagaaggcggaggggctgtttcacagtattctggagtaccttttgagtattggttcctgaacatcagcagtcttggctgcctctgtggactcccggagttgtctccctgcttgtgttctggtgccatcctttgttcctccacccctgaccaaggtgcccagcagcctgtcttcaccagtcaaggaatccgccatcttggctgtagacatacataggtctggagaaatctctccctttttccttgatttctttttaaaggtaccttatctctccccactcctttcttccctcctcaatctagttaaatttcctaagctttcacaaaaatccgggaagagataattaagagcttagcatccctcttagagtagaaggcagtacagataacaaagaagttgtgagtatattatctacattttagaaaattttctgactctagatccatagattctgttgtatttatttgccggacactcatttgattgatttgcaccttgaacactatactaggtcttttcagttacgttgcttgggttaagacactttgctaaaattacagcctgaatcctttctttagttgaagaaagggtatgtgtgtgcaagtgggtgtgtgtgtgccagtttttcttgtctcaggtagatactcccactgtgtataaatagatctacagacttttcatacttacctcccgtattctgtttctgtggtaaaaatatgaagtgttttagttgtatgttgagtgattggttggtattatcaacactgttgtttgcagtctcattaaagcatgctcttaaggagtacatatggtcattaattgccaactgtagattccagtgatctggcccctgcctacctccttcctctctttttcattctctgtcatgcttctccactgttttccccaatgatgcactattttgacacactggccttgctattccttaagcaaatcacattcttcccaatccaaagactttgcacatgctgttgtctttcttagaatgcccttcccctaggcctgcatggcttgctacctcacttaattgtttgacacttcctttggttcattgagcttcaaggctcttaaaatgccactgacaatgagatctccctttaaaaaaaaaaaaaa

SEQ ID NO: 202005 - DNA, 3714 bp, Homo sapiens; identical to SEQ ID NO: 202003
  Payload ID: 19849
  Gene Name: zinc finger protein 280B
  Uniprot ID: Q86YH2
  ENST ID: ENST00000613655
  CDS Start-End: 71-1702

SEQ ID NO: 202006 - DNA, 5721 bp, Homo sapiens
  Payload ID: 19849
  Gene Name: zinc finger protein 280B
  ENST ID: ENST00000626650
  CDS Start-End: 744-2375
atcccctgatggactggaagcctaccccccaccccaagccctggctgcgacagctctggaaccctgactgcctgggtgcccctcagctctggaaccctgactgcctggatgctcctcagctctggaaccctgactgcttggataccccctcagctctggaaccctgactgcctggaaccgtgatccggaacccaagatcctttcaaggcctcaggggtattgctgctgccctcctccttctcaatttaaccccgcgtccagccgtcgccaccaggggcgtcagagcgcgcgcatgctcctagctcggagccgcgccgatctcgcgccggcacctggcagccaatcgcaggtctccactggacgcgcgcgtgtggaggcgtgcgcgtcggcggcgccgggggcctgaggaggcgtagtcgccgccggctgtgccccgggagcgcctccggggctggtgcgtggccggcagctcgcgaacagcagctgatccggactggatgtgaccttctgcctggaatagctcaagttcttaaaagttgcgttgtaataaacctgaggctgggaagttcaagatcaagatgctggacgatttggttccttagtgaaggctctcttcctggctggtggatgacagccttcttgctgtgttctcacatgacagaaagaggaagcaaggtggcagtttatataaaggaagcattgggacttgtggccccaccattcaggaataaaaaaattagaaaatggaacaatcatgtgaggaagagaaagagcctgaaccacagaagaacatacaagaaaccaaacaagtagatgacgaagatgctgagctcatctttgttggtgtggaacatgtaaatgaagatgctgagctaatctttgttggggtgacttcaaattcaaaaccagtcgtttcaaacattttgaacagagtcaccccgggttcatggtcaaggagaaaaaagtatgatcaccttagaaaagatactgctcgcaaattgcagcctaaaagtcatgagaccgttacatcagaagcagtgaccgtcctgccagcttcccaacttgaatcgagatcaacagatagtcctattattattgagcctttgtctaaacctgattatagaaatagttcaccacaagttgtgcctaataactcttcagaattaccttctcctttgattacattcacagattcattgcatcatccagtaagtacagcactttcagtaggaggtataaatgaaagtcctcgtgtatcaaagcaactttccactttcgaagtaaacagcataaatcccaaaagggctaaactcagggatggaattatagaaggaaattcttcagcttcattcccttcagatacctttcatacaatgaatactcagcaaagtacaccctcaaataatgttcatacctcattaagccatgttcagaatggagcaccttttccagcagcttttccaaaggacaatatccatttcaagcctataaatacaaatcttgatagggcaaatgaattggcaaaaacagacattttgagtctaacaagtcaaaacaagacctttgatcccaagaaagaaaatcccattgtgttacttagtgacttttactatggacagcataaaggagaagggcagccggaacagaagactcacaccacctttaaatgcctcagctgcgtgaaagttctaaaaaatgttaagtttatgaatcacgtgaagcatcatttggaatttgagaagcagaggaacgacagctgggaaaaccacaccacctgccagcactgccaccggcagtttcccactcccttccagctacagtgtcacatcgaaaatgtccacactgcccaggagccctctactgtctgtaaaatctgtgaattgtcatttgaaacagatcaggtcctcttacaacacatgaaggaccatcataagcctggcgaaatgccctatgtgtgccaggtttgccattatagatcgtcggtctttgctgatgtagaaacacattttagaacgtgccatgaaaacacaaagaatttgctttgtcccttttgtctcaaaattttcaaaacagcaacaccatacatgtgtcattataggggccactggggaaagagtgcacaccagtgttccaagtgccggctacagtttttaactttcaaggagaaaatggagcacaagacccagtgtcatcaaatgtttaagaagcctaagcaactagaaggattacctcctgaaacaaaagttactattcaagtgtcgctggaacctcttcagccaggatcagtggatgtagcatccataactgtgagcacatctgactctgaaccatcactccccaggtctaaaagcaaaatttcaaaaaagtcccattaattctagtttcagtaaatctaaagcaagtatttcaaaccaaattaaaaaacctcataaaacaaaaaatacaaaccatacattattcagtagcaccaaaaatagtgaaactagtggattatatatgactttttaaacaagattcaggatatatattatttgatctgaattttgaggtattattttaaaacatctggttttcatgttaactgtatctggcttaacacataaaaggtgtttgtgtgtgtgtgtgagagagagaaaaaggtattaatttatttttttaattttaatttttttttttttttttttttttttttttactttagagacagggtctcactgttacccaggctggagtgcagtggcgtgatcctagctcactgcaaccttgaacttccaggctcaagcattcctccgcctcagcctttggagagtagctaggactacaggcgcagccaccacacccagctaattttttattttaattttttgtagcgatggaatcttgttatgtcgcccagggtggtctcgaactcctgaccttaggggagcctcctgcctcagcctccccaagtgctgggttgtgtgagtcactgcccctggcacctatttattgttttggtatttcatgttactcctaagcttgaaagctcttttttctatatacagaattcatagaatttttgaaatacttagttttctttacagctttttccatgcattcagcatttcatggttaactctagtcagactggaatggctttgttatgccctggcccacttgctgccgaattcccagaagtgcctctgctgtgctggcataaaataacctgaaaagattctgaaaagccaggatgtggaattgaaagagaagctgctgcgtgagcagagaccaagaaggcggaggttagttgagggagagcagtggttctttgttctagttgaagtataggcacacattcattctagtcttggggccaggtcaaaaggaacactgcttcagagtgtctttacctacctgaaaacatccaaggaagccaaaccattcaaagtaaaatgcttttgtttggtgaagggcccctgcagacatcaaacagccgtcatgtatcattggtttgaggtgaaatagcaataaaattaatagaatggtgcctggtactagctgacttcctgttctgtgatctaaaggtgaatttgattcattccctctcctctcccttctggctagccgttagtggagaatgaactggccatattctcagccacagctgtaaagcaagtttcccaaggggaagaagccctaatatctataatttgaactgtactggacccatagttttaactgaaaagggccaaacaagtggtgtctgtccagttcctggactgggctaaatttagttttcccactgttaagctggaatgaggactgtcccaacaacagtaggtacagtggacaaaaatagcccagggtgactgactgaatttaaacccataatggctttatatttttctgtgcatatatatcttaccctaattgaacatgtgaagcttgcaactttatgtcttgctttggacatgaatgtattacagcttgcagctattctgttaaatgtatagtttcccagttttttgacactaatgctgtttgggtcttacctgacacacaccagtgtgcaagaaatgtctctctaattcaataagttttaagacttagagttaatgtccttcatctgatctatcctatctaatctgtactatgggtgaatctttttcccttgctctccccaggggctgtttcacagtattctggagtaccttttgagtattggttcctgaacatcagcagtcttggctgcctctgtggactcccggagttgtctccctgcttgtgttctggtgccatcctttgttcctccacccctgaccaaggtgcccagcagcctgtcttcaccagtcaaggaatccgccatcttggctgtagacatacataggtctggagaaatctctccctttttccttgatttctttttaaaggtaccttatctctccccactcctttcttccctcctcaatctagttaaatttcctaagctttcacaaaaatccgggaagagataattaagagcttagcatccctcttagagtagaaggcagtacagataacaaagaagttgtgagtatattatctacattttagaaaattttctgactctagatccatagattctgttgtatttatttgccggacactcatttgattgatttgcaccttgaacactatactaggtcttttcagttacgttgcttgggttaagacactttgctaaaattacagcctgaatcctttctttagttgaagaaagggtatgtgtgtgcaagtgggtgtgtgtgtgccagtttttcttgtctcaggtagatactcccactgtgtataaatagatctacagacttttcatacttacctcccgtattctgtttctgtggtaaaaatatgaagtgttttagttgtatgttgagtgattggttggtattatcaacactgttgtttgcagtctcattaaagcatgctcttaaggagtacatatggtcattaattgccaactgtagattccagtgatctggcccctgcctacctccttcctctctttttcattctctgtcatgcttctccactgttttccccaatgatgcactattttgacacactggccttgctattccttaagcaaatcacattcttcccaatccaaagactttgcacatgctgttgtctttcttagaatgcccttcccctaggcctgcatggcttgctacctcacttaattgtttgacacttcctttggttcattgagcttcaaggctcttaaaatgccactgacaatgagatctccctttaaaaaaaaaaaaaaacttctacttttcctcttaaaggcactttactctctccccactcttttcttcctcttcaaagtatttaaatttcctaggttttcatgaaaaagctggaaagcgatcatcatcaagggctttgcttctgtcttagaattgagctagcttgagtcaatttctgtgcctgcaaccaaatgaaaattaatatagtgagttctttcaggagctttctctgtttttctattgatacctctatatatttttaaggcaatgtcactttgttttgtttacaaatatattgaatatgtcaagattactattttgttattgccctttgtgaatttccttgtctattttgctcgcttgttctttcaggtgaaatttattattttattaatgttgccaaaaattataagtaaaatatcaattatagtaataaaatgttttgtgaaaaaaa

SEQ ID NO: 202007 - DNA, 5721 bp, Homo sapiens; identical to SEQ ID NO: 202006
  Payload ID: 19849
  Gene Name: zinc finger protein 280B
  ENST ID: ENST00000627112
  CDS Start-End: 744-2375

SEQ ID NO: 202008 - DNA, 3981 bp, Homo sapiens; identical to SEQ ID NO: 202004
  Payload ID: 19849
  Gene Name: zinc finger protein 280B
  ENST ID: ENST00000630760
  CDS Start-End: 323-1954

SEQ ID NO: 202009 - DNA, 4634 bp, Homo sapiens
  Payload ID: 19850
  Gene Name: zinc finger protein 280C
  Uniprot ID: Q8ND82
  ENST ID: ENST00000370978
  CDS Start-End: 155-2368
ggttccgcgctggaagtctccgggggagtcgctgttgctgaggctgtcgcctgaggtttttcgcgctcctccctttcctcctcctctttctcctcctccttatccgaaccccagtcagaccgatctgctctgctctcggtgaccttgcaacttcatggatgacgacaaaccttttcaaccaaaaaacatttcaaaaatggcagaactctttatggaatgtgaagaagaagagctagagccatggcagaagaaagtagaagaaactcaggatgaggatgacgatgaactgatctttgttggagagatatcaagttcaaaaccagccatttcaaatattttgaacagaggccactccagctcatcttcaaaaggaataaagagtgagccacacagtccaggtattcctgaaatattcaggactgcaagtcaacgctgcagagacccaccatcaaatccagtggctgcctcgcctagatttcatcttgtatctaaatcttcacaaagctctgttactgttgagaatgcgtctaaacctgattttacaaagaattcacaagttggatcggataattcttcaattttactgtttgactcgacccaggaatcactaccaccatcccaagacataccagcaatttttagagaaggtatgaaaaatacttcatatgtgttgaaacatccttctacttctaaagtaaacagtgttactccaaaaaaaccaaagaccagtgaagatgttcctcagataaatccctccacttcattgcctttaattggctctcctccagtgacatcctcccaagttatgctgtcaaaaggtacaaatacctcatctccatatgatgctggagcagattacctaagagcttgtccaaagtgcaatgttcagttcaatcttttggatcctttgaaataccacatgaagcattgttgtccagacatgataactaaatttttgggagtaattgttaaatcagaacgtccatgtgatgaagacaagactgattcagagacaggaaagttgatcatgttagtcaatgagttttattatggaaggcatgaaggagtcactgagaaagagccaaagacttacacaacctttaaatgcttcagttgctcgaaagttcttaaaaataatattaggtttatgaaccacatgaaacatcacttggaacttgagaagcagaacaatgaaagctgggaaaaccacaccacctgccagcactgttaccggcaatatcccacacccttccaactgcagtgccacattgagagtacacacactccccatgagttttctactatttgcaaaatctgtgaattatcatttgaaacagagcatattcttttacaacatatgaaggacacccataaacctggtgaaatgccatatgtttgccaggtttgccagtttagatcatcaacattttctgatgtagaagctcattttagagcagcccatgaaaacactaagaacttgctatgtccattttgcctcaaagttagtaaaatggcaaccccctacatgaatcattacatgaagcatcagaaaaaaggagttcatcgttgcccaaaatgcagactacaatttttgaccagcaaggagaaagctgaacataaggcgcagcatcgtacatttataaagcctaaagaactagaaggattgcctcctggagcaaaagttactattcgagcttcacttggacctctccagtcaaaattaccaactgcacctttcggttgcgctccaggcacttcttttcttcaggtcacacctccgacatctcaaaatacaactgctagaaatcctagaaaatctaatgccagtagatctaagacaagtaagcttcatgcaactacatccactgcaagtaaagttaatacaagtaagccaaggggacgtatagctaagtccaaagcaaaaccctcttacaagcaaaagcgacagcgcaacagaaaaaataaaatgagccttgctttgaagaacataaggtgtcgtcggggaattcacaagtgcattgaatgtcattccaaaataaaagattttgcaagccacttttctatatacatccactgcagtttttgcaagtacaatactaactgtaacaaagcctttgtaaatcatatgatgagctctcatagcaaccatccaggtaaacggttttgtattttcaagaagcattcaggaactctcaggggcattactctagtgtgccttaaatgtgatttcctagctgattcttccggcttagatcgtatggctaaacacttaagtcaacgtaaaactcatacttgccaagttataatagagaatgtttccaaaagtacctcaacttctgaacccactactggctgctcattgaaatagattcctgctccatggagttcatgcaacctggtgcaagacaagttggaagttcctaagttcaaagttctgaagtattttctcacacaaagggcagttaaacagccaagtttatgacactagctctcattattcagctcttttcagctttcagatgccactacattgttattccaccttatctttgcgtcaggttaacatatcttaacatatttttttctccagttggctctctccaaaaatgccttttgtttttctctgctatacttgacttgccttcagaatattacattccagataatatgactgttcatctttttctgtctgttttgtctgctttcttaatttcttataagtcttacatgtttaggtcagataaccattttttcttcattccttgttcattactgttctatttttcatatttttcaaatgaagaagcaacacataagtttcaaaaaatatccagggtactcctggacagtgtccccttttgatggacacaactgatacctgttctttctttccaagaaatgtgaattatttgactgtgagacgtcctctagtttgtggccttcagaaatcagatcttggggagagtcccttcctacctgactgacctcccataaggctgatgctgatttggccagagatgacctcaaggcccaccaaatagagcacaacttcccattgggagctttggcttttgatcttaagcttatgggtcgattctaaccaagaaaagtccatgagatcagtgcttcaacatccaggttgacgtttaaccattttggctgctgctctttaattttcctctagcaggcatgcagtccaaggaatatcaaaattctgattgtatgggaaccaaggttactttcttgttcttggataaagaaaatttctacaattacagttcccaaagacacagttgttcatgttatttaaagttttatccagtattctaggaattttcagcaatactaatattctcatttttaaacattttttacattttattttgttttattttggtagcttggttttatattgtttttagatcagtgcttcaacatccaggctgacgtttagccattttggctgctgttctttaatcttcctctagcaggcatgcagtccaaggaatatcaaaattctggttgtattgggaaccaaggttactttcttgtttttggaaaaacaaaatttctacaattacagttcccaaagtcagttattcatgttttcatttaaagttttatccaatattctaggaattttcagcaatactgatattcactttattttttttctttttttaagacagagtcttgctctgtcacccaggctggagtgcagtggcgcgatcttggctcactgcaagctccgcctcctgggttcacgccattctcctgcctcagtctcccaagtacctgggatgacaggcgcctgccaccacgcccggctaatttttaattttttgtatttttagtagagacagggtttcaccatgttagccaggatggtctcgatctcctgacgtcgtgatcagtccgcctcgtcctcccaaagtgctgggattacaggtgtgagccactgcacccgaccgatactcacatttttaaactttttttttaattttattttggtagctaggttttatattgttcttaaatttattttactctattttatttttccatcacttctttgtcccagattcatgaaatttgctgatgtccattttatgtctacttttgaactcttctctttgtgtttgttttgttcttattacaaactccaagacatttcttagaattgtctacagatttcgtgtagctacttattggtagcttcttaatttcatacttgtccagaccattagacattattacatgctctgtcttgggcctatcattaacattagcttagggattctgatttcaaagacataaagaattggcaaaactcttcttacagaacttaaaacaagttttaaagttacatttctatacatctaatacataataccttcttagccattaatgtaattcctctggataaagataatatattcaaaaaatattgggaccaaaaaatgcacttgtttcttgctcatatatatatagatgtatattttttttaatttcttgtttgtttattttggttacattgaatacagatttgctgaacagttttgatgttatttttttaataaaatttgtattgttaaagtgccttggaaatttctaataaataacttcatataaaa

SEQ ID NO: 202010 - DNA, 1970 bp, Homo sapiens
  Payload ID: 19850
  Gene Name: zinc finger protein 280C
  ENST ID: ENST00000447817
  CDS Start-End: 139-1970
tctccgggggagtcgctgttgctgaggctgtcgcctgaggtttttcgcgctcctccctttcctcctcctctttctcctcctccttatccgaaccccagtcagaccgatctgctctgctctcggtgaccttgcaacttcatggatgacgacaaaccttttcaaccaaaaaacatttcaaaaatggcagaactctttatggaatgtgaagaagaagagctagagccatggcagaagaaagtagaagaaactcaggatgaggatgacgatgaactgatctttgttggagagatatcaagttcaaaaccagccatttcaaatattttgaacagaggccactccagctcatcttcaaaaggaataaagagtgagccacacagtccaggtattcctgaaatattcaggactgcaagtcaacgctgcagagacccaccatcaaatccagtggctgcctcgcctagatttcatcttgtatctaaatcttcacaaagctctgttactgttgagaatgcgtctaaacctgattttacaaagaattcacaagttggatcggataattcttcaattttactgtttgactcgacccaggaatcactaccaccatcccaagacataccagcaatttttagagaaggtatgaaaaatacttcatatgtgttgaaacatccttctacttctaaagtaaacagtgttactccaaaaaaaccaaagaccagtgaagatgttcctcagataaatccctccacttcattgcctttaattggctctcctccagtgacatcctcccaagttatgctgtcaaaaggtacaaatacctcatctccatatgatgctggagcagattacctaagagcttgtccaaagtgcaatgttcagttcaatcttttggatcctttgaaataccacatgaagcattgttgtccagacatgataactaaatttttgggagtaattgttaaatcagaacgtccatgtgatgaagacaagactgattcagagacaggaaagttgatcatgttagtcaatgagttttattatggaaggcatgaaggagtcactgagaaagagccaaagacttacacaacctttaaatgcttcagttgctcgaaagttcttaaaaataatattaggtttatgaaccacatgaaacatcacttggaacttgagaagcagaacaatgaaagctgggaaaaccacaccacctgccagcactgttaccggcaatatcccacacccttccaactgcagtgccacattgagagtacacacactccccatgagttttctactatttgcaaaatctgtgaattatcatttgaaacagagcatattcttttacaacatatgaaggacacccataaacctggtgaaatgccatatgtttgccagaaaaaaggagttcatcgttgcccaaaatgcagactacaatttttgaccagcaaggagaaagctgaacataaggcgcagcatcgtacatttataaagcctaaagaactagaaggattgcctcctggagcaaaagttactattcgagcttcacttggacctctccagtcaaaattaccaactgcacctttcggttgcgctccaggcacttcttttcttcaggtcacacctccgacatctcaaaatacaactgctagaaatcctagaaaatctaatgccagtagatctaagacaagtaagcttcatgcaactacatccactgcaagtaaagttaatacaagtaagccaaggggacgtatagctaagtccaaagcaaaaccctcttacaagcaaaagcgacagcgcaacagaaaaaataaaatgagccttgctttgaagaacataaggtgtcgtcggggaattcacaagtgcattgaatgtcattccaaaataaaagattttgcaagccacttttctatatacatccactgcagtttttgcaagtacaatactaactgtaacaaagcctttgtaaatcatatgatgag

SEQ ID NO: 202011 - DNA, 4328 bp, Homo sapiens
  Payload ID: 19851
  Gene Name: zinc finger protein 280D
  Uniprot ID: Q6N043
  ENST ID: ENST00000267807
  CDS Start-End: 218-3157
acggctcggctgccagctccgcaatgggagccgccgccgtcgccgcagtgtagtttttcgtgctcctccttttcctcctcctctttctcctcctcctcagggctccagtcaggccgatccgctccgctcacggaaggaaaacagaaataacttgctggcttgtctggagtcacatgtacttaggtgacaatttacagaaagtcatctctgcagcttgatgggcgacaacccttttcaaccaaaaagtaattcaaaaatggcagaactgtttatggaatgtgaagaagaggagctggaaccatggcagaagaaagtaaaagaagttgaggatgacgatgatgatgagccaatctttgttggcgagatatcaagttcaaaaccagcaatttcaaatattttgaacagagttaaccccagctcatattcaaggggactaaagaatggtgcactcagtcgaggtattactgctgcattcaagcctacaagtcaacactacacgaatccaacatcaaatccagtgcctgcctcaccaataaattttcatcctgagtctagatcttcagatagttctgttattgttcagcctttttctaaacctggttatataacaaactcatcacgagttgtgtctaataagtcatcagagttactgtttgacttgacccaggatacaggattatcacattaccaagggggaccaacactttctatggcaggtatgagtgaaagttcatttttatcaaaacgtccttctacttctgaagtaaataatgttaatccaaagaagcctaaacccagcgaaagtgtttctggagcaaattcctcagctgtattaccttcagttaaatctccttcagtgacttcttcccaggctatgctagcaaaaggtacaaatacctcatcaaatcagtctaaaaatggaacaccttttccaagagcttgtccaaagtgcaacattcatttcaatcttttggatcctttgaaaaatcacatgaagtattgttgtccagacatgataaataactttttgggactggctaaaacagaattttcaagtacagtaaataaaaacacaactattgattcagagaaaggaaaattgatcatgttagttaatgacttttattatggaaaacatgaaggagatgtccaggaggaacagaagactcacacaacctttaaatgcttcagttgcttgaaaattctaaaaaataacattaggtttatgaaccacatgaaacaccatttggaacttgagaagcagagcagtgagagctgggaaaaccataccacctgccagcactgctaccgtcagtttcccacaccatttcagttgcagtgtcacatcgaaagtacacatacgccccatgaattttctactatttgtaaaatctgtgaattgtcatttgaaacagaacatgttcttttacaacatatgaaggacaatcataaacctggtgaaatgccatatgtctgccaggtttgtaattatagatcatcatcattttctgatgtagaaactcattttagaacatcccatgaaaacactaagaacttgctatgcccgttttgcctcaaagttattaaaattgcaacaccatatatgcatcattatatgaagcatcagaaaaaaggaatacatcgttgtacaaaatgcaggctgcagtttttgacatgcaaggagaaaatggatcataagactcaacaccatcgaacatttataaaacctaaacaactagaaggattgcctcctggaacaaaagttactattcgagcttcagttggacctctgcaatcaggagcttcacctacaccttccattagtgcaagtgcttctacccttcagctctcacctccaaggactaaaaatataactgctaaaaatcctgcaaaatctaatacaagtaaacctaatacagtcaaatccaacgcaagtaaacctaatacaagtaagcctaatggaagtaaatctaaatacaaaccaaaaatctctaatatgcaaaagaaacaaagcacattggctagtagcaataaaaaaagtaaagtcaatacagcattgaggaatttaaggtatcgtcggggcattcacaaatgcattgagtgttgttccgaaataaaagattttgcaaaccactttcctacgtacgtccactgtagtttttgcagatacaacactagctgtagcaaagcctatgtaaatcatatgatgagctttcatagtaaccgtccaagcaaaaggttttgtatttttaagaagcattcagaaaatctccggggcattactctagtgtgccttaattgtgatttcctaagtgatgtttctggcttagataatatggctacacacttaagtcaacataaaactcatacttgccaagttgtaatgcagaaagtttctgtttgtatcccaacttctgagcacctttctgaattaaaaaaagaagctcccgcaaaggaacaagaacctgtgtctaaggaaattgcaagacctaacatggctgaaagagaaacagaaacatcaaattctgaaagtaaacaagataaagctgcttcttcaaaagaaaaaaatggatgtaatgcaaattcatttgaaggctcatcaacaacaaaaagtgaagaaagcataacagtttcagataaggaaaatgaaacctgtcttgcagaccaggaaactggctcaaaaaacatcgtcagttgtgattcaaatattggtgcagataaagtggaaaagaaaaaacaaatacaacacgtttgtcaggaaatggagttgaagatgtgccaaagttcagaaaacataatcttatctgatcagattaaagatcacaactccagtgaagccagattttcttcaaagaatattaaggatttgcgattagcatcagataatgtaagcattgatcagtttttgagaaaaagacatgaacctgaatctgttagttctgatgttagcgagcaaggcagtattcatttggaacctctgactccatccgaggtacttgagtatgaagccacagagattcttcagaaaggtagtggtgatccttcagccaagactgatgaagtagtgtctgatcaaacagatgacattcctggaggaaataaccctagcacaacagaggcaacagtagacctggaagacgaaaaagaaagaagttgaaattagtcattttaagtttcagtgtaccaacgataagggcatttggaacagtgctatcaggtgagctcagtggtgctgttgtaggttcagaaatggaaatatgtaagggaggtcacacatacactttacctgtatgttcaacctatgttatcaaacaaatcaattcaccaataatagcatgattagtagggattcccaaaaagtttttaaaaacacgaacaggattttaatgataattaaatttgcagtggaaaggtctcatttaatggttttcaaggaaatgggatttggttgctgacatgaattgatgatattagtaatatttataaagcctttcaaacttccatcaatcctaagctaaaaatctttattacctgtatatccttttcagttaactgagaggaagggatttggaaaccatgtacttttggggagtaattgattaaaaacaatggctgattggcattgttaatgaaggctttatttgtgaggatgatgctggtaaatggagcatgcttagagtactaaattgatctaatgagaatttggatgaacataaacttaattttggatttaatataacattccagtcagacgcatgtaaacagaatatttgaatctttgtacctccatacaagtgttagcctgccaggctgtaagcttaccttaattaaactttcagtgaaagtggaattattaagatataaatttatatttgtgctttttgtcagtgtgtaagctgtgtagaaattctttgatgtattagttgtattaatgtaaagtagaaacccattgttgaaactcctgtagctattatgcttttaatattgttttaatgatcttccttagaaataggcccataaaaatggtctggaagccaaaccaaagtatggtataatgtagatattgtaaagcagtaaactgaaaacatgtcctggcatgtattcagccatgtttaagtgacttttctgtaattgtaaaataaaaacttcaaatgggacctaaaacagtgatgtaaaagaactggttttggaaatttagcctaatttatctataagatggctgctaaattgatttttcagttctttttatcatctagaatataatagatatagaaatgaataatatgaagaacagtagtttgctttgaaatactaataaacttttattt

SEQ ID NO: 202012 - DNA, 4726 bp, Homo sapiens
  Payload ID: 19851
  Gene Name: zinc finger protein 280D
  ENST ID: ENST00000559000
  CDS Start-End: 1801-4044
gaagtggggccggcagagggggcggggaggagctgtcggggactgggaggagccgcaccgcggcgggtggacaaagcccgcggtcgggtgaggcgggacggagttggggccggtggggaggggcatgaggcgctcgcaggcacctcgagaagcaggccccgaccgctcgccgacgaagcctcgtccgggcctcctgggagcggggtggcaggtaccgtggcgcctcctcgcgttggtcttgctggttctcggcccccgaagcggagcgacggagacacagctgtggaagcatctggatccgctgcccaggtccccgagcttcccggaacccgaggccgcaggacactgaaggctgccattcccgagtaggtcacgctggacgccaccctaagctgggcccagaggctcccgtccaggagggctgcagtcggcgcagacaccgcgcgtgtggagacgggagacccatcctcctcggccgttccgagagtaggcgcggccggtcagattcgatgcagagccgaatgcgggagaaagggcaaaacgtacctcaaaccagacaaagccttgtgagcttcaggttctcaaataccccactcacccagaccccacatctccagtcagcccctcgcacccaaatcccattcggagcaaccgaactgcacgtgggactagttcttgggaatggatcaagccagtctcttcatctaacggagacagccctgggtggctctgtcacacagccactgtcttgtgcacaagttctgaacttggcctcagagaagccccagagtagaaagaagacaaaataagccccagttcttcgattctgggctgaagtgagattttcttgaatggcagccattgttttgcctcttaggtaagtgagtgcagtaaagaccggtaaggcccacgcagaagaaacactgaggaaagaagacacttccaaagtaacaaatgggaggaagcagccaacgcccgaggacaacatggcaagaaggagcctttggattccggactgggatggaaagagagttgattgaatcccggaatttggaaaccccagatacggagggcggacggtacaaccggagctgtcagaatcttgctctgtcacccaggctggagtgcaatggtgcaatctcaagctcactgcaacctctgtgcaggttcaagtggagaatctgaatcttgatgatataattggaactcttcagccaagccatatctaacagaactatcttcaacttttcaggtgttggtgaggatgcagagaaaagggaaactcatacactgctgatgggaatgcaaaccagtacaacttctatggaaaacgatatggagactctcaaagaactaaaagcagaaccatcattccgtccagcaatcccaccactggtcatctacccaaagtttgggtatcaaaaatatacttacaaaagaagtaaagagagctcacctatttttgtcttcactgaatgaaaaagtctgttcaatacaggaaataaactttgaagatttggtaaaactcacctctttgggtgatttggagtacagatagtatagtccttgagttgtcaattggaagtcactgataccacacggtttaagattatctgactctcagctatacaggattgctgactgctgctagaaaggccttcataaccaaaatgcaacatggaaatagctttcttacattccatgagaaaaaaaatagatctgacaacgttattgaatagaaaaaggaaggaaaacagaaataacttgctggcttgtctggagtcacatggtaattcaaaaatggcagaactgtttatggaatgtgaagaagaggagctggaaccatggcagaagaaagtaaaagaagttgaggatgacgatgatgatgagccaatctttgttggcgagatatcaagttcaaaaccagcaatttcaaatattttgaacagagttaaccccagctcatattcaaggggactaaagaatggtgcactcagtcgaggtattactgctgcattcaagcctacaagtcaacactacacgaatccaacatcaaatccagtgcctgcctcaccaataaattttcatcctgagtctagatcttcagatagttctgttattgttcagcctttttctaaacctggttatataacaaactcatcacgagttgtgtctaataagtcatcagagttactgtttgacttgacccaggatacaggattatcacattaccaagggggaccaacactttctatggcaggtatgagtgaaagttcatttttatcaaaacgtccttctacttctgaagtaaataatgttaatccaaagaagcctaaacccagcgaaagtgtttctggagcaaattcctcagctgtattaccttcagttaaatctccttcagtgacttcttcccaggctatgctagcaaaaggtacaaatacctcatcaaatcagtctaaaaatggaacaccttttccaagagcttgtccaaagtgcaacattcatttcaatcttttggatcctttgaaaaatcacatgaagtattgttgtccagacatgataaataactttttgggactggctaaaacagaattttcaagtacagtaaataaaaacacaactattgattcagagaaaggaaaattgatcatgttagttaatgacttttattatggaaaacatgaaggagatgtccaggaggaacagaagactcacacaacctttaaatgcttcagttgcttgaaaattctaaaaaataacattaggtttatgaaccacatgaaacaccatttggaacttgagaagcagagcagtgagagctgggaaaaccataccacctgccagcactgctaccgtcagtttcccacaccatttcagttgcagtgtcacatcgaaagtacacatacgccccatgaattttctactatttgtaaaatctgtgaattgtcatttgaaacagaacatgttcttttacaacatatgaaggacaatcataaacctggtgaaatgccatatgtctgccaggtttgtaattatagatcatcatcattttctgatgtagaaactcattttagaacatcccatgaaaacactaagaacttgctatgcccgttttgcctcaaagttattaaaattgcaacaccatatatgcatcattatatgaagcatcagaaaaaaggaatacatcgttgtacaaaatgcaggctgcagtttttgacatgcaaggagaaaatggatcataagactcaacaccatcgaacatttataaaacctaaacaactagaaggattgcctcctggaacaaaagttactattcgagcttcagttggacctctgcaatcaggagcttcacctacaccttccattagtgcaagtgcttctacccttcagctctcacctccaaggactaaaaatataactgctaaaaatcctgcaaaatctaatacaagtaaacctaatacagtcaaatccaacgcaagtaaacctaatacaagtaagcctaatggaagtaaatctaaatacaaaccaaaaatctctaatatgcaaaagaaacaaagcacattggctagtagcaataaaaaaagtaaagtcaatacagcattgaggaatttaaggtatcgtcggggcattcacaaatgcattgagtgttgttccgaaataaaagattttgcaaaccactttcctacgtacgtccactgtagtttttgcagatacaacactagctgtagcaaagcctatgtaaatcatatgatgagctttcatagtaaccgtccaagcaaaaggttttgtatttttaagaagcattcagaaaatctccggggcattactctagtgtgccttaattgtgatttcctaagtgatgtttctggcttagataatatggctacacacttaagtcaacataaaactcatacttgccaagttgtaatgcagaaagatgcagaagcagcccagagatttcaaaaaatatccagggtatacctggacagtgtcccccttcgatggacacaactgatgcctgttctctctttccaaggaatgtgaataatttgactgtgggacctgctcttaggttgtggcctcaagaaatcagatcttggggagactccctttctacatggctggcctcccataaggctgatgttgtttggccagagatggctttaaggcccaccaaattgagcatacttcccactgggggctttggcttatgatcttaagcttatgagtcagttatgaccaagaaaagcccatcaaaccactgcttcagcatccaagttgaagtttagtcattttggctgctgcctttaaatctttctctagcatgaatgcagtccaaggaatataaaaactctagttgttaggaaaccatggctactttcatatccttggaacaacaggtctccacaattaagttccaaaattgcagttatttttactgacatataaaatctattaaccagtattaattctgtaattttttaacaataccgattcttgcattttgattttttaaaaattaatttaatagcttggttttatgttctcaaaatttattaatgtctattttatgatgtctatttttatattatattatttaaaatttgtttagtgtttgttttaagaactccaagagatttcttagaattctctacagattttgtgtagctgcctatttgtagattttaaatttggctgttactaagcccattaaacattattagat

SEQ ID NO: 202013 - DNA, 2274 bp, Homo sapiens
  Payload ID: 19851
  Gene Name: zinc finger protein 280D
  ENST ID: ENST00000558002
  CDS Start-End: 136-1743
ctttctcctcctcctcagggctccagtcaggccgatccgctccgctcacggaaggaaaacagaaataacttgctggcttgtctggagtcacatgtacttaggtgacaatttacagaaagtcatctctgcagcttgatgggcgacaacccttttcaaccaaaaagtaattcaaaaatggcagaactgtttatggaatgtgaagaagaggagctggaaccatggcagaagaaagtaaaagaagttgaggatgacgatgatgatgagccaatctttgttggcgagatatcaagttcaaaaccagcaatttcaaatattttgaacagagttaaccccagctcatattcaaggggactaaagaatggtgcactcagtcgaggtattactgctgcattcaagcctacaagtcaacactacacgaatccaacatcaaatccagtgcctgcctcaccaataaattttcatcctgagtctagatcttcagatagttctgttattgttcagcctttttctaaacctggttatataacaaactcatcacgagttgtgtctaataagtcatcagagttactgtttgacttgacccaggatacaggattatcacattaccaagggggaccaacactttctatggcaggtatgagtgaaagttcatttttatcaaaacgtccttctacttctgaagtaaataatgttaatccaaagaagcctaaacccagcgaaagtgtttctggagcaaattcctcagctgtattaccttcagttaaatctccttcagtgacttcttcccaggctatgctagcaaaaggtacaaatacctcatcaaatcagtctaaaaatggaacaccttttccaagagcttgtccaaagtgcaacattcatttcaatcttttggatcctttgaaaaatcacatgaagtattgttgtccagacatgataaataactttttgggactggctaaaacagaattttcaagtacagtaaataaaaacacaactattgattcagagaaaggaaaattgatcatgttagttaatgacttttattatggaaaacatgaaggagatgtccaggaggaacagaagactcacacaacctttaaatgcttcagttgcttgaaaattctaaaaaataacattaggtttatgaaccacatgaaacaccatttggaacttgagaagcagagcagtgagagctgggaaaaccataccacctgccagcactgctaccgtcagtttcccacaccatttcagttgcagtgtcacatcgaaagtacacatacgccccatgaattttctactatttgtaaaatctgtgaattgtcatttgaaacagaacatgttcttttacaacatatgaaggacaatcataaacctggtgaaatgccatatgtctgccaggtttgtaattatagatcatcatcattttctgatgtagaaactcattttagaacatcccatgaaaacactaagaacttgctatgcccgttttgcctcaaagttattaaaattgcaacaccatatatgcatcattatatgaagcatcagaaaaaaggaatacatcgttgtacaaaatgcaggctgcagtttttgacatgcaaggagaaaatggatcataagactcaacaccatcgaacatttataaaacctaaacaactagaaggattgcctcctggaacaaaatcagctcttgaatatttgctccagtggagggaaacagaggcatggataatccaaagtgaataatccccaaaacatttatttttggctttgggtactttcctttgaatgtgggtatgtctgttatttgaattaactaaaacaatataaagccatgctctgaagacatgatagcaagagaagctatccagcatccttccctgcaatccattcattccatgttgggactagacatgcagaacactaatgttactattcgagcttcagttggacctctgcaatcaggagcttcacctacaccttccattagtgcaagtgcttctacccttcagctctcacctccaaggactaaaaatataactgctaaaaatcctgcaaaatctaatacaagtaaacctaatacagtcaaatccaacgcaagtaaacctaatacaagtaagcctaatggaagtaaatctaaatacaaaccaaaaatctctaatatgcaaaagaaacaaagcacattggctagtagcaataaaaaaagtaaagtcaatacagcattgaggaatttaaggtatcgtcggggcattcacaaatgcattgagtgttgttccg

SEQ ID NO: 202014 - DNA, 4040 bp, Homo sapiens
  Payload ID: 19851
  Gene Name: zinc finger protein 280D
  Uniprot ID: Q6N043
  ENST ID: ENST00000560002
  CDS Start-End: 91-1869
tttattttataggaaggaaaacagaaataacttgctggcttgtctggagtcacatggtgacaatttacagaaagtcatctctgcagcttgatgggcgacaacccttttcaaccaaaaagtaattcaaaaatggcagaactgtttatggaatgtgaagaagaggagctggaaccatggcagaagaaagtaaaagaagttgaggatgacgatgatgatgagccaatctttgttggcgagatatcaagttcaaaaccagcaatttcaaatattttgaacagagttaaccccagctcatattcaaggggactaaagaatggtgcactcagtcgaggtattactgctgcattcaagcctacaagtcaacactacacgaatccaacatcaaatccagtgcctgcctcaccaataaattttcatcctgagtctagatcttcagatagttctgttattgttcagcctttttctaaacctggttatataacaaactcatcacgagttgtgtctaataagtcatcagagttactgtttgacttgacccaggatacaggattatcacattaccaagggggaccaacactttctatggcaggtatgagtgaaagttcatttttatcaaaacgtccttctacttctgaagtaaataatgttaatccaaagaagcctaaacccagcgaaagtgtttctggagcaaattcctcagctgtattaccttcagttaaatctccttcagtgacttcttcccaggctatgctagcaaaaggtacaaatacctcatcaaatcagtctaaaaatggaacaccttttccaagagcttgtccaaagtgcaacattcatttcaatcttttggatcctttgaaaaatcacatgaagtattgttgtccagacatgataaataactttttgggactggctaaaacagaattttcaagtacagtaaataaaaacacaactattgattcagagaaaggaaaattgatcatgttagttaatgacttttattatggaaaacatgaaggagatgtccaggaggaacagaagactcacacaacctttaaatgcttcagttgcttgaaaattctaaaaaataacattaggtttatgaaccacatgaaacaccatttggaacttgagaagcagagcagtgagagctgggaaaaccataccacctgccagcactgctaccgtcagtttcccacaccatttcagttgcagtgtcacatcgaaagtacacatacgccccatgaattttctactatttgtaaaatctgtgaattgtcatttgaaacagaacatgttcttttacaacatatgaaggacaatcataaacctggtgaaatgccatatgtctgccaggtttgtaattatagatcatcatcattttctgatgtagaaactcattttagaacatcccatgaaaacactaagaacttgctatgcccgttttgcctcaaagttattaaaattgcaacaccatatatgcatcattatatgaagcatcagaaaaaaggaatacatcgttgtacaaaatgcaggctgcagtttttgacatgcaaggagaaaatggatcataagactcaacaccatcgaacatttataaaacctaaacaactagaaggattgcctcctggaacaaaagttactattcgagcttcagttggacctctgcaatcaggagcttcacctacaccttccattagtgcaagtgcttctacccttcagctctcacctccaaggactaaaaatataactgctaaaaatcctgcaaaatctaatacaagtaaacctaatacagtcaaatccaacgcaagtaaacctaatacaagtatcgtcggggcattcacaaatgcattgagtgttgttccgaaataaaagattttgcaaaccactttcctacgtacgtccactgtagtttttgcagatacaacactagctgtagcaaagcctatgtaaatcatatgatgagctttcatagtaaccgtccaagcaaaaggttttgtatttttaagaagcattcagaaaatctccggggcattactctagtgtgccttaattgtgatttcctaagtgatgtttctggcttagataatatggctacacacttaagtcaacataaaactcatacttgccaagttgtaatgcagaaaggtacgtatatgtaactgtgctactttagatttttgacttttattccagtatttttggtcatccacaatatggtctctttactaaatcattattctcactcatcatatttcatatgctgttgtaaatgtaaaacttttcttctaatttcagtttctgtttgtatcccaacttctgagcacctttctgagtaagtttaatttttattcagtgcattttactttgatggattttagcactattgcatttttaaatgtatcattaatacgaatgaaaagtattaaagtatgttgttgtttttttgttttttttttaaagctgcttgttgaaataggttcctgctctatggagctcgtgacctggtgcaagacaagttggaatttcctaagttcaaagttctgagatgttttcttacacaaaggcagttgagcagccaagttcatgacactagctctcattattcagctcttttcagctttcaaatgggactagattcttattccaccttatctttgtgtcaggttgacatatcttaacatatttttttttctccagtttgcgctgtctaaaaataacatttgttgctatggtcttttctttgcttacaataatttttgtttttctctgctgtacttgccttcagaataatagattccaaattatatggctgtttgtcttttgtctgtttgtctgctttcttaatttcttatacgtcttaagttttaggccagataattgtctttttctcattcgttgtctgtcattgtgctatttttcttatttttcagatgcagaagcagcccagagatttcaaaaaatatccagggtatacctggacagtgtcccccttcgatggacacaactgatgcctgttctctctttccaaggaatgtgaataatttgactgtgggacctgctcttaggttgtggcctcaagaaatcagatcttggggagactccctttctacatggctggcctcccataaggctgatgttgtttggccagagatggctttaaggcccaccaaattgagcatacttcccactgggggctttggcttatgatcttaagcttatgagtcagttatgaccaagaaaagcccatcaaaccactgcttcagcatccaagttgaagtttagtcattttggctgctgcctttaaatctttctctagcatgaatgcagtccaaggaatataaaaactctagttgttaggaaaccatggctactttcatatccttggaacaacaggtctccacaattaagttccaaaattgcagttatttttactgacatataaaatctattaaccagtattaattctgtaattttttaacaataccgattcttgcattttgattttttaaaaattaatttaatagcttggttttatgttctcaaaatttattaatgtctattttatgatgtctatttttatattatattatttaaaatttgtttagtgtttgttttaagaactccaagagatttcttagaattctctacagattttgtgtagctgcctatttgtagattttaaatttggctgttactaagcccattaaacattattagatactctgtcctattgggattattattaatattaccttaattgtgagttcttaggtgtaaagaattggcaatactacttgcagaccttaagagccagttttaaagttacgtatttgtgcgtctaagatgtaatgtctacttagccattaatgtagctcctttgggtaaaggtaacatgttaaaaaacatacatatggtgaccagtaatgcatgtatttctttcctttatatattttaaatttgtcatgtgtttattttagttacattgaatatagatctaaactttttatactattatccttttaataaaaattatattgttt

SEQ ID NO: 202015 - DNA, 3666 bp, Homo sapiens
  Payload ID: 19851
  Gene Name: zinc finger protein 280D
  Uniprot ID: Q6N043
  ENST ID: ENST00000558320
  CDS Start-End: 116-592
ctcagggctccagtcaggccgatccgctccgctcacggaaggaaaacagaaataacttgctggcttgtctggagtcacatggtgacaatttacagaaagtcatctctgcagcttgatgggcgacaacccttttcaaccaaaaagtaattcaaaaatggcagaactgtttatggaatgtgaagaagaggagctggaaccatggcagaagaaagtaaaagaagttgaggatgacgatgatgatgagccaatctttgttggcgagatatcaagttcaaaaccagcaatttcaaatattttgaacagagttaaccccagctcatattcaaggggactaaagaatggtgcactcagtcgaggtattactgctgcattcaagcctacaagtcaacactacacgaatccaacatcaaatccagtgcctgcctcaccaataaattttcatcctgagtctagatcttcagatagttctgttattgttcagcctttttctaaacctgtaagtgtttctaaaactatacggccagctcagggatccattggatgttgtttatcaatatcaacagtacccagttacaattctggactgtcataagtagtcatccagtagaagcatagttagcatcagaaaatgtcaccatattttcgctagctcaagcagtaccccaagtaataactgaaggagctaactacccaacctgttaataacaggcagtatgcctaaataggtacagtaatgaaaactatactatcaaaatgtgaataaaattatagtcagccataaatattgcataatgacaaatatttaagattgcagacgggaccaggtattcttaattgggaaaacagtcaagtgaccatcatagctttttattctgaaaacattccttcatagttcagttagttaaaaaaaaacaaacattttttcctattacaaaaaactcccactttttttgttacaaaaagtaatagaaaatggtaatagttaacattcattgagctgttaatatgtataagtgtttgtgctaaatgctataggtaaattcatttcatttagttcttaaacatccccatgaagtaaacactattattatcctcattttttagttgaggaaactgaggctcatagaggttgaaagatttattcaagatcccaaagctggcagttgatggatctgggatttcaatccagcctaacccatagtttatatgtatatgcacacatacatacatatatgttgtgtataaatgtacacttttttagacatgaaagaattgccttagttgaacagttctcagattgtagtttgcaatcccctggggttccccaagaccctttcagaggtttgagggtcaacagtgttgtcattataatcaaagactgttttccttttccactgtgttggcatttgcactggtgatgctaaagtaatggtggataagctgctggtgccttagtgtgaatcaaggtagtgccaccaaagtgtacttgtagtttctgtattagtcacctgccgtgcactcacagtaaactacattactcaactgagtattacccagttatacccaatccctgatgaagtattaaaatgttattagttttattaactctctacacttgaatgtgtgttttttaaaatattctgtgtgatgacatgggtagtgtgcataaagtacctctgtgtctgaagtatgatagttgtcttgaggaaaagcacttgtgtgattgaattgtgaggtaaactacctgatttttttttgttgttacatgaaagaatgagtgacaaatctttaaagtatttacaatatcactccagaaaagaaaacaaatcaaataaatattgactcaaaactctccaagtacatatcaaaatctcaggaagggaaaaaagagtctaaagaacaaaatataacactattttatttcagtcatgttagttcagtttccacagtttgaactgggtatagattaatatctaaaaccaaaaaatgaacatgtgtatagtgatgctgaaaaatgtgcattattttttatttatattttaggaataataaagttagttattaaagaatttagtgattttgattgagtgagaggtgtgagctatatttgcttctttcctgtatgatatacatacattgtttccaatctcatttctattaaataactataggagagcccacagccttgttattttacatatcactatttagatatttgttatttatttatttgtgttggcctgaagtaaatgttacttttgtacgatatttgaaggatagatttattttataaattaatagtttaaataagattttgccagcatttgaaatgatatttatttctgtgtatcaatattaccacaaacttacacagcttaaaacaacatacactctttatctcatgatctcacaatttctgtgggtcaggaatcaggtcatggcttaggtgggttttctgcttaaggatctcacaaggctgcattcaagatgtggtgcctgaagttgcagtttcatctgaaattctgttggggaagtatttgcttccaagttcacatggttgttggtagcattcagttccttaagggatgttggactgagaatctctgtatcttgttggcttttggctggctccttgccacgtaggtcttcccaataaggctgcttgcttcctcaaagctagcaggtgagagtgagtccttagcaagatgcccttacagtcttaggtaacataatcacgtacacaaaaatcatatatatcctgtcacctttgttgtgttctattggttaaaagcaagtcagaggtcctgcccacactcaatgggagggaattacacaggacctgaataccaggacctggggattatgggtaatgacatttacatggaggccactttagagtctgtctgccacacacgcttagtcaatcttgattgtttggcaaacatttcctcaaatctgtcacttcagcaaaaataattgatagtaatatttcttaccaatggtaaaatttgaacttttaagcaaaaattagaattttggaaaactcatttgccaccgtgatcttggcagcttttgaataagagttttctgatgggtggtggtgttcataaataatgatttttaaaatattgtgtaatgaactatgtcaccatttggaagacctgtgtaattcagtgaaactagtattttccacataactagtatatatactacaaaagtatgcatgggtaaaacatacatttaaaagctaagatagaccaatgattttaatggaacgggtgttctgggatacggtttcagatttcacactgcaacaaacctttaagaaagtaccaactgttcagttttggtatagtatcaaagtagtatatccacagttaattaaaaccctattaaaacactcccttttccagttatatattcctgtgaggcagaatttaataatactcctcaaccaaaacaacatgtcatagtagactgaaggcagaagcagataagagactaaaacaatttttgattaagctagatatttaagagctttgcaaagatgtgaaacaatgccacttttcactagttttttttgcgtttgcaagtcatttttcattaaaatgttatttatgttaatttgtaatgagtttgttattttaaaatgaataaataaatatt

SEQ ID NO: 202016 - DNA, 428 bp, Homo sapiens
  Payload ID: 19851
  Gene Name: zinc finger protein 280D
  ENST ID: ENST00000559352
  CDS Start-End: 188-428
gtgctcctccttttcctcctcctctttctcctcctcctcagggctccagtcaggccgatccgctccgctcacgatctgtgcagaaatcattgtggttagagggaaggaaaacagaaataacttgctggcttgtctggagtcacatgtacttaggtgacaatttacagaaagtcatctctgcagcttgatgggcgacaacccttttcaaccaaaaagtaattcaaaaatggcagaactgtttatggaatgtgaagaagaggagctggaaccatggcagaagaaagtaaaagaagttgaggatgacgatgatgatgagccaatctttgttggcgagatatcaagttcaaaaccagcaatttcaaatattttgaacagagttaaccccagctcatattcaaggggactaaagaatggtgcactcagtcgag

SEQ ID NO: 202017 - DNA, 4902 bp, Homo sapiens
  Payload ID: 19851
  Gene Name: zinc finger protein 280D
  Uniprot ID: Q6N043
  ENST ID: ENST00000559237
  CDS Start-End: 685-3585
gacctcgacagggaacgcaagcaaaaccacacatttaaaacagacttggtaaaatcagctcgttatttaaagaaacggacgattcctttttctctcctggtttagtcttcgacccacaggccccttgcttctttcgaacggcggctgtatcccatgaccttttcactttccaagccaacggactgggggtcgttacacacgcggagggcccggaacgcacggctcctcgcctgcaaattccgagcagtccggattttggggctgcctcccggccacaccagccagcagctcgcacccacatggaggcagggccctggccctcgccccggaccggcgcgtggcggggcgcgtgggtcttcgagggcccgcgacgcggcgcacatgccggtgcccgcctcccgcgtcggcgagaagacagggagctcggacacggggaggctgacccggagcctacccatgaggcagcgcgccggctgcacgagagcccccccctttccacggctcggctgccagctccgcaatgggagccgccgccgtcgccgcagtgtagtttttcgtgctcctccttttcctcctcctctttctcctcctcctcagggctccagtcaggccgatccgctccgctcacggaaggaaaacagaaataacttgctggcttgtctggagtcacatggtaattcaaaaatggcagaactgtttatggaatgtgaagaagaggagctggaaccatggcagaagaaagtaaaagaagttgaggatgacgatgatgatgagccaatctttgttggcgagatatcaagttcaaaaccagcaatttcaaatattttgaacagagttaaccccagctcatattcaaggggactaaagaatggtgcactcagtcgaggtattactgctgcattcaagcctacaagtcaacactacacgaatccaacatcaaatccagtgcctgcctcaccaataaattttcatcctgagtctagatcttcagatagttctgttattgttcagcctttttctaaacctggttatataacaaactcatcacgagttgtgtctaataagtcatcagagttactgtttgacttgacccaggatacaggattatcacattaccaagggggaccaacactttctatggcaggtatgagtgaaagttcatttttatcaaaacgtccttctacttctgaagtaaataatgttaatccaaagaagcctaaacccagcgaaagtgtttctggagcaaattcctcagctgtattaccttcagttaaatctccttcagtgacttcttcccaggctatgctagcaaaaggtacaaatacctcatcaaatcagtctaaaaatggaacaccttttccaagagcttgtccaaagtgcaacattcatttcaatcttttggatcctttgaaaaatcacatgaagtattgttgtccagacatgataaataactttttgggactggctaaaacagaattttcaagtacagtaaataaaaacacaactattgattcagagaaaggaaaattgatcatgttagttaatgacttttattatggaaaacatgaaggagatgtccaggaggaacagaagactcacacaacctttaaatgcttcagttgcttgaaaattctaaaaaataacattaggtttatgaaccacatgaaacaccatttggaacttgagaagcagagcagtgagagctgggaaaaccataccacctgccagcactgctaccgtcagtttcccacaccatttcagttgcagtgtcacatcgaaagtacacatacgccccatgaattttctactatttgtaaaatctgtgaattgtcatttgaaacagaacatgttcttttacaacatatgaaggacaatcataaacctggtgaaatgccatatgtctgccaggtttgtaattatagatcatcatcattttctgatgtagaaactcattttagaacatcccatgaaaacactaagaacttgctatgcccgttttgcctcaaagttattaaaattgcaacaccatatatgcatcattatatgaagcatcagaaaaaaggaatacatcgttgtacaaaatgcaggctgcagtttttgacatgcaaggagaaaatggatcataagactcaacaccatcgaacatttataaaacctaaacaactagaaggattgcctcctggaacaaaagttactattcgagcttcagttggacctctgcaatcaggagcttcacctacaccttccattagtgcaagtgcttctacccttcagctctcacctccaaggactaaaaatataactgctaaaaatcctgcaaaatctaatacaagtaaacctaatacagtcaaatccaacgcaagtaaacctaatacaagtaagcctaatggaagtaaatctaaatacaaaccaaaaatctctaatatgcaaaagaaacaaagcacattggctagtagcaataaaaaaagtaaagtcaatacagcattgaggaatttaaggtatcgtcggggcattcacaaatgcattgagtgttgttccgaaataaaagattttgcaaaccactttcctacgtacgtccactgtagtttttgcagatacaacactagctgtagcaaagcctatgtaaatcatatgatgagctttcatagtaaccgtccaagcaaaaggttttgtatttttaagaagcattcagaaaatctccggggcattactctagtgtgccttaattgtgatttcctaagtgatgtttctggcttagataatatggctacacacttaagtcaacataaaactcatacttgccaagttgtaatgcagaaagtttctgtttgtatcccaacttctgagcacctttctgaattaaaaaaagaagctcccgcaaaggaacaagaacctgtgtctaaggaaattgcaagacctaacatggctgaaagagaaacagaaacatcaaattctgaaagtaaacaagataaagctgcttcttcaaaagaaaaaaatggatgtaatgcaaattcatttgaaggctcatcaacaacaaaaagtgaagaaagcataacagtttcagataaggaaaatgaaacctgtcttgcagaccaggaaactggctcaaaaaacatcgtcagttgtgattcaaatattggtgcagataaagtggaaaagaaaaaacaaatacaacacgtttgtcaggaaatggagttgaagatgtgccaaagttcagaaaacataatcttatctgatcagattaaagatcacaactccagtgaagccagattttcttcaaagaatattaaggatttgcgattagcatcagataatgtaagcattgatcagtttttgagaaaaagacatgaacctgaatctgttagttctgatgttagcgagcaaggcagtattcatttggaacctctgactccatccgaggtacttgagtatgaagccacagagattcttcagaaaggtagtggtgatccttcagccaagactgatgaagtagtgtctgatcaaacagatgacattcctggaggaaataaccctagcacaacagaggcaacagtagacctggaagacgaaaaagaaagaagttgaaattagtcattttaagtttcagtgtaccaacgataagggcatttggaacagtgctatcaggtgagctcagtggtgctgttgtaggttcagaaatggaaatatgtaagggaggtcacacatacactttacctgtatgttcaacctatgttatcaaacaaatcaattcaccaataatagcatgattagtagggattcccaaaaagtttttaaaaacacgaacaggattttaatgataattaaatttgcagtggaaaggtctcatttaatggttttcaaggaaatgggatttggttgctgacatgaattgatgatattagtaatatttataaagcctttcaaacttccatcaatcctaagctaaaaatctttattacctgtatatccttttcagttaactgagaggaagggatttggaaaccatgtacttttggggagtaattgattaaaaacaatggctgattggcattgttaatgaaggctttatttgtgaggatgatgctggtaaatggagcatgcttagagtactaaattgatctaatgagaatttggatgaacataaacttaattttggatttaatataacattccagtcagacgcatgtaaacagaatatttgaatctttgtacctccatacaagtgttagcctgccaggctgtaagcttaccttaattaaactttcagtgaaagtggaattattaagatataaatttatatttgtgctttttgtcagtgtgtaagctgtgtagaaattctttgatgtattagttgtattaatgtaaagtagaaacccattgttgaaactcctgtagctattatgcttttaatattgttttaatgatcttccttagaaataggcccataaaaatggtctggaagccaaaccaaagtatggtataatgtagatattgtaaagcagtaaactgaaaacatgtcctggcatgtattcagccatgtttaagtgacttttctgtaattgtaaaataaaaacttcaaatgggacctaaaacagtgatgtaaaagaactggttttggaaatttagcctaatttatctataagatggctgctaaattgatttttcagttctttttatcatctagaatataatagatatagaaatgaataatatgaagaacagtagtttgctttgaaatactaataaacttttatttaaaatgcttcatttttacttcttaaaatgtgctttggattcttaaattttgtttcactgaatgttcaatgttttaaatggcgattaaaatactctgctgtatatagtagtttttgagtaaatatttgcaataaaaatctgcccccg

SEQ ID NO: 202018 - DNA, 3528 bp, Homo sapiens
  Payload ID: 19851
  Gene Name: zinc finger protein 280D
  Uniprot ID: Q6N043
  ENST ID: ENST00000558067
  CDS Start-End: 48-1313
cagtaaataaaaacacaactattgattcagagaaaggaaaattgatcatgttagttaatgacttttattatggaaaacatgaaggagatgtccaggaggaacagaagactcacacaacctttaaatgcttcagttgcttgaaaattctaaaaaataacattaggtttatgaaccacatgaaacaccatttggaacttgagaagcagagcagtgagagctgggaaaaccataccacctgccagcactgctaccgtcagtttcccacaccatttcagttgcagtgtcacatcgaaagtacacatacgccccatgaattttctactatttgtaaaatctgtgaattgtcatttgaaacagaacatgttcttttacaacatatgaaggacaatcataaacctggtgaaatgccatatgtctgccaggtttgtaattatagatcatcatcattttctgatgtagaaactcattttagaacatcccatgaaaacactaagaacttgctatgcccgttttgcctcaaagttattaaaattgcaacaccatatatgcatcattatatgaagcatcagaaaaaaggaatacatcgttgtacaaaatgcaggctgcagtttttgacatgcaaggagaaaatggatcataagactcaacaccatcgaacatttataaaacctaaacaactagaaggattgcctcctggaacaaaagttactattcgagcttcagttggacctctgcaatcaggagcttcacctacaccttccattagtgcaagtgcttctacccttcagctctcacctccaaggactaaaaatataactgctaaaaatcctgcaaaatctaatacaagtaaacctaatacagtcaaatccaacgcaagtaaacctaatacaagtaagcctaatggaagtaaatctaaatacaaaccaaaaatctctaatatgcaaaagaaacaaagcacattggctagtagcaataaaaaaagtaaagtcaatacagcattgaggaatttaaggtatcgtcggggcattcacaaatgcattgagtgttgttccgaaataaaagattttgcaaaccactttcctacgtacgtccactgtagtttttgcagatacaacactagctgtagcaaagcctatgtaaatcatatgatgagctttcatagtaaccgtccaagcaaaaggttttgtatttttaagaagcattcagaaaatctccgatgcgtgggaggacaaatagaatgtgacttgcctaagttacacaagttggttgtggagccaagactgactctaggtcttctgactcctaacttttaacaattggtatgacaggggcattactctagtgtgccttaattgtgatttcctaagtgatgtttctggcttagataatatggctacacacttaagtcaacataaaactcatacttgccaagttgtaatgcagaaagtttctgtttgtatcccaacttctgagcacctttctgaattaaaaaaagaagctcccgcaaaggaacaagaacctgtgtctaaggaaattgcaagacctaacatggctgaaagagaaacagaaacatcaaattctgaaagtaaacaagataaagctgcttcttcaaaagaaaaaaatggatgtaatgcaaattcatttgaaggctcatcaacaacaaaaagtgaagaaagcataacagtttcagataaggaaaatgaaacctgtcttgcagaccaggaaactggctcaaaaaacatcgtcagttgtgattcaaatattggtgcagataaagtggaaaagaaaaaacaaatacaacacgtttgtcaggaaatggagttgaagatgtgccaaagttcagaaaacataatcttatctgatcagattaaagatcacaactccagtgaagccagattttcttcaaagaatattaaggatttgcgattagcatcagataatgtaagcattgatcagtttttgagaaaaagacatgaacctgaatctgttagttctgatgttagcgagcaaggcagtattcatttggaacctctgactccatccgaggtacttgagtatgaagccacagagattcttcagaaaggtagtggtgatccttcagccaagactgatgaagtagtgtctgatcaaacagatgacattcctggaggaaataaccctagcacaacagaggcaacagtagacctggaagacgaaaaagaaagaagttgaaattagtcattttaagtttcagtgtaccaacgataagggcatttggaacagtgctatcaggtgagctcagtggtgctgttgtaggttcagaaatggaaatatgtaagggaggtcacacatacactttacctgtatgttcaacctatgttatcaaacaaatcaattcaccaataatagcatgattagtagggattcccaaaaagtttttaaaaacacgaacaggattttaatgataattaaatttgcagtggaaaggtctcatttaatggttttcaaggaaatgggatttggttgctgacatgaattgatgatattagtaatatttataaagcctttcaaacttccatcaatcctaagctaaaaatctttattacctgtatatccttttcagttaactgagaggaagggatttggaaaccatgtacttttggggagtaattgattaaaaacaatggctgattggcattgttaatgaaggctttatttgtgaggatgatgctggtaaatggagcatgcttagagtactaaattgatctaatgagaatttggatgaacataaacttaattttggatttaatataacattccagtcagacgcatgtaaacagaatatttgaatctttgtacctccatacaagtgttagcctgccaggctgtaagcttaccttaattaaactttcagtgaaagtggaattattaagatataaatttatatttgtgctttttgtcagtgtgtaagctgtgtagaaattctttgatgtattagttgtattaatgtaaagtagaaacccattgttgaaactcctgtagctattatgcttttaatattgttttaatgatcttccttagaaataggcccataaaaatggtctggaagccaaaccaaagtatggtataatgtagatattgtaaagcagtaaactgaaaacatgtcctggcatgtattcagccatgtttaagtgacttttctgtaattgtaaaataaaaacttcaaatgggacctaaaacagtgatgtaaaagaactggttttggaaatttagcctaatttatctataagatggctgctaaattgatttttcagttctttttatcatctagaatataatagatatagaaatgaataatatgaagaacagtagtttgctttgaaatactaataaacttttatttaaaatgcttcatttttacttcttaaaatgtgctttggattcttaaattttgtttcactgaatgttcaatgttttaaatggcgattaaaatactctgctgtatatagtagtttttgagtaaatatttgcaataaaaatctgcccccg

SEQ ID NO: 202019 - DNA, 4891 bp, Homo sapiens
  Payload ID: 19852
  Gene Name: zinc finger protein 281
  Uniprot ID: Q9Y2X9
  ENST ID: ENST00000294740
  CDS Start-End: 126-2813
acactgcgccgcggctgcgcagtacacgggaggcttttaattccattgtggagaggacggcgttatttttattaactggaggcgacggcggctgcggcggcggcgggacccgcctcctccggggtatgaaaatcggcagtgggttcctgagtggcggcggaggtaccggcagtagcggtggtagcggctccggcggcggtggtagtggcggcggcggcggcggcggcagcagcggcaggagggcagagatggaacccacctttccccagggtatggttatgttcaaccaccgtcttcccccggtcaccagcttcacccggccggcggggtcggccgcccctcccccgcaatgcgtgttatcctcctctacctccgcagccccggccgctgagcccccccctccgccagccccggacatgactttcaagaaggagccggcggcgtcagccgcggccttcccctcgcagaggacctcctgggggttcttgcagtctttggttagcatcaaacaggagaaacccgcggatcctgaggagcagcagtcccaccaccaccatcaccaccaccactatggggggctgttcgctggagctgaagagaggtctccaggcctaggaggcggtgaaggggggagtcacggcgtcatccaggacctcagtattctccaccagcatgtccagcagcaaccagcccagcaccaccgtgacgtattactcagcagcagtagcaggactgatgaccaccatggcactgaggagccaaagcaggacactaatgtcaaaaaggcaaaaaggccaaagccagaatctcagggaatcaaagccaagaggaagccaagtgcatcttccaaaccttctttggttggagatggagaaggtgccatcctctccccaagtcagaaacctcatatctgtgatcactgtagtgctgctttccgaagctcctatcacctgcggagacatgtcctcattcatacaggagaaagacctttccagtgcagccagtgtagtatgggtttcattcagaaatacctactacagagacatgagaaaattcatagtagagagaagccatttggatgtgatcagtgcagcatgaagtttattcagaagtaccatatggagagacacaagaggacacatagtggagaaaagccatataagtgtgacacttgccaacagtatttttcaaggactgatagattgttgaagcacaggcgcacatgtggtgaagtcatagttaaaggagccactagtgcagaacctgggtcatcaaaccataccaatatgggtaatctggctgtgttgtctcagggaaatacaagttcttcaaggagaaaaacaaagtcaaaaagcatagctattgaaaataaggaacagaagaccggtaaaacaaatgaatcgcaaatttcaaataatataaacatgcagagttactcagtagaaatgcctaccgtgtcttccagtggaggcataattggcactggaatagatgaactgcagaagagggtgccaaaattgatctttaagaaaggaagcagaaagaatacagataaaaactaccttaactttgtgtcaccattaccagacatagtaggacagaaatccttgtctggaaaaccaagtggctcacttggcatagtatcaaataatagtgtggagaccattggtcttctccaaagtacaagtggcaaacaaggtcagataagtagtaattatgatgatgccatgcagttttcaaagaaaagaagatatttaccaactgccagcagcaacagtgccttttctataaacgtaggacacatggtctcccaacagtctgtcattcagtctgcaggtgtcagtgttttggacaatgaggcaccattgtcacttattgactcctcagctctaaatgctgaaattaaatcttgtcatgacaagtctggaattcctgatgaggttttacaaagtattttggatcaatactccaacaaatcagaaagccagaaagaggatcctttcaatattgcagaaccacgagtggatttacacacctcaggagaacactcagaattggttcaagaagaaaatttgagcccaggcacccaaacaccttcaaatgataaagcaagtatgttgcaagaatactccaaatacctccaacaggcttttgaaaaatccactaatgcaagttttactcttggacacggtttccaatttgtcagtttgtcttcacctctccacaaccacactttgtttccagaaaaacaaatatacactacgtctcctttggagtgtggtttcggccaatctgttacctcagtgttgccatcttcattgccaaagcctccttttgggatgttgtttggatctcagccaggtctttatttgtctgctttggatgctacacatcagcagttgacaccttcccaggagctggatgatctgatagattctcagaagaacttagagacttcatcagccttccagtcctcatctcagaaattgactagccagaaggaacagaaaaacttagagtcttcaacaggctttcagattccatctcaggagttagctagccagatagatcctcagaaagacatagagcctagaacaacgtatcagattgagaactttgcacaagcgtttggttctcagtttaagtcgggcagcagggtgccaatgacctttatcactaactctaatggagaagtggaccatagagtaaggacttcagtgtcagatttctcagggtatacaaatatgatgtctgatgtaagtgagccatgtagtacaagagtaaagacacccaccagccagagttacaggtaaggtcccaaaagtggccaggctggaggtcttctaatgtaattttgttttattttgagaacactgccattggaatgtttctacacgatcctattaagaataatgtgatgccctttcaatgcaacttttcatatttagtttattttgttagcgtgattttagctctgtttgtattatgatttttaatcaaaatcaatagattaaaaatagtttgacattcaaagtgacaatgtttagcaatcaaatttacatgtatagatcgtcagggaatagcccaaatgttttaaacgcaaaaaaaaagacaaaaaaaaaccaaaaaaaaaaaacctacaaaaaaaactttgttgctaggattaaggttattctaattgctttactctcaggaaagtgtaataacgcatgggaattctgtacgttatcactgtaatggaatatccaatttacagatagtatgatatacatttcatcatttaagtaagggatcgaaaacatttcaaattgctctatctgggctgatagacatttcgtcatttaagtaagggatcgaagacatttcaaattgctatctccatctgggctgatccaaaattctgagattgttggctacctatattttgttgcagcttttaaatgtactctgaacttccaaaccacattcattccagcctggtagaacaaatattcttggatctttgatcaaagcctggaatgatagctttaataaaagaaggaaaaaaaaaaagcaccctctcttgatctcaactgtaacaaggctgtaattccatcaagcgattctactgacatctagtacagtgttgaagcccaagtggttggctggttccagtattagaactcaagttgaaattatatgattaactgaaatttggggcatgcattatttattatacatggcctacaacggttctgtctgcgctgttacgtattacctacacttctgggtttttttgttcttgttctcagcctctctttaagagttcttgggccttccttttccctctttctattttaacagttttaattttagaaccatttacattccagtaggtaattcactatgcgctttatatgccttagggcatccaaataaaaaacaatagggtaaacatccccaaaacccacctttaaaaaaaaaaaaacccatacagatttccatatgtaataaaaccccgtgttcttggatagatattaataaggttgtaattccaactggtgacataactcctgtgagggataagaatgtgtctgcttatagtaataacatcagaacctctttgtgaaattgcggcctttaatgtacattttaatgaaagggtgcattagtattgtacaggggtcttgtaaagtcatcaaaacttgctatgaactctaattgccatttgaagctactgattggcagtggctctactctaaaactgctttttagcaattgtatttttttcctgattatattttttaatgtactttgatgtttatgctgatgagttttttatgtacttttggtgatgtttcagtcttatgtactcttctgacgtcagaaaagtaccactggttgtttgcagtcttattgtgtaatcagcctaccgcaggcttccatgtataataaagtaattaatattgtgcaagtgtaaaacacttctgttataaaagcagtgtttggaaaataagaaatattaaaaatggttacaaagtattagttaatttccttttcccactttcctccctttagctttagcagctaaagggtcaccaacttgtcattgcaagattcttagaaaatgtacttaatcttaaatacgctgagtactaaaaagtgtttatttcttatttcagtaagtgcggtaagttctattgagtacagagtacaagctgtaatcaaaggatggagaggacctttaccactgtatctcttaagctgtatgatttttctccagtttgttttatacaggttttgaatttctttaacttttattgtgtgtactgaatactgcatatgtattattctgattgtttgctctagtttactaccaataaaagtcctgttaatcacaagattgaagaaa

SEQ ID NO: 202020 - DNA, 2933 bp, Homo sapiens
  Payload ID: 19852
  Gene Name: zinc finger protein 281
  Uniprot ID: Q9Y2X9
  ENST ID: ENST00000367352
  CDS Start-End: 66-2645
atttttattaactggaggcgacggcggctgcggcggcggcgggacccccaggcctcctccggggtatgaaaatcggcagtgggttcctgagtggcggcggaggtaccggcagtagcggtggtagcggctccggcggcggtggtagtggcggcggcggcggcggcggcagcagcggcaggagggcagagatggaacccacctttccccaggccccggccgctgagcccccccctccgccagccccggacatgactttcaagaaggagccggcggcgtcagccgcggccttcccctcgcagaggacctcctgggggttcttgcagtctttggttagcatcaaacaggagaaacccgcggatcctgaggagcagcagtcccaccaccaccatcaccaccaccactatggggggctgttcgctggagctgaagagaggtctccaggcctaggaggcggtgaaggggggagtcacggcgtcatccaggacctcagtattctccaccagcatgtccagcagcaaccagcccagcaccaccgtgacgtattactcagcagcagtagcaggactgatgaccaccatggcactgaggagccaaagcaggacactaatgtcaaaaaggcaaaaaggccaaagccagaatctcagggaatcaaagccaagaggaagccaagtgcatcttccaaaccttctttggttggagatggagaaggtgccatcctctccccaagtcagaaacctcatatctgtgatcactgtagtgctgctttccgaagctcctatcacctgcggagacatgtcctcattcatacaggagaaagacctttccagtgcagccagtgtagtatgggtttcattcagaaatacctactacagagacatgagaaaattcatagtagagagaagccatttggatgtgatcagtgcagcatgaagtttattcagaagtaccatatggagagacacaagaggacacatagtggagaaaagccatataagtgtgacacttgccaacagtatttttcaaggactgatagattgttgaagcacaggcgcacatgtggtgaagtcatagttaaaggagccactagtgcagaacctgggtcatcaaaccataccaatatgggtaatctggctgtgttgtctcagggaaatacaagttcttcaaggagaaaaacaaagtcaaaaagcatagctattgaaaataaggaacagaagaccggtaaaacaaatgaatcgcaaatttcaaataatataaacatgcagagttactcagtagaaatgcctaccgtgtcttccagtggaggcataattggcactggaatagatgaactgcagaagagggtgccaaaattgatctttaagaaaggaagcagaaagaatacagataaaaactaccttaactttgtgtcaccattaccagacatagtaggacagaaatccttgtctggaaaaccaagtggctcacttggcatagtatcaaataatagtgtggagaccattggtcttctccaaagtacaagtggcaaacaaggtcagataagtagtaattatgatgatgccatgcagttttcaaagaaaagaagatatttaccaactgccagcagcaacagtgccttttctataaacgtaggacacatggtctcccaacagtctgtcattcagtctgcaggtgtcagtgttttggacaatgaggcaccattgtcacttattgactcctcagctctaaatgctgaaattaaatcttgtcatgacaagtctggaattcctgatgaggttttacaaagtattttggatcaatactccaacaaatcagaaagccagaaagaggatcctttcaatattgcagaaccacgagtggatttacacacctcaggagaacactcagaattggttcaagaagaaaatttgagcccaggcacccaaacaccttcaaatgataaagcaagtatgttgcaagaatactccaaatacctccaacaggcttttgaaaaatccactaatgcaagttttactcttggacacggtttccaatttgtcagtttgtcttcacctctccacaaccacactttgtttccagaaaaacaaatatacactacgtctcctttggagtgtggtttcggccaatctgttacctcagtgttgccatcttcattgccaaagcctccttttgggatgttgtttggatctcagccaggtctttatttgtctgctttggatgctacacatcagcagttgacaccttcccaggagctggatgatctgatagattctcagaagaacttagagacttcatcagccttccagtcctcatctcagaaattgactagccagaaggaacagaaaaacttagagtcttcaacaggctttcagattccatctcaggagttagctagccagatagatcctcagaaagacatagagcctagaacaacgtatcagattgagaactttgcacaagcgtttggttctcagtttaagtcgggcagcagggtgccaatgacctttatcactaactctaatggagaagtggaccatagagtaaggacttcagtgtcagatttctcagggtatacaaatatgatgtctgatgtaagtgagccatgtagtacaagagtaaagacacccaccagccagagttacaggtaaggtcccaaaagtggccaggctggaggtcttctaatgtaattttgttttattttgagaacactgccattggaatgtttctacacgatcctattaagaataatgtgatgccctttcaatgcaacttttcatatttagtttattttgttagcgtgattttagctctgtttgtattatgatttttaatcaaaatcaatagattaaaaatagtttgacattcaaagtgacaatgtttagcaatcaaatttacatgtatagatcgtcagggaatagcccaaatgttttaaacgc

SEQ ID NO: 202021 - DNA, 3080 bp, Homo sapiens
  Payload ID: 19852
  Gene Name: zinc finger protein 281
  Uniprot ID: Q9Y2X9
  ENST ID: ENST00000367353
  CDS Start-End: 83-2770
gtggagaggacggcgttatttttattaactggaggcgacggcggctgcggcggcggcgggacccccaggcctcctccggggtatgaaaatcggcagtgggttcctgagtggcggcggaggtaccggcagtagcggtggtagcggctccggcggcggtggtagtggcggcggcggcggcggcggcagcagcggcaggagggcagagatggaacccacctttccccagggtatggttatgttcaaccaccgtcttcccccggtcaccagcttcacccggccggcggggtcggccgcccctcccccgcaatgcgtgttatcctcctctacctccgcagccccggccgctgagcccccccctccgccagccccggacatgactttcaagaaggagccggcggcgtcagccgcggccttcccctcgcagaggacctcctgggggttcttgcagtctttggttagcatcaaacaggagaaacccgcggatcctgaggagcagcagtcccaccaccaccatcaccaccaccactatggggggctgttcgctggagctgaagagaggtctccaggcctaggaggcggtgaaggggggagtcacggcgtcatccaggacctcagtattctccaccagcatgtccagcagcaaccagcccagcaccaccgtgacgtattactcagcagcagtagcaggactgatgaccaccatggcactgaggagccaaagcaggacactaatgtcaaaaaggcaaaaaggccaaagccagaatctcagggaatcaaagccaagaggaagccaagtgcatcttccaaaccttctttggttggagatggagaaggtgccatcctctccccaagtcagaaacctcatatctgtgatcactgtagtgctgctttccgaagctcctatcacctgcggagacatgtcctcattcatacaggagaaagacctttccagtgcagccagtgtagtatgggtttcattcagaaatacctactacagagacatgagaaaattcatagtagagagaagccatttggatgtgatcagtgcagcatgaagtttattcagaagtaccatatggagagacacaagaggacacatagtggagaaaagccatataagtgtgacacttgccaacagtatttttcaaggactgatagattgttgaagcacaggcgcacatgtggtgaagtcatagttaaaggagccactagtgcagaacctgggtcatcaaaccataccaatatgggtaatctggctgtgttgtctcagggaaatacaagttcttcaaggagaaaaacaaagtcaaaaagcatagctattgaaaataaggaacagaagaccggtaaaacaaatgaatcgcaaatttcaaataatataaacatgcagagttactcagtagaaatgcctaccgtgtcttccagtggaggcataattggcactggaatagatgaactgcagaagagggtgccaaaattgatctttaagaaaggaagcagaaagaatacagataaaaactaccttaactttgtgtcaccattaccagacatagtaggacagaaatccttgtctggaaaaccaagtggctcacttggcatagtatcaaataatagtgtggagaccattggtcttctccaaagtacaagtggcaaacaaggtcagataagtagtaattatgatgatgccatgcagttttcaaagaaaagaagatatttaccaactgccagcagcaacagtgccttttctataaacgtaggacacatggtctcccaacagtctgtcattcagtctgcaggtgtcagtgttttggacaatgaggcaccattgtcacttattgactcctcagctctaaatgctgaaattaaatcttgtcatgacaagtctggaattcctgatgaggttttacaaagtattttggatcaatactccaacaaatcagaaagccagaaagaggatcctttcaatattgcagaaccacgagtggatttacacacctcaggagaacactcagaattggttcaagaagaaaatttgagcccaggcacccaaacaccttcaaatgataaagcaagtatgttgcaagaatactccaaatacctccaacaggcttttgaaaaatccactaatgcaagttttactcttggacacggtttccaatttgtcagtttgtcttcacctctccacaaccacactttgtttccagaaaaacaaatatacactacgtctcctttggagtgtggtttcggccaatctgttacctcagtgttgccatcttcattgccaaagcctccttttgggatgttgtttggatctcagccaggtctttatttgtctgctttggatgctacacatcagcagttgacaccttcccaggagctggatgatctgatagattctcagaagaacttagagacttcatcagccttccagtcctcatctcagaaattgactagccagaaggaacagaaaaacttagagtcttcaacaggctttcagattccatctcaggagttagctagccagatagatcctcagaaagacatagagcctagaacaacgtatcagattgagaactttgcacaagcgtttggttctcagtttaagtcgggcagcagggtgccaatgacctttatcactaactctaatggagaagtggaccatagagtaaggacttcagtgtcagatttctcagggtatacaaatatgatgtctgatgtaagtgagccatgtagtacaagagtaaagacacccaccagccagagttacaggtaaggtcccaaaagtggccaggctggaggtcttctaatgtaattttgttttattttgagaacactgccattggaatgtttctacacgatcctattaagaataatgtgatgccctttcaatgcaacttttcatatttagtttattttgttagcgtgattttagctctgtttgtattatgatttttaatcaaaatcaatagattaaaaatagtttgacattcaaagtgacaatgtttagcaatcaaatttacatgtatagatcgtcagggaatagcccaaatgttttaaacgcaaaaaaaaagacaaaaaaaaac

SEQ ID NO: 202022 - DNA, 1815 bp, Homo sapiens
  Payload ID: 19853
  Gene Name: zinc finger protein 282
  Uniprot ID: Q9UDV7
  ENST ID: ENST00000479907
  CDS Start-End: 41-1432
ttctccctggccgacccgagcggggaacagcactcccaggatgcagtttgtgtcaacacggccgcagcctcagcagctgggcatccagggcctggggctggacagcgggagctggagctgggcccaggctctgcccccggaggaggtctgccaccaggagccggcgctgcgcggggaaatggccgagggaatgccgcccatgcaggctcaagaatgggacatggacgcccggcggccaatgccttttcagttcccaccctttccagatagggcacctgtcttccccgaccgcatgatgcgagagccccagttgcccacagcagagatctcactctggactgtggtggctgccattcaggctgtggagaggaaggtggatgcccaggccagccagctgctgaacctggaggggcgcacggggacagccgagaagaagctggccgactgtgaaaagacggccgtggaatttgggaaccacatggagagcaagtgggccgtgctggggaccctgctgcaggagtacgggctgctgcagaggcggctggagaacttggagaacttgctgcgcaacaggaacttctgggtcctgcggctgcccccgggcagcaagggggaggcccccaaggttccagtgacttttgtcgacattgctgtgtacttctccgaagacgagtggaagaacttggacgaatggcagaaggagctttataacaaccttgttaaggagaactacaaaaccctcatgtccctggacgcggagggctcagtccccaagccagatgctccagtccaggctgagcccagggaagaaccttgtgtgtgggagcagcgccaccccgaagagagagaaatcccaatggatcccgaagcaggagcagagcccctggtgcctgcgcaggatgcgtcctcccaggtgaagcgtgaggacaccctgtgtgtccggggtcagcggggcctggaggaaagagccatccctacggaatccattaccgactccccaatttctgcccaggacctcttgtcccggattaaacaggaggagcatcagtgcgtgtgggatcagcaggatttggcagacagagatattcccacggatcccaattcagagtctctcatctcagcacatgacattttgtcatggatcaagcaggaggagcagccatacccatggggaccacgcgactcaatggacggagagcttggattagactctggccctagtgacagcctgctgatggtgaagaacccacccccggccccgccacagccccagccccagccccagccaccgcagccgcagctgcagtcgcagccccagccccagagcctgccccccatcgcggtggccgagaacccgggcggccccccgagccgagggctgctggacgacggtttccagccacaccaaggagcggccctacgagtgcgctgagtgcgagaagagcttcaactgccactcgggcctcatccgccaccagatgacgcaccgcggcgagcggccctacaagtgctcggagtgcgagaagacctacagccgtaaggagcacctgcagaaccaccagcggctgcacacgggcgagcggcctttccaatgtgcactgtgcggcaagagcttcatccgcaagcagaacctgctcaagcaccagcgcatccacacgggcgagcgcccctacacgtgcggcgagtgcggcaagagcttccgctacaaggagtcgctcaaggaccacctgcgcgtgcacagcggcggcccgggccccggcgccccacggcagctcccgccgcctcctgagcgagactagggctgggctgggggag

SEQ ID NO: 202023 - DNA, 3722 bp, Homo sapiens
  Payload ID: 19853
  Gene Name: zinc finger protein 282
  Uniprot ID: Q9UDV7
  ENST ID: ENST00000610704
  CDS Start-End: 106-2121
cctacgggctgtagatggagctgtccggccccggagagggggaaggcgcctggaaaacgttcttcttctccctggccgacccgagcggggaacagcactcccaggatgcagtttgtgtcaacacggccgcagcctcagcagctgggcatccagggcctggggctggacagcgggagctggagctgggcccaggctctgcccccggaggaggtctgccaccaggagccggcgctgcgcggggaaatggccgagggaatgccgcccatgcaggctcaagaatgggacatggacgcccggcggccaatgccttttcagttcccaccctttccagatagggcacctgtcttccccgaccgcatgatgcgagagccccagttgcccacagcagagatctcactctggactgtggtggctgccattcaggctgtggagaggaaggtggatgcccaggccagccagctgctgaacctggaggggcgcacggggacagccgagaagaagctggccgactgtgaaaagacggccgtggaatttgggaaccacatggagagcaagtgggccgtgctggggaccctgctgcaggagtacgggctgctgcagaggcggctggagaacttggagaacttgctgcgcaacaggaacttctgggtcctgcggctgcccccgggcagcaagggggaggcccccaaggttccagtgacttttgtcgacattgctgtgtacttctccgaagacgagtggaagaacttggacgaatggcagaaggagctttataacaaccttgttaaggagaactacaaaaccctcatgtccctggacgcggagggctcagtccccaagccagatgctccagtccaggctgagcccagggaagaaccttgtgtgtgggagcagcgccaccccgaagagagagaaatcccaatggatcccgaagcaggagcagagcccctggtgcctgcgcaggatgcgtcctcccaggtgaagcgtgaggacaccctgtgtgtccggggtcagcggggcctggaggaaagagccatccctacggaatccattaccgactccccaatttctgcccaggacctcttgtcccggattaaacaggaggagcatcagtgcgtgtgggatcagcaggatttggcagacagagatattcccacggatcccaattcagagtctctcatctcagcacatgacattttgtcatggatcaagcaggaggagcagccatacccatggggaccacgcgactcaatggacggagagcttggattagactctggccctagtgacagcctgctgatggtgaagaacccacccccggccccgccacagccccagccccagccccagccaccgcagccgcagctgcagtcgcagccccagccccagagcctgccccccatcgcggtggccgagaacccgggcggccccccgagccgagggctgctggacgacggtttccaggtgctgcccggggagcgtggctccggcgaggcgccgccgggtggggaccgcagcaccgggggcggcgggggcgatgggggcggtgggggcggcggcgcggaggcggggacgggggcaggcggcggctgtggcagctgctgccctggcgggctgcggcggagcctcctcctgcacggcgcccgcagcaagccctactcgtgccccgagtgcggcaagagcttcggcgtgcgcaagagcctcatcatccaccaccgcagccacaccaaggagcggccctacgagtgcgctgagtgcgagaagagcttcaactgccactcgggcctcatccgccaccagatgacgcaccgcggcgagcggccctacaagtgctcggagtgcgagaagacctacagccgtaaggagcacctgcagaaccaccagcggctgcacacgggcgagcggcctttccaatgtgcactgtgcggcaagagcttcatccgcaagcagaacctgctcaagcaccagcgcatccacacgggcgagcgcccctacacgtgcggcgagtgcggcaagagcttccgctacaaggagtcgctcaaggaccacctgcgcgtgcacagcggcggcccgggccccggcgccccacggcagctcccgccgcctcctgagcgagactagggctgggctgggggagggcagggccggacggagtggatcgggggcggcctgagcaccaaccaccttgccgggtgtcctcagccaccgtctggaaatcggcaacaggcattgcactccggttgggggtcccccagggtggggcagggatcccccagatctgtctggtctgaatggacgcccagctcatctagggtggacccagctgctggggaagagccagggggaccgcgaggagccgagcgtcctcgggcaccgccctcacacctcctcgagtgccctgggaccactgggccacagatggtcatcaggggaagccaccagggagtcccgaagcccttctgagatcaggaaatcaggtcccaaggttaggagacgccctgaaaaaaagcgaaggccgagggatgtgctaagggtaacaccttcatgatgacaacactgcctcgcgtttcaatagcgctttatacttttttaagtgttttctatccgttatccatttcacccttggcctatccctctcagataggtggggtaggattttcctggtgaccgagtaaagtgagaggcaggtgagacggttcacccaatcacacgggaaggggcgcgcgctgcccaaccgcgctctccgcctacctccgctgctcgggaagctgctggcctggccctcctggtctctcttcctttcctggtctctcttcctttccttgctctcacccacggataaaaccagaagcgacaggaggccagctcctggggttcctgggagccgggaacagattggctacggaacgccccaggttgtacattcagagggctctttctccatgggagctcctggtgccgcctcggccccagcctgtccccagcccctcaatctggtgcagcagcatcttgtcactgcacaacagtggcctggtcccccacaggcagttagggccccaggtcagacctcaccatgatgatttgttccagttctcccagggcagaggggcgagggagaggcttttgctgtgagagtagccgtcacgtgtctcttcccagcagcgccgggcaagtgggtgctagagtctgagcctcaggctctcctgccctgggcctcccaattggtgctatctgttactgcccgtgctcacggacatggatacagaccctgctgtgctccacaccctgcaggcgcctcgggaagcgcccaaaggattccccttcacgttggtgcacctgctccatagctccgggcgctgcgtcccgaggggccacagtctccatttcagcgtcttgcatggcctggcaccgggtggggtggtatgccccaggacccttgtttgtgtcaaaaatgactttccctgcccttgccgtgggtccggcgttcctcccagccgggatcacagtgggcagccggcacccggcaccactttggcgagcgtcctgcttccgccctcgccctcatctacgctgctccgctttcctcagacccctttttgccgtgcaaagggaattcttgacattaaataaaaggtatccagattgcagactgcatgttcacagagctgggggttctccagcttgcctacagtaaagcctcaatgaactggaatccaattcaa

SEQ ID NO: 202024 - DNA, 2297 bp, Homo sapiens
  Payload ID: 19854
  Gene Name: zinc finger protein 283
  Uniprot ID: Q8N7M2
  ENST ID: ENST00000324461
  CDS Start-End: 1-2040
atggagtctcgctctgtcgcccaggctggagtgcagtggtgcgatcttggctcactgcaagctccgcctcctgggttcacgctattctcctgcctcagcctcctgagtagctgggactacagttctggcttttctggattctgtgcttcaccaatagaggaatcccatggagcattaattagttcttgcaattccagaaccatgactgatgggttggtgacattcagggatgtggccatcgacttctctcaggaggagtgggaatgcctggaccctgctcagagggacttgtacgtggatgtaatgttggagaactatagtaacttggtgtcactggatttggagtcaaaaacgtatgagaccaaaaaaatattttcagaaaatgatatttttgaaataaatttttcccagtgggagatgaaggacaaaagtaaaacccttggccttgaggcatccatcttcagaaataattggaagtgcaaaagcatattcgagggactaaaaggacatcaagagggatacttcagtcaaatgataatcagctatgaaaaaataccttcttacagaaaaagtaaatctcttactccacatcaaagaattcataatacagagaaatcctatgtttgtaaggaatgtgggaaggcttgcagtcatggctcaaaacttgttcaacatgagagaactcatacagctgaaaaacactttgaatgtaaagaatgtgggaagaattatttaagtgcctatcaactcaatgtgcatcagagatttcatactggtgagaaaccctatgagtgtaaggaatgtgggaagacctttagctggggatcaagccttgttaaacatgagagaattcacactggtgagaaaccctatgaatgtaaagaatgtgggaaggcctttagtcgtggctatcaccttacccaacatcagaaaattcatactggtgtgaaatcttataaatgtaaggaatgtgggaaggcctttttttggggctcaagccttgctaaacatgagataattcatacaggtgagaaaccttataaatgtaaagaatgtgggaaggccttcagtcgtggctatcagcttactcagcatcagaaaatccatactggtaagaaaccttatgaatgtaaaatatgtggaaaggctttttgttggggctatcaacttactcgacatcagatatttcatactggtgagaaaccctatgaatgcaaggaatgtgggaaggcttttaattgcggatcaagtcttattcaacatgaaagaattcatactggtgagaaaccttatgaatgtaaagaatgtggaaaggcctttagtcgtggctatcacctttctcaacatcagaaaatccatactggtgagaaaccttttgaatgtaaggaatgtgggaaggcctttagttggggttcaagccttgttaaacatgagagagttcatactggtgagaaatcccatgaatgtaaagaatgcggaaagaccttttgtagtgggtatcaacttactcgacatcaggtatttcacactggtgagaaaccctatgaatgtaaggaatgtgggaaggcttttaattgtggatcaagccttgttcaacatgaaagaatccatacaggggagaaaccctatgaatgtaaagaatgtgggaaggcttttagtcgtggctatcaccttactcaacatcagaaaattcataccggtgagaaacctttcaaatgtaaggaatgtgggaaggccttcagttggggttcaagcctagttaagcatgagagagtccatactaatgagaagtcttatgaatgtaaagactgtgggaaggcctttggtagtggctatcaacttagtgttcatcagagatttcatactggtgagaagctttatcaacgtaaggaattcgggaagacctttacttgtggctcaaaacttgttcatgagagaactcatagtaatgataaaccctacaaatataacgaatgtggggaagcctttctgtggacaacttactcaaatgagaaaattgatactgatgaaaccttatgattgaaagttgtaaaagaatattttgtgtgtgtgtatagacaacttatcataataagaactcttactcttgagaaaccttgtgaatgtaagggttgtgcaaaagccattcatttctgtttatgggcaattatcttgctatccagcaattcatactagtgagaaatattttgaatataattaatatgaaaaggcctttagacttctgtacagtcttattggatatcaatttatactgatgtaaaatcatttaaatgtaa

SEQ ID NO: 202025 - DNA, 466 bp, Homo sapiens
  Payload ID: 19854
  Gene Name: zinc finger protein 283
  ENST ID: ENST00000590950
  CDS Start-End: 119-358
aaggttcttggactctgcatgtgctgccaggttgccagatttctaagaaggagtttgaagaggagaaaaggatttttgcatgtttagaaatcaaggttcaggagaatcttgacagtgaatgtgtctcattacattgaataacagctacaggatgttcgagagctgttctggcttttctggattctgtgcttcaccaatagaggaatcccatggagcattaattagttcttgcaattccagaaccatgactgatgggttggtgacattcagggatgtggccatcgacttctctcaggaggagtgggaatgcctggaccctgctcagagggactttagagatgaggtttcaccgtgttagccaggatggtctcaatctcctgacctcgtgatccacccacctcggcctcccaaaatgctaggattacaggtgtggcccaccgcacctggccaatgacaatctgtcttt

SEQ ID NO: 202026 - DNA, 298 bp, Homo sapiens
  Payload ID: 19854
  Gene Name: zinc finger protein 283
  ENST ID: ENST00000588967
  CDS Start-End: 163-298
cagtgctgccaggttgccagatttctaagaaggagtttgaagaggagaaaaggatttttgcatgtttagaaatcaaggttcagttctggcttttctggattctgtgcttcaccaatagaggaatcccatggagcattaattagttcttgcaattccagaaccatgactgatgggttggtgacattcagggatgtggccatcgacttctctcaggaggagtgggaatgcctggaccctgctcagagggacttgtacgtggatgtaatgttggagaactatagtaacttggtgtcactgg

SEQ ID NO: 202027 - DNA, 1260 bp, Homo sapiens
  Payload ID: 19854
  Gene Name: zinc finger protein 283
  ENST ID: ENST00000593164
  CDS Start-End: 98-382
tgctgccaggttgccagatttctaagaaggagtttgaagaggagaaaaggatttttgcatgtttagaaatcaaggttcaggagaatcttgacagtgaatgtgtctcattacattgaataacagctacaggatgttcgagagctgttctggcttttctggattctgtgcttcaccaatagaggaatcccatggagcattaattagttcttgcaattccagaaccatgactgatgggttggtgacattcagggatgtggccatcgacttctctcaggaggagtgggaatgcctggaccctgctcagagggacttgtacgtggatgtaatgttggagaactatagtaacttggtgtcactgggtaaggtcatctgcctgaaataatttagagtctcctctttgcatcatcagttttctgcactggaaattacagggctatctttgaagaaaccaggtgaatttcttctcccccttcccaagggcatgcttttatacttgctgggttagaaatgggtttgttaaacacgttgatcttccccatccctcagtgagctttacaccattctcgggccctccctgcaatcacctctctcctttaatggccaaggggctggatttgcattatagaacatttatttcataactatggcaaagaaaccagatttcataaattctgcaaatattatattgaatatctactcctggccagccttgtgctgagcactgtcaattgaatcatgaacaagctttgataacttgcccattttcgtgcagtttactttgtagtaaagcagaaacatcaaataagtaaatttataaatagataaatagtatgtaatgaagcaaattctttggaaaaggtaaacagcataagggaatagaaaatgatgaggactgacagggctaatttaggtaagacagtcggggaacgctttcttgaacagagatgtggagcctgggatctctatgtgaatatctggcggaggaacagatcagtcacagtgaacagcaaatgcaaagaccctgttgttggaaaggaactttaccagaactctagagtagagttattaaaggaacatgtactaagaaattaggccagggagataggaaggggccagataatacattgttttgttgttcttgtttgtggaatttggattgtttagtctctttcagtctgaaacagttcacatgtctttccttgacttgcgtatatgtctgtgatgcttttgaagattacaggccagctattttgtatagtg

SEQ ID NO: 202028 - DNA, 552 bp, Homo sapiens
  Payload ID: 19854
  Gene Name: zinc finger protein 283
  ENST ID: ENST00000593268
  CDS Start-End: 151-474
ccccagtgctgccaggttgccagatttctaagaaggagtttgaagaggagaaaaggatttttgcatgtttagaaatcaaggttcaggagaatcttgacagtgaatgtgtctcattacattgaataacagctacaggatgttcgagagctgatggagtctcgctctgtcgcccaggctggagtgcagtggtgcgatcttggctcactgcaagctccgcctcctgggttcacgctattctcctgcctcagcctcctgagtagctgggactacagttctggcttttctggattctgtgcttcaccaatagaggaatcccatggagcattaattagttcttgcaattccagaaccatgactgatgggttggtgacattcagggatgtggccatcgacttctctcaggaggagtgggaatgcctggaccctgctcagagggacttttttctgcactggaaattacagggctatctttgaagaaaccagatggagtcttgctctgtcacccaggctggagtgcagtggtgtgatctcggctcactgcaagctctgcct

SEQ ID NO: 202029 - DNA, 2428 bp, Homo sapiens
  Payload ID: 19854
  Gene Name: zinc finger protein 283
  ENST ID: ENST00000588797
  CDS Start-End: 549-2171
ctctgggtccaaactaaccacaggtctctgggtccttttccggtgtccttaaggttcttggactctgcatggttccctttagcctgtcttcgggcctgccacaattaaatgaccgcaagaaagaagtctatgctaagccccataatgaacgtttcaagcaagaaggatgagaattttagatctggaagtgtccgcgggacaggatcttgtcaagacctgatggggaagttctagagtgctgccaggttgccagatttctaagaaggagtttgaagaggagaaaaggatttttgcatgtttagaaatcaaggttcaggagaatcttgacagtgaatgtgtctcattacattgaataacagctacaggatgttcgagagctgttctggcttttctggattctgtgcttcaccaatagaggaatcccatggagcattaattagttcttgcaattccagaaccatgactgatatttggagtcaaaaacgtatgagaccaaaaaaatattttcagaaaatgatatttttgaaataaatttttcccagtgggagatgaaggacaaaagtaaaacccttggccttgaggcatccatcttcagaaataattggaagtgcaaaagcatattcgagggactaaaaggacatcaagagggatacttcagtcaaatgataatcagctatgaaaaaataccttcttacagaaaaagtaaatctcttactccacatcaaagaattcataatacagagaaatcctatgtttgtaaggaatgtgggaaggcttgcagtcatggctcaaaacttgttcaacatgagagaactcatacagctgaaaaacactttgaatgtaaagaatgtgggaagaattatttaagtgcctatcaactcaatgtgcatcagagatttcatactggtgagaaaccctatgagtgtaaggaatgtgggaagacctttagctggggatcaagccttgttaaacatgagagaattcacactggtgagaaaccctatgaatgtaaagaatgtgggaaggcctttagtcgtggctatcaccttacccaacatcagaaaattcatactggtgtgaaatcttataaatgtaaggaatgtgggaaggcctttttttggggctcaagccttgctaaacatgagataattcatacaggtgagaaaccttataaatgtaaagaatgtgggaaggccttcagtcgtggctatcagcttactcagcatcagaaaatccatactggtaagaaaccttatgaatgtaaaatatgtggaaaggctttttgttggggctatcaacttactcgacatcagatatttcatactggtgagaaaccctatgaatgcaaggaatgtgggaaggcttttaattgcggatcaagtcttattcaacatgaaagaattcatactggtgagaaaccttatgaatgtaaagaatgtggaaaggcctttagtcgtggctatcacctttctcaacatcagaaaatccatactggtgagaaaccttttgaatgtaaggaatgtgggaaggcctttagttggggttcaagccttgttaaacatgagagagttcatactggtgagaaatcccatgaatgtaaagaatgcggaaagaccttttgtagtgggtatcaacttactcgacatcaggtatttcacactggtgagaaaccctatgaatgtaaggaatgtgggaaggcttttaattgtggatcaagccttgttcaacatgaaagaatccatacaggggagaaaccctatgaatgtaaagaatgtgggaaggcttttagtcgtggctatcaccttactcaacatcagaaaattcataccggtgagaaacctttcaaatgtaaggaatgtgggaaggccttcagttggggttcaagcctagttaagcatgagagagtccatactaatgagaagtcttatgaatgtaaagactgtgggaaggcctttggtagtggctatcaacttagtgttcatcagagatttcatactggtgagaagctttatcaacgtaaggaattcgggaagacctttacttgtggctcaaaacttgttcatgagagaactcatagtaatgataaaccctacaaatataacgaatgtggggaagcctttctgtggacaacttactcaaatgagaaaattgatactgatgaaaccttatgattgaaagttgtaaaagaatattttgtgtgtgtgtatagacaacttatcataataagaactcttactcttgagaaaccttgtgaatgtaagggttgtgcaaaagccattcatttctgtttatgggcaattatcttgctatccagcaattcatactagtgagaaatattttgaatataattaatatgaaaaggcctttagacttctgtacagtcttattggatatcaatttatactgatgtaaaatcatttaaatgtaa

SEQ ID NO: 202030 - DNA, 5713 bp, Homo sapiens
  Payload ID: 19854
  Gene Name: zinc finger protein 283
  Uniprot ID: Q8N7M2
  ENST ID: ENST00000618787
  CDS Start-End: 298-2337
cttttaggggcggggcgagcttgcctgccagaagctcctctcccagcctgcgagcatttccaggctcttgtttcccatcagcctctgggtccaaactaaccacaggtctctgggtccttttccggtgtccttaaggttcttggactctgcatgtgctgccaggttgccagatttctaagaaggagtttgaagaggagaaaaggatttttgcatgtttagaaatcaaggttcaggagaatcttgacagtgaatgtgtctcattacattgaataacagctacaggatgttcgagagctgatggagtctcgctctgtcgcccaggctggagtgcagtggtgcgatcttggctcactgcaagctccgcctcctgggttcacgctattctcctgcctcagcctcctgagtagctgggactacagttctggcttttctggattctgtgcttcaccaatagaggaatcccatggagcattaattagttcttgcaattccagaaccatgactgatgggttggtgacattcagggatgtggccatcgacttctctcaggaggagtgggaatgcctggaccctgctcagagggacttgtacgtggatgtaatgttggagaactatagtaacttggtgtcactggatttggagtcaaaaacgtatgagaccaaaaaaatattttcagaaaatgatatttttgaaataaatttttcccagtgggagatgaaggacaaaagtaaaacccttggccttgaggcatccatcttcagaaataattggaagtgcaaaagcatattcgagggactaaaaggacatcaagagggatacttcagtcaaatgataatcagctatgaaaaaataccttcttacagaaaaagtaaatctcttactccacatcaaagaattcataatacagagaaatcctatgtttgtaaggaatgtgggaaggcttgcagtcatggctcaaaacttgttcaacatgagagaactcatacagctgaaaaacactttgaatgtaaagaatgtgggaagaattatttaagtgcctatcaactcaatgtgcatcagagatttcatactggtgagaaaccctatgagtgtaaggaatgtgggaagacctttagctggggatcaagccttgttaaacatgagagaattcacactggtgagaaaccctatgaatgtaaagaatgtgggaaggcctttagtcgtggctatcaccttacccaacatcagaaaattcatactggtgtgaaatcttataaatgtaaggaatgtgggaaggcctttttttggggctcaagccttgctaaacatgagataattcatacaggtgagaaaccttataaatgtaaagaatgtgggaaggccttcagtcgtggctatcagcttactcagcatcagaaaatccatactggtaagaaaccttatgaatgtaaaatatgtggaaaggctttttgttggggctatcaacttactcgacatcagatatttcatactggtgagaaaccctatgaatgcaaggaatgtgggaaggcttttaattgcggatcaagtcttattcaacatgaaagaattcatactggtgagaaaccttatgaatgtaaagaatgtggaaaggcctttagtcgtggctatcacctttctcaacatcagaaaatccatactggtgagaaaccttttgaatgtaaggaatgtgggaaggcctttagttggggttcaagccttgttaaacatgagagagttcatactggtgagaaatcccatgaatgtaaagaatgcggaaagaccttttgtagtgggtatcaacttactcgacatcaggtatttcacactggtgagaaaccctatgaatgtaaggaatgtgggaaggcttttaattgtggatcaagccttgttcaacatgaaagaatccatacaggggagaaaccctatgaatgtaaagaatgtgggaaggcttttagtcgtggctatcaccttactcaacatcagaaaattcataccggtgagaaacctttcaaatgtaaggaatgtgggaaggccttcagttggggttcaagcctagttaagcatgagagagtccatactaatgagaagtcttatgaatgtaaagactgtgggaaggcctttggtagtggctatcaacttagtgttcatcagagatttcatactggtgagaagctttatcaacgtaaggaattcgggaagacctttacttgtggctcaaaacttgttcatgagagaactcatagtaatgataaaccctacaaatataacgaatgtggggaagcctttctgtggacaacttactcaaatgagaaaattgatactgatgaaaccttatgattgaaagttgtaaaagaatattttgtgtgtgtgtatagacaacttatcataataagaactcttactcttgagaaaccttgtgaatgtaagggttgtgcaaaagccattcatttctgtttatgggcaattatcttgctatccagcaattcatactagtgagaaatattttgaatataattaatatgaaaaggcctttagacttctgtacagtcttattggatatcaatttatactgatgtaaaatcatttaaatgtaaggaatgtgtgaagatcttcattcatgacataaggtctgattaacatcaaataattggtatttgttaaaaagagtttaaataggaggaatgtgggaaggacctaaacttaattcagttcttgctgcacatcagagaattcatactgctgtgtaatcctatgcacataaggaatttgggaaggcttatagacacagtaaatatcttagagtacatcagagaattcatccaaatgagaaatcatttgaattagaattataggaaggcctttagacaaatgctacccaaattattatccagagactggtgcagtcataaaattgtcatctgtcaattgtgagataaacgtggaaagtgagtaaatatttggaacttttatagcaatttgacatttccataacattctgttttacaaaattatcagtccataaatgattgagaattgaaaacaaagtttgttctttcccagaaataatttgagacaagactcacacttttcaagacatgagacaagtgacaatttaaataagaaattcttcacttgcacctctctgattagaatagcagaatattcatactatagcaagatttggcaaatgagggaatcaaaattttctaatgcctgtaacagcataagataatttataccagatatgttaaatgtgcagaagccttccaacactattcagtctttgttaaacttcagtaagttcatcctagagagtaactctgttaatgtaacaaatgtaggaaaacccttatccatggcaaataccatactgtcatcaccatttcacctccatactacctgtaggatggtgagcaaaatgcttatctcttctggacatgatgtttcaaatgctgatggtaactaataatgctgttacagagattagatggatttagtatgcatcatatccttggaagagtatctggtatgtagcctatgcttaatacatattagctattgttcatattgtctttattattagtattactactggtgaattcttaggagaggcacaaccgttttgaggaatgaattcagaaaagcttcccataaccactcatccatttgaatttcagatagttcattctggataagatctagtacagtataaagaatttgaggggattttaattcagagtttatcccttaagctgagctaaaaaaatgagacttgaaaaaatccagacttttgaagagtttaggaaagctgttttatagaatgtcacacattagtttcattcctcatggtgaaatttgatatgggcctctccttcacatttctcgtaacatgaagttggaaatagaggcttaaacattttttaccagaacacttcatagatggtgatgtgtacttcatcttgcaatacctcagaagcagatagtatccatttcccccagtatcaccagtgccaagtttgatcacttatggtaactactggagttgtctgttataaagatccattatatacctaataggattggtcagccttgatcaatgatctttggaaatgtgtgatcatatggtatgtattttacttttttttttttttgggacaggatctctctttctgtcaccaaggctggagtgcagtggtgtgatttcggctcactgcaacctgcacctctcgggttcaagtgattctcgtgcctcagcctcccaagtagctggatacacaggtgtgcaccaccatactggctaattcttgtatttttagtagagatggggttttgccatgttggtccaggctgatcttgaactcctgcacctgcctcagcctcccaaagtgttgggattacaggtgtgagacactgcgcctggctatattttactatttggaaatcacaatgcatcttaaaattgatggcttcttgcaaccactttcaaccaggtgcctgtcatgatttagtgctagcatcaaggcaggttagttatgaagaaatagagtgtgtgtttatatactcacacagttagaaatcgacccttttaaaaattatttctttttgaaaataatgtcagttccatcagaactaatgcattgataactaaatgtctgtggttccttgtcataggtctacacctgacctctctattttgtgcacataggggattcgtaatatcactgttcagtcagtcattcaccatctagtgatcatcattctacatgattgcactttttcaaaggcataaaaagccaacagttgcactcttaataatcaactgtaacacaaagcagagtactttgggagttttaacaggatatattattggtaactggctattatgccactccctctgggtgccacatttgcctgttaaccaagaaatgtagacatggtgccttatcccaacatttctgaaattatatctcaaggaatcaccagtgcttactagtacttgacaatgaaggaggattttacagttaaagaagcttataaagtagcatctactaaatcccctcctaaggaacaagcaaaagcacctcaccagcttatcaaaagactaaagagaagtgaaaaaaaaaaaaagacggccgggcgcggtggctcatgcctgtaatcccagaactttgggaagccgaggcgggcggatcacgaggtcaggagatcaagaccatcctggctaacacggtgaaaccccgtctctactaaaaatagaaaaaattagccgggcgtggtggcgggcgcctgtggtcccagctactcggggaggctgaggcaggagaatggcgtgaacccgggaggcagagcttgcagtgagccgagattgcgccactgcactccagcctgggcgacagagcgagactccgtctcaaaaaaataaaaataaaaaaagactaaggagtattctagtgaagaaaatggttgaactttgtttaaactggtgtatggcaaacttcactgttgaaatacttattcccatgacctattatctttgtaggtgggtgaaattgcattgggaactgctgctataaccaaaagagaatttcagtcaccatgtctggttgttagctatgatggaatggcagcatcatggtctcagttatgagtgaaaatctttgttgtagctaagtagtggtgcctcctgagttttattaaatgccgtttcactatc

SEQ ID NO: 202031 - DNA, 4351 bp, Homo sapiens
  Payload ID: 19855
  Gene Name: zinc finger protein 284
  Uniprot ID: Q2VY69
  ENST ID: ENST00000421176
  CDS Start-End: 217-1998
gggggcgaggttgctgcagtgcattcggtggtagtttggtgtcagtcctgtgtcttgtcggtccttctaaacgtgtccccttacgatgctggctcgcaaccacctggaagttgactaaggggagaaggagtctcgttggaaaacggaggcacaattctgtcttctcttgaactgcataactgagaactctgcaaattccccaaagaaggaggaaaaatgaccatgttcaaggaggcagtgaccttcaaggatgtggctgtggtcttcaccgaggaggagctggggctgctggacgtttcccagaggaagctgtatcgagatgtcatgctggagaacttcagaaacctgctatcagtggggcatcaactttcccaccgagatacttttcacttccaaagagaagaaaagttttggatcatggagacagcaacccaaagagaagggaattcaggaggcaagatccaaactgagttggagtctgttccagaaacaggaccacatgaagagtggtcttgccagcaaatctgggaacaaactgcaagtgagttaactagacctcaagactccataagtagctctcagttctccacacaaggtgatgtcccctcccaggttgacgcaggactatctataattcacataggagagacaccttctgagcatgggaagtgtaaaaaattcttcagtgatgtctccatccttgatcttcatcaacaattacactcaggaaagatatcccatacatgtaatgagtacaggaagagattctgttatagctcagctctttgtcttcatcagaaagttcacatgggagagaaacgctataagtgtgatgtgtgtagtaaggcatttagtcagaactcacaactgcaaactcatcagagaatccacactggagagaaaccattcaaatgtgagcagtgtgggaaaagtttcagccgtagatcaggaatgtatgttcattgcaaattacacacaggagaaaaacctcatatttgtgaggaatgtgggaaggccttcattcacaattcccagcttcgggaacatcaaagaatccatactggggagaagccattcaaatgttatatatgtggtaagagcttccatagtagatcaaatcttaataggcattccatggtccacatgcaagagaaatcatttagatgtgatacctgtagtaatagctttggtcagagatcagcacttaatagtcattgcatggaccacacaaaagagaaactatacaaatgtgaagaatgtggaaggagcttcacttgtaggcaagatctttgtaagcatcagatggaccatacaggagacaaaccatataattgtaatgtatgtgggaagggcttcaggtggtcctcatgtctttcaagacatcagcgggtccacaatggagaaacaacattcaagtgcgacggatgtgggaagagattttatatgaattcacagggccattcacatcagagagcctatagagaagaagaactgtataaatgtcagaagtgtgggaagggctacattagtaagtttaatcttgacttgcaccagagggtccacacgggagagagaccttataattgtaaggaatgtggaaagagcttcaggtgggcctcaggtattttgagacataagagactccatactggagaaaaaccattcaaatgtgaagagtgtgggaagaggtttactgagaattcaaaacttcgtttccatcaaagaattcacactggagaaaagccttacaaatgtgaggagtgtggaaagggattcagatgggcctcaactcatctaacccatcaaagactccacagcagagaaaaactattccaatgtgaggattgtgggaagagcagtgagcacagttcatgccttcaagaccaacaaagcgaccacagtggagaaaaaacatccaaatgtgaggactgtgggaagcgctacgagaggcgcttgaatctagatatgattttatcattatttttaaatgatatataattattgtccatatttatgggttacagcatatttcaatacatgtatacaatgtataatgatcaaatcagtgttattagcatatccatcacctcctttatcatttatttgtggatcatttatcatttctttgtgctttgaacgttcaaaaactgctgttctagttatttgaaaataagttattattaattatagtcacctttagtgctgtggaacactagaacttgttcctttcatcatcttactgtactttcatatctgttaacgaatctttcatcatccaccctctctcctacttttcccttctagtaattgctatgccatgctgcttctgcttttttttttttttttttttttttttgagaacagagtcttccaggcttgagtgtagtggcatgatcctttctcactgcagcctccacctcctgggttcaagcgattctcctgcctaaacctcctgagtagcagggattacaggcacgcaccaccacgcccagctaatttttgtacttttttttttttttttttgagacagagtatcgctctgtcgcccagtatggagtgcaatggcttgatctcggctcactgcaacctctgcctcctgggttcaaacgattcttccctgccttggcctcccgagtagctgggactacaggcgcccgccaccacacctgactaattgttgtatgcgtagtagagatggggttttgccatattggccaacctggacttgaactcctgacttcagatgatccgcccacctcggcctcccaaagtgctgggattacaggcgtgagccaccatgcccaccatgcctaaaaatttttgtatttttagtgaagatggggtttcaccacattggccaggctagccttgaactcccaaactcaaatggtccacctgccttggcctcccaaagtgctgggattacaggcatgagccaccgtgcccagccaatgctatgctgcttctatgatgtcaactttttagcttccacatatgtgtgaaaacatgtggtatttatctttctgggcctgaatttacatcactcaacatcatgttctccaaagcttatctttatcttgccataaatgacagaattttattattttttatggttaaatagtgtacctttgtgtatgtatgccacattttctttaccattttctgttgatgaacacttagattggttccatatgttagctattgcaaatagtactataataaatataggagtgcagataggagttcaacacactgatttcctttcctttggatatacagctagtagtgggattgctggatcacttgaatgctgatatgcataagaggatctacactggagaaaaaccatggaagtgtggagattgtggtacatgcttcagtcagggctcacatcttcaaattcagtgtctgttctgtagagaaaccttaataatgtgatatatgtgacagcaaagagttataagatatgaatatgttaattttagtagatacttccgaaaagtatttcaaactggttgtaccactataaactctgaccattattaggcaagaattggctttttttttttttttcttttgagacagtcttgctctgtcacccagactggcatgcagtggaatgatcacggctccctgcagccttgacctcccaggctcaagaaatccttctgcctcagcccctcaaaagctgggactataggcatgcaacaacacgcctggctaaatttttgttgtagagatggggtctcactatgttgcccaaattggtctcaaactcctgggctcaagcgattctccctcctcagccttccaaagtgctgggattacaggcctgagccatgcgcacagcattttgttttgttttgttttgtttttgagatggggtctctcggtgttgcccaggctggattgcttattcacagatgcagttacagtgccctatagcctcgaactcctgggcctaagtgatcctcttgcttcaatcccctgagaagctgggactacaggcatggaccaccacccctgattgatcttctttagtttctataacaaaatagtacactgtttccacaaacttgggaaggctagtatttgggggtggggggcgtggaaatcactaaacaacaaagaaaatctgatgaattggacagcataaaaatattggcataaagatgaacataacataagcaggaatatttaaagcacatactttttatagagtgtctcccctgtaatgtctctggttaaatgaaagggtttcaaatgtgaagacaaccctaaccatactcattatctgtaaaagatgtagcattgtcatggactccttaataaacgtgaagactttaatcca

SEQ ID NO: 202032 - DNA, 2793 bp, Homo sapiens
  Payload ID: 19856
  Gene Name: zinc finger protein 285
  Uniprot ID: Q96NJ3
  ENST ID: ENST00000544719
  CDS Start-End: 198-1970
gacgctggggtgagtcccgtctgtaccgcgcccctcttggaggcgtagccaggagtaggagtgtaggatgtgcagctgtgacccgtccctgtggactgaagtaggaggagtggaagaggggactggtaaccaatgataaggcctcgtaggtgggttctgcttttccagaatcctgccctttccaaaaggaagacggtatgattaagttccaggaaagggtgacattcaaggatgtggctgttgtcttcaccaaggaagagctggcactattggataaagcccagataaacctgtaccaagatgtgatgctggaaaacttcaggaacctcatgttagtgagagacgggattaaaaacaacattttgaatcttcaggcaaaggggttaagttacctttcgcaagaagtgcttcattgctggcagatttggaaacaaaggatccgggatttaactgtgagtcaggattatatcgtgaaccttcaagaagagtgttccccacatttagaagatgtttccctcagtgaagagtgggcaggcatttctcttcagatttctgaaaatgaaaactatgtagtaaatgccattatcaaaaatcaagatatcacagcatggcaaagcctgacacaggttcttaccccagaatcgtggaggaaagccaacataatgaccgagccccagaactctcagggaagatataagggaatttacatggaagagaaattgtacagacgtgctcagcatgatgacagcctcagttggacctcatgtgatcatcatgagtcccaagaatgtaaaggagaggaccctggtagacatcccagctgtgggaaaaacttgggtatgaaatcaacggttgaaaaacgtaatgcggcccatgtattaccacagcctttcccatgtaataactgtggggtggcctttgcagatgatacagatcctcatgtccatcacagcactcacctaggagaaaaatcttataaatgtgaccagtatggaaagaactttagtcagagccaagatcttatcgttcattgtaaaactcactctggcaagactccctatgaattccacgaatggcctatgggctgcaaacagagctcagaccttcccagatatcagaaagtctcctcaggagacaaaccctacaaatgtaaagaatgtggcaagggcttcaggcgcagctcttcccttcacaaccatcatcgagtccacacaggggagatgccctacaaatgcgatgaatgtgggaaagggtttggatttaggtcacttctttgtattcatcagggagtacacacagggaaaaagccctataaatgtgaagagtgtgggaagggctttgatcagagctccaaccttcttgtccatcagagagtccacactggagagaagccctacaaatgcagtgagtgtggcaagtgctttagttcaagctccgttcttcaagtccactggaggtttcacacaggggagaaaccatataggtgtggtgagtgtggaaagggcttcagccaatgtacacaccttcacattcaccagagagtccacacaggggagaaaccatacaaatgcaatgtgtgtggaaaggattttgcgtatagctctgttcttcacactcatcagagagttcacactggagaaaaaccatataaatgtgaagtgtgtggaaagtgcttcagttacagttcatattttcacttacatcaaagagatcacatcagagagaaaccatataaatgtgatgagtgtggtaaaggcttcagccggaattcagatcttaatgttcacctcagagtccacacaggagagaggccctataagtgtaaggcatgtggtaagggcttcagtcgtaattcatacctccttgcccatcagagagtgcatatagatgagacacagtacacacactgtgagcgtggaaaggaccttctgactcatcaaagactacatgagcagagagaaacattataaatgtagtaagtcagggttcaattagtaaaacagaagccacactgtattccagatgatagaggcttactcagcctgtgggagggctaggggagcaaaagacagggacactgccatcgataatgtcagcctgcagcactgaagtgtgccaggcaaggactgtggatttcaagaacttctgtgaagctcccatcaactgctgtatgctacaatggcaaagaggttacttttgacaaatgggtggtttgtggtagtggttgtagttagtggtcaaatttccattaaagggtgtgtccaggaaggaaattctaattgggatgatcatggtaaggtcttcagttcagccaacgtctttagatttttttttagtccccagtagaaaaatactctctgtatgaagaacattcaaaagtgtgctcaaaaatgaaacccatgctcttactatgaaagaacgttagtacccaggttttccatgagattctctacacaggcaagaagctccatagaagtggcatttgaagggtgtggcagaggcagtgctgtgtttatcacactggttccatttccttgcaaataagaagtctatttcccagtaacccttgcagttaagagtgtgcccatgtgattgagttctagccaatggagtgtgagcaaaagtgatataagccactttcaggtctagcctttacaaacatcctcaggcttctctatccctgccaaggtgaccttggaggctgcttattccagactgggttgatagaaggtcactacttcatctgtgttggatttctttttagagtaagaaataaaagttcattgtgtctca

SEQ ID NO: 202033 - DNA, 2388 bp, Homo sapiens
  Payload ID: 19856
  Gene Name: zinc finger protein 285
  ENST ID: ENST00000591679
  CDS Start-End: 52-1845
acgctgggttctgcttttccagaatcctgccctttccaaaaggaagacggtatgattaagttccagattcaagggatacatgtgcaggaaagggtgacattcaaggatgtggctgttgtcttcaccaaggaagagctggcactattggataaagcccagataaacctgtaccaagatgtgatgctggaaaacttcaggaacctcatgttagtgagagacgggattaaaaacaacattttgaatcttcaggcaaaggggttaagttacctttcgcaagaagtgcttcattgctggcagatttggaaacaaaggatccgggatttaactgtgagtcaggattatatcgtgaaccttcaagaagagtgttccccacatttagaagatgtttccctcagtgaagagtgggcaggcatttctcttcagatttctgaaaatgaaaactatgtagtaaatgccattatcaaaaatcaagatatcacagcatggcaaagcctgacacaggttcttaccccagaatcgtggaggaaagccaacataatgaccgagccccagaactctcagggaagatataagggaatttacatggaagagaaattgtacagacgtgctcagcatgatgacagcctcagttggacctcatgtgatcatcatgagtcccaagaatgtaaaggagaggaccctggtagacatcccagctgtgggaaaaacttgggtatgaaatcaacggttgaaaaacgtaatgcggcccatgtattaccacagcctttcccatgtaataactgtggggtggcctttgcagatgatacagatcctcatgtccatcacagcactcacctaggagaaaaatcttataaatgtgaccagtatggaaagaactttagtcagagccaagatcttatcgttcattgtaaaactcactctggcaagactccctatgaattccacgaatggcctatgggctgcaaacagagctcagaccttcccagatatcagaaagtctcctcaggagacaaaccctacaaatgtaaagaatgtggcaagggcttcaggcgcagctcttcccttcacaaccatcatcgagtccacacaggggagatgccctacaaatgcgatgaatgtgggaaagggtttggatttaggtcacttctttgtattcatcagggagtacacacagggaaaaagccctataaatgtgaagagtgtgggaagggctttgatcagagctccaaccttcttgtccatcagagagtccacactggagagaagccctacaaatgcagtgagtgtggcaagtgctttagttcaagctccgttcttcaagtccactggaggtttcacacaggggagaaaccatataggtgtggtgagtgtggaaagggcttcagccaatgtacacaccttcacattcaccagagagtccacacaggggagaaaccatacaaatgcaatgtgtgtggaaaggattttgcgtatagctctgttcttcacactcatcagagagttcacactggagaaaaaccatataaatgtgaagtgtgtggaaagtgcttcagttacagttcatattttcacttacatcaaagagatcacatcagagagaaaccatataaatgtgatgagtgtggtaaaggcttcagccggaattcagatcttaatgttcacctcagagtccacacaggagagaggccctataagtgtaaggcatgtggtaagggcttcagtcgtaattcatacctccttgcccatcagagagtgcatatagatgagacacagtacacacactgtgagcgtggaaaggaccttctgactcatcaaagactacatgagcagagagaaacattataaatgtagtaagtcagggttcaattagtaaaacagaagccacactgtattccagatgatagaggcttactcagcctgtgggagggctaggggagcaaaagacagggacactgccatcgataatgtcagcctgcagcactgaagtgtgccaggcaaggactgtggatttcaagaacttctgtgaagctcccatcaactgctgtatgctacaatggcaaagaggttacttttgacaaatgggtggtttgtggtagtggttgtagttagtggtcaaatttccattaaagggtgtgtccaggaaggaaattctaattgggatgatcatggtaaggtcttcagttcagccaacgtctttagatttttttttagtccccagtagaaaaatactctctgtatgaagaacattcaaaagtgtgctcaaaaatgaaacccatgctcttactatgaaagaacgttagtacccaggttttccatgagattctctacacaggcaagaagctccatagaagtggcatttgaagggtgtggcagaggcagtgctgtgtt

SEQ ID NO: 202034 - DNA, 555 bp, Homo sapiens
  Payload ID: 19856
  Gene Name: zinc finger protein 285
  ENST ID: ENST00000589738
  CDS Start-End: 78-248
gcacgctgcgggcgacattgtttgggacgctgggttctgcttttccagaatcctgccctttccaaaaggaagacggtatgattaagttccagattcaagggatacatgtgcaggaaagggtgacattcaaggatgtggctgttgtcttcaccaaggaagagctggcactattggataaagcccagataaacctgtaccaagatgtgatgctggaaaacttcaggaacctcatgttagtgagtgagtaactgagcatgagaccactggacctgtttcctcaaatcatcatttcaaaccagatagaatattccagttagaccacaaagagaaactttggccactggaaagaaaactcctaagagatgcatgtgcaggagacgggattaaaaacaacattttgaatcttcaggcaaaggggttaagttacctttcgcaagaagtgcttcattgctggcagatttggaaacaaaggatccgggatttaactgtgagtcaggattatatcgtgaaccttcaagaagagtgttccccacatttagaagatgtttccctcag

SEQ ID NO: 202035 - DNA, 540 bp, Homo sapiens
  Payload ID: 19856
  Gene Name: zinc finger protein 285
  ENST ID: ENST00000585868
  CDS Start-End: 423-540
actggacgcacgctgcgggcgacattgtttgggacgctgggttctgcttttccagaatcctgccctttccaaaaggaagacggtatgattaagttccaggagacgggattaaaaacaacattttgaatcttcaggcaaaggggttaagttacctttcgcaagaagtgcttcattgctggcagatttggaaacaaaggatccgggatttaactgtgagtcaggattatatcgtgaaccttcaagaagagtgttccccacatttagaagatgtttccctcagtgaagagtgggcaggcatttctcttcagatttctgaaaatgaaaactatgtagtaaatgccattatcaaaaatcaagatatcacagcatggcaaagcctgacacaggttcttaccccagaatcgtggaggaaagccaacataatgaccgagccccagaactctcagggaagatataagggaatttacatggaagagaaattgtacagacgtgctcagcatgatgacagcctcagttggacctcatgtgatcatcatgagt

SEQ ID NO: 202036 - DNA, 6012 bp, Homo sapiens
  Payload ID: 19856
  Gene Name: zinc finger protein 285
  Uniprot ID: Q96NJ3
  ENST ID: ENST00000614994
  CDS Start-End: 66-1838
cgacattgtttgggacgctgggttctgcttttccagaatcctgccctttccaaaaggaagacggtatgattaagttccaggaaagggtgacattcaaggatgtggctgttgtcttcaccaaggaagagctggcactattggataaagcccagataaacctgtaccaagatgtgatgctggaaaacttcaggaacctcatgttagtgagagacgggattaaaaacaacattttgaatcttcaggcaaaggggttaagttacctttcgcaagaagtgcttcattgctggcagatttggaaacaaaggatccgggatttaactgtgagtcaggattatatcgtgaaccttcaagaagagtgttccccacatttagaagatgtttccctcagtgaagagtgggcaggcatttctcttcagatttctgaaaatgaaaactatgtagtaaatgccattatcaaaaatcaagatatcacagcatggcaaagcctgacacaggttcttaccccagaatcgtggaggaaagccaacataatgaccgagccccagaactctcagggaagatataagggaatttacatggaagagaaattgtacagacgtgctcagcatgatgacagcctcagttggacctcatgtgatcatcatgagtcccaagaatgtaaaggagaggaccctggtagacatcccagctgtgggaaaaacttgggtatgaaatcaacggttgaaaaacgtaatgcggcccatgtattaccacagcctttcccatgtaataactgtggggtggcctttgcagatgatacagatcctcatgtccatcacagcactcacctaggagaaaaatcttataaatgtgaccagtatggaaagaactttagtcagagccaagatcttatcgttcattgtaaaactcactctggcaagactccctatgaattccacgaatggcctatgggctgcaaacagagctcagaccttcccagatatcagaaagtctcctcaggagacaaaccctacaaatgtaaagaatgtggcaagggcttcaggcgcagctcttcccttcacaaccatcatcgagtccacacaggggagatgccctacaaatgcgatgaatgtgggaaagggtttggatttaggtcacttctttgtattcatcagggagtacacacagggaaaaagccctataaatgtgaagagtgtgggaagggctttgatcagagctccaaccttcttgtccatcagagagtccacactggagagaagccctacaaatgcagtgagtgtggcaagtgctttagttcaagctccgttcttcaagtccactggaggtttcacacaggggagaaaccatataggtgtggtgagtgtggaaagggcttcagccaatgtacacaccttcacattcaccagagagtccacacaggggagaaaccatacaaatgcaatgtgtgtggaaaggattttgcgtatagctctgttcttcacactcatcagagagttcacactggagaaaaaccatataaatgtgaagtgtgtggaaagtgcttcagttacagttcatattttcacttacatcaaagagatcacatcagagagaaaccatataaatgtgatgagtgtggtaaaggcttcagccggaattcagatcttaatgttcacctcagagtccacacaggagagaggccctataagtgtaaggcatgtggtaagggcttcagtcgtaattcatacctccttgcccatcagagagtgcatatagatgagacacagtacacacactgtgagcgtggaaaggaccttctgactcatcaaagactacatgagcagagagaaacattataaatgtagtaagtcagggttcaattagtaaaacagaagccacactgtattccagatgatagaggcttactcagcctgtgggagggctaggggagcaaaagacagggacactgccatcgataatgtcagcctgcagcactgaagtgtgccaggcaaggactgtggatttcaagaacttctgtgaagctcccatcaactgctgtatgctacaatggcaaagaggttacttttgacaaatgggtggtttgtggtagtggttgtagttagtggtcaaatttccattaaagggtgtgtccaggaaggaaattctaattgggatgatcatggtaaggtcttcagttcagccaacgtctttagatttttttttagtccccagtagaaaaatactctctgtatgaagaacattcaaaagtgtgctcaaaaatgaaacccatgctcttactatgaaagaacgttagtacccaggttttccatgagattctctacacaggcaagaagctccatagaagtggcatttgaagggtgtggcagaggcagtgctgtgtttatcacactggttccatttccttgcaaataagaagtctatttcccagtaacccttgcagttaagagtgtgcccatgtgattgagttctagccaatggagtgtgagcaaaagtgatataagccactttcaggtctagcctttacaaacatcctcaggcttctctatccctgccaaggtgaccttggaggctgcttattccagactgggttgatagaaggtcactacttcatctgtgttggatttctttttagagtaagaaataaaagttcattgtgtctcaccactgagatttttggtggtttatttattactgcagcattgcctaggctatcctgactagcatggagggattttatagcaatatgtttcattgtcattggagtccacatacagaagtaacataattcagagttcaaaacttttaaatctttaaggcttgatgtggcagtgcaaccatctaaaatggtatggatgggacttcttcagtgataaccttcattcattggtgagtacaccaaagagaaatgttccagatgatatagctgtggtaaaactttactgaaaagtataacccaccgacgtaagaaatctcatataatagagaaactctataatgtgggatgctgaataggtttgtcagctcacaccttaaatgcgattaaaaattaactagaataggtgttctgtggttagtcttaataaaattaattgaataaaatcaacatttactaaagtgaccaacaacatgtaaaaaaccaacagtgttcattgcagactgatgcagtcttcttctcagcagacctgtataataatgggtttttaaaggatgctctttctgtcagtttccccccaaatttgtcatttaattggggataatagatgaattcgagaggagatctctttgctttttttttttttttttttttttggaaacagggtcttgctgtgtcacccaggtggctggagtgcagtggcctgatcattgctcgctgaagccttgaactcctggcttcagtgatcctcctgcctcagcctcctgagtagctgggactacagacatacaccaccgtgttcagctgatgttttctttaaaaattgtacttgtagagatggggtcttactttgttgcccaggttagtctcaaacttctggtttcaagcgatcctcctacctcagcttcccaaagtgcagggattacaggtttgggccactgcactcatcccacaaggtgttttttttttccttcaaaaacagtgtccttttttgttttaattgacttataggtttcttcatttggatcatggtttattcctagtttttcttgcattacagtttcctgctagttatagtttgtaaacagaacagccattcaagtgcaaataaaaccatccctgaagtgtcattttcttactgatcaggtggataatagtgaaatattttaaaaattctatgtcagtagaaatgaggaaatgagtgttcttacataagttggtgggggaaagaaaaacaggtacaaagttgctggagaggatcttgtctatatgtatcatatgtacaatgtgcattgtctttgagccaatgatcctgcttctcagaatgtatttttaggatgtaattacatgagtggggaaaatatggtttcagaaagaaatatgttctaagaattttgcaatgagaagactgtaaacaacctgaaggttcatgtataagagattgagtaaattagggcatcccatataatggaataacatggctccatcaacaatgatctagacctataaaaatgtccacatgttattgtccatgtccaccacatactccagtactcctacttgcaaacattaagttagagaaaaaatccgggatacacattatcctaggaagcttttggggtttagaatgggtgcaacattccttcatgacagaatcagccctcagtgttggtggaggtgtcccaggcaatcctctagtttggccgggagcagcgcttgcatatcacattaagctttttaaatatatgatgctaacaggaatgtctccctacttcacaaaattgtttgcttttcctcttgtagcaaagtagcatggaaaaagcagaaattagtctagctcccaatcagtgggagccaatctcatttacaaatgaagatgcagagatcctaaataaatatgagcatgtcaaatccaatgatttgataaaagcgtaacagactcgctcatgtataatttatcctaaatatgcttatcagcttctgcctcataacacacacaagaactgagtagctctaaatacatatttatttagctcatgatgtgtgagctggcaagttcaactgggcttagctgggcagttctggtgtgggacatgctagattatcttaactgggctttgtacatgcatctgcagtcagctgatggttcatctgggcctggctgttttatgatggtcatagatgagacaacgaagttctctctgtcatcatggtctctcaccctccagaagaccaatcgagggttggtcccatagtgccagggtttcaagggcaaaagctgtgatctcttaaggcctcatcagggaacaggctcaatgatactttcaccacattttaatgattaaagcaagtcacaacactggcccagattcatggggtgagattaagacaaaataaaaaatgttgagacataatcattggaaggaaaaggaagatactatttttatgctagagaataatgttatttacttataaaattcaaatccacctgtaaaatttgaccaattgaaggctgttttaaaattatcgggtcaacaaattggtttcacacgaaattggcatgtgaaaattcatagcattactatgtaagagtcttttataaaatgtagccaaaatgtttcattcacaataacaattgtgtgcaatgaccagaattgtccaaaggtaattctgggagttccctttgggatgcctaggtgaggagctatctggggcctcagactcccacattcttcagtgggaagggctttacatgaactcaacttcccagcggctttctcttcctgatgggaggtgttagaacctggctttctcatgcaacttctgtgaagctctgacaactaaagccagattgtctgctttagttaagtagtccagattacctgcatagtcaatttgttccctcaccaacatggatgccttcacaattgctctttaagaaggataaaaacatagcggtgaggtgtggtctatttcctgcttcacccaggccctggtgcttcttcaagtggtatgagaaattgtggtcctgtgccttctcttccagacccttagcttacatgttttccctataaaacttagtcctaatcccagcactttgggaggccaaggtggctgaatcacaagatcaggagtttgagaccagcctggccaacatagtgaaaccccgtctctactaaaaatacacaaaattagctgggcatagtggcaggcacctgtaatcccagctactcaggaggctgaggcaggagaatcgcttgagcacaggaggtggaggttgcaatgagccaagatcgcaccactgcactccagcccaggcgacagggcaagactctgtctcaaaaaaaaaaaaaaaaaaa

SEQ ID NO: 202037 - DNA, 654 bp, Homo sapiens
  Payload ID: 19857
  Gene Name: zinc finger protein 286A
  ENST ID: ENST00000395893
  CDS Start-End: 198-623
aggctccagcgccgtaggactgaggcagactccacggtgagaaagagacccgatctaacccaggcctttcatcagagcccaggagggaaggcaggaagtgggaccacgaggcccggggggcttctaactcgtctggccagggagatctgaattggggtgaagagcagaatctccagaacaaggaggaggtggtgatcatggagacagatttggctgaaatgcctgagaaaggagctctgtcttcccaggattctccccatttccaagagaagagcacagaagagggagaagtggctgctctgcgcctcacggccagatcccaggaaacagtgacattcaaggatgtggccatggactttacaccagaggagtgggggaagctggatcctgcacaaagggatgtgatgctggagaactataggaacctagtctcactttggcttccagtttccaaacctgagagctacaacttggagaatggaaaagaaccattgaagcttgagagaaaagcccccaaaagcagctattcagcagttgcagtgatcatcctttttttgattccttatgttcatcttgagagctggtttagggagataactggaagaagaattagtaggtcttaaatcatcacatgtttagctttactaggaactg

SEQ ID NO: 202038 - DNA, 5443 bp, Homo sapiens
  Payload ID: 19857
  Gene Name: zinc finger protein 286A
  ENST ID: ENST00000395894
  CDS Start-End: 322-672
caaagaagttcgtcccctttgtgaggcccgggatgggaggtgcccggttcccccagggacagcttcaagcggtagggacagacatctgaggacccagcctcagggatgctgtccccgggcttccaggctccagcgccgtaggactgaggcagactccacggtgagaaagagacccgatctaacccaggcctttcatcagagcccaggagggaaggcaggaagtgggaccacgaggcccggggggcttctaactcgtctggccagggagatctgaattggggtgaagagcagaatctccagaacaaggaggaggtggtgatcatggagacagatttggctgaaatgcctgagaaaggagctctgtcttcccaggattctccccatttccaagagaagagcacagaagagggagaagtggctgctctgcgcctcacggccagatcccaggaaacagtgacattcaaggatgtggccatggactttacaccagaggagtgggggaagctggatcctgcacaaagggatgtgatgctggagaactataggaacctagtctcactttggcttccagtttccaaacctgagagctacaacttggagaatggaaaagaaccattgaagcttgagagaaaagcccccaaaagcagctattcagaactgcctttttgttgagcacagaaaacgaaggaaatttgcatttccaatgtctttcagacatggagactagaccacagagcaaggattcaacttcagtgcaagatttttccaaagcagaatcatgcaaagttgcaataatagacagactgacacggaatagtgtctatgactctaacttggaagcagcccttgaatgtgaaaattggttagagaatcagcaaggaaatcaggagagacatttgagagaaatgttcactcacatgaattcactctctgaggaaacagaccataagcatgatgtatactggaaaagcttcaatcagaaatctgtccttatcactgaagacagagttcccaaaggatcttatgccttccatacacttgaaaaaagcttgaaacaaaaatcaaacttaatgaaaaagcagagaacttataaagagaaaaaacctcataaatgtaatgattgtggtgaactcttcacctaccattcagtgcttattcgacaccagagagtccatactggagagaaaccctatacctgcaatgaatgtgggaaatcttttagccacagagctaatttaactaaacaccagagaactcatactagaattctctttgaatgcagtgaatgcaagaaaaccttcacagaaagctcatcccttgcaacacatcagagaattcacgttggagagagaccttatgaatgcaatgaatgtgggaaaggttttaatcgaagtacacatcttgtgcagcatcagttgattcatactggagtgaagccttatgaatgtaatgaatgtgataaagcttttattcattcatcagcactcattaaacatcaaagaactcatactggagagaaaccttataaatgtcaagaatgtgggaaagcctttagccattgctcatccctaactaagcatcagagagttcatactggagaaaagccatatgaatgcagtgaatgtggaaaaacttttagtcagagcacacatcttgttcaacatcagagaattcacactggagagaaaccctatgagtgtaatgaatgtgggaaaaccttcagccggagctccaattttgctaaacatcaaagaattcatattggaaagaaaccgtacaaatgtagcgagtgtggaaaagccttcattcattcatcagctctcattcaacatcagagaactcataccggagagaaaccctttagatgtaatgagtgtgggaaaagctttaagtgcagttcatctctcatcagacatcaaagagttcacactgaagagcaaccctgaaaaattactgaatgtgaagaaatgtaagttggttttatcactgtattaaatacttgagtgtttaggtggaaggcgcatccataatatgcatgtgaggaccaattctgtatgcatctaatttcatttgcgtaatacatagttttgagccataagcaggttctttatgtccgttaatttgataattatgaaatctagccagcgatttcaaaattttaatctccaacgtcccaaatagctatctgtggaaattcaagaagtccctgagagtaggtagcagtacgaacattgtgaaatccagttttcccctctcttgtttatgtcagagctttgttgtaagcctctcactttgtaaggaaattcttattgggtaggttaggctgagggcttacatccttatcatcaggaagacacaatgttgttatttattactccttgagatctagatacacatatggtataattcatctagagtgtaatttcttttatattagccttaaaaaccaaaaatgctgggttcaaagtccttagaattcccttcctccctcaacaagctgctgtctatgttgatgaccataactgggatgtataatatttacagacaactctaagttacgttcacatggattatgtacatcattgatttttttttttttttttttttgagacagagtcttgctctgttgcccgggctggagtgcagtggcgcgatctcggctcactgcaacctccacctcccaggttcatgccattctcttgtctcagcctcccaagtagctgggactacaggcacctgccagtacgcctggctaattttttttgtatttttagtagagatggggtttcaccatgttagccaggatggtcttgatctcctgacctcgtgatctgcctgcctcggcctcccaaagtgctgggattacaggcatgagccaccatgcctggcatcatcattgatttatgtcattgttatccctctaccgcggagaccttctttcattttccatttccctgggagttcacgtgaagtagtgaatgggtcaaaatcttaacagtggttgttgatcaagtccttcctttcttatccttggcactgaataaatctttggttttccataatcaaagggtgagggagacttcttttgtctacattattcagctttctgaaagctatgctgtgtccatttgagaaaaagccccagggatattgaaggtctgagaagttgagtggttcagtgtgttattatatttagggtcccagtaaagaagaactgaagcaactgtgagacaccagggcatacttccctgtatgagtggaaaacaaggcacggaaaatagctcacaggatagtcctcaactgacttgcttgaggataagcagcttcccttcgtgaagaagttgccatttctctggccttcatatttatctactttttgttattgttgtctgtatcggttcaatctcacactgctataaagaaatgcctgagactgggtaacttataaagaaaaaaggtttaattggctcatggttccatgggctgtacaggaagtatgactggggaggtctcagggagcttttactcatggcaaaaggcaaagccagagcaggtatcttcacagggctagagcaagaggaaaagagagaggggaggtgctacacactttttatgcaaccaaatctcatgagaactctatcacgagacagcagtagggggacagtgctaaatcattcatgagaaactacctgcgtggtccagtcaccttgcaccaggccccacctcccacattggggattacaattaaacatgagatttgggtggggatacagatctaaactgtatcattactcaaaaaaaaaaaaaaaaagaaagaaaagaaaacacaggaaaaggaactcacctcttttatcatcttagtatttagtactaatggtttagagcaggaattgacaaactgtggcctggactcatggaccaactctggcccaccacctgtttctcagaagaaaattttattggaactcagccacacttactcatttacatgttgtccttgactgcctttgtgtccagtgtcagaactgagtagctgcagcggaggttgtgcctctgggctttaatatcacaaacagagcagcttataagcaacagaaacttacttctcacagttttggaggctgggaagtccaagatcaaggtgtcaacatatttagggtctagggaaggtctgcttcttggttaatagaaagcacctttcactgtgtcttcacatggtagaaggggagagctctggtatcttcagccccttataagggcactaatcccattcatgagagctccaccctcacgacctaatcacctccaaaaggccccatttcgtaataccgtcagttaagtttcattatatgactttgatggggatatagcccatagtaggttgtatgtccctgaaagcctaaaatatttactgtttggctctttacagaaaatattttcttggcccctgttccagagcattcatcaagtcagataaagggtttaaaccagtcagagaaactaggtggaatggaaaagtactgagagataattggggacagaaaaataaaagagatgggaaatgctgcatcaaaatactcctacctctaggatgttactatatattgttaggagaattcaagttattgaaacttgccaaattcttgagtgaagaggaattcatttgagagccaaaatttgactaaggaaagaagaccaacatgggctttccaaagttgagtttgaattctgccatccccactaagcagtcatgtgaccttggaaaaactccctactctgagtctcagtttctttatctgtattaggtttcaacaaagggaataaatcattggcttctcatgaggttgtcataaggattaaataagacaatgcatataaaagaactggcagacaataaatatagagtcccccactcctgcttggtgctctctttctctctccttctctacatagagaagtgccagagcatccgtcagtagaagttacttaaggttggctgtgtcttccacatcttttgtttacccatgaagaactgtgaccatcttgttctgtgtcttgtcataaagatgggacgtgacttctttctgctcttgcttccatctggtgctgttttctgcacagcctccttgagaccttccagaaccttcttttttcctacttcatatcacttaaccagtagctatctgggatggttccagaggctgaagtttgcagttgaataacattttaaatagtgttaagcgacttgggatctctggccctttgcgtttcagtatttgtcctttttatgcctgatgtttaacctgccacatgtttgtactgcaacatgaatcttggaaattttaatgttatgcatttcaaatgtttttggttatctgtaaactaaatgtgcccttattggctcacttgtcaataaagatgtttgtatatgtattgtcagaaa

SEQ ID NO: 202039 - DNA, 5541 bp, Homo sapiens
  Payload ID: 19857
  Gene Name: zinc finger protein 286A
  Uniprot ID: Q9HBT8
  ENST ID: ENST00000421016
  CDS Start-End: 484-2049
cttcgatcgtccgattctcccagccgcaccacgggtgctcccacctgcggagaaccggagtctggcgatgccaaggcgcttctgggaattgtagttccgggcgggatgagggcagcacgcctggctccgctccttcttacgcatgcgcgactccgagctggccaaagaagttcgtcccctttgtgaggcccgggatgggaggtgcccggttcccccagggacagcttcaagcggtagggacagacatctgaggacccagcctcagggatgctgtccccgggcttccaggctccagcgccgtaggactgaggcagactccacggtgagaaagagacccgatctaacccaggcctttcatcagagcccaggagggaaggcaggaagtgggaccacgaggcccggggggcttctaactcgtctggccagggagatctgaattggggtgaagagcagaatctccagaacaaggaggaggtggtgatcatggagacagatttggctgaaatgcctgagaaaggagctctgtcttcccaggattctccccatttccaagagaagagcacagaagagggagaagtggctgctctgcgcctcacggccagatcccaggaaacagtgacattcaaggatgtggccatggactttacaccagaggagtgggggaagctggatcctgcacaaagggatgtgatgctggagaactataggaacctagtctcactttggcttccagtttccaaacctgagagctacaacttggagaatggaaaagaaccattgaagcttgagagaaaagcccccaaaagcagctattcagacatggagactagaccacagagcaaggattcaacttcagtgcaagatttttccaaagcagaatcatgcaaagttgcaataatagacagactgacacggaatagtgtctatgactctaacttggaagcagcccttgaatgtgaaaattggttagagaatcagcaaggaaatcaggagagacatttgagagaaatgttcactcacatgaattcactctctgaggaaacagaccataagcatgatgtatactggaaaagcttcaatcagaaatctgtccttatcactgaagacagagttcccaaaggatcttatgccttccatacacttgaaaaaagcttgaaacaaaaatcaaacttaatgaaaaagcagagaacttataaagagaaaaaacctcataaatgtaatgattgtggtgaactcttcacctaccattcagtgcttattcgacaccagagagtccatactggagagaaaccctatacctgcaatgaatgtgggaaatcttttagccacagagctaatttaactaaacaccagagaactcatactagaattctctttgaatgcagtgaatgcaagaaaaccttcacagaaagctcatcccttgcaacacatcagagaattcacgttggagagagaccttatgaatgcaatgaatgtgggaaaggttttaatcgaagtacacatcttgtgcagcatcagttgattcatactggagtgaagccttatgaatgtaatgaatgtgataaagcttttattcattcatcagcactcattaaacatcaaagaactcatactggagagaaaccttataaatgtcaagaatgtgggaaagcctttagccattgctcatccctaactaagcatcagagagttcatactggagaaaagccatatgaatgcagtgaatgtggaaaaacttttagtcagagcacacatcttgttcaacatcagagaattcacactggagagaaaccctatgagtgtaatgaatgtgggaaaaccttcagccggagctccaattttgctaaacatcaaagaattcatattggaaagaaaccgtacaaatgtagcgagtgtggaaaagccttcattcattcatcagctctcattcaacatcagagaactcataccggagagaaaccctttagatgtaatgagtgtgggaaaagctttaagtgcagttcatctctcatcagacatcaaagagttcacactgaagagcaaccctgaaaaattactgaatgtgaagaaatgtaagttggttttatcactgtattaaatacttgagtgtttaggtggaaggcgcatccataatatgcatgtgaggaccaattctgtatgcatctaatttcatttgcgtaatacatagttttgagccataagcaggttctttatgtccgttaatttgataattatgaaatctagccagcgatttcaaaattttaatctccaacgtcccaaatagctatctgtggaaattcaagaagtccctgagagtaggtagcagtacgaacattgtgaaatccagttttcccctctcttgtttatgtcagagctttgttgtaagcctctcactttgtaaggaaattcttattgggtaggttaggctgagggcttacatccttatcatcaggaagacacaatgttgttatttattactccttgagatctagatacacatatggtataattcatctagagtgtaatttcttttatattagccttaaaaaccaaaaatgctgggttcaaagtccttagaattcccttcctccctcaacaagctgctgtctatgttgatgaccataactgggatgtataatatttacagacaactctaagttacgttcacatggattatgtacatcattgatttttttttttttttttttttgagacagagtcttgctctgttgcccgggctggagtgcagtggcgcgatctcggctcactgcaacctccacctcccaggttcatgccattctcttgtctcagcctcccaagtagctgggactacaggcacctgccagtacgcctggctaattttttttgtatttttagtagagatggggtttcaccatgttagccaggatggtcttgatctcctgacctcgtgatctgcctgcctcggcctcccaaagtgctgggattacaggcatgagccaccatgcctggcatcatcattgatttatgtcattgttatccctctaccgcggagaccttctttcattttccatttccctgggagttcacgtgaagtagtgaatgggtcaaaatcttaacagtggttgttgatcaagtccttcctttcttatccttggcactgaataaatctttggttttccataatcaaagggtgagggagacttcttttgtctacattattcagctttctgaaagctatgctgtgtccatttgagaaaaagccccagggatattgaaggtctgagaagttgagtggttcagtgtgttattatatttagggtcccagtaaagaagaactgaagcaactgtgagacaccagggcatacttccctgtatgagtggaaaacaaggcacggaaaatagctcacaggatagtcctcaactgacttgcttgaggataagcagcttcccttcgtgaagaagttgccatttctctggccttcatatttatctactttttgttattgttgtctgtatcggttcaatctcacactgctataaagaaatgcctgagactgggtaacttataaagaaaaaaggtttaattggctcatggttccatgggctgtacaggaagtatgactggggaggtctcagggagcttttactcatggcaaaaggcaaagccagagcaggtatcttcacagggctagagcaagaggaaaagagagaggggaggtgctacacactttttatgcaaccaaatctcatgagaactctatcacgagacagcagtagggggacagtgctaaatcattcatgagaaactacctgcgtggtccagtcaccttgcaccaggccccacctcccacattggggattacaattaaacatgagatttgggtggggatacagatctaaactgtatcattactcaaaaaaaaaaaaaaaaagaaagaaaagaaaacacaggaaaaggaactcacctcttttatcatcttagtatttagtactaatggtttagagcaggaattgacaaactgtggcctggactcatggaccaactctggcccaccacctgtttctcagaagaaaattttattggaactcagccacacttactcatttacatgttgtccttgactgcctttgtgtccagtgtcagaactgagtagctgcagcggaggttgtgcctctgggctttaatatcacaaacagagcagcttataagcaacagaaacttacttctcacagttttggaggctgggaagtccaagatcaaggtgtcaacatatttagggtctagggaaggtctgcttcttggttaatagaaagcacctttcactgtgtcttcacatggtagaaggggagagctctggtatcttcagccccttataagggcactaatcccattcatgagagctccaccctcacgacctaatcacctccaaaaggccccatttcgtaataccgtcagttaagtttcattatatgactttgatggggatatagcccatagtaggttgtatgtccctgaaagcctaaaatatttactgtttggctctttacagaaaatattttcttggcccctgttccagagcattcatcaagtcagataaagggtttaaaccagtcagagaaactaggtggaatggaaaagtactgagagataattggggacagaaaaataaaagagatgggaaatgctgcatcaaaatactcctacctctaggatgttactatatattgttaggagaattcaagttattgaaacttgccaaattcttgagtgaagaggaattcatttgagagccaaaatttgactaaggaaagaagaccaacatgggctttccaaagttgagtttgaattctgccatccccactaagcagtcatgtgaccttggaaaaactccctactctgagtctcagtttctttatctgtattaggtttcaacaaagggaataaatcattggcttctcatgaggttgtcataaggattaaataagacaatgcatataaaagaactggcagacaataaatatagagtcccccactcctgcttggtgctctctttctctctccttctctacatagagaagtgccagagcatccgtcagtagaagttacttaaggttggctgtgtcttccacatcttttgtttacccatgaagaactgtgaccatcttgttctgtgtcttgtcataaagatgggacgtgacttctttctgctcttgcttccatctggtgctgttttctgcacagcctccttgagaccttccagaaccttcttttttcctacttcatatcacttaaccagtagctatctgggatggttccagaggctgaagtttgcagttgaataacattttaaatagtgttaagcgacttgggatctctggccctttgcgtttcagtatttgtcctttttatgcctgatgtttaacctgccacatgtttgtactgcaacatgaatcttggaaattttaatgttatgcatttcaaatgtttttggttatctgtaaactaaatgtgcccttattggctcacttgtcaataaagatgtttgtatatgtattgtc

SEQ ID NO: 202040 - DNA, 402 bp, Homo sapiens
  Payload ID: 19857
  Gene Name: zinc finger protein 286A
  ENST ID: ENST00000583031
  CDS Start-End: 221-402
ccctttgtgaggcccgggatgggaggctccagcgccgtaggactgaggcagactccacggtgagaaagagacccgatctaacccaggcctttcatcagagcccaggagggaaggcaggaagtgggaccacgaggcccggggggcttctaactcgtctggccagggagatctgaattggggtgaagagcagaatctccagaacaaggaggaggtggtgatcatggagacagatttggctgaaatgcctgagaaaggagctctgtcttcccaggattctccccatttccaagagaagagcacagaagagggagaagtggctgctctgcgcctcacggccagatcccagaactgcctttttgttgagcacagaaaacgaaggaaatttgcatttccaatgtcttt

SEQ ID NO: 202041 - DNA, 827 bp, Homo sapiens
  Payload ID: 19857
  Gene Name: zinc finger protein 286A
  ENST ID: ENST00000472486
  CDS Start-End: 33-353
caaagaagttcgtcccctttgtgaggcccgggatgggagctctgtcttcccaggattctccccatttccaagagaagagcacagaagagggagaagtggctgctctgcgcctcacggccagatcccaggaaacagtgacattcaaggatgtggccatggactttacaccagaggagtgggggaagctggatcctgcacaaagggatgtgatgctggagaactataggaacctagtctcactttggcttccagtttccaaacctgagagctacaacttggagaatggaaaagaaccattgaagcttgagagaaaagcccccaaaagcagctattcagaactgcctttttgttgagcacagaaaacgaaggaaatttgcatttccaatgtctttcagacatggagactagaccacagagcaaggattcaacttcagtgcaagatttttccaaagcagaatcatgcaaagttgcaataatagacagactgacacggaatagtgtctatgactctaacttggaagcagcccttgaatgtgaaaattggttagagaatcagcaaggaaatcaggagagacatttgagagaaatgttcactcacatgaattcactctctgaggaaacagaccataagcatgatgtatactggaaaagcttcaatcagaaatctgtccttatcactgaagacagagttcccaaaggatcttatgccttccatacacttgaaaaaagcttgaaacaaaaatcaaacttaatgaaaaagcagagaacttataaagagaaaaaacctcataaatgtaatgattgtggtgaactcttcacctaccatt

SEQ ID NO: 202042 - DNA, 527 bp, Homo sapiens
  Payload ID: 19857
  Gene Name: zinc finger protein 286A
  ENST ID: ENST00000580259
  CDS Start-End: 255-437
atgcgcgactccgagctggccaaagaagttcgtcccctttgtgaggcccgggatgggaggctccagcgccgtaggactgaggcagactccacggtgagaaagagacccgatctaacccaggcctttcatcagagcccaggagggaaggcaggaagtgggaccacgaggcccggggggcttctaactcgtctggccagggagatctgaattggggtgaagagcagaatctccagaacaaggaggaggtggtgatcatggagacagatttggctgaaatgcctgagaaaggagctctgtcttcccaggattctccccatttccaagagaagagcacagaagagggagaagtggctgctctgcgcctcacggccagatcccagggcttccagtttccaaacctgagagctacaacttggagaatggaaaagaaccattgaagcttgagagaaaagcccccaaaagcagctattcagacatggagactagaccacagagcaaggattcaacttcagtgcaagatttttcca

SEQ ID NO: 202043 - DNA, 541 bp, Homo sapiens
  Payload ID: 19857
  Gene Name: zinc finger protein 286A
  ENST ID: ENST00000580393
  CDS Start-End: 28-541
aagttcgtcccctttgtgaggcccgggatgggagagcccaggagggaaggcaggaagtgggaccacgaggcccggggggcttctaactcgtctggccagggagatctgaattggggtgaagagcagaatctccagaacaaggaggaggtggtgatcatggagacagatttggctgaaatgcctgagaaaggagctctgtcttcccaggattctccccatttccaagagaagagcacagaagagggagaagtggctgctctgcgcctcacggccagatcccaggaaacagtgacattcaaggatgtggccatggactttacaccagaggagtgggggaagctggatcctgcacaaagggatgtgatgctggagaactataggaacctagtctcactttggcttccagtttccaaacctgagagctacaacttggagaatggaaaagaaccattgaagcttgagagaaaagcccccaaaagcagctattcagacatggagactagaccacagagcaaggattcaacttcagtgcaagattttt

SEQ ID NO: 202044 - DNA, 607 bp, Homo sapiens
  Payload ID: 19857
  Gene Name: zinc finger protein 286A
  ENST ID: ENST00000585194
  CDS Start-End: 229-579
agttcgtcccctttgtgaggcccgggatgggaggctccagcgccgtaggactgaggcagactccacggtgagaaagagacccgatctaacccaggcctttcatcagagcccaggagggaaggcaggaagtgggaccacgaggcccggggggcttctaactcgtctggccagggagatctgaattggggtgaagagcagaatctccagaacaaggaggaggtggtgatcatggagacagatttggctgaaatgcctgagaaaggagctctgtcttcccaggattctccccatttccaagagaagagcacagaagagggagaagtggctgctctgcgcctcacggccagatcccaggaaacagtgacattcaaggatgtggccatggactttacaccagaggagtgggggaagctggatcctgcacaaagggatgtgatgctggagaactataggaacctagtctcactttggcttccagtttccaaacctgagagctacaacttggagaatggaaaagaaccattgaagcttgagagaaaagcccccaaaagcagctattcagaactgcctttttgttgagcacagaaaacgaaggaaatttgcattt

SEQ ID NO: 202045 - DNA, 560 bp, Homo sapiens
  Payload ID: 19857
  Gene Name: zinc finger protein 286A
  ENST ID: ENST00000581529
  CDS Start-End: 32-184
aaagaagttcgtcccctttgtgaggcccgggatgggagctctgtcttcccaggattctccccatttccaagagaagagcacagaagagggagaagtggctgctctgcgcctcacggccagatcccagggcttccagtttccaaacctgagagctacaacttggagaatggaaaagaaccattgaagcttgagagaaaagcccccaaaagcagctattcagacatggagactagaccacagagcaaggattcaacttcagtgcaagatttttccaaagcagaatcatgcaaagttgcaataatagacagactgacacggaatagtgtctatgactctaacttggaagcagcccttgaatgtgaaaattggttagagaatcagcaaggaaatcaggagagacatttgagagaaatgttcactcacatgaattcactctctgaggaaacagaccataagcatgatgtatactggaaaagcttcaatcagaaatctgtccttatcactgaagacagagttcccaaaggatcttatgccttccatacacttgaaaaaagcttgaa

SEQ ID NO: 202046 - DNA, 1806 bp, Homo sapiens
  Payload ID: 19857
  Gene Name: zinc finger protein 286A
  Uniprot ID: Q9HBT8
  ENST ID: ENST00000583566
  CDS Start-End: 241-1806
gctggccaaagaagttcgtcccctttgtgaggcccgggatgggaggctccagcgccgtaggactgaggcagactccacggtgagaaagagacccgatctaacccaggcctttcatcagagcccaggagggaaggcaggaagtgggaccacgaggcccggggggcttctaactcgtctggccagggagatctgaattggggtgaagagcagaatctccagaacaaggaggaggtggtgatcatggagacagatttggctgaaatgcctgagaaaggagctctgtcttcccaggattctccccatttccaagagaagagcacagaagagggagaagtggctgctctgcgcctcacggccagatcccaggaaacagtgacattcaaggatgtggccatggactttacaccagaggagtgggggaagctggatcctgcacaaagggatgtgatgctggagaactataggaacctagtctcactttggcttccagtttccaaacctgagagctacaacttggagaatggaaaagaaccattgaagcttgagagaaaagcccccaaaagcagctattcagacatggagactagaccacagagcaaggattcaacttcagtgcaagatttttccaaagcagaatcatgcaaagttgcaataatagacagactgacacggaatagtgtctatgactctaacttggaagcagcccttgaatgtgaaaattggttagagaatcagcaaggaaatcaggagagacatttgagagaaatgttcactcacatgaattcactctctgaggaaacagaccataagcatgatgtatactggaaaagcttcaatcagaaatctgtccttatcactgaagacagagttcccaaaggatcttatgccttccatacacttgaaaaaagcttgaaacaaaaatcaaacttaatgaaaaagcagagaacttataaagagaaaaaacctcataaatgtaatgattgtggtgaactcttcacctaccattcagtgcttattcgacaccagagagtccatactggagagaaaccctatacctgcaatgaatgtgggaaatcttttagccacagagctaatttaactaaacaccagagaactcatactagaattctctttgaatgcagtgaatgcaagaaaaccttcacagaaagctcatcccttgcaacacatcagagaattcacgttggagagagaccttatgaatgcaatgaatgtgggaaaggttttaatcgaagtacacatcttgtgcagcatcagttgattcatactggagtgaagccttatgaatgtaatgaatgtgataaagcttttattcattcatcagcactcattaaacatcaaagaactcatactggagagaaaccttataaatgtcaagaatgtgggaaagcctttagccattgctcatccctaactaagcatcagagagttcatactggagaaaagccatatgaatgcagtgaatgtggaaaaacttttagtcagagcacacatcttgttcaacatcagagaattcacactggagagaaaccctatgagtgtaatgaatgtgggaaaaccttcagccggagctccaattttgctaaacatcaaagaattcatattggaaagaaaccgtacaaatgtagcgagtgtggaaaagccttcattcattcatcagctctcattcaacatcagagaactcataccggagagaaaccctttagatgtaatgagtgtgggaaaagctttaagtgcagttcatctctcatcagacatcaaagagttcacactgaagagcaaccctga

SEQ ID NO: 202047 - DNA, 5616 bp, Homo sapiens
  Payload ID: 19857
  Gene Name: zinc finger protein 286A
  Uniprot ID: Q9HBT8
  ENST ID: ENST00000464847
  CDS Start-End: 554-2119
ggtgagttgcttgtggtgatgtcgctcgtctcggctcggcctcggcggtggttccccgggtcgttctgtgccgagtcggggctagagtgcgcgtttgttaaaggggcctcgagggcagaccatgagccctgtcccttctcactctggcctgatcctctcctcgggggacgcggttgtgccacgggcggggtggtcgcggggttctgggccagtgccccgagcgcggcagaatttgtccaaactcctgatgccccagcgtcacctcttccaggtgcccggttcccccagggacagcttcaagcggtagggacagacatctgaggacccagcctcagggatgctgtccccgggcttccaggctccagcgccgtaggactgaggcagactccacggtgagaaagagacccgatctaacccaggcctttcatcagagcccaggagggaaggcaggaagtgggaccacgaggcccggggggcttctaactcgtctggccagggagatctgaattggggtgaagagcagaatctccagaacaaggaggaggtggtgatcatggagacagatttggctgaaatgcctgagaaaggagctctgtcttcccaggattctccccatttccaagagaagagcacagaagagggagaagtggctgctctgcgcctcacggccagatcccaggaaacagtgacattcaaggatgtggccatggactttacaccagaggagtgggggaagctggatcctgcacaaagggatgtgatgctggagaactataggaacctagtctcactttggcttccagtttccaaacctgagagctacaacttggagaatggaaaagaaccattgaagcttgagagaaaagcccccaaaagcagctattcagacatggagactagaccacagagcaaggattcaacttcagtgcaagatttttccaaagcagaatcatgcaaagttgcaataatagacagactgacacggaatagtgtctatgactctaacttggaagcagcccttgaatgtgaaaattggttagagaatcagcaaggaaatcaggagagacatttgagagaaatgttcactcacatgaattcactctctgaggaaacagaccataagcatgatgtatactggaaaagcttcaatcagaaatctgtccttatcactgaagacagagttcccaaaggatcttatgccttccatacacttgaaaaaagcttgaaacaaaaatcaaacttaatgaaaaagcagagaacttataaagagaaaaaacctcataaatgtaatgattgtggtgaactcttcacctaccattcagtgcttattcgacaccagagagtccatactggagagaaaccctatacctgcaatgaatgtgggaaatcttttagccacagagctaatttaactaaacaccagagaactcatactagaattctctttgaatgcagtgaatgcaagaaaaccttcacagaaagctcatcccttgcaacacatcagagaattcacgttggagagagaccttatgaatgcaatgaatgtgggaaaggttttaatcgaagtacacatcttgtgcagcatcagttgattcatactggagtgaagccttatgaatgtaatgaatgtgataaagcttttattcattcatcagcactcattaaacatcaaagaactcatactggagagaaaccttataaatgtcaagaatgtgggaaagcctttagccattgctcatccctaactaagcatcagagagttcatactggagaaaagccatatgaatgcagtgaatgtggaaaaacttttagtcagagcacacatcttgttcaacatcagagaattcacactggagagaaaccctatgagtgtaatgaatgtgggaaaaccttcagccggagctccaattttgctaaacatcaaagaattcatattggaaagaaaccgtacaaatgtagcgagtgtggaaaagccttcattcattcatcagctctcattcaacatcagagaactcataccggagagaaaccctttagatgtaatgagtgtgggaaaagctttaagtgcagttcatctctcatcagacatcaaagagttcacactgaagagcaaccctgaaaaattactgaatgtgaagaaatgtaagttggttttatcactgtattaaatacttgagtgtttaggtggaaggcgcatccataatatgcatgtgaggaccaattctgtatgcatctaatttcatttgcgtaatacatagttttgagccataagcaggttctttatgtccgttaatttgataattatgaaatctagccagcgatttcaaaattttaatctccaacgtcccaaatagctatctgtggaaattcaagaagtccctgagagtaggtagcagtacgaacattgtgaaatccagttttcccctctcttgtttatgtcagagctttgttgtaagcctctcactttgtaaggaaattcttattgggtaggttaggctgagggcttacatccttatcatcaggaagacacaatgttgttatttattactccttgagatctagatacacatatggtataattcatctagagtgtaatttcttttatattagccttaaaaaccaaaaatgctgggttcaaagtccttagaattcccttcctccctcaacaagctgctgtctatgttgatgaccataactgggatgtataatatttacagacaactctaagttacgttcacatggattatgtacatcattgatttttttttttttttttttttgagacagagtcttgctctgttgcccgggctggagtgcagtggcgcgatctcggctcactgcaacctccacctcccaggttcatgccattctcttgtctcagcctcccaagtagctgggactacaggcacctgccagtacgcctggctaattttttttgtatttttagtagagatggggtttcaccatgttagccaggatggtcttgatctcctgacctcgtgatctgcctgcctcggcctcccaaagtgctgggattacaggcatgagccaccatgcctggcatcatcattgatttatgtcattgttatccctctaccgcggagaccttctttcattttccatttccctgggagttcacgtgaagtagtgaatgggtcaaaatcttaacagtggttgttgatcaagtccttcctttcttatccttggcactgaataaatctttggttttccataatcaaagggtgagggagacttcttttgtctacattattcagctttctgaaagctatgctgtgtccatttgagaaaaagccccagggatattgaaggtctgagaagttgagtggttcagtgtgttattatatttagggtcccagtaaagaagaactgaagcaactgtgagacaccagggcatacttccctgtatgagtggaaaacaaggcacggaaaatagctcacaggatagtcctcaactgacttgcttgaggataagcagcttcccttcgtgaagaagttgccatttctctggccttcatatttatctactttttgttattgttgtctgtatcggttcaatctcacactgctataaagaaatgcctgagactgggtaacttataaagaaaaaaggtttaattggctcatggttccatgggctgtacaggaagtatgactggggaggtctcagggagcttttactcatggcaaaaggcaaagccagagcaggtatcttcacagggctagagcaagaggaaaagagagaggggaggtgctacacactttttatgcaaccaaatctcatgagaactctatcacgagacagcagtagggggacagtgctaaatcattcatgagaaactacctgcgtggtccagtcaccttgcaccaggccccacctcccacattggggattacaattaaacatgagatttgggtggggatacagatctaaactgtatcattactcaaaaaaaaaaaaaaaaagaaagaaaagaaaacacaggaaaaggaactcacctcttttatcatcttagtatttagtactaatggtttagagcaggaattgacaaactgtggcctggactcatggaccaactctggcccaccacctgtttctcagaagaaaattttattggaactcagccacacttactcatttacatgttgtccttgactgcctttgtgtccagtgtcagaactgagtagctgcagcggaggttgtgcctctgggctttaatatcacaaacagagcagcttataagcaacagaaacttacttctcacagttttggaggctgggaagtccaagatcaaggtgtcaacatatttagggtctagggaaggtctgcttcttggttaatagaaagcacctttcactgtgtcttcacatggtagaaggggagagctctggtatcttcagccccttataagggcactaatcccattcatgagagctccaccctcacgacctaatcacctccaaaaggccccatttcgtaataccgtcagttaagtttcattatatgactttgatggggatatagcccatagtaggttgtatgtccctgaaagcctaaaatatttactgtttggctctttacagaaaatattttcttggcccctgttccagagcattcatcaagtcagataaagggtttaaaccagtcagagaaactaggtggaatggaaaagtactgagagataattggggacagaaaaataaaagagatgggaaatgctgcatcaaaatactcctacctctaggatgttactatatattgttaggagaattcaagttattgaaacttgccaaattcttgagtgaagaggaattcatttgagagccaaaatttgactaaggaaagaagaccaacatgggctttccaaagttgagtttgaattctgccatccccactaagcagtcatgtgaccttggaaaaactccctactctgagtctcagtttctttatctgtattaggtttcaacaaagggaataaatcattggcttctcatgaggttgtcataaggattaaataagacaatgcatataaaagaactggcagacaataaatatagagtcccccactcctgcttggtgctctctttctctctccttctctacatagagaagtgccagagcatccgtcagtagaagttacttaaggttggctgtgtcttccacatcttttgtttacccatgaagaactgtgaccatcttgttctgtgtcttgtcataaagatgggacgtgacttctttctgctcttgcttccatctggtgctgttttctgcacagcctccttgagaccttccagaaccttcttttttcctacttcatatcacttaaccagtagctatctgggatggttccagaggctgaagtttgcagttgaataacattttaaatagtgttaagcgacttgggatctctggccctttgcgtttcagtatttgtcctttttatgcctgatgtttaacctgccacatgtttgtactgcaacatgaatcttggaaattttaatgttatgcatttcaaatgtttttggttatctgtaaactaaatgtgcccttattggctcacttgtcaataaagatgtttgtatatgtattgtcagaaa

SEQ ID NO: 202048 - DNA, 5222 bp, Homo sapiens
  Payload ID: 19857
  Gene Name: zinc finger protein 286A
  Uniprot ID: Q9HBT8
  ENST ID: ENST00000593105
  CDS Start-End: 195-1730
cttcgatcgtccgattctcccagccgcaccacgggtgctcccacctgcggagaaccggagtctggcgatgccaaggcgcttctgggaattgtagttccgggcgggatgagggcagcacgcctggctccgctccttcttacgcatgcgcgactccgagctggccaaagaagttcgtcccctttgtgaggcccgggatgggagctctgtcttcccaggattctccccatttccaagagaagagcacagaagagggagaagtggctgctctgcgcctcacggccagatcccaggaaacagtgacattcaaggatgtggccatggactttacaccagaggagtgggggaagctggatcctgcacaaagggatgtgatgctggagaactataggaacctagtctcactttggcttccagtttccaaacctgagagctacaacttggagaatggaaaagaaccattgaagcttgagagaaaagcccccaaaagcagctattcagacatggagactagaccacagagcaaggattcaacttcagtgcaagatttttccaaagcagaatcatgcaaagttgcaataatagacagactgacacggaatagtgtctatgactctaacttggaagcagcccttgaatgtgaaaattggttagagaatcagcaaggaaatcaggagagacatttgagagaaatgttcactcacatgaattcactctctgaggaaacagaccataagcatgatgtatactggaaaagcttcaatcagaaatctgtccttatcactgaagacagagttcccaaaggatcttatgccttccatacacttgaaaaaagcttgaaacaaaaatcaaacttaatgaaaaagcagagaacttataaagagaaaaaacctcataaatgtaatgattgtggtgaactcttcacctaccattcagtgcttattcgacaccagagagtccatactggagagaaaccctatacctgcaatgaatgtgggaaatcttttagccacagagctaatttaactaaacaccagagaactcatactagaattctctttgaatgcagtgaatgcaagaaaaccttcacagaaagctcatcccttgcaacacatcagagaattcacgttggagagagaccttatgaatgcaatgaatgtgggaaaggttttaatcgaagtacacatcttgtgcagcatcagttgattcatactggagtgaagccttatgaatgtaatgaatgtgataaagcttttattcattcatcagcactcattaaacatcaaagaactcatactggagagaaaccttataaatgtcaagaatgtgggaaagcctttagccattgctcatccctaactaagcatcagagagttcatactggagaaaagccatatgaatgcagtgaatgtggaaaaacttttagtcagagcacacatcttgttcaacatcagagaattcacactggagagaaaccctatgagtgtaatgaatgtgggaaaaccttcagccggagctccaattttgctaaacatcaaagaattcatattggaaagaaaccgtacaaatgtagcgagtgtggaaaagccttcattcattcatcagctctcattcaacatcagagaactcataccggagagaaaccctttagatgtaatgagtgtgggaaaagctttaagtgcagttcatctctcatcagacatcaaagagttcacactgaagagcaaccctgaaaaattactgaatgtgaagaaatgtaagttggttttatcactgtattaaatacttgagtgtttaggtggaaggcgcatccataatatgcatgtgaggaccaattctgtatgcatctaatttcatttgcgtaatacatagttttgagccataagcaggttctttatgtccgttaatttgataattatgaaatctagccagcgatttcaaaattttaatctccaacgtcccaaatagctatctgtggaaattcaagaagtccctgagagtaggtagcagtacgaacattgtgaaatccagttttcccctctcttgtttatgtcagagctttgttgtaagcctctcactttgtaaggaaattcttattgggtaggttaggctgagggcttacatccttatcatcaggaagacacaatgttgttatttattactccttgagatctagatacacatatggtataattcatctagagtgtaatttcttttatattagccttaaaaaccaaaaatgctgggttcaaagtccttagaattcccttcctccctcaacaagctgctgtctatgttgatgaccataactgggatgtataatatttacagacaactctaagttacgttcacatggattatgtacatcattgatttttttttttttttttttttgagacagagtcttgctctgttgcccgggctggagtgcagtggcgcgatctcggctcactgcaacctccacctcccaggttcatgccattctcttgtctcagcctcccaagtagctgggactacaggcacctgccagtacgcctggctaattttttttgtatttttagtagagatggggtttcaccatgttagccaggatggtcttgatctcctgacctcgtgatctgcctgcctcggcctcccaaagtgctgggattacaggcatgagccaccatgcctggcatcatcattgatttatgtcattgttatccctctaccgcggagaccttctttcattttccatttccctgggagttcacgtgaagtagtgaatgggtcaaaatcttaacagtggttgttgatcaagtccttcctttcttatccttggcactgaataaatctttggttttccataatcaaagggtgagggagacttcttttgtctacattattcagctttctgaaagctatgctgtgtccatttgagaaaaagccccagggatattgaaggtctgagaagttgagtggttcagtgtgttattatatttagggtcccagtaaagaagaactgaagcaactgtgagacaccagggcatacttccctgtatgagtggaaaacaaggcacggaaaatagctcacaggatagtcctcaactgacttgcttgaggataagcagcttcccttcgtgaagaagttgccatttctctggccttcatatttatctactttttgttattgttgtctgtatcggttcaatctcacactgctataaagaaatgcctgagactgggtaacttataaagaaaaaaggtttaattggctcatggttccatgggctgtacaggaagtatgactggggaggtctcagggagcttttactcatggcaaaaggcaaagccagagcaggtatcttcacagggctagagcaagaggaaaagagagaggggaggtgctacacactttttatgcaaccaaatctcatgagaactctatcacgagacagcagtagggggacagtgctaaatcattcatgagaaactacctgcgtggtccagtcaccttgcaccaggccccacctcccacattggggattacaattaaacatgagatttgggtggggatacagatctaaactgtatcattactcaaaaaaaaaaaaaaaaagaaagaaaagaaaacacaggaaaaggaactcacctcttttatcatcttagtatttagtactaatggtttagagcaggaattgacaaactgtggcctggactcatggaccaactctggcccaccacctgtttctcagaagaaaattttattggaactcagccacacttactcatttacatgttgtccttgactgcctttgtgtccagtgtcagaactgagtagctgcagcggaggttgtgcctctgggctttaatatcacaaacagagcagcttataagcaacagaaacttacttctcacagttttggaggctgggaagtccaagatcaaggtgtcaacatatttagggtctagggaaggtctgcttcttggttaatagaaagcacctttcactgtgtcttcacatggtagaaggggagagctctggtatcttcagccccttataagggcactaatcccattcatgagagctccaccctcacgacctaatcacctccaaaaggccccatttcgtaataccgtcagttaagtttcattatatgactttgatggggatatagcccatagtaggttgtatgtccctgaaagcctaaaatatttactgtttggctctttacagaaaatattttcttggcccctgttccagagcattcatcaagtcagataaagggtttaaaccagtcagagaaactaggtggaatggaaaagtactgagagataattggggacagaaaaataaaagagatgggaaatgctgcatcaaaatactcctacctctaggatgttactatatattgttaggagaattcaagttattgaaacttgccaaattcttgagtgaagaggaattcatttgagagccaaaatttgactaaggaaagaagaccaacatgggctttccaaagttgagtttgaattctgccatccccactaagcagtcatgtgaccttggaaaaactccctactctgagtctcagtttctttatctgtattaggtttcaacaaagggaataaatcattggcttctcatgaggttgtcataaggattaaataagacaatgcatataaaagaactggcagacaataaatatagagtcccccactcctgcttggtgctctctttctctctccttctctacatagagaagtgccagagcatccgtcagtagaagttacttaaggttggctgtgtcttccacatcttttgtttacccatgaagaactgtgaccatcttgttctgtgtcttgtcataaagatgggacgtgacttctttctgctcttgcttccatctggtgctgttttctgcacagcctccttgagaccttccagaaccttcttttttcctacttcatatcacttaaccagtagctatctgggatggttccagaggctgaagtttgcagttgaataacattttaaatagtgttaagcgacttgggatctctggccctttgcgtttcagtatttgtcctttttatgcctgatgtttaacctgccacatgtttgtactgcaacatgaatcttggaaattttaatgttatgcatttcaaatgtttttggttatctgtaaactaaatgtgcccttattggctcacttgtcaataaagatgtttgtatatgtattgtc

SEQ ID NO: 202049 - DNA, 427 bp, Homo sapiens
  Payload ID: 19857
  Gene Name: zinc finger protein 286A
  ENST ID: ENST00000481540
  CDS Start-End: 1-279
gagggagaagtggctgctctgcgcctcacggccagatcccaggaaacagtgacattcaaggatgtggccatggactttacaccagaggagtgggggaagctggatcctgcacaaagggatgtgatgctggagaactataggaacctagtctcactttggcttccagtttccaaacctgagagctacaacttggagaatggaaaagaaccattgaagcttgagagaaaagcccccaaaagcagctattcaggtgagccagatagatgggagtcttcataaatgatagcccagcaggacaatgaagaaatacttttcagtgcttaagaaagtgcctgtgtgcccttatttttaaatttttttaaaattctaaagcatttaaaatatatacagaagtccagaaaataaaataacattcatgtatccatca

SEQ ID NO: 202050 - DNA, 574 bp, Homo sapiens
  Payload ID: 19857
  Gene Name: zinc finger protein 286A
  ENST ID: ENST00000579694
  CDS Start-End: 218-574
aaagaagttcgtcccctttgtgaggcccgggatgggagaactataggaacctagtctcactttggcttccagtttccaaacctgagagctacaacttggagaatggaaaagaaccattgaagcttgagagaaaagcccccaaaagcagctattcagaactgcctttttgttgagcacagaaaacgaaggaaatttgcatttccaatgtctttcagacatggagactagaccacagagcaaggattcaacttcagtgcaagatttttccaaagcagaatcatgcaaagttgcaataatagacagactgacacggaatagtgtctatgactctaacttggaagcagcccttgaatgtgaaaattggttagagaatcagcaaggaaatcaggagagacatttgagagaaatgttcactcacatgaattcactctctgaggaaacagaccataagcatgatgtatactggaaaagcttcaatcagaaatctgtccttatcactgaagacagagttcccaaaggatcttatgccttccatacacttgaaaaaagcttgaaacaaaaatcaaacttaatg

SEQ ID NO: 202051 - DNA, 5145 bp, Homo sapiens
  Payload ID: 19858
  Gene Name: zinc finger protein 286B
  ENST ID: ENST00000285274
  CDS Start-End: 221-418
ccctttgtgaggcccgggatgggaggctccagcgccgtaggactgaggcagactccacggtgagaaagagacccgatctaacccaggcctttcatcagagcccaggagggaaggcaggaagtgggaccacgaggcccggggggcttctaactcgtctggccagggagatctgaattggggtgaagagcagaatctccagaacaaggaggaggtggtgatcatggagacagatttggctgaaatgcctgagaaaggagttctgtcttcccaggattctccccatttccaagagaagagcacagaagagggagaagtggctgctctgcgcctcacggccagatcccagaactgcctttttgttgagcacagaaaacgaaggaaatttgcatttccaatgtccttcagacgtggagactagaccacagagcaaggattcaacttcagtgcaagatttttccaaagcagaatcatgcaaagttgcaataatagacagactgacacggaatagtgtctatgactctaacttggaagcagcccttgaatgtgaaaattggttagagaagcagcaaggaaatcaggagagacatttgagagaaatgttcactcacatgaattcactctctgaggaaacagaccatgagcatgatgtatactggaaaagcttcaatcagaaatctgtccttatcactgaagacagagttcccaaaggatcttatgccttccatacacttgaaaaaagcttgaaacaaaaatcaaacttaatgaaaaagcagagaacttataaagagaaaaaacctcataaatgtaatgattgtggtgaactcttcacctgccattcagtgcatattcaacaccagagagtccatactggagagaaaccctatacctgcaatgaatgtgggaaatcttttagccacagagctaatttaactaaacaccagagaactcatactagaattctctttgaatgccgtgaatgtaagaaaaccttcacagaaagctcatcccttgcaacacatcagagaattcacgttggagagagaccttatgaatgcaatgaatgtgggaaaggttttaatcgaagtacacatcttgtgcagcatcagttgattcatactggagtgaggccttatgaatgtaatgaatgtgataaagcttttattcattcatcagcactcattaaacatcaaagaactcatactggagagaaaccttataaatgtcaagaatgtgggaaagcctttagccattgctcatccctaactaagcatcagagagttcatactggagaaaagccatatgaatgcagtgaatgtggaaaaacttttagtcagagcacacatcttgttcaacatcagagaattcacactggagagaaaccctatgagtgtagtgaatgtgggaaaaccttcagccagagctccaattttgctaaacatcaaagaattcatattggaaagaaaccgtacaaatgtagtgagtgtggaaaagccttcattcattcatcagctcttattcaacatcagagaactcataccggagagaaaccctttagatgtaatgagtgtgggaaaagctttaagtgcagttcatctctcatcagacatcaaagagttcacactgaagagcaaccctgaaaaattactgaatgtgaagaaatgtaagttggttttatcactatattaaatacttgagtgtttaggtggaaggcccatccataatatgcatgtgaggaccaattctatatgcatctaatttcatttgtgtaatacatagttttgagccataggcaggttctttatgtccgttaatttgataattatgaaatctagccagcgatttcaaaattttaatctccaacctcccaaatagctatctgtggaaattcaagaagtccctgagagtgggtagcagtacaaacattgtgaaatccagttttcccctctcttgtttatgtcagagctttgttgtaagcctctcactttgtaaggaaattcttattgggtaggttaggctgagggcttacatccttatcatcaggaagacacaatgttgttatttattactccttgagatctagatacacatatggtataattcatctagagtgtcatttcttttatattagccttaaaaaccaaaaatgctgggttcaaagtccttagcattcccttcctccctcaacaagctgctgtctattttgatgaccataactaggatgtataatatttacagacaattctaatttatgttcacatggattatgtacatcattgatttttttttttttttttttttgagacagagtctcgctctgttgcccgggctggagtgcagtggcgtgatctcagctcactgcaacctccacctcccaggttcatgccattctcttgtctcagcctcctgagtagctgggactacaggcacctgccagtacgcctggctaattttttttgtatttttagtagagatggggtttcaccatgttagccaggatggtcttgatctcctgacctcgtgatctgcctgcctcggcctcccaaagtgctgggattacaggcgtgagccaccatgcctggcatcatcattgatttatgtcattgttatccctctaccgcggagaccttctttcattttccatttccctgggagttcacgtgaagtagtgaatgggtcaaaatcttaacagtggttgttgatcaagtccttcctttcttatccttggcactgaataaatctttggttttccataatcaaagggtgagggagacttcttttgtctacattattcagctttctgaaagctatgctgtgtccatttgagaaaaagccccagggatattgaaggtctgagaagttgagtggttcagtgtgttattatatttagggtcccagtaaagaagaactgaagcaactgtgagacaccagggcatacttccctgtatgagtggaaaacaaggtacggaaaatagctcacaggatagtcctcaactgacttgcttgaggataagcagcttcccttcatgaagaagttgccatttctctggccttcatatttacctactttttgttattgttatctgtatcggttcaatctcacactgctataaagaaatgcctgagactgggtaacttataaagaaaaaaggtttaattggctcatggttccatgggctgtacaggaagtatgactggggaggtctcagggagcttttactcatggcaaaaggcaaagccagagcaggtatcttcacagggctagagcaagaggaaaagagagaggggaggtgctacacactttttatgcaaccaaatctcatgagaactctatcacgagacagcagtagggggacagtgctaaatcattcatgagaaactacctgcgtggtccagtcaccttgcaccaggccccacctcccacattggggattacaattaaacatgagatttgggtggggatacagatctaaactgtatcattactcaaaaaaaaaaaaaaaagaaaaaagaaagaaaacacaggaaaaggaactcacctcttttatcatcttagtatttagtactaatggtttagagcaggagttgacaaactgtggcctggactcatggaccaactctggcccaccacctgtttctcagaagaaaattttattggaactcagccacacttactcatttacatgttgtccttgactgcctttgtgtccagtgtcagaactgagtagctgcagcggaggttgtgcctctgggctttaatatcacaaacagagcagcttataagcaacagaaacttacttctcacagttttggaggctgggaagtccaagatcaaggtgtcaacatatttagggtctagggaaggtctgcttcttggttaatagaaagcacctttcactgtgtcttcacatggtagaaggggagagctctggtatcttcaggcccttataagggcactaatcccattcatgagcgctccaccctcacgacctaatcacctccaaaaggccccatttcataataccatcaattaagtttcattatatgactttgatggggatatagcccatagtaggttctatgtccctgaaagcctaaaatatttactgtttggctctttacagaaaatattttcttggcccctgttccagagcattcatcaagaagtcagataaagggtttaaaccagtcagagaaagtaggtggaatggaaaagttgaacttactgagagataactggggacagaaaaataaaagaggtgggaaatgatgcatcaaaatactcctacctctaggatgttactatatattgtcaggagaattcaagttattgaaacttgccaaattcttgagtgaaaagaaattcatttgagggccaaaatttgactaaggaaagaagaccaacatgggctttccaaagttgagtttgaattctgccatccccactaagcagtcatgtgaccttggaaaaactccctactctgagtctcagtttctttatctgtattaggtttcaacaaagggaataaatcattggcttctcatgaggttgtcataaggattaaataagacaatgcatacaaaagaactggcagacaataaatatagagtcccccactcctgcttggtgctctctttctctctccttctctacatagagaagtgccagagcatccgtcagtagaagttacttaaggttggctgtgtcttccacatcttttgtttacccatgaagaactgtgaccatcttgttctgtggcttgtcataaagatgggacgtgacttctttctgctcttgcttccatctggtgctgttttctgcacagcctccttgagaccttccagaaccttcttttttcctacttcgtatcacttaaccagtagctatctgggatggttccagaggctgaagtttgcagttgaataacattttaaatagtgttaagcgacttgggatctctggccctttgcgtttcagtatttgtcctttttatgcctgatgtttaacctgccacatgtttgtactgcaacatgaatcttggaaattttaatgttatgcatttcaaatgtttttggttatctgtaaactaaatgtgcccttattggctcacttgtcaataaagatgtttgtatatgttttgtcagaaa

SEQ ID NO: 202052 - DNA, 504 bp, Homo sapiens
  Payload ID: 19858
  Gene Name: zinc finger protein 286B
  ENST ID: ENST00000443457
  CDS Start-End: 168-504
tccacggtgagaaagagacccgatctaacccaggcctttcatcagagcccaggagggaaggcaggaagtgggaccacgaggcccggggggcttctaactcgtctggccagggagatctgaattggggtgaagagcagaatctccagaacaaggaggaggtggtgatcatggagacagatttggctgaaatgcctgagaaaggaggtgagaattgcggacgtgttgaacttgtagcgtggaaggacgaaattcctgctcctgaagggaaaacggttggctcaggggaggtggctcttggctggctgtctccattgtcttggggatggatgggctttttaagtgagactgaagagcttggtatgggagcaccgccctttccatggcagctgggcacacagtggacccttcaaagctacccccaaaatttctgtcttcccaggattctccccatttccaagagaagagcacagaagagggagaagtggctgctctgcgcctcacggc

SEQ ID NO: 202053 - DNA, 5328 bp, Homo sapiens
  Payload ID: 19858
  Gene Name: zinc finger protein 286B
  Uniprot ID: P0CG31
  ENST ID: ENST00000545289
  CDS Start-End: 252-1820
cgcgactccgagctggccaaagaagttcgtcccctttgtgaggcccgggatgggaggctccagcgccgtaggactgaggcagactccacggtgagaaagagacccgatctaacccaggcctttcatcagagcccaggagggaaggcaggaagtgggaccacgaggcccggggggcttctaactcgtctggccagggagatctgaattggggtgaagagcagaatctccagaacaaggaggaggtggtgatcatggagacagatttggctgaaatgcctgagaaaggagttctgtcttcccaggattctccccatttccaagagaagagcacagaagagggagaagtggctgctctgcgcctcacggccagatcccaggcggcggcggcggcggcggcgcccgggagccggagccttcgcggcgtccacgtccctcccccgctgcaccccgccccggcgcgagaggagatcaaatccacttgctccttgaaggcatgcttttcactttcattaactcttacctattacagaactgcctttttgttgagcacagaaaacgaaggaaatttgcatttccaatgtccttcagacgtggagactagaccacagagcaaggattcaacttcagtgcaagatttttccaaagcagaatcatgcaaagttgcaataatagacagactgacacggaatagtgtctatgactctaacttggaagcagcccttgaatgtgaaaattggttagagaagcagcaaggaaatcaggagagacatttgagagaaatgttcactcacatgaattcactctctgaggaaacagaccatgagcatgatgtatactggaaaagcttcaatcagaaatctgtccttatcactgaagacagagttcccaaaggatcttatgccttccatacacttgaaaaaagcttgaaacaaaaatcaaacttaatgaaaaagcagagaacttataaagagaaaaaacctcataaatgtaatgattgtggtgaactcttcacctgccattcagtgcatattcaacaccagagagtccatactggagagaaaccctatacctgcaatgaatgtgggaaatcttttagccacagagctaatttaactaaacaccagagaactcatactagaattctctttgaatgccgtgaatgtaagaaaaccttcacagaaagctcatcccttgcaacacatcagagaattcacgttggagagagaccttatgaatgcaatgaatgtgggaaaggttttaatcgaagtacacatcttgtgcagcatcagttgattcatactggagtgaggccttatgaatgtaatgaatgtgataaagcttttattcattcatcagcactcattaaacatcaaagaactcatactggagagaaaccttataaatgtcaagaatgtgggaaagcctttagccattgctcatccctaactaagcatcagagagttcatactggagaaaagccatatgaatgcagtgaatgtggaaaaacttttagtcagagcacacatcttgttcaacatcagagaattcacactggagagaaaccctatgagtgtagtgaatgtgggaaaaccttcagccagagctccaattttgctaaacatcaaagaattcatattggaaagaaaccgtacaaatgtagtgagtgtggaaaagccttcattcattcatcagctcttattcaacatcagagaactcataccggagagaaaccctttagatgtaatgagtgtgggaaaagctttaagtgcagttcatctctcatcagacatcaaagagttcacactgaagagcaaccctgaaaaattactgaatgtgaagaaatgtaagttggttttatcactatattaaatacttgagtgtttaggtggaaggcccatccataatatgcatgtgaggaccaattctatatgcatctaatttcatttgtgtaatacatagttttgagccataggcaggttctttatgtccgttaatttgataattatgaaatctagccagcgatttcaaaattttaatctccaacctcccaaatagctatctgtggaaattcaagaagtccctgagagtgggtagcagtacaaacattgtgaaatccagttttcccctctcttgtttatgtcagagctttgttgtaagcctctcactttgtaaggaaattcttattgggtaggttaggctgagggcttacatccttatcatcaggaagacacaatgttgttatttattactccttgagatctagatacacatatggtataattcatctagagtgtcatttcttttatattagccttaaaaaccaaaaatgctgggttcaaagtccttagcattcccttcctccctcaacaagctgctgtctattttgatgaccataactaggatgtataatatttacagacaattctaatttatgttcacatggattatgtacatcattgatttttttttttttttttttttgagacagagtctcgctctgttgcccgggctggagtgcagtggcgtgatctcagctcactgcaacctccacctcccaggttcatgccattctcttgtctcagcctcctgagtagctgggactacaggcacctgccagtacgcctggctaattttttttgtatttttagtagagatggggtttcaccatgttagccaggatggtcttgatctcctgacctcgtgatctgcctgcctcggcctcccaaagtgctgggattacaggcgtgagccaccatgcctggcatcatcattgatttatgtcattgttatccctctaccgcggagaccttctttcattttccatttccctgggagttcacgtgaagtagtgaatgggtcaaaatcttaacagtggttgttgatcaagtccttcctttcttatccttggcactgaataaatctttggttttccataatcaaagggtgagggagacttcttttgtctacattattcagctttctgaaagctatgctgtgtccatttgagaaaaagccccagggatattgaaggtctgagaagttgagtggttcagtgtgttattatatttagggtcccagtaaagaagaactgaagcaactgtgagacaccagggcatacttccctgtatgagtggaaaacaaggtacggaaaatagctcacaggatagtcctcaactgacttgcttgaggataagcagcttcccttcatgaagaagttgccatttctctggccttcatatttacctactttttgttattgttatctgtatcggttcaatctcacactgctataaagaaatgcctgagactgggtaacttataaagaaaaaaggtttaattggctcatggttccatgggctgtacaggaagtatgactggggaggtctcagggagcttttactcatggcaaaaggcaaagccagagcaggtatcttcacagggctagagcaagaggaaaagagagaggggaggtgctacacactttttatgcaaccaaatctcatgagaactctatcacgagacagcagtagggggacagtgctaaatcattcatgagaaactacctgcgtggtccagtcaccttgcaccaggccccacctcccacattggggattacaattaaacatgagatttgggtggggatacagatctaaactgtatcattactcaaaaaaaaaaaaaaaagaaaaaagaaagaaaacacaggaaaaggaactcacctcttttatcatcttagtatttagtactaatggtttagagcaggagttgacaaactgtggcctggactcatggaccaactctggcccaccacctgtttctcagaagaaaattttattggaactcagccacacttactcatttacatgttgtccttgactgcctttgtgtccagtgtcagaactgagtagctgcagcggaggttgtgcctctgggctttaatatcacaaacagagcagcttataagcaacagaaacttacttctcacagttttggaggctgggaagtccaagatcaaggtgtcaacatatttagggtctagggaaggtctgcttcttggttaatagaaagcacctttcactgtgtcttcacatggtagaaggggagagctctggtatcttcaggcccttataagggcactaatcccattcatgagcgctccaccctcacgacctaatcacctccaaaaggccccatttcataataccatcaattaagtttcattatatgactttgatggggatatagcccatagtaggttctatgtccctgaaagcctaaaatatttactgtttggctctttacagaaaatattttcttggcccctgttccagagcattcatcaagaagtcagataaagggtttaaaccagtcagagaaagtaggtggaatggaaaagttgaacttactgagagataactggggacagaaaaataaaagaggtgggaaatgatgcatcaaaatactcctacctctaggatgttactatatattgtcaggagaattcaagttattgaaacttgccaaattcttgagtgaaaagaaattcatttgagggccaaaatttgactaaggaaagaagaccaacatgggctttccaaagttgagtttgaattctgccatccccactaagcagtcatgtgaccttggaaaaactccctactctgagtctcagtttctttatctgtattaggtttcaacaaagggaataaatcattggcttctcatgaggttgtcataaggattaaataagacaatgcatacaaaagaactggcagacaataaatatagagtcccccactcctgcttggtgctctctttctctctccttctctacatagagaagtgccagagcatccgtcagtagaagttacttaaggttggctgtgtcttccacatcttttgtttacccatgaagaactgtgaccatcttgttctgtggcttgtcataaagatgggacgtgacttctttctgctcttgcttccatctggtgctgttttctgcacagcctccttgagaccttccagaaccttcttttttcctacttcgtatcacttaaccagtagctatctgggatggttccagaggctgaagtttgcagttgaataacattttaaatagtgttaagcgacttgggatctctggccctttgcgtttcagtatttgtcctttttatgcctgatgtttaacctgccacatgtttgtactgcaacatgaatcttggaaattttaatgttatgcatttcaaatgtttttggttatctgtaaactaaatgtgcccttattggctcacttgtcaataaagatgtttgtatatgttttgtcagaaa

SEQ ID NO: 202054 - DNA, 640 bp, Homo sapiens
  Payload ID: 19858
  Gene Name: zinc finger protein 286B
  ENST ID: ENST00000580145
  CDS Start-End: 252-640
cgcgactccgagctggccaaagaagttcgtcccctttgtgaggcccgggatgggaggctccagcgccgtaggactgaggcagactccacggtgagaaagagacccgatctaacccaggcctttcatcagagcccaggagggaaggcaggaagtgggaccacgaggcccggggggcttctaactcgtctggccagggagatctgaattggggtgaagagcagaatctccagaacaaggaggaggtggtgatcatggagacagatttggctgaaatgcctgagaaaggagttctgtcttcccaggattctccccatttccaagagaagagcacagaagagggagaagtggctgctctgcgcctcacggccagatcccaggcggcggcggcggcggcggcgcccgggagccggagccttcgcggcgtccacgtccctcccccgctgcaccccgccccggcgcgagaggagagcgcgagaaccccagccgcggccgggcgggcggcgaagatggcagaggcaccggcttccccggccccgctttctccgctcgaagtggagctggacccggagttcgagccccagagccgtccgcgatcctgtacgtggcccctgcaaaggccggagctccaagcgagccctgc

SEQ ID NO: 202055 - DNA, 525 bp, Homo sapiens
  Payload ID: 19858
  Gene Name: zinc finger protein 286B
  ENST ID: ENST00000583002
  CDS Start-End: 208-525
ccgggcttccaggctccagcgccgtaggactgaggcagactccacggtgagaaagagacccgatctaacccaggcctttcatcagagcccaggagggaaggcaggaagtgggaccacgaggcccggggggcttctaactcgtctggccagggagatctgaattggggtgaagagcagaatctccagaacaaggaggaggtggtgatcatggagacagatttggctgaaatgcctgagaaaggagttctgtcttcccaggattctccccatttccaagagaagagcacagaagagggagaagtggctgctctgcgcctcacggccagatcccaggcggcggcggcggcggcggcgcccgggagccggagccttcgcggcgtccacgtccctcccccgctgcaccccgccccggcgcgagaggagagcgcgagaaccccagccgcggccgggcgggcggcgaagatggcagaggcaccggcttccccggccccgctttctccgctcgaagtggagctggacccggag

SEQ ID NO: 202056 - DNA, 3373 bp, Homo sapiens
  Payload ID: 19859
  Gene Name: zinc finger protein 287
  Uniprot ID: Q9HBT7
  ENST ID: ENST00000395824
  CDS Start-End: 619-2904
cgccggggtttctgggccgggcttctcaggaccgggctggaacgtgcagctcctggccgggacactctgtgctttgcggggaagggaagtggcggagcccgaggatccgctgccgctcgggactgagcccgccacgcaggcgcctgtgccagcgtcgccattgttgcctgtggccttagggccgctccggctgcccgtcggccgggtcccagcgacaggtattgatgtccgggcgcagcgcgcgagtgtccgcgcgatcagtgacagcccgagcccgtccacgcgcgggctcccgtgctcgtggcttgcgggagggcaaagacggggtggaggctgctgtgggcccagtcccagcgttgcgcgtcgcacggtccccgactcccccgctgccctcgacctcgaccctgcggctgaagaggaggtctcttatccatccctgcaagttctgggctcagaatttgtcactaaggctgctaactctaccttgattctgttctgccctcggctgcagcagcctttgatatagtgtccttgtgactctagcatgagacttcaagcagttggctcactactggagaaataaaggatattgccagattgactctcctgtctgtagcaatgttagcctcaagcaagaggatgaacagttcttcacgttctcaaatccttctaaggtggaagtcagacaaggctcagagtggaccctacaatgttgagaaggaaatccttacttcaagattcttgcgtgacactgagacctgtcgacagaattttaggaattttccatacccagacctggctggtcctcgaaaggcattgagtcaactccgagagctctgccttaagtggctgagacctgagattcactcaaaggaacaaattttggagctgctggtgctggagcaattcctgaccatcctgcctggtgaggttaggacttgggtaaagtcccagtatccagagagcagcgaggaagcagtgactctggtggaggatttgactcagattctagaagaggaagctcctcaaaactctaccctttcccaagataccccagaggaagaccccagaggaaaacatgctttccagacaggatggctaaatgacttggtgaccaaagaatcgatgacattcaaagatgtggctgtagacatcacccaggaggactgggagttaatgcgtcctgtgcagaaggaattatacaagactgtgacgttacagaactattggaacatggtttctctgggacttacagtgtacagaccaactgtgattcccatattggaagaaccatggatggtgataaaagaaattttagaaggccctagtccagaatgggaaactaaagcccaagcatgtactccagtggaggatatgtctaaactcacaaaggaagaaacccataccatcaaattagaagactcatatgactacgatgatagactagagaggcgaggaaaaggtggcttctggaaaattcacactgatgaaagaggtttcagtttgaagtcagtcctttcacaagaatatgatcctacagaagaatgtcttagtaaatatgatatatatagaaataattttgaaaagcattcaaacctaattgtacagtttgatacccaattagataataaaacttctgtgtataatgaaggcagggcaaccttcaatcatgtctcatatggtattgtacataggaaaatacttcctggagagaagccttacaagtgtaatgtgtgtgggaaaaaatttaggaaatacccatccctcctgaaacaccaaagtacccatgccaaagagaaatcgtatgaatgtgaagaatgtgggaaagagtttaggcatatctcatcccttattgcacatcagagaatgcacactggagaaaaaccatatgaatgccaccagtgtggtaaagccttcagccagcgtgcacaccttactatacatcagagaattcatactggagagaaaccctataagtgtgatgactgtgggaaagacttcagtcagcgtgcacaccttaccatccatcaaaggacacatactggagagaaaccatataaatgcttggaatgtggtaaaaccttcagtcatagttcatcactgattaatcatcagagagttcatactggagaaaaaccttatatatgcaatgaatgtgggaagactttcagtcagagtacacaccttcttcagcatcaaaaaatacatactgggaagaaaccatataaatgcaatgaatgttggaaagtgtttagtcagagtacttaccttattcgacatcagagaattcattctggagagaagtgttataaatgtaatgaatgtggaaaagcctttgctcattcctcaacccttattcaacatcaaaccactcacactggagagaaatcctatatatgtaatatatgtgggaaagccttcagccagagtgcaaatcttactcaacatcatagaacacatactggagagaaaccatataaatgcagtgtgtgtgggaaagcattcagccagagtgtgcaccttactcaacatcagaggattcataatggagaaaaaccctttaaatgcaatatatgtgggaaagcatatagacaaggcgcaaatcttactcagcatcaaaggattcatactggagaaaaaccctataaatgtaatgaatgtgggaaagctttcatttattcctcatcacttaatcaacatcagagaactcatactggagagagaccctataaatgtaatgaatgtgataaggattttagccagagaacatgccttattcaacaccagagaattcacacaggagagaaaccctatgcatgtcgtatatgtggtaaaaccttcacccagagtacaaaccttattcagcatcaacgtgttcatacaggtgccaaacatcgtaattaatggataagggaaacttcaattcggttttacaactttgtttcaattttgttttgtgcattctatgtgtcagaacattcagaagaagtctgaagaagtgcaatatgttagatactcagcagaagtatcagaagtagtggtatggatataacctatttagatttaatgtgaaatttaagaaggaaacttgacttcttaaccttaatttgatatgattttaattcattacagaaagaaaccctgtgaagggtattcaaaaacataactcatcaactctctatttcaagtacacttatcctttggtatactcgggggattggttccaggaccacccatgtatacgaaaatctacccatactcaagttgcacggtcagcctggtggaacctgtgtatatgaaaagccctacatctatgcaggtttcccatccctgaataatgtgctttcaaactctgttcagttgaaaaaaaaaa

SEQ ID NO: 202057 - DNA, 3208 bp, Homo sapiens
  Payload ID: 19859
  Gene Name: zinc finger protein 287
  Uniprot ID: Q9HBT7
  ENST ID: ENST00000395825
  CDS Start-End: 454-2739
gcagtgacgccgaggcgaggtcgcggctaagcagaggcgccggggtttctgggccgggcttctcaggaccgggctggaacgtgcagctcctggccgggacactctgtgctttgcggggaagggaagtggcggagcccgaggatccgctgccgctcgggactgagcccgccacgcaggcgcctgtgccagcgtcgccattgttgcctgtggccttagggccgctccggctgcccgtcggccgggtcccagcgacagggtctcttatccatccctgcaagttctgggctcagaatttgtcactaaggctgctaactctaccttgattctgttctgccctcggctgcagcagcctttgatatagtgtccttgtgactctagcatgagacttcaagcagttggctcactactggagaaataaaggatattgccagattgactctcctgtctgtagcaatgttagcctcaagcaagaggatgaacagttcttcacgttctcaaatccttctaaggtggaagtcagacaaggctcagagtggaccctacaatgttgagaaggaaatccttacttcaagattcttgcgtgacactgagacctgtcgacagaattttaggaattttccatacccagacctggctggtcctcgaaaggcattgagtcaactccgagagctctgccttaagtggctgagacctgagattcactcaaaggaacaaattttggagctgctggtgctggagcaattcctgaccatcctgcctggtgaggttaggacttgggtaaagtcccagtatccagagagcagcgaggaagcagtgactctggtggaggatttgactcagattctagaagaggaagctcctcaaaactctaccctttcccaagataccccagaggaagaccccagaggaaaacatgctttccagacaggatggctaaatgacttggtgaccaaagaatcgatgacattcaaagatgtggctgtagacatcacccaggaggactgggagttaatgcgtcctgtgcagaaggaattatacaagactgtgacgttacagaactattggaacatggtttctctgggacttacagtgtacagaccaactgtgattcccatattggaagaaccatggatggtgataaaagaaattttagaaggccctagtccagaatgggaaactaaagcccaagcatgtactccagtggaggatatgtctaaactcacaaaggaagaaacccataccatcaaattagaagactcatatgactacgatgatagactagagaggcgaggaaaaggtggcttctggaaaattcacactgatgaaagaggtttcagtttgaagtcagtcctttcacaagaatatgatcctacagaagaatgtcttagtaaatatgatatatatagaaataattttgaaaagcattcaaacctaattgtacagtttgatacccaattagataataaaacttctgtgtataatgaaggcagggcaaccttcaatcatgtctcatatggtattgtacataggaaaatacttcctggagagaagccttacaagtgtaatgtgtgtgggaaaaaatttaggaaatacccatccctcctgaaacaccaaagtacccatgccaaagagaaatcgtatgaatgtgaagaatgtgggaaagagtttaggcatatctcatcccttattgcacatcagagaatgcacactggagaaaaaccatatgaatgccaccagtgtggtaaagccttcagccagcgtgcacaccttactatacatcagagaattcatactggagagaaaccctataagtgtgatgactgtgggaaagacttcagtcagcgtgcacaccttaccatccatcaaaggacacatactggagagaaaccatataaatgcttggaatgtggtaaaaccttcagtcatagttcatcactgattaatcatcagagagttcatactggagaaaaaccttatatatgcaatgaatgtgggaagactttcagtcagagtacacaccttcttcagcatcaaaaaatacatactgggaagaaaccatataaatgcaatgaatgttggaaagtgtttagtcagagtacttaccttattcgacatcagagaattcattctggagagaagtgttataaatgtaatgaatgtggaaaagcctttgctcattcctcaacccttattcaacatcaaaccactcacactggagagaaatcctatatatgtaatatatgtgggaaagccttcagccagagtgcaaatcttactcaacatcatagaacacatactggagagaaaccatataaatgcagtgtgtgtgggaaagcattcagccagagtgtgcaccttactcaacatcagaggattcataatggagaaaaaccctttaaatgcaatatatgtgggaaagcatatagacaaggcgcaaatcttactcagcatcaaaggattcatactggagaaaaaccctataaatgtaatgaatgtgggaaagctttcatttattcctcatcacttaatcaacatcagagaactcatactggagagagaccctataaatgtaatgaatgtgataaggattttagccagagaacatgccttattcaacaccagagaattcacacaggagagaaaccctatgcatgtcgtatatgtggtaaaaccttcacccagagtacaaaccttattcagcatcaacgtgttcatacaggtgccaaacatcgtaattaatggataagggaaacttcaattcggttttacaactttgtttcaattttgttttgtgcattctatgtgtcagaacattcagaagaagtctgaagaagtgcaatatgttagatactcagcagaagtatcagaagtagtggtatggatataacctatttagatttaatgtgaaatttaagaaggaaacttgacttcttaaccttaatttgatatgattttaattcattacagaaagaaaccctgtgaagggtattcaaaaacataactcatcaactctctatttcaagtacacttatcctttggtatactcgggggattggttccaggaccacccatgtatacgaaaatctacccatactcaagttgcacggtcagcctggtggaacctgtgtatatgaaaagccctacatctatgcaggtttcccatccctgaataatgtgctttcaaactctgttcagttgaaaaaaaaaa

SEQ ID NO: 202058 - DNA, 692 bp, Homo sapiens
  Payload ID: 19859
  Gene Name: zinc finger protein 287
  ENST ID: ENST00000448349
  CDS Start-End: 521-692
gccgaggcgaggtcgcggctaagcagaggcgccggggtttctgggccgggcttctcaggaccgggctggaacgtgcagctcctggccgggacactctgtgctttgcggggaagggaagtggcggagcccgaggatccgctgccgctcgggactgagcccgccacgcaggcgcctgtgccagcgtcgccattgttgcctgtggccttagggccgctccggctgcccgtcggccgggtcccagcgacagcagctccatcccccaccaaccccaagcagatggcagttcccttacaagtctaaggatataggggaggaagacaagggtctcttatccatccctgcaagttctgggctcagaatttgtcactaaggctgctaactctaccttgattctgttctgccctcggctgcagcagcctttgatatagtgtccttgtgactctagcatgagacttcaagcagttggctcactactggagaaataaaggatattgccagattgactctcctgtctgtagcaatgttagcctcaagcaagaggatgaacagttcttcacgttctcaaatccttctaaggtggaagtcagacaaggctcagagtggaccctacaatgttgagaaggaaatccttacttcaagattcttgcgtgacactgagacctgtcgacagaattttaggaattttccatacc

SEQ ID NO: 202059 - DNA, 8287 bp, Homo sapiens
  Payload ID: 19860
  Gene Name: zinc finger protein 292
  ENST ID: ENST00000339907
  CDS Start-End: 12-8168
ggggtgtgaagatggcggacgaagaggccgagcaggagaggttgagttgcggcgaaggcggctgcgtcgcggagctgcagcgcctgggcgagcggctccaggagctggagctacagctgcgggagagccgggtaccggccgtggaagcggccaccgactactgtcagcagctgtgccagacactcctagaatatgcagagaaatggaaaacttcagaagatcctttacctttattggaggtatacacagtggctatccaaagttatgttaaagcccgaccttatcttacctctgaatgtgaaaatgtagccttggttctggaacgcttggcattaagctgtgttgaacttttactgtgtctgcctgttgagttatcagataaacagtgggaacaatttcagacactggtgcaggtagctcatgaaaagctgatggagaatggcagctgtgaattgcattttttagctactctagctcaagagactggggtgtggaaaaacccggtactgtgcactattctttcccaggaaccattggataaggataaagcttttgagggtcccatcttgttggatatgagaattaaacatctaatcaaaacaaatcagttaagtcaagcaactgctctagcaaagctgtgttctgaccatccagagattggcataaaaggtagttttaagcaaacttaccttgtctgtctttgtacatcatcaccaaatggaaagttaatcgaagagatttcagaagttgattgcaaagatgcactggaaatgatctgtaacttagaatctgagggtgatgaaaaaagcgctcttgttttatgtactgcgtttttgtcacgtcagctccaacaaggagatatgtactgcgcttgggaacttactctcttttggagtaaattacaacaaagagtagaaccatctatacaagtgtaccttgagaggtgtcgtcaactttctttgttaacgaaaacagtatatcacattttcttcctgattaaagttattaattcagagactgaaggggctggacttgctacctgtatagaactgtgtgtaaaggctcttcgcttggagtctacagaaaatactgaagtgaaaatatctatttgcaagaccatttcatgtttgttgcctgatgatctggaagttaaacgtgcttgtcaactgagtgaatttcttattgagcctacagtagatgcgtattatgctgtggaaatgttgtataatcagccagaccagaaatatgatgaagagaatcttccaataccaaattctttacgctgtgagctgttacttgtattgaaaactcaatggccctttgatccagaattctgggattggaaaaccttgaaacgacaatgtcttgcattaatgggagaagaagcatccattgtgtcttcaatagatgaactaaatgacagtgaagtatatgaaaaagtggtagactaccaagaagagagtaaagaaacttctatgaatgggctttctggtggagttggtgctaattctggccttcttaaagacattggtgatgaaaagcagaagaagagagagataaaacagttaagagagaggggatttatatctgctcggtttaggaattggcaagcctacatgcagtattgtgtgttgtgtgacaaagaattccttggtcacagaatagtacgacatgctcagaaacattacaaagatggaatttatagttgccccatatgtgcaaagaactttaattctaaagaaacttttgtccctcatgtcacactgcatgttaaacaatctagtaaagagagactagcagctatgaaaccattaagaagattgggaaggcctccaaagatcacaactaccaatgaaaatcagaagactaatactgtggctaaacaggagcagcgacctataaaaaagaatagtctctattcaacagattttatagtgtttaatgacaatgatggttcagatgatgagaatgatgacaaagataaatcctatgagccagaagtgattccagtccagaaaccagtacctgttaatgaatttaattgccctgtaactttttgtaaaaagggctttaagtactttaaaaatttaattgctcatgtgaaggggcataaagataatgaagacgccaagcgctttcttgaaatgcagagcaaaaaagttatttgccagtactgtaggcggcattttgtgagtgttactcatctcaatgatcacttacagatgcactgtggcagtaaaccatatatctgtatacagatgaaatgtaaagctggttttaatagttacgccgagcttttaacccaccgaaaggagcatcaagtctttagagcaaaatgtatgtttcctaaatgtggaagaattttttcggaagcttatttactatatgatcatgaagcacaacattataatacgtacacttgtaagttcacaggttgtggtaaagtttatcgttctcagggtgagctggaaaagcatctggatgatcacagtactcctcctgaaaaagtgctgcctcctgaagcccaacttaattcatctggagattccattcagccttctgaagtgaatcagaacacagcagagaatattgagaaagaaagatctatgcttccttcagaaaataacattgaaaacagcttactagcagatagaagtgatgcttgggataaaagcaaagcagaatcagctgtgaccaaacaagaccagatttctgcctctgagctcaggcaagctaatggaccattgtcaaatggtttggaaaaccctgctactactcctctacttcaatccagtgaagtagctgtgtccattaaggtgtctctcaatcaggggattgaggataactttggaaagcaagaaaactcaactgtggaaggcagtggtgaagcactggtcacagacttacatacgccagttgaagatacttgtaatgatttgtgtcatccaggtttccaggagagaaaagaacaagattgctttaatgatgcccatgttactcagaattctttagtaaattcagaaactctcaaaataggtgaccttaccccacaaaacttagaaagacaagtgaacaacttgatgaccttttctgtgcaaaatcaggcagcatttcaaaacaatttaccaacttccaaatttgaatgtggagataatgttaaaacatcatccaatctttataatttacctcttaagacattagaaagtattgcatttgttccaccgcagtccgacctaagtaattcattaggaactccatcagtgcctccaaaagctccagttcagaaattcagctgccaggtcgagggatgtactcgaacctataattcttcacagagtattgggaaacacatgaagacagcacaccctgaccaatatgctgcatttaaaatgcagcgcaaaagtaaaaaaggtcagaaagctaacaacttaaatacaccaaataatggaaagtttgtttattttttgccatcaccggtgaacagctcaaatccattttttacatcacagaccaaagccaatgggaatcctgcttgttcggcccagttgcagcatgtctcgccacccatttttccagctcatttagcaagtgtgtcaactccattgttgtcctcaatggaaagtgtcataaatccaaatataacttctcaggataaaaatgaacaaggtggtatgttatgttcccaaatggaaaatttacctagtactgccttgccagcacaaatggaagatctaaccaaaacagttctgcctttgaatattgacagtggctcagatcctttccttcctttacctgcagaaagtagttcaatgtctctcttcccttcaccagcagatagtgggactaattctgttttttcccaactggaaaataatacaaatcattattcctcacagattgaaggaaacactaattcctcctttctaaaggggggtaatggtgaaaatgcagtttttccttcacaagtgaatgttgcaaataacttcagtagcaccaatgcccaacagtctgcacctgaaaaagttaaaaaagaccgtgggcggggcccaaatgggaaggaaagaaaacctaagcacaacaaaagggctaaatggcctgcaattatcagagatgggaaatttatctgtagcaggtgttacagggcttttactaatcccagatcactgggtgggcacttatccaagcgatcttactgtaaaccactggatggagccgaaattgctcaagaacttctacagagtaatggacagccttctcttcttgccagcatgattctctccacaaatgcagtaaatttgcagcagccacaacaatctaccttcaatccagaagcatgttttaaagatccatcatttctacagcttcttgctgaaaatcgctcgccagcatttttaccaaatacatttcctcgatctggtgtgactaactttaataccagtgtcagtcaagaaggtagtgaaattattaaacaggctttggaaactgctggcattcccagtacatttgagggtgccgaaatgctttctcatgtttcaacaggttgtgtctctgatgcatcacaagtaaatgcaacggtgatgccaaatccaactgtaccacccctgttgcacactgtatgccatccaaacaccttgctgaccaaccagaataggacgtcaaactccaaaacttcctccattgaggaatgtagcagcttgcctgtttttccaacgaatgacttactactgaagactgttgaaaatggtttgtgctctagttcatttcctaattctggtgggccatcacaaaattttaccagtaacagttctcgtgtttctgttataagtggtcctcagaacacaagatccagtcatttaaataaaaagggaaacagtgcttctaagagaagaaagaaagttgctcctccactaattgcacctaacgcttcccaaaacttggtaacaagtgacttaacaacaatgggactcatagcaaagagtgttgaaatcccaactactaaccttcattcaaatgtaattccaacttgtgaacctcagagtttggtggaaaatctaacacagaaattaaataatgttaacaatcagttatttatgactgatgtaaaagagaatttcaaaaccagtcttgagtcccatacagtgttagcccctttaacattaaaaactgaaaatggtgattcccaaatgatggctttgaattcatgcacaacttcaataaattctgatttgcagatttctgaagacaatgttatacaaaactttgaaaagactcttgaaattattaaaactgctatgaattctcaaatacttgaggtaaaaagtggatctcagggtgctggtgaaacttcacaaaatgctcaaataaattataacattcagcttccttcagtaaacactgtgcaaaataacaaattacccgattcttctccgttttcctcctttataagtgtcatgccaacaaaaagtaacattcctcagtctgaagtatcacataaggaggatcaaatacaggaaattttagaaggcttacagaaattaaaattagaaaatgacctatccactccagcatcccaatgtgtactgataaatacatcagtgacactgactcccacgcctgttaaatcaactgcagatatcacagttattcagccagtttctgaaatgataaacattcaatttaatgacaaagttaataaaccctttgtgtgtcaaaaccaaggctgtaactacagtgctatgacaaaggatgcactatttaagcactatggtaaaattcatcaatacactccagaaatgattcttgaaattaagaagaatcaattgaaatttgctccctttaaatgtgtagtacctacatgtacaaaaacatttacaagaaattctaacctccgggcacactgtcagttggtgcatcattttacaactgaagaaatggtaaagttaaaaattaaaaggccttatggaagaaaatctcagagtgaaaatgtgccggcctcacgaagtacacaagtgaaaaaacagctagctatgacagaggaaaataaaaaggaatctcagcctgctttagaattgagagcagagacccaaaatacccacagtaatgtagcagtgatcccagaaaaacaacttgtagaaaaaaaaagtcctgacaaaacagaaagttctttacaagtgattacagttacttcagaacaatgtaatacaaatgcactcacaaacacacaaaccaaaggacggaagattaggaggcataaaaaagaaaaggaggagaaaaaacgaaagaagccagtttcccaatcccttgagtttccaacaagatacagtccttacagaccttatcgatgtgttcaccagggatgctttgctgcctttacgatacagcaaaacttgattctccattaccaggctgtacacaaatcagatctacctgcattttcagcagaggtcgaagaggaaagtgaagctggtaaagaaagtgaagaaactgaaactaaacaaactttgaaagaatttcgatgtcaggtaagtgactgttctcgaattttccaagcaattactggcctaatacaacactacatgaaacttcatgaaatgactcctgaagaaattgaaagtatgactgcttcagtggatgttgggaagtttccatgtgaccagttagagtgtaaatcttcatttactacatatttgaactatgttgttcatctagaggcagaccacgggattggactaagggcaagtaaaacagaagaagatggtgtatacaaatgtgattgtgaaggctgtgaccgtatatatgcaacccggtcgaatctcctccgacacatttttaataagcataatgacaaacataaggctcatttgattcgtccaagaagattaacaccaggccaggaaaatatgtcaagcaaggcaaaccaagaaaaatcaaagtctaaacatcgggggaccaagcacagcagatgtggaaaggaaggaataaaaatgcccaagaccaaacgaaagaaaaaaaataatttagaaaacaagaatgcaaagattgtgcagattgaagaaaataagccttattctctgaaacgtgggaagcatgtatattctataaaggctagaaatgatgccctgtctgagtgtacaagcagatttgtaacccagtatccatgtatgataaagggatgtacttcagttgttacaagtgaaagcaatataattagacattataagtgccataaattatctaaggcatttacatcacaacaccgaaatcttcttattgtattcaaacggtgttgcaactcacaagtaaaggaaacgtctgagcaagaaggtgctaagaatgatgtgaaagattctgacacgtgtgtatcagagagcaatgataattcaagaacaacagctacagtttcacaaaaggaagttgaaaaaaatgaaaaagatgaaatggatgaactaacagaattgtttattacaaaattaataaatgaagatagcacaagtgtagagacccaagctaatacttcttcaaatgtaagtaatgattttcaggaagataacctctgccagtcagaaagacaaaaagcaagtaatttgaagagagttaataaggaaaaaaatgtctcacaaaataaaaaaaggaaagttgaaaaagctgaaccagcatcagcagctgagttaagtagcgtgcgtaaagaagaagaaactgctgttgccattcaaaccattgaggagcatcctgcatcttttgactggagctcttttaagccaatgggatttgaagtatcatttctgaagtttcttgaggagtctgcagtgaagcagaagaaaaatactgacaaagaccatccgaatactggaaacaaaaaaggatcccattcaaattcaagaaaaaatattgataagactgctgtgactagtggaaatcatgtatgtccttgtaaagaaagcgaaacgtttgtacagtttgccaatccatcacagcttcagtgcagtgataatgtaaaaattgttttagacaagaatcttaaagattgcactgagcttgtcttaaagcaacttcaggaaatgaaacctaccgtcagtctgaaaaaacttgaagtacattcaaatgatccagatatgtctgttatgaaagatatcagtataggtaaagccacaggcagaggtcagtactgataattaatgtagtataaatacatcatttaccattttattttaaataggaagccatcaagcatgctagaattgtgaaactttcattatatttttttgttgttgacatgaattaacctggc

SEQ ID NO: 202060 - DNA, 10610 bp, Homo sapiens
  Payload ID: 19860
  Gene Name: zinc finger protein 292
  Uniprot ID: O60281
  ENST ID: ENST00000369577
  CDS Start-End: 44-8215
atcacgtgacccaggtgcgtacgcgacggagcggggtgtgaagatggcggacgaagaggccgagcaggagaggttgagttgcggcgaaggcggctgcgtcgcggagctgcagcgcctgggcgagcggctccaggagctggagctacagctgcgggagagccgggtaccggccgtggaagcggccaccgactactgtcagcagctgtgccagacactcctagaatatgcagagaaatggaaaacttcagaagatcctttacctttattggaggtatacacagtggctatccaaagttatgttaaagcccgaccttatcttacctctgaatgtgaaaatgtagccttggttctggaacgcttggcattaagctgtgttgaacttttactgtgtctgcctgttgagttatcagataaacagtgggaacaatttcagacactggtgcaggtagctcatgaaaagctgatggagaatggcagctgtgaattgcattttttagctactctagctcaagagactggggtgtggaaaaacccggtactgtgcactattctttcccaggaaccattggataaggataaagtgaatgaatttttagcttttgagggtcccatcttgttggatatgagaattaaacatctaatcaaaacaaatcagttaagtcaagcaactgctctagcaaagctgtgttctgaccatccagagattggcataaaaggtagttttaagcaaacttaccttgtctgtctttgtacatcatcaccaaatggaaagttaatcgaagagatttcagaagttgattgcaaagatgcactggaaatgatctgtaacttagaatctgagggtgatgaaaaaagcgctcttgttttatgtactgcgtttttgtcacgtcagctccaacaaggagatatgtactgcgcttgggaacttactctcttttggagtaaattacaacaaagagtagaaccatctatacaagtgtaccttgagaggtgtcgtcaactttctttgttaacgaaaacagtatatcacattttcttcctgattaaagttattaattcagagactgaaggggctggacttgctacctgtatagaactgtgtgtaaaggctcttcgcttggagtctacagaaaatactgaagtgaaaatatctatttgcaagaccatttcatgtttgttgcctgatgatctggaagttaaacgtgcttgtcaactgagtgaatttcttattgagcctacagtagatgcgtattatgctgtggaaatgttgtataatcagccagaccagaaatatgatgaagagaatcttccaataccaaattctttacgctgtgagctgttacttgtattgaaaactcaatggccctttgatccagaattctgggattggaaaaccttgaaacgacaatgtcttgcattaatgggagaagaagcatccattgtgtcttcaatagatgaactaaatgacagtgaagtatatgaaaaagtggtagactaccaagaagagagtaaagaaacttctatgaatgggctttctggtggagttggtgctaattctggccttcttaaagacattggtgatgaaaagcagaagaagagagagataaaacagttaagagagaggggatttatatctgctcggtttaggaattggcaagcctacatgcagtattgtgtgttgtgtgacaaagaattccttggtcacagaatagtacgacatgctcagaaacattacaaagatggaatttatagttgccccatatgtgcaaagaactttaattctaaagaaacttttgtccctcatgtcacactgcatgttaaacaatctagtaaagagagactagcagctatgaaaccattaagaagattgggaaggcctccaaagatcacaactaccaatgaaaatcagaagactaatactgtggctaaacaggagcagcgacctataaaaaagaatagtctctattcaacagattttatagtgtttaatgacaatgatggttcagatgatgagaatgatgacaaagataaatcctatgagccagaagtgattccagtccagaaaccagtacctgttaatgaatttaattgccctgtaactttttgtaaaaagggctttaagtactttaaaaatttaattgctcatgtgaaggggcataaagataatgaagacgccaagcgctttcttgaaatgcagagcaaaaaagttatttgccagtactgtaggcggcattttgtgagtgttactcatctcaatgatcacttacagatgcactgtggcagtaaaccatatatctgtatacagatgaaatgtaaagctggttttaatagttacgccgagcttttaacccaccgaaaggagcatcaagtctttagagcaaaatgtatgtttcctaaatgtggaagaattttttcggaagcttatttactatatgatcatgaagcacaacattataatacgtacacttgtaagttcacaggttgtggtaaagtttatcgttctcagggtgagctggaaaagcatctggatgatcacagtactcctcctgaaaaagtgctgcctcctgaagcccaacttaattcatctggagattccattcagccttctgaagtgaatcagaacacagcagagaatattgagaaagaaagatctatgcttccttcagaaaataacattgaaaacagcttactagcagatagaagtgatgcttgggataaaagcaaagcagaatcagctgtgaccaaacaagaccagatttctgcctctgagctcaggcaagctaatggaccattgtcaaatggtttggaaaaccctgctactactcctctacttcaatccagtgaagtagctgtgtccattaaggtgtctctcaatcaggggattgaggataactttggaaagcaagaaaactcaactgtggaaggcagtggtgaagcactggtcacagacttacatacgccagttgaagatacttgtaatgatttgtgtcatccaggtttccaggagagaaaagaacaagattgctttaatgatgcccatgttactcagaattctttagtaaattcagaaactctcaaaataggtgaccttaccccacaaaacttagaaagacaagtgaacaacttgatgaccttttctgtgcaaaatcaggcagcatttcaaaacaatttaccaacttccaaatttgaatgtggagataatgttaaaacatcatccaatctttataatttacctcttaagacattagaaagtattgcatttgttccaccgcagtccgacctaagtaattcattaggaactccatcagtgcctccaaaagctccagttcagaaattcagctgccaggtcgagggatgtactcgaacctataattcttcacagagtattgggaaacacatgaagacagcacaccctgaccaatatgctgcatttaaaatgcagcgcaaaagtaaaaaaggtcagaaagctaacaacttaaatacaccaaataatggaaagtttgtttattttttgccatcaccggtgaacagctcaaatccattttttacatcacagaccaaagccaatgggaatcctgcttgttcggcccagttgcagcatgtctcgccacccatttttccagctcatttagcaagtgtgtcaactccattgttgtcctcaatggaaagtgtcataaatccaaatataacttctcaggataaaaatgaacaaggtggtatgttatgttcccaaatggaaaatttacctagtactgccttgccagcacaaatggaagatctaaccaaaacagttctgcctttgaatattgacagtggctcagatcctttccttcctttacctgcagaaagtagttcaatgtctctcttcccttcaccagcagatagtgggactaattctgttttttcccaactggaaaataatacaaatcattattcctcacagattgaaggaaacactaattcctcctttctaaaggggggtaatggtgaaaatgcagtttttccttcacaagtgaatgttgcaaataacttcagtagcaccaatgcccaacagtctgcacctgaaaaagttaaaaaagaccgtgggcggggcccaaatgggaaggaaagaaaacctaagcacaacaaaagggctaaatggcctgcaattatcagagatgggaaatttatctgtagcaggtgttacagggcttttactaatcccagatcactgggtgggcacttatccaagcgatcttactgtaaaccactggatggagccgaaattgctcaagaacttctacagagtaatggacagccttctcttcttgccagcatgattctctccacaaatgcagtaaatttgcagcagccacaacaatctaccttcaatccagaagcatgttttaaagatccatcatttctacagcttcttgctgaaaatcgctcgccagcatttttaccaaatacatttcctcgatctggtgtgactaactttaataccagtgtcagtcaagaaggtagtgaaattattaaacaggctttggaaactgctggcattcccagtacatttgagggtgccgaaatgctttctcatgtttcaacaggttgtgtctctgatgcatcacaagtaaatgcaacggtgatgccaaatccaactgtaccacccctgttgcacactgtatgccatccaaacaccttgctgaccaaccagaataggacgtcaaactccaaaacttcctccattgaggaatgtagcagcttgcctgtttttccaacgaatgacttactactgaagactgttgaaaatggtttgtgctctagttcatttcctaattctggtgggccatcacaaaattttaccagtaacagttctcgtgtttctgttataagtggtcctcagaacacaagatccagtcatttaaataaaaagggaaacagtgcttctaagagaagaaagaaagttgctcctccactaattgcacctaacgcttcccaaaacttggtaacaagtgacttaacaacaatgggactcatagcaaagagtgttgaaatcccaactactaaccttcattcaaatgtaattccaacttgtgaacctcagagtttggtggaaaatctaacacagaaattaaataatgttaacaatcagttatttatgactgatgtaaaagagaatttcaaaaccagtcttgagtcccatacagtgttagcccctttaacattaaaaactgaaaatggtgattcccaaatgatggctttgaattcatgcacaacttcaataaattctgatttgcagatttctgaagacaatgttatacaaaactttgaaaagactcttgaaattattaaaactgctatgaattctcaaatacttgaggtaaaaagtggatctcagggtgctggtgaaacttcacaaaatgctcaaataaattataacattcagcttccttcagtaaacactgtgcaaaataacaaattacccgattcttctccgttttcctcctttataagtgtcatgccaacaaaaagtaacattcctcagtctgaagtatcacataaggaggatcaaatacaggaaattttagaaggcttacagaaattaaaattagaaaatgacctatccactccagcatcccaatgtgtactgataaatacatcagtgacactgactcccacgcctgttaaatcaactgcagatatcacagttattcagccagtttctgaaatgataaacattcaatttaatgacaaagttaataaaccctttgtgtgtcaaaaccaaggctgtaactacagtgctatgacaaaggatgcactatttaagcactatggtaaaattcatcaatacactccagaaatgattcttgaaattaagaagaatcaattgaaatttgctccctttaaatgtgtagtacctacatgtacaaaaacatttacaagaaattctaacctccgggcacactgtcagttggtgcatcattttacaactgaagaaatggtaaagttaaaaattaaaaggccttatggaagaaaatctcagagtgaaaatgtgccggcctcacgaagtacacaagtgaaaaaacagctagctatgacagaggaaaataaaaaggaatctcagcctgctttagaattgagagcagagacccaaaatacccacagtaatgtagcagtgatcccagaaaaacaacttgtagaaaaaaaaagtcctgacaaaacagaaagttctttacaagtgattacagttacttcagaacaatgtaatacaaatgcactcacaaacacacaaaccaaaggacggaagattaggaggcataaaaaagaaaaggaggagaaaaaacgaaagaagccagtttcccaatcccttgagtttccaacaagatacagtccttacagaccttatcgatgtgttcaccagggatgctttgctgcctttacgatacagcaaaacttgattctccattaccaggctgtacacaaatcagatctacctgcattttcagcagaggtcgaagaggaaagtgaagctggtaaagaaagtgaagaaactgaaactaaacaaactttgaaagaatttcgatgtcaggtaagtgactgttctcgaattttccaagcaattactggcctaatacaacactacatgaaacttcatgaaatgactcctgaagaaattgaaagtatgactgcttcagtggatgttgggaagtttccatgtgaccagttagagtgtaaatcttcatttactacatatttgaactatgttgttcatctagaggcagaccacgggattggactaagggcaagtaaaacagaagaagatggtgtatacaaatgtgattgtgaaggctgtgaccgtatatatgcaacccggtcgaatctcctccgacacatttttaataagcataatgacaaacataaggctcatttgattcgtccaagaagattaacaccaggccaggaaaatatgtcaagcaaggcaaaccaagaaaaatcaaagtctaaacatcgggggaccaagcacagcagatgtggaaaggaaggaataaaaatgcccaagaccaaacgaaagaaaaaaaataatttagaaaacaagaatgcaaagattgtgcagattgaagaaaataagccttattctctgaaacgtgggaagcatgtatattctataaaggctagaaatgatgccctgtctgagtgtacaagcagatttgtaacccagtatccatgtatgataaagggatgtacttcagttgttacaagtgaaagcaatataattagacattataagtgccataaattatctaaggcatttacatcacaacaccgaaatcttcttattgtattcaaacggtgttgcaactcacaagtaaaggaaacgtctgagcaagaaggtgctaagaatgatgtgaaagattctgacacgtgtgtatcagagagcaatgataattcaagaacaacagctacagtttcacaaaaggaagttgaaaaaaatgaaaaagatgaaatggatgaactaacagaattgtttattacaaaattaataaatgaagatagcacaagtgtagagacccaagctaatacttcttcaaatgtaagtaatgattttcaggaagataacctctgccagtcagaaagacaaaaagcaagtaatttgaagagagttaataaggaaaaaaatgtctcacaaaataaaaaaaggaaagttgaaaaagctgaaccagcatcagcagctgagttaagtagcgtgcgtaaagaagaagaaactgctgttgccattcaaaccattgaggagcatcctgcatcttttgactggagctcttttaagccaatgggatttgaagtatcatttctgaagtttcttgaggagtctgcagtgaagcagaagaaaaatactgacaaagaccatccgaatactggaaacaaaaaaggatcccattcaaattcaagaaaaaatattgataagactgctgtgactagtggaaatcatgtatgtccttgtaaagaaagcgaaacgtttgtacagtttgccaatccatcacagcttcagtgcagtgataatgtaaaaattgttttagacaagaatcttaaagattgcactgagcttgtcttaaagcaacttcaggaaatgaaacctaccgtcagtctgaaaaaacttgaagtacattcaaatgatccagatatgtctgttatgaaagatatcagtataggtaaagccacaggcagaggtcagtactgataattaatgtagtataaatacatcatttaccattttattttaaataggaagccatcaagcatgctagaattgtgaaactttcattatatttttttgttgttgacatgaattaacctggccaaaaacaaaaaagaaaaaaaaaacatgacatttgtcatgtaaaacttttttttatccctatgggacttgaggaacagaatcagtacttcagttattgtaaatagtgagctaaacctcaaatttctatcacccagttgcccttttcatgaactaaacaattatctgtgtgattggtatgtttcaccaggtcactgctcatgtataacagtactctttatttgtagataccttttttgtatatatttattattgtaaatcatgtgctgccaccagcagtctgtaagtctaaactattaaatgacacatttatatttggaattttaatttttaactaagcgatcaagttttttaaattgttcttttattgttttaaattaagaactttttgaactaaaaccagaaactctgccatagttcattgatttttacatgaaacatttatttacaagatgatatcaagattacttttcacaaaataggcacattatatcaacactttgctctgctttgtaaatttgccatccaggattttggggtggtattcatgtgaaattaaagcagattctctagcagtttcctatagctacagtttttttttttcattgcttctaattggatatagttactatgagtccatgaaatacaatggaaatgtgaataaagaatttactacattgaagattttaaacatttggtattaaaaaaaaatcctttgtgaatgtgatagaaaactagtagtgtggagcagtgtaaatatttgaggtggtgatttgtgaagtagcccagtattgccttaaataaaatcacatttcatttcttgttttatacatgtgatcttataaagattttttgttttgttttgttttccattttctgagatttatagattggtgtatagctttaaactgtataaagttttgtggaaagatttttttaaacatttttataaatcttaaaattgatatcatcaaagtgagcccatcttgtgtttataaaatacaagagtccttaacatttataattacatagataaaacactttctataaggaagttggatgttttgattttactgtttatagatgttagattgtacagatttgtctgtatttctcaccatatctaatgatacttttttcattagattggtcttcaagaacagtattagttataattattttggttattcagtatatagttagctcttacagtttagctttattcaccatatttatactgtggattcacagcgagaggtagaggttattccaggagagttgatgaccttcatttaaagtccaactaaaatcagtagtagaaacataagaaaacatctttgcaatatttacttttgtttctgtttgccgtaaatagtaacattgtttttttttattttgtgtttgttataaaacagttgcattcacaatattattggcctgagatattgatgatattgtgatggtatgaaaatgtgtacattccctgtgcaacatcagatttgcaggaaaaatgaagcacttactgaaatcgctggtactctgaataaataagcatggtcaaggagtgaactattttcttttggaaatttctttttaatttttattattaaagtattttatttttagggccttttgggttttattgaatagttcatttcacctgtttaagacttactaccaataagcataaaacctgacacgttaaaatccctgccctttggtgagcccactgttatttattaaaataaaagttattttatgggtgattaatacatgggttttctttttcctaaattaacaataatttaaataactgagtaattttaatattaaatttttgttaacaactgaatgtttccatacagttttcttagaaattgacctagctcttaaaggtgggcacttggcaaaactgccctatatagcacagtagcaagtaggtttatttctgatcattgtaactatgagccactgttaagtgaaaatgccaatgtattggggcttttcttttgctcattagcttaagaaaatttataactagacatttctaattgttttacatgtcatggggaagagtttgccaacatttaatgaaatttttatattccaggtaatgtatactaaaggtaattatgagagtgggctttttagcatgaaacaaaaaaaatcaaactatggtaaaaagacatgaatttatagaatagcatgttggtaaattttgatacggaatgtaatgtctaagtattaaaaaatcataaaatatatttttttcatggta

SEQ ID NO: 202061 - DNA, 838 bp, Homo sapiens
  Payload ID: 19860
  Gene Name: zinc finger protein 292
  ENST ID: ENST00000466062
  CDS Start-End: 1-397
agagatttcagaagttgattgcaaagatgcactggaaatgatctgtaacttagaatctgagggtgatgaaaaaagcgctcttgttttatgtactgcgtttttgtcacgtcagctccaacaaggagatatgtactgcgcttgggaacttactctcttttggagtaaattacaacaaagagtagaaccatctatacaagtgtaccttgagaggtgtcgtcaactttctttgttaacgaaaacagtatatcacattttcttcctgattaaagttattaattcagagagatggggtctcactatattgcccagatttatctccaactcctgggctcaagtaattctccgtgccttggccttccaaagtggtgggattacaggtatgagccaccacacatgaccttcgcagcagccttcttgacagggatagtatgcaccatgactgaaggggctggacttgctacctgtatagaactgtgtgtaaaggctcttcgcttggagtctacagaaaatactgaagtgaaaatatctatttgcaagaccatttcatgtttgttgcctgatgatctggaagttaaacgtgcttgtcaactgagtgaatttcttattgagcctacagtagatgcgtattatgctgtggaaatgttgtataatcagccagaccagaaatatgatgaagagaatcttccaataccaaattctttacgctgtgagctgttacttgtattgaaaactcaatggccctttgatccagaattctgggattggaaaaccttgaaacgacaatgtcttgcattaatgggagaagaagcatccattgtgtcttcaatagatgaactaa

SEQ ID NO: 202062 - DNA, 770 bp, Homo sapiens
  Payload ID: 19860
  Gene Name: zinc finger protein 292
  ENST ID: ENST00000496806
  CDS Start-End: 1-770
gttgagttgcggcgaaggcggctgcgtcgcggagctgcagcgcctgggcgagcggctccaggagctggagctacagctgcgggagagccgggtaccggccgtggaagcggccaccgactactgtcagcagctgtgccagacactcctagaatatgcagagaaatggaaaacttcagaagatcctttacctttattggagaggtcgaagaggaaagtgaagctggtaaagaaagtgaagaaactgaaactaaacaaactttgaaagaatttcgatgtcaggtaagtgactgttctcgaattttccaagcaattactggcctaatacaacactacatgaaacttcatgaaatgactcctgaagaaattgaaagtatgactgcttcagtggatgttgggaagtttccatgtgaccagttagagtgtaaatcttcatttactacatatttgaactatgttgttcatctagaggcagaccacgggattggactaagggcaagtaaaacagaagaagatggtgtatacaaatgtgattgtgaaggctgtgaccgtatatatgcaacccggtcgaatctcctccgacacatttttaataagcataatgacaaacataaggctcatttgattcgtccaagaagattaacaccaggccaggaaaatatgtcaagcaaggcaaaccaagaaaaatcaaagtctaaacatcgggggaccaagcacagcagatgtggaaaggaaggaataaaaatgcccaagaccaaacgaaagaaaaaaaa

SEQ ID NO: 202063 - DNA, 277 bp, Homo sapiens
  Payload ID: 19860
  Gene Name: zinc finger protein 292
  ENST ID: ENST00000518845
  CDS Start-End: 17-277
ggagcggggtgtgaagatggcggacgaagaggccgagcaggagaggttgagttgcggcgaaggcggctgcgtcgcggagctgcagcgcctgggcgagcggctccaggagctggagctacagctgcgggagagccgggtaccggccgtggaagcggccaccgactactgtcagcagctgtgccagatttcagaagttgattgcaaagatgcactggaaatgatctgtaacttagaatctgagggtgatgaaaaaagcgctcttgttttatgtactgcg

SEQ ID NO: 202064 - DNA, 1096 bp, Homo sapiens
  Payload ID: 19860
  Gene Name: zinc finger protein 292
  ENST ID: ENST00000392985
  CDS Start-End: 238-438
atggaacaggtcttcgaatctccccaggaacatctcagaggatatgtccgtagaagacttcgtggactggggaaagccacgccgggatcgggacgccggagagggtcgcccctccctaggctttttcccgtcgcggcgcccacgtgaccgagagcaggccttcaccagcccgcccctttcggccgctgctgcccacttcccgctcggggtgcgtacgcgacggagcggggtgtgaagatggcggacgaagaggccgagcaggagaggttgagttgcggcgaaggcggctgcgtcgcggagctgcagcgcctgggcgagcggctccaggagctggagctacagctgcgggagagccgggtaccggccgtggaagcggccaccgactactgtcagcagctgtgccagggtctcactgtcacccaggctggaatgcagtgacgccatcagagctcacttcagcgtccacctcccgggctcaagtgatcctcccacctcagcctcttggatagctgggactacagatgtgcgctaccatgcccagctgatttttggaaattttagtggagacagggttttgccatgttgcccagactggtcttgatctcctgggctcaagcaatttgcccatctcagactcccagagtgctgggattacaggcgtgagccaccgtgcccagcctagaatttgtatatactcaaaatagtttacattttgcatttttctacatgaacatatgcatgtattgctgatctttccctactttttgcaaatatgatagatttcactatatacaaaacttaaaacattatacattaactcaaaagcattgtcaatttatattctgaaataatgcaaattttaatttttttaaaaacaaaacttctacaagattattatattattttaggagactaaaacataaaagcctgatacttaagtagtttgaatctggtgatttattccatgacttaacctattcatatttgtataatcttattttaagccttggcttgggattttttttaattgcctccctaaaataggatagtgcacattgcataaaatgacattgtcaataaaatttatatcctcaaa

SEQ ID NO: 202065 - DNA, 1744 bp, Homo sapiens
  Payload ID: 19861
  Gene Name: zinc finger protein 296
  Uniprot ID: Q8WUU4
  ENST ID: ENST00000303809
  CDS Start-End: 216-1643
cgccgtcagggccccagcagggcggctcggtcccctcccatgagccccgccctggtaggcggagccacgggcccggccagcacgtgtaagagttcgcggcgggtcgccgcagtcactcacctgagcgcgcacggtccgcgcgtcctccgctcgtgcgtcctccgcccgcccgcctgcctgcctgcccgcccgctcgctcgcccggcccgcgactcatgtcccgccgcaaggccggcagcgcgccccgccgagtagagcccgcgcccgccgccaacccagacgacgagatggaaatgcaggacctcgtcatcgaactcaagcccgagccagacgcgcagccccaacaggccccaaggctggggcccttctccccgaaggaggtgtcctcggcggggcggttcggcggcgaaccccaccactcccctggccccatgcccgccggggccgccctcctcgccctcggcccgcggaacccgtggaccctgtggacgccgttgaccccgaactatcccgaccgccagccctggaccgacaaacacccagatctgttgacctgcggccgctgcctgcagaccttcccgttggaggccatcactgccttcatggaccacaagaagctgggctgtcagctcttcagaggccccagccgcggccagggctcagaacgagaggagctgaaggccttgagctgcctgcgctgtggcaaacagttcacagtggcctggaagctgctgcgtcacgcccagtgggaccacggactgtccatctaccagacagaatcagaggccccggaggccccgctcctgggcctggccgaggtggctgcagccgtgtcggcagtggtggggccagcagctgaggccaagagcccccgtgcaagtggcagcggcctcacccggcggagccccacctgtcctgtgtgcaagaagaccctcagctccttcagcaacctcaaagtgcacatgcgctcacacacaggcgagcggccctatgcttgcgaccagtgtccctacgcctgcgcccagagcagcaagctcaaccgccacaagaagacccaccggcaggtgccgccccagagccccctcatggccgacaccagccaggagcaggcctctgcagcccctccggagccggctgtccatgctgctgcccccaccagcacccttccatgcagcggtggtgagggggctggagccgccgccacagcaggtgtccaggaacccggggctcctggcagtggggctcaagccggccctggtggagacacttggggagccatcaccacggaacaaagaactgaccctgcaaacagccagaaggcatcacccaaaaagatgcccaagtcagggggcaagagccgcgggcccgggggcagctgtgagttctgcgggaagcattttaccaacagcagcaacctgacggtgcaccggcgctcacacaccggggagcgcccctacacctgtgagttctgcaactacgcctgcgcccagagcagtaagctcaaccgccaccgccgcatgcacggcatgacgcctggcagcacccgcttcgagtgcccccactgccatgtgcccttcggcctgcgagccaccctggacaaacacctgcggcagaagcaccctgaggcggccggcgaggcctgagcccaggaaagcccccctcactgtccctggtaccgctgccaacacccattgacctcctcgtttttgcccgccttctccaagtaaattttcccttttattta

SEQ ID NO: 202066 - DNA, 1631 bp, Homo sapiens
  Payload ID: 19861
  Gene Name: zinc finger protein 296
  ENST ID: ENST00000622376
  CDS Start-End: 176-1531
gccgtcagggccccagcagggcggctcggtcccctcccatgagccccgccctggtaggcggagccacgggcccggccagcacgtgtaagagttcgcggcgggtcgccgcagtcactcacctgagcgcgcacggtccgcgcgtcctccgctcgtgcgtcccaacccagacgacgagatggaaatgcaggacctcgtcatcgaactcaagcccgagccagacgcgcagccccaacaggccccaaggctggggcccttctccccgaaggaggtgtcctcggcggggcggttcggcggcgaaccccaccactcccctggccccatgcccgccggggccgccctcctcgccctcggcccgcggaacccgtggaccctgtggacgccgttgaccccgaactatcccgaccgccagccctggaccgacaaacacccagatctgttgacctgcggccgctgcctgcagaccttcccgttggaggccatcactgccttcatggaccacaagaagctgggctgtcagctcttcagaggccccagccgcggccagggctcagaacgagaggagctgaaggccttgagctgcctgcgctgtggcaaacagttcacagtggcctggaagctgctgcgtcacgcccagtgggaccacggactgtccatctaccagacagaatcagaggccccggaggccccgctcctgggcctggccgaggtggctgcagccgtgtcggcagtggtggggccagcagctgaggccaagagcccccgtgcaagtggcagcggcctcacccggcggagccccacctgtcctgtgtgcaagaagaccctcagctccttcagcaacctcaaagtgcacatgcgctcacacacaggcgagcggccctatgcttgcgaccagtgtccctacgcctgcgcccagagcagcaagctcaaccgccacaagaagacccaccggcaggtgccgccccagagccccctcatggccgacaccagccaggagcaggcctctgcagcccctccggagccggctgtccatgctgctgcccccaccagcacccttccatgcagcggtggtgagggggctggagccgccgccacagcaggtgtccaggaacccggggctcctggcagtggggctcaagccggccctggtggagacacttggggagccatcaccacggaacaaagaactgaccctgcaaacagccagaaggcatcacccaaaaagatgcccaagtcagggggcaagagccgcgggcccgggggcagctgtgagttctgcgggaagcattttaccaacagcagcaacctgacggtgcaccggcgctcacacaccggggagcgcccctacacctgtgagttctgcaactacgcctgcgcccagagcagtaagctcaaccgccaccgccgcatgcacggcatgacgcctggcagcacccgcttcgagtgcccccactgccatgtgcccttcggcctgcgagccaccctggacaaacacctgcggcagaagcaccctgaggcggccggcgaggcctgagcccaggaaagcccccctcactgtccctggtaccgctgccaacacccattgacctcctcgtttttgcccgccttctccaagtaaattttcccttttattt

SEQ ID NO: 202067 - DNA, 512 bp, Homo sapiens
  Payload ID: 19862
  Gene Name: zinc finger protein 3
  ENST ID: ENST00000292393
  CDS Start-End: 451-512
gggtctgtgacagggtccaacagggcctggtccgtgtccggtcccccaaatctgtcgtccctgcccccaggcattggcatcaacaaaagtcagaattcccgggaacttgaacagaggctgctaaattcccagtaattgctcctttggccttctagggactgacttcaaagaaggaaggaaagaatcaggcagtgcttcctcattctcttttaaaacccgcttcccgctgagtctgcacccaggagaccagagagcaccttgcccttccatggaaactcaggctgatctcgtatctcaggaacctcaggccctgcttgacagtggtgaggaataaggactcattcattcttttactcagtcattctgcaatcatccattgaaatcgctcacttaccagctcttccttcaaaagttcctgccttttccgacaaggacagcctgggggatgagatgttggcggctgcgctcctaaaggccaagtcccaggagctggtaacctttgaggatgtagc

SEQ ID NO: 202068 - DNA, 2799 bp, Homo sapiens
  Payload ID: 19862
  Gene Name: zinc finger protein 3
  Uniprot ID: P17036
  ENST ID: ENST00000299667
  CDS Start-End: 304-1644
gggaacttccgttctttgttctgtccccggtgtgtgggtctgtgacagggtccaacagggcctggtccgtgtccggtcccccaaatctgtcgtccctgcccccaggcattggcatcaacaaaagtcagaattcccgggaacttgaacagaggctgctaaattcccagtaattgctcctttggccttctagggactgacttcaaagaaggaaggaaagaatcaggcagtgcttcctcattctcttttaaaacccgcttcccgctgagtctgcacccaggagaccagagagcaccttgcccttccatggaaactcaggctgatctcgtatctcaggaacctcaggccctgcttgacagtgctcttccttcaaaagttcctgccttttccgacaaggacagcctgggggatgagatgttggcggctgcgctcctaaaggccaagtcccaggagctggtaacctttgaggatgtagctgtgtacttcatccggaaggagtggaagcgtttggaacctgctcagagggacctctatagagatgtgatgctggagaattacgggaatgtgttctcactggatcgtgagaccaggactgaaaatgatcaagaaatttctgaagacacaagatcacatggggtcctactgggaagatttcaaaaggatatttctcagggtctcaagtttaaagaagcctatgaacgagaagtcagtctgaaaaggccgctggggaactcccctggagaaagactgaacaggaaaatgccagattttggtcaagtgacagttgaggagaagctaacccccaggggagagagaagcgagaaatataatgattttgggaacagcttcactgtgaattccaaccttatctcacatcagagactccccgtgggagacagaccccataagtgtgatgaatgtagcaagagctttaatcgaacttcagaccttattcaacatcagagaatccacactggggaaaagccctatgaatgtaatgagtgtgggaaggccttcagccagagctcacaccttattcagcatcagagaatccacactggggaaaaaccttatgaatgtagtgattgtgggaaaaccttcagctgtagctctgccctcattctgcatcggaggatccacacgggggagaaaccctatgaatgtaatgagtgtgggaagaccttcagctggagctccaccctcacccaccatcagagaatccacactggtgagaaaccctacgcctgcaatgaatgtgggaaggccttcagcaggagctcaacccttattcaccatcagagaatccacactggagaaaaaccctatgaatgtaatgaatgtgggaaagccttcagccagagctcacacctctatcagcaccagagaatccacactggagagaagccctacgaatgtatggaatgtggaggaaagtttacctacagttcaggccttattcagcatcaaagaatccacaccggggagaacccctatgaatgtagtgagtgtgggaaagccttcaggtacagctcggctcttgttcgccatcagagaattcacactggagagaagcctttgaatgggatcggcatgagcaaaagctccctcagagttacgaccgagttaaatatcagagagtccacgtgaaagagccacacacccattttcctcactttccctgagtctcaagagctcttgccttaccctataaatctcaacagcttaggatgtgtccctttcaactcagacttttcattttagagaatggggcagatggggcaaatcgttgaattttcccagaaatcacaccagccttagaaagcgtcaaggcaagtggatggcgtgctgggaatagaaagcagctctgggaccagttaccccatttaggaaaggagtttgcactaaactgtttttctcacagcagaggaacctttccaaggtggggatggaagcacagtcgggacagaattcgatggattcctttagttggagtccgcgtagtcagcacagacagcagtggaaaggacgctctgggtcctgttatttgctagggagggtaaagggagactatttcaaagctactgttcctagtccagctttaagtttcggtaagaaacatgctgttttgtttcatgatttcgttaattatggaaatttggcattgagggattattttattgagggtagaagagattccagaatcatcatctgtgatgatggtgtcctttagggctcttggagcagccagaccatgtttccaagagaaacctggtgatattgccagcagaccccctgccatcccccccagttgtcctggggctgaatgggcaaatctgtccaaacagctagtaaccggctgtgagggagagggtcagaagcacttagcgttggcctctgattgctgtcctctcttgtcctcttcccactccaatgatgaaaatgattttctctaaatgcctgggtaaggatgctttcaaggagctcacttggcctgcttgccctgccctctcacctctgacacccagccccaggagccagaccactcctgcctccacctctgactcttcagcagctgaagattaatgcagagaaagagcaaagcccaaaagggagaaaaaaaaaacaaaaaaacaaaaaaacgaagcccagagaaggcaggctgtgcctgagcctggtagcagagctcgttgctgggtgaggatggcactccccgagttttcccaaccgacgggatgaccttccattgtgttttcccaaccctgctcatcctgtagcataaatgaagtgcactattaaacagaa

SEQ ID NO: 202069 - DNA, 3473 bp, Homo sapiens
  Payload ID: 19862
  Gene Name: zinc finger protein 3
  Uniprot ID: P17036
  ENST ID: ENST00000303915
  CDS Start-End: 969-2309
gatatgatggttggctctgagacaccattgaagggaccctgctaggagggcgatggtggcaagaaggtgtgtcaccttgattgccagtggcctggcttgtgcctgagtcagtgctttccactgtgtaagggctctggtattggacattctatatcccctgctacccgaagaccagagttgcccaaacttgcgactgactttcaaacaggacccctcttcctttgttctttttttttcttttattctctcaaacattctcttatccattcctcttcctttgatgccttatgtgagtgtaacagtctgtaattatgaagcacatactttttgcattcccgatttttttactccttgcagttgtgagtggcaatagagttagccctcagcaaacatttgctatgtgagcaaatgagtaaagagataatgagaggtagatcaaatccagggttggttggtttgttttgttttgttttgttttgtttgagagagaatcgcttgaacccgggaggcagaggtggcagtgagatgagattgcgccattgcactccagcctgggtgacaagagtgaaattccgtcttaaaaaaaataaagaaaatttaaaaataccgggcgcggtggctcacgcctgtaatcccagctctcagggaggcaacaggtgggaggatagcttgagcccaggagttccagacctgcctgggcaatatagcgagaccctgttctccacaaaaaggaaaaaaaaaattaaaaaataaaagaaaataaaagactagtcccagttgccacatttcttctcactgttcctgggtactcactgaaatactagctcccatctttctgtattcaggaggtttttttgaattatctttgaaccttgaacttttgcttctgcagtgcttcctcattctcttttaaaacccgcttcccgctgagtctgcacccaggagaccagagagcaccttgcccttccatggaaactcaggctgatctcgtatctcaggaacctcaggccctgcttgacagtgctcttccttcaaaagttcctgccttttccgacaaggacagcctgggggatgagatgttggcggctgcgctcctaaaggccaagtcccaggagctggtaacctttgaggatgtagctgtgtacttcatccggaaggagtggaagcgtttggaacctgctcagagggacctctatagagatgtgatgctggagaattacgggaatgtgttctcactggatcgtgagaccaggactgaaaatgatcaagaaatttctgaagacacaagatcacatggggtcctactgggaagatttcaaaaggatatttctcagggtctcaagtttaaagaagcctatgaacgagaagtcagtctgaaaaggccgctggggaactcccctggagaaagactgaacaggaaaatgccagattttggtcaagtgacagttgaggagaagctaacccccaggggagagagaagcgagaaatataatgattttgggaacagcttcactgtgaattccaaccttatctcacatcagagactccccgtgggagacagaccccataagtgtgatgaatgtagcaagagctttaatcgaacttcagaccttattcaacatcagagaatccacactggggaaaagccctatgaatgtaatgagtgtgggaaggccttcagccagagctcacaccttattcagcatcagagaatccacactggggaaaaaccttatgaatgtagtgattgtgggaaaaccttcagctgtagctctgccctcattctgcatcggaggatccacacgggggagaaaccctatgaatgtaatgagtgtgggaagaccttcagctggagctccaccctcacccaccatcagagaatccacactggtgagaaaccctacgcctgcaatgaatgtgggaaggccttcagcaggagctcaacccttattcaccatcagagaatccacactggagaaaaaccctatgaatgtaatgaatgtgggaaagccttcagccagagctcacacctctatcagcaccagagaatccacactggagagaagccctacgaatgtatggaatgtggaggaaagtttacctacagttcaggccttattcagcatcaaagaatccacaccggggagaacccctatgaatgtagtgagtgtgggaaagccttcaggtacagctcggctcttgttcgccatcagagaattcacactggagagaagcctttgaatgggatcggcatgagcaaaagctccctcagagttacgaccgagttaaatatcagagagtccacgtgaaagagccacacacccattttcctcactttccctgagtctcaagagctcttgccttaccctataaatctcaacagcttaggatgtgtccctttcaactcagacttttcattttagagaatggggcagatggggcaaatcgttgaattttcccagaaatcacaccagccttagaaagcgtcaaggcaagtggatggcgtgctgggaatagaaagcagctctgggaccagttaccccatttaggaaaggagtttgcactaaactgtttttctcacagcagaggaacctttccaaggtggggatggaagcacagtcgggacagaattcgatggattcctttagttggagtccgcgtagtcagcacagacagcagtggaaaggacgctctgggtcctgttatttgctagggagggtaaagggagactatttcaaagctactgttcctagtccagctttaagtttcggtaagaaacatgctgttttgtttcatgatttcgttaattatggaaatttggcattgagggattattttattgagggtagaagagattccagaatcatcatctgtgatgatggtgtcctttagggctcttggagcagccagaccatgtttccaagagaaacctggtgatattgccagcagaccccctgccatcccccccagttgtcctggggctgaatgggcaaatctgtccaaacagctagtaaccggctgtgagggagagggtcagaagcacttagcgttggcctctgattgctgtcctctcttgtcctcttcccactccaatgatgaaaatgattttctctaaatgcctgggtaaggatgctttcaaggagctcacttggcctgcttgccctgccctctcacctctgacacccagccccaggagccagaccactcctgcctccacctctgactcttcagcagctgaagattaatgcagagaaagagcaaagcccaaaagggagaaaaaaaaaacaaaaaaacaaaaaaacgaagcccagagaaggcaggctgtgcctgagcctggtagcagagctcgttgctgggtgaggatggcactccccgagttttcccaaccgacgggatgaccttccattgtgttttcccaaccctgctcatcctgtagcataaatgaagtgcactattaaacagaatagtttttc

SEQ ID NO: 202070 - DNA, 999 bp, Homo sapiens
  Payload ID: 19862
  Gene Name: zinc finger protein 3
  ENST ID: ENST00000428683
  CDS Start-End: 446-999
agtggtgcgatgtcggctcactgcaacctccgcctcctgggttcaagcgattctcctgtctcagcctccagagtagctgggattacaggcgtctgccaccacgcccgggtaatttttttgtatttttagtcgagacggggtttcgccatgttggccaggctggtctcgaactcctgacctcaggtgatccgcccgcctcggcctcctaaagtgctgggattacaggcgtgagcctccgcgcccggccgcattggcatcaacaaaagtcagaattcccgggaacttgaacagaggctgctaaattcccagtaattgctcctttggccttctagggactgacttcaaagaaggaaggaaagaatcaggcagtgcttcctcattctcttttaaaacccgcttcccgctgagtctgcacccaggagaccagagagcaccttgcccttccatggaaactcaggctgatctcgtatctcaggaacctcaggccctgcttgacagtgctcttccttcaaaagttcctgccttttccgacaaggacagcctgggggatgagatgttggcggctgcgctcctaaaggccaagtcccaggagctggtaacctttgaggatgtagctgtgtacttcatccggaaggagtggaagcgtttggaacctgctcagagggacctctatagagatgtgatgctggagaattacgggaatgtgttctcactggatcgtgagaccaggactgaaaatgatcaagaaatttctgaagacacaagatcacatggggtcctactgggaagatttcaaaaggatatttctcagggtctcaagtttaaagaagcctatgaacgagaagtcagtctgaaaaggccgctggggaactcccctggagaaagactgaacaggaaaatgccagattttggtcaagtgacagttgaggagaagctaacccccaggggagagagaagcgagaaatataatgattttgggaacagcttcactgtgaattc

SEQ ID NO: 202071 - DNA, 574 bp, Homo sapiens
  Payload ID: 19862
  Gene Name: zinc finger protein 3
  ENST ID: ENST00000441298
  CDS Start-End: 279-574
gaacttccgttctttgttctgtccccggtgtgtgggtctgtgacagggtccaacagggcctggtccgtgtccggtcccccaaatctgtcgtccctgcccccaggcattggcatcaacaaaagtcagaattcccgggaacttgaacagaggctgctaaattcccagtaattgctcctttggccttctagggactgacttcaaagaaggaaggaaagaatcaggcagctcttccttcaaaagttcctgccttttccgacaaggacagcctgggggatgagatgttggcggctgcgctcctaaaggccaagtcccaggagctggtaacctttgaggatgtagctgtgtacttcatccggaaggagtggaagcgtttggaacctgctcagagggacctctatagagatgtgatgctggagaattacgggaatgtgttctcactggatcgtgagaccaggactgaaaatgatcaagaaatttctgaagacacaagatcacatggggtcctactgggaagatttcaaaaggatatttctcagggtctcaagtttaaagaagcctatgaacgagaagtcag

SEQ ID NO: 202072 - DNA, 1441 bp, Homo sapiens
  Payload ID: 19862
  Gene Name: zinc finger protein 3
  Uniprot ID: P17036
  ENST ID: ENST00000413658
  CDS Start-End: 291-686
ctttgttctgtccccggtgtgtgggtctgtgacagggtccaacagggcctggtccgtgtccggtcccccaaatctgtcgtccctgcccccaggcattggcatcaacaaaagtcagaattcccgggaacttgaacagaggctgctaaattcccagtaattgctcctttggccttctagggactgacttcaaagaaggaaggaaagaatcaggcagtgcttcctcattctcttttaaaacccgcttcccgctgagtctgcacccaggagaccagagagcaccttgcccttccatggaaactcaggctgatctcgtatctcaggaacctcaggccctgcttgacagtgctcttccttcaaaagttcctgccttttccgacaaggacagcctgggggatgagatgttggcggctgcgctcctaaaggccaagtcccaggagctggtaacctttgaggatgtagctgtgtacttcatccggaaggagtggaagcgtttggaacctgctcagagggacctctatagagatgtgatgctggagaattacgggaatgtgttctcactggactggatacacgtctgtttaactacgcaaaaggtaatgctggcatggcttactgggaccctaagtgtggcgaagggactctgctccagtgaactggcgagtgtggaacctcctgacaccttctgaggacctcctgcctgccatgttgctgtggagctcgcactcctcaggcatcccctgatgttgagtgatacaaactctatcaccggaatcgatgctgctgcaatgacaagacttctttctggttttcagattctaaagtttaaaacaacgacaacaacaggagcgcttgaaagttacggtgcttctccctctccagtgtggactcgctgatgtttggaaagattggacttgctacagaaggtctttccacagtgatgacaccagtagggcttttccccggtgtggattctgtggtgtttattgaagttggagctgtggttgaaggctttcccacactccttacacttatatggcttctctccggtgtggagtctctggtgggagctgaggcccgcatgctgactgaagctcttcccacattcgttacactgataaggcttctccccagtgtggatccgatagtgacgaatgaggctgcctttcccgctgaaagccttgccacaatctttgcactgatatggcgcctcttctgtgtgcattctctgatgtttaagaaggtctgagctctgcccaaaagcttttccacacttacagtcatagggccggtccaccaagtgtgttctgtagtggagggtgaggtttgagctgtggctgaaagctttcccacacttggtgcacacgtaaggtttctccccagtgtgtgttctcctgtgtttggtgagatttgagctattactaaaggctttgccacattcagc

SEQ ID NO: 202073 - DNA, 735 bp, Homo sapiens
  Payload ID: 19862
  Gene Name: zinc finger protein 3
  ENST ID: ENST00000449785
  CDS Start-End: 182-735
ggaacttccgttctttgttctgtccccggtgtgtgggtctgtgacagggtccaacagggcctggtccgtgtccggtcccccaaatctgtcgtccctgcccccaggtgcttcctcattctcttttaaaacccgcttcccgctgagtctgcacccaggagaccagagagcaccttgcccttccatggaaactcaggctgatctcgtatctcaggaacctcaggccctgcttgacagtgctcttccttcaaaagttcctgccttttccgacaaggacagcctgggggatgagatgttggcggctgcgctcctaaaggccaagtcccaggagctggtaacctttgaggatgtagctgtgtacttcatccggaaggagtggaagcgtttggaacctgctcagagggacctctatagagatgtgatgctggagaattacgggaatgtgttctcactggatcgtgagaccaggactgaaaatgatcaagaaatttctgaagacacaagatcacatggggtcctactgggaagatttcaaaaggatatttctcagggtctcaagtttaaagaagcctatgaacgagaagtcagtctgaaaaggccgctggggaactcccctggagaaagactgaacaggaaaatgccagattttggtcaagtgacagttgaggagaagctaacccccaggggagagagaagcgagaaatataatgattttgggaacagcttcactgtgaattc

SEQ ID NO: 202074 - DNA, 2718 bp, Homo sapiens
  Payload ID: 19862
  Gene Name: zinc finger protein 3
  Uniprot ID: P17036
  ENST ID: ENST00000424697
  CDS Start-End: 207-1547
aaccgacccggaagcgaaacgagggggaacttccgttctttgttctgtccccggtgtgtgggtctgtgacagggtccaacagggcctggtccgtgtccggtcccccaaatctgtcgtccctgcccccaggtgcttcctcattctcttttaaaacccgcttcccgctgagtctgcacccaggagaccagagagcaccttgcccttccatggaaactcaggctgatctcgtatctcaggaacctcaggccctgcttgacagtgctcttccttcaaaagttcctgccttttccgacaaggacagcctgggggatgagatgttggcggctgcgctcctaaaggccaagtcccaggagctggtaacctttgaggatgtagctgtgtacttcatccggaaggagtggaagcgtttggaacctgctcagagggacctctatagagatgtgatgctggagaattacgggaatgtgttctcactggatcgtgagaccaggactgaaaatgatcaagaaatttctgaagacacaagatcacatggggtcctactgggaagatttcaaaaggatatttctcagggtctcaagtttaaagaagcctatgaacgagaagtcagtctgaaaaggccgctggggaactcccctggagaaagactgaacaggaaaatgccagattttggtcaagtgacagttgaggagaagctaacccccaggggagagagaagcgagaaatataatgattttgggaacagcttcactgtgaattccaaccttatctcacatcagagactccccgtgggagacagaccccataagtgtgatgaatgtagcaagagctttaatcgaacttcagaccttattcaacatcagagaatccacactggggaaaagccctatgaatgtaatgagtgtgggaaggccttcagccagagctcacaccttattcagcatcagagaatccacactggggaaaaaccttatgaatgtagtgattgtgggaaaaccttcagctgtagctctgccctcattctgcatcggaggatccacacgggggagaaaccctatgaatgtaatgagtgtgggaagaccttcagctggagctccaccctcacccaccatcagagaatccacactggtgagaaaccctacgcctgcaatgaatgtgggaaggccttcagcaggagctcaacccttattcaccatcagagaatccacactggagaaaaaccctatgaatgtaatgaatgtgggaaagccttcagccagagctcacacctctatcagcaccagagaatccacactggagagaagccctacgaatgtatggaatgtggaggaaagtttacctacagttcaggccttattcagcatcaaagaatccacaccggggagaacccctatgaatgtagtgagtgtgggaaagccttcaggtacagctcggctcttgttcgccatcagagaattcacactggagagaagcctttgaatgggatcggcatgagcaaaagctccctcagagttacgaccgagttaaatatcagagagtccacgtgaaagagccacacacccattttcctcactttccctgagtctcaagagctcttgccttaccctataaatctcaacagcttaggatgtgtccctttcaactcagacttttcattttagagaatggggcagatggggcaaatcgttgaattttcccagaaatcacaccagccttagaaagcgtcaaggcaagtggatggcgtgctgggaatagaaagcagctctgggaccagttaccccatttaggaaaggagtttgcactaaactgtttttctcacagcagaggaacctttccaaggtggggatggaagcacagtcgggacagaattcgatggattcctttagttggagtccgcgtagtcagcacagacagcagtggaaaggacgctctgggtcctgttatttgctagggagggtaaagggagactatttcaaagctactgttcctagtccagctttaagtttcggtaagaaacatgctgttttgtttcatgatttcgttaattatggaaatttggcattgagggattattttattgagggtagaagagattccagaatcatcatctgtgatgatggtgtcctttagggctcttggagcagccagaccatgtttccaagagaaacctggtgatattgccagcagaccccctgccatcccccccagttgtcctggggctgaatgggcaaatctgtccaaacagctagtaaccggctgtgagggagagggtcagaagcacttagcgttggcctctgattgctgtcctctcttgtcctcttcccactccaatgatgaaaatgattttctctaaatgcctgggtaaggatgctttcaaggagctcacttggcctgcttgccctgccctctcacctctgacacccagccccaggagccagaccactcctgcctccacctctgactcttcagcagctgaagattaatgcagagaaagagcaaagcccaaaagggagaaaaaaaaaacaaaaaaacaaaaaaacgaagcccagagaaggcaggctgtgcctgagcctggtagcagagctcgttgctgggtgaggatggcactccccgagttttcccaaccgacgggatgaccttccattgtgttttcccaaccctgctcatcctgtagcataaatgaagtgcactattaaacagaatagtttttcagaagag

SEQ ID NO: 202075 - DNA, 595 bp, Homo sapiens
  Payload ID: 19862
  Gene Name: zinc finger protein 3
  ENST ID: ENST00000412947
  CDS Start-End: 150-595
gttctttgttctgtccccggtgtgtgggtctgtgacagggtccaacagggcctggtccgtgtccggtcccccaaatctgtcgtccctgcccccaggctcttccttcaaaagttcctgccttttccgacaaggacagcctgggggatgagatgttggcggctgcgctcctaaaggccaagtcccaggagctggtaacctttgaggatgtagctgtgtacttcatccggaaggagtggaagcgtttggaacctgctcagagggacctctatagagatgtgatgctggagaattacgggaatgtgttctcactggatcgtgagaccaggactgaaaatgatcaagaaatttctgaagacacaagatcacatggggtcctactgggaagatttcaaaaggatatttctcagggtctcaagtttaaagaagcctatgaacgagaagtcagtctgaaaaggccgctggggaactcccctggagaaagactgaacaggaaaatgccagattttggtcaagtgacagttgaggagaagctaacccccaggggagagagaagcgagaaatataatgattttgggaacagcttcactgtgaattc

SEQ ID NO: 202076 - DNA, 543 bp, Homo sapiens
  Payload ID: 19862
  Gene Name: zinc finger protein 3
  ENST ID: ENST00000415068
  CDS Start-End: 231-543
aaaattaaaaaataaaagaaaataaaagactagtcccagttgccacatttcttctcactgttcctgggtactcactgaaatactagctcccatctttctgtattcaggaggtttttttgaattatctttgaaccttgaacttttgcttctgcagtgcttcctcattctcttttaaaacccgcttcccgctgagtctgcacccaggagaccagagagcaccttgcccttccatggaaactcaggctgatctcgtatctcaggaacctcaggccctgcttgacagtgctcttccttcaaaagttcctgccttttccgacaaggacagcctgggggatgagatgttggcggctgcgctcctaaaggccaagtcccaggagctggtaacctttgaggatgtagctgtgtacttcatccggaaggagtggaagcgtttggaacctgctcagagggacctctatagagatgtgatgctggagaattacgggaatgtgttctcactggatcgtgagaccaggactgaaaatgatcaagaaatttctgaag

SEQ ID NO: 202077 - DNA, 2579 bp, Homo sapiens
  Payload ID: 19863
  Gene Name: zinc finger protein 30
  Uniprot ID: P17039
  ENST ID: ENST00000303586
  CDS Start-End: 379-2253
cttgtggactgcgccgggcatgctcggcggtgtgacggctcaggactgcatttcccagaggctgcagctatccggccaatgtagcctgaaactacatttctcagcggccactggaacgacctcaatctctgcctcctcgccagttcattgtggtcgttgacccggcagcgagctttggagttcatcgagggagaagtcagcgcccagctccgaggttggagcagccccgccgggcaacttgaatttctgcaaacgaacacagcaccgggagctctgcagacctgtgtcggcgcggaacccggactgagacatgccttttgaacttctcagatagaggaaccccagtgaagactgatcagttcttacaattctcaaagcatggcccataaatatgtgggtttgcagtatcacggatcagtgacatttgaggatgtggccatagccttctcccagcaggagtgggagagtctggactcttcccagaggggcttgtacagagatgtgatgttggagaactacaggaacttggtgtcaatggcaggacattcccgttctaaaccacatgtgatcgccttattggaacaatggaaagagcctgaagtgacagtgaggaaagatggaagaagatggtgcacagatttgcagttggaagatgatacaatcggctgtaaagaaatgcccacctctgaaaactgtccatcttttgctctacatcagaaaataagtagacagaaaccacgtgaatgtcaggaatatggaaagaccctttgtcaagactcaaagcctgttcaacatgaaagaatacatagtagtgaaaaacccaacagatgtaaagaatgtgggaagaactttagtaatggacatcaactcaccatacatcagagattgcatgttggtgagaaaccctataaatatgaaaaatgtgggaaggcctttatcagtggctcagcctttgttaagcatgggagaattcacactggtgagaagccactcaaatgtaagcaatgtggaaagactattagtggtagctatcaacttacagtacataagagtattcatactgggaagaaaccatatgagtgcggggaatgtgggaaagcttttctagtatatggaaagcttacccggcatcagagtactcacactggtgaaaaaccctttgggtgtgaggagtgtgggaaggccttcagtaccttttcatacctggttcaacatcagcgaattcataccagtgaaaaaccttacgaatgcaaagaatgtgggaaggcctttagcactagctcaccccttgctaagcatcagagaattcatactggcgagaaaccctatgaatgtaaggagtgtgggaagtccttcactgtgtatggacagcttactcgacatcagagtattcatactggtgagaaaccttttgaatgtaaggaatgtggaaaggcctttagacttagttccttccttcatgcacatcagcgaattcatgcagagataaagccctacggatgcaaggaatgcgggagaaccttcagtcgtgcctcatatcttgttcaacatggaagacttcacactggcgagaagccctatgaatgtaaggagtgtggcaaggcctttagtactggctcataccttgttcagcatcagaggatccatactggggagaaaccctatgaatgtaaggaatgtggcaaagcctttattagtcgccatcagcttaccgtacatcaaagggttcatactggagagaaaccctatgagtgtaaggaatgtggcaaggccttcagagtgcacgtacatctcacacagcatcggaaaattcatactgatgtaaagccctatgaatgtaaggaatgtggaaagacttttagtcgagcctcgtaccttgtacaacatagcagaatccatactggtaagaagccctatgagtgtaaggagtgtggcaaggccttcagttctggctcataccttgttcagcatcaaagaattcatactggggagaaaccctatgaatgtaacaaatgtgggaaagcctttactgtttatggacaacttattggacatcagagtgttcacactggtgagaaaccttttgaatgtaaggaatgcgggaaggcctttagacttaattcattccttactgaacatcagcgggtacacactggtgagaaaccctttaaatgcaaaaaatgtgggaagacctttagatacagttcagcccttaaagtgcatctgagaaaacatatgagtgttataccctaagagtctgaggagtgtgggaagtgcttcgtgtgtggctcaaacattgttgaacatcggggaatttatgctggtaggaaactttcaaatgtgaagaatattggcaggtctattctcatcttataattcataatataactcagaaaacataagaatattcctttgtcatttataggtttgtaataccaatatttatactggtggaccattcagaaaaagtgggaaacgttattacttaatggttacagcactgacagcatgaacttttatatgatgcatttattctaatgtgattgtatgaacaagtgaataaaaaaccttggacctcc

SEQ ID NO: 202078 - DNA, 2651 bp, Homo sapiens
  Payload ID: 19863
  Gene Name: zinc finger protein 30
  Uniprot ID: P17039
  ENST ID: ENST00000439785
  CDS Start-End: 445-2319
cttgtggactgcgccgggcatgctcggcggtgtgacggctcaggactgcatttcccagaggctgcagctatccggccaatgtagcctgaaactacatttctcagcggccactggaacgacctcaatctctgcctcctcgccagttcattgtggtcgttgacccggcagcgagctttggagttcatcgagggagaagtcagcgcccagctccgaggttggagcagccccgccgggcaacttgaatttctgcaaacgaacacagcaccgggagctctgcagacctgtgtcggcgcggaacccggactgagacatgcgtgagcgttgggtggaccgggcgaggatcccgggccggcgagtgcgggagcggcagggcagggaggcttttgaacttctcagatagaggaaccccagtgaagactgatcagttcttacaattctcaaagcatggcccataaatatgtgggtttgcagtatcacggatcagtgacatttgaggatgtggccatagccttctcccagcaggagtgggagagtctggactcttcccagaggggcttgtacagagatgtgatgttggagaactacaggaacttggtgtcaatggcaggacattcccgttctaaaccacatgtgatcgccttattggaacaatggaaagagcctgaagtgacagtgaggaaagatggaagaagatggtgcacagatttgcagttggaagatgatacaatcggctgtaaagaaatgcccacctctgaaaactgtccatcttttgctctacatcagaaaataagtagacagaaaccacgtgaatgtcaggaatatggaaagaccctttgtcaagactcaaagcctgttcaacatgaaagaatacatagtagtgaaaaacccaacagatgtaaagaatgtgggaagaactttagtaatggacatcaactcaccatacatcagagattgcatgttggtgagaaaccctataaatatgaaaaatgtgggaaggcctttatcagtggctcagcctttgttaagcatgggagaattcacactggtgagaagccactcaaatgtaagcaatgtggaaagactattagtggtagctatcaacttacagtacataagagtattcatactgggaagaaaccatatgagtgcggggaatgtgggaaagcttttctagtatatggaaagcttacccggcatcagagtactcacactggtgaaaaaccctttgggtgtgaggagtgtgggaaggccttcagtaccttttcatacctggttcaacatcagcgaattcataccagtgaaaaaccttacgaatgcaaagaatgtgggaaggcctttagcactagctcaccccttgctaagcatcagagaattcatactggcgagaaaccctatgaatgtaaggagtgtgggaagtccttcactgtgtatggacagcttactcgacatcagagtattcatactggtgagaaaccttttgaatgtaaggaatgtggaaaggcctttagacttagttccttccttcatgcacatcagcgaattcatgcagagataaagccctacggatgcaaggaatgcgggagaaccttcagtcgtgcctcatatcttgttcaacatggaagacttcacactggcgagaagccctatgaatgtaaggagtgtggcaaggcctttagtactggctcataccttgttcagcatcagaggatccatactggggagaaaccctatgaatgtaaggaatgtggcaaagcctttattagtcgccatcagcttaccgtacatcaaagggttcatactggagagaaaccctatgagtgtaaggaatgtggcaaggccttcagagtgcacgtacatctcacacagcatcggaaaattcatactgatgtaaagccctatgaatgtaaggaatgtggaaagacttttagtcgagcctcgtaccttgtacaacatagcagaatccatactggtaagaagccctatgagtgtaaggagtgtggcaaggccttcagttctggctcataccttgttcagcatcaaagaattcatactggggagaaaccctatgaatgtaacaaatgtgggaaagcctttactgtttatggacaacttattggacatcagagtgttcacactggtgagaaaccttttgaatgtaaggaatgcgggaaggcctttagacttaattcattccttactgaacatcagcgggtacacactggtgagaaaccctttaaatgcaaaaaatgtgggaagacctttagatacagttcagcccttaaagtgcatctgagaaaacatatgagtgttataccctaagagtctgaggagtgtgggaagtgcttcgtgtgtggctcaaacattgttgaacatcggggaatttatgctggtaggaaactttcaaatgtgaagaatattggcaggtctattctcatcttataattcataatataactcagaaaacataagaatattcctttgtcatttataggtttgtaataccaatatttatactggtggaccattcagaaaaagtgggaaacgttattacttaatggttacagcactgacagcatgaacttttatatgatgcatttattctaatgtgattgtatgaacaagtgaataaaaaaccttggacctcctaaacc

SEQ ID NO: 202079 - DNA, 2280 bp, Homo sapiens
  Payload ID: 19863
  Gene Name: zinc finger protein 30
  Uniprot ID: P17039
  ENST ID: ENST00000601142
  CDS Start-End: 238-2109
agttcattgtggtcgttgacccggcagcgagctttggagttcatcgagggagaagtcagcgcccagctccgaggttggagcagccccgccgggcaacttgaatttctgcaaacgaacacagcaccgggagctctgcagacctgtgtcggcgcggaacccggactgagacatgccttttgaacttctcagatagaggaaccccagtgaagactgatcagttcttacaattctcaaagcatggcccataaatatgtgggtttgcagtatcacggatcagtgacatttgaggatgtggccatagccttctcccagcaggagtgggagagtctggactcttcccagaggggcttgtacagagatgtgatgttggagaactacaggaacttggtgtcaatgggacattcccgttctaaaccacatgtgatcgccttattggaacaatggaaagagcctgaagtgacagtgaggaaagatggaagaagatggtgcacagatttgcagttggaagatgatacaatcggctgtaaagaaatgcccacctctgaaaactgtccatcttttgctctacatcagaaaataagtagacagaaaccacgtgaatgtcaggaatatggaaagaccctttgtcaagactcaaagcctgttcaacatgaaagaatacatagtagtgaaaaacccaacagatgtaaagaatgtgggaagaactttagtaatggacatcaactcaccatacatcagagattgcatgttggtgagaaaccctataaatatgaaaaatgtgggaaggcctttatcagtggctcagcctttgttaagcatgggagaattcacactggtgagaagccactcaaatgtaagcaatgtggaaagactattagtggtagctatcaacttacagtacataagagtattcatactgggaagaaaccatatgagtgcggggaatgtgggaaagcttttctagtatatggaaagcttacccggcatcagagtactcacactggtgaaaaaccctttgggtgtgaggagtgtgggaaggccttcagtaccttttcatacctggttcaacatcagcgaattcataccagtgaaaaaccttacgaatgcaaagaatgtgggaaggcctttagcactagctcaccccttgctaagcatcagagaattcatactggcgagaaaccctatgaatgtaaggagtgtgggaagtccttcactgtgtatggacagcttactcgacatcagagtattcatactggtgagaaaccttttgaatgtaaggaatgtggaaaggcctttagacttagttccttccttcatgcacatcagcgaattcatgcagagataaagccctacggatgcaaggaatgcgggagaaccttcagtcgtgcctcatatcttgttcaacatggaagacttcacactggcgagaagccctatgaatgtaaggagtgtggcaaggcctttagtactggctcataccttgttcagcatcagaggatccatactggggagaaaccctatgaatgtaaggaatgtggcaaagcctttattagtcgccatcagcttaccgtacatcaaagggttcatactggagagaaaccctatgagtgtaaggaatgtggcaaggccttcagagtgcacgtacatctcacacagcatcggaaaattcatactgatgtaaagccctatgaatgtaaggaatgtggaaagacttttagtcgagcctcgtaccttgtacaacatagcagaatccatactggtaagaagccctatgagtgtaaggagtgtggcaaggccttcagttctggctcataccttgttcagcatcaaagaattcatactggggagaaaccctatgaatgtaacaaatgtgggaaagcctttactgtttatggacaacttattggacatcagagtgttcacactggtgagaaaccttttgaatgtaaggaatgcgggaaggcctttagacttaattcattccttactgaacatcagcgggtacacactggtgagaaaccctttaaatgcaaaaaatgtgggaagacctttagatacagttcagcccttaaagtgcatctgagaaaacatatgagtgttataccctaagagtctgaggagtgtgggaagtgcttcgtgtgtggctcaaacattgttgaacatcggggaatttatgctggtaggaaactttcaaatgtgaagaatattggcaggtctattctcatcttataattcataatataactcagaaaacataagaatattcctttgtcatttata

SEQ ID NO: 202080 - DNA, 2583 bp, Homo sapiens
  Payload ID: 19863
  Gene Name: zinc finger protein 30
  Uniprot ID: P17039
  ENST ID: ENST00000601957
  CDS Start-End: 302-562
aatgtagcctgaaactacatttctcagcggccactggaacgacctcaatctctgcctcctcgccagttcattgtggtcgttgacccggcagcgagctttggagttcatcgagggagaagtcagcgcccagctccgaggttggagcagccccgccgggcaacttgaatttctgcaaacgaacacagcaccgggagctctgcagacctgtgtcggcgcggaacccggactgagacatgccttttgaacttctcagatagaggaaccccagtgaagactgatcagttcttacaattctcaaagcatggcccataaatatgtgggtttgcagtatcacggatcagtgacatttgaggatgtggccatagccttctcccagcaggagtgggagagtctggactcttcccagaggggcttgtacagagatgtgatgttggagaactacaggaacttggtgtcaatgggacattcccgttctaaaccacatgtgatcgccttattggaacaatggaaagagcctgaagtgacagtgaggaaagatggaagaagatggtgcacaggataagaaagctccagtctacaaacaaaacatgccagaagatttttaggcgatgatgccacctgcacatggaaccaaaagatttgcagttggaagatgatacaatcggctgtaaagaaatgcccacctctgaaaactgtccatcttttgctctacatcagaaaataagtagacagaaaccacgtgaatgtcaggaatatggaaagaccctttgtcaagactcaaagcctgttcaacatgaaagaatacatagtagtgaaaaacccaacagatgtaaagaatgtgggaagaactttagtaatggacatcaactcaccatacatcagagattgcatgttggtgagaaaccctataaatatgaaaaatgtgggaaggcctttatcagtggctcagcctttgttaagcatgggagaattcacactggtgagaagccactcaaatgtaagcaatgtggaaagactattagtggtagctatcaacttacagtacataagagtattcatactgggaagaaaccatatgagtgcggggaatgtgggaaagcttttctagtatatggaaagcttacccggcatcagagtactcacactggtgaaaaaccctttgggtgtgaggagtgtgggaaggccttcagtaccttttcatacctggttcaacatcagcgaattcataccagtgaaaaaccttacgaatgcaaagaatgtgggaaggcctttagcactagctcaccccttgctaagcatcagagaattcatactggcgagaaaccctatgaatgtaaggagtgtgggaagtccttcactgtgtatggacagcttactcgacatcagagtattcatactggtgagaaaccttttgaatgtaaggaatgtggaaaggcctttagacttagttccttccttcatgcacatcagcgaattcatgcagagataaagccctacggatgcaaggaatgcgggagaaccttcagtcgtgcctcatatcttgttcaacatggaagacttcacactggcgagaagccctatgaatgtaaggagtgtggcaaggcctttagtactggctcataccttgttcagcatcagaggatccatactggggagaaaccctatgaatgtaaggaatgtggcaaagcctttattagtcgccatcagcttaccgtacatcaaagggttcatactggagagaaaccctatgagtgtaaggaatgtggcaaggccttcagagtgcacgtacatctcacacagcatcggaaaattcatactgatgtaaagccctatgaatgtaaggaatgtggaaagacttttagtcgagcctcgtaccttgtacaacatagcagaatccatactggtaagaagccctatgagtgtaaggagtgtggcaaggccttcagttctggctcataccttgttcagcatcaaagaattcatactggggagaaaccctatgaatgtaacaaatgtgggaaagcctttactgtttatggacaacttattggacatcagagtgttcacactggtgagaaaccttttgaatgtaaggaatgcgggaaggcctttagacttaattcattccttactgaacatcagcgggtacacactggtgagaaaccctttaaatgcaaaaaatgtgggaagacctttagatacagttcagcccttaaagtgcatctgagaaaacatatgagtgttataccctaagagtctgaggagtgtgggaagtgcttcgtgtgtggctcaaacattgttgaacatcggggaatttatgctggtaggaaactttcaaatgtgaagaatattggcaggtctattctcatcttataattcataatataactcagaaaacataagaatattcctttgtcatttataggtttgtaataccaatatttatactggtggaccattcagaaaaagtgggaaacgttattacttaatggttacagcactgacagcatgaacttttatatgatgcatttattctaatgtgattgtatgaacaagtgaataaaaaaccttggacctcctaaa

SEQ ID NO: 202081 - DNA, 696 bp, Homo sapiens
  Payload ID: 19863
  Gene Name: zinc finger protein 30
  ENST ID: ENST00000601540
  CDS Start-End: 438-696
actgcgccgggcatgctcggcggtgtgacggctcaggactgcatttcccagaggctgcagctatccggccaatgtagcctgaaactacatttctcagcggccactggaacgacctcaatctctgcctcctcgccagttcattgtggtcgttgacccggcagcgagctttggagttcatcgagggagaagtcagcgcccagctccgaggttggagcagccccgccgggcaacttgaatttctgcaaacgaacacagcaccgggagctctgcagacctgtgtcggcgcggaacccggactgagacatgcgtgagcgttgggtggaccgggcgaggatcccgggccggcgagtgcgggagcggcagggcagggaggcttttgaacttctcagatagaggaaccccagtgaagactgatcagttcttacaattctcaaagcatggcccataaatatgtgggtttgcagtatcacggatcagtgacatttgaggatgtggccatagccttctcccagcaggagtgggagagtctggactcttcccagaggggcttgtacagagatgtgatgttggagaactacaggaacttggtgtcaatggcaggacattcccgttctaaaccacatgtgatcgccttattggaacaatggaaagagcctgaagtgacagtgaggaaagatggaagaagatggtgcacag

SEQ ID NO: 202082 - DNA, 3268 bp, Homo sapiens
  Payload ID: 19864
  Gene Name: zinc finger protein 300
  Uniprot ID: Q96RE9
  ENST ID: ENST00000274599
  CDS Start-End: 422-2236
agtacgaagacgaccgggctctcaagatggcggccccatgcggaaacagctccagggagcagccatgttgcttcctgaacaaagcctctgaagatgcggaacgggcaaaaccgcccagtacggaacggcgcagcctcgggagcccggtgtggtgctcgcggacaggaagcaggagagtttgccaatagggatgtgacagcggttcccattaagcggtgatggtggttttgggacctgataatcgagctgggagtcagaggcgggatgtgtgcggtgaaggatgttttgatacccccatataaaataatctgtctgtcatgggagcccccacgtcctctgaaatagttcagctctgtctgcatgacttgtcctgggactgaggaaaatttaccagtcatctggccttttggaagagcaaaaaatgatgaagtcccaggggttagtatcattcaaggatgtggctgtggatttcacccaggaggagtggcagcaacttgacccttctcagaggaccctgtacagggatgtgatgctggagaactacagccacctggtctcaatggggtatccagtttccaaaccagatgtcatctccaagttggaacaaggagaagagccatggatcataaagggagacatatcaaattggatctatccagatgaatatcaggcagatgggagacaagacaggaagagtaaccttcacaactcccagtcatgtattttggggacagtttccttccatcataagatactgaaaggagtcacaagggatggttcattgtgctccattttaaaagtctgtcaaggtgatggtcagctgcagagatttctagagaatcaagacaaactcttcaggcaggtcacatttgttaacagcaaaacagtgactgaggcatcagggcataaatataatccactggggaaaatatttcaagagtgcatagaaacagatatatcaatacagagattccataaatatgatgcttttaaaaagaacttaaaaccaaatattgacctaccgagttgttataagagcaattcaagaaaaaaacctgatcagagttttggaggtggaaaatcatctagccagagtgagcccaattctaatcttgagaagattcacaatggagtaataccttttgatgataatcagtgtggaaacgtttttagaaatacacaatcccttattcaatatcagaatgtggaaactaaagagaaaagctgtgtatgtgttacatgtggaaaagcctttgctaagaagtcacaactcattgtacatcaaagaattcatactggaaagaaaccatatgattgtggtgcatgcggaaaagccttcagtgagaagtttcatcttgttgtacatcagagaactcatactggggagaaaccttatgattgttctgaatgtggaaaagccttctctcagaaatcgtcccttattatacatcagagagttcacactggggaaaaaccctatgaatgtagtgaatgcgggaaagccttctcccagaaatcacccctcattatacatcagagaatacatactggggaaaaaccctatgaatgtagagagtgtgggaaggccttttcccagaagtcacagctgattatacaccacagagctcatactggagagaagccgtatgagtgtaccgaatgtgggaaagccttctgtgagaagtcccacctcattatacataaaagaattcacactggtgagaaaccctacaaatgtgctcaatgtgaggaagccttcagcaggaagacagaactcattacacatcagttagttcatactggggaaaaaccttatgaatgtactgaatgtggaaagacattctcccgcaagtcacagctcatcatacatcagagaacacatactggagaaaaaccctataaatgtagtgaatgtggcaaagccttctgccagaagtcacatctcattggacatcagagaattcacacaggagaaaaaccttatatatgtactgaatgtgggaaagccttctctcagaagtcccaccttccgggacaccagcgaattcatacaggagagaaaccttacatatgtgctgaatgtggaaaggccttttctcagaagtcagaccttgttttacatcagaggattcatactggggaaagaccctatcaatgtgctatatgtgggaaggccttcatccagaagtcacaactaactgtacaccagagaattcacacagtggtaaaatcataatgaactggccacagaaaagccttagtattagctcaagccttaataattactagaaacccaattaatttgataagcttggggacaacatcccaatagataaaaatttttaagggaatttgtttctagtttggtgatgcctaacttttccagcaaagatgatggaaaatagttatataaatgaagaacatttttaatatggcatgtaaagcttttaaagttatgaactcagtgatcagcacagcaagttaagcatacagaatattgtcaagttgcatattccttatactacaaaatgataatcagccattgtgaaactgctaatattagcttgtcataattatggccataaactaatttttctataaaagacgtggaagaaagcttaagtaaacaataaaataaaacctatacactattttaagaaggggcttgagcatgacccctaaagctacatgtaaagttcttgtacaaaaaatggaatgataggttgatcagattcagtaaagttgatctgtatgcattttcccatctcaagcatataagttgacctgcatctctggaaggaccttgagattgatgcattttgagcaggtctcccttttactcttcccaactgggaacttggagctgaaaaacattggcactgaggccagatggccttgggtttaatcctggctcagtgcctcacagattgtgtgactttaggcaaacatacttctcctagctgagtattttttatcagtaagtacaaatacaatgcagagctcattttcagttaatattagtactttttaaatctttactctctatcttgaagcattagatgttaagactaatgtgtaaaaaccacgtctgagcttgcttttccctctggacactctgcttttgattgcctatccctataagtggctcattttactgtcttctgatcctggtggccttatttttgctatgttaaggttgtgttttttaatacttggatttattttcatatacttacataaaccgtggtgattgcacataaagaccctg

SEQ ID NO: 202083 - DNA, 3256 bp, Homo sapiens
  Payload ID: 19864
  Gene Name: zinc finger protein 300
  ENST ID: ENST00000394226
  CDS Start-End: 417-2231
gaagacgaccgggctctcaagatggcggccccatgcggaaacagctccagggagcagccatgttgcttcctgaacaaagcctctgaagatgcggaacgggcaaaaccgcccagtacggaacggcgcagcctcgggagcccggtgtggtgctcgcggacaggaagcaggagagtttgccaatagggatgtgacagcggttcccattaagcggtgatggtggttttgggacctgataatcgagctgggagtcagaggcgggatgtgtgcggtgaaggatgttttgatacccccatataaaataatctgtctgtcatgggagcccccacgtcctctgaaatagttcagctctgtctgcatgacttgtcctgggactgaggaaaatttaccagtcatctggccttttggaagagcaaaaaatgatgaagtcccaggggttagtatcattcaaggatgtggctgtggatttcacccaggaggagtggcagcaacttgacccttctcagaggaccctgtacagggatgtgatgctggagaactacagccacctggtctcaatggggtatccagtttccaaaccagatgtcatctccaagttggaacaaggagaagagccatggatcataaagggagacatatcaaattggatctatccagatgaatatcaggcagatgggagacaagggaagaagagtaaccttcacaactcccagtcatgtattttggggacagtttccttccatcataagatactgaaaggagtcacaagggatggttcattgtgctccattttaaaagtctgtcaaggtgatggtcagctgcagagatttctagagaatcaagacaaactcttcaggcaggtcacatttgttaacagcaaaacagtgactgaggcatcagggcataaatataatccactggggaaaatatttcaagagtgcatagaaacagatatatcaatacagagattccataaatatgatgcttttaaaaagaacttaaaaccaaatattgacctaccgagttgttataagagcaattcaagaaaaaaacctgatcagagttttggaggtggaaaatcatctagccagagtgagcccaattctaatcttgagaagattcacaatggagtaataccttttgatgataatcagtgtggaaacgtttttagaaatacacaatcccttattcaatatcagaatgtggaaactaaagagaaaagctgtgtatgtgttacatgtggaaaagcctttgctaagaagtcacaactcattgtacatcaaagaattcatactggaaagaaaccatatgattgtggtgcatgcggaaaagccttcagtgagaagtttcatcttgttgtacatcagagaactcatactggggagaaaccttatgattgttctgaatgtggaaaagccttctctcagaaatcgtcccttattatacatcagagagttcacactggggaaaaaccctatgaatgtagtgaatgcgggaaagccttctcccagaaatcacccctcattatacatcagagaatacatactggggaaaaaccctatgaatgtagagagtgtgggaaggccttttcccagaagtcacagctgattatacaccacagagctcatactggagagaagccgtatgagtgtaccgaatgtgggaaagccttctgtgagaagtcccacctcattatacataaaagaattcacactggtgagaaaccctacaaatgtgctcaatgtgaggaagccttcagcaggaagacagaactcattacacatcagttagttcatactggggaaaaaccttatgaatgtactgaatgtggaaagacattctcccgcaagtcacagctcatcatacatcagagaacacatactggagaaaaaccctataaatgtagtgaatgtggcaaagccttctgccagaagtcacatctcattggacatcagagaattcacacaggagaaaaaccttatatatgtactgaatgtgggaaagccttctctcagaagtcccaccttccgggacaccagcgaattcatacaggagagaaaccttacatatgtgctgaatgtggaaaggccttttctcagaagtcagaccttgttttacatcagaggattcatactggggaaagaccctatcaatgtgctatatgtgggaaggccttcatccagaagtcacaactaactgtacaccagagaattcacacagtggtaaaatcataatgaactggccacagaaaagccttagtattagctcaagccttaataattactagaaacccaattaatttgataagcttggggacaacatcccaatagataaaaatttttaagggaatttgtttctagtttggtgatgcctaacttttccagcaaagatgatggaaaatagttatataaatgaagaacatttttaatatggcatgtaaagcttttaaagttatgaactcagtgatcagcacagcaagttaagcatacagaatattgtcaagttgcatattccttatactacaaaatgataatcagccattgtgaaactgctaatattagcttgtcataattatggccataaactaatttttctataaaagacgtggaagaaagcttaagtaaacaataaaataaaacctatacactattttaagaaggggcttgagcatgacccctaaagctacatgtaaagttcttgtacaaaaaatggaatgataggttgatcagattcagtaaagttgatctgtatgcattttcccatctcaagcatataagttgacctgcatctctggaaggaccttgagattgatgcattttgagcaggtctcccttttactcttcccaactgggaacttggagctgaaaaacattggcactgaggccagatggccttgggtttaatcctggctcagtgcctcacagattgtgtgactttaggcaaacatacttctcctagctgagtattttttatcagtaagtacaaatacaatgcagagctcattttcagttaatattagtactttttaaatctttactctctatcttgaagcattagatgttaagactaatgtgtaaaaaccacgtctgagcttgcttttccctctggacactctgcttttgattgcctatccctataagtggctcattttactgtcttctgatcctggtggccttatttttgctatgttaaggttgtgttttttaatacttggatttattttcatatacttacataaaccgtggtgattgcacataaa

SEQ ID NO: 202084 - DNA, 3226 bp, Homo sapiens
  Payload ID: 19864
  Gene Name: zinc finger protein 300
  Uniprot ID: Q96RE9
  ENST ID: ENST00000418587
  CDS Start-End: 488-2194
agtacgaagacgaccgggctctcaagatggcggccccatgcggaaacagctccagggagcagccatgttgcttcctgaacaaagcctctgaagatgcggaacgggcaaaaccgcccagtacggaacggcgcagcctcgggagcccggtgtggtgctcgcggacaggaagcaggagagtttgccaatagggatgtgacagcggttcccattaagcggtgatggtggttttgggacctgataatcgagctgggagtcagaggcgggatgtgtgcggtgaaggatgttttgatacccccatataaaataatctgtctgtcatgggagcccccacgtcctctgaaatagttcagctctgtctgcatgacttgtcctgggactgaggaaaatttaccaggggttagtatcattcaaggatgtggctgtggatttcacccaggaggagtggcagcaacttgacccttctcagaggaccctgtacagggatgtgatgctggagaactacagccacctggtctcaatggggtatccagtttccaaaccagatgtcatctccaagttggaacaaggagaagagccatggatcataaagggagacatatcaaattggatctatccagatgaatatcaggcagatgggagacaagacaggaagagtaaccttcacaactcccagtcatgtattttggggacagtttccttccatcataagatactgaaaggagtcacaagggatggttcattgtgctccattttaaaagtctgtcaaggtgatggtcagctgcagagatttctagagaatcaagacaaactcttcaggcaggtcacatttgttaacagcaaaacagtgactgaggcatcagggcataaatataatccactggggaaaatatttcaagagtgcatagaaacagatatatcaatacagagattccataaatatgatgcttttaaaaagaacttaaaaccaaatattgacctaccgagttgttataagagcaattcaagaaaaaaacctgatcagagttttggaggtggaaaatcatctagccagagtgagcccaattctaatcttgagaagattcacaatggagtaataccttttgatgataatcagtgtggaaacgtttttagaaatacacaatcccttattcaatatcagaatgtggaaactaaagagaaaagctgtgtatgtgttacatgtggaaaagcctttgctaagaagtcacaactcattgtacatcaaagaattcatactggaaagaaaccatatgattgtggtgcatgcggaaaagccttcagtgagaagtttcatcttgttgtacatcagagaactcatactggggagaaaccttatgattgttctgaatgtggaaaagccttctctcagaaatcgtcccttattatacatcagagagttcacactggggaaaaaccctatgaatgtagtgaatgcgggaaagccttctcccagaaatcacccctcattatacatcagagaatacatactggggaaaaaccctatgaatgtagagagtgtgggaaggccttttcccagaagtcacagctgattatacaccacagagctcatactggagagaagccgtatgagtgtaccgaatgtgggaaagccttctgtgagaagtcccacctcattatacataaaagaattcacactggtgagaaaccctacaaatgtgctcaatgtgaggaagccttcagcaggaagacagaactcattacacatcagttagttcatactggggaaaaaccttatgaatgtactgaatgtggaaagacattctcccgcaagtcacagctcatcatacatcagagaacacatactggagaaaaaccctataaatgtagtgaatgtggcaaagccttctgccagaagtcacatctcattggacatcagagaattcacacaggagaaaaaccttatatatgtactgaatgtgggaaagccttctctcagaagtcccaccttccgggacaccagcgaattcatacaggagagaaaccttacatatgtgctgaatgtggaaaggccttttctcagaagtcagaccttgttttacatcagaggattcatactggggaaagaccctatcaatgtgctatatgtgggaaggccttcatccagaagtcacaactaactgtacaccagagaattcacacagtggtaaaatcataatgaactggccacagaaaagccttagtattagctcaagccttaataattactagaaacccaattaatttgataagcttggggacaacatcccaatagataaaaatttttaagggaatttgtttctagtttggtgatgcctaacttttccagcaaagatgatggaaaatagttatataaatgaagaacatttttaatatggcatgtaaagcttttaaagttatgaactcagtgatcagcacagcaagttaagcatacagaatattgtcaagttgcatattccttatactacaaaatgataatcagccattgtgaaactgctaatattagcttgtcataattatggccataaactaatttttctataaaagacgtggaagaaagcttaagtaaacaataaaataaaacctatacactattttaagaaggggcttgagcatgacccctaaagctacatgtaaagttcttgtacaaaaaatggaatgataggttgatcagattcagtaaagttgatctgtatgcattttcccatctcaagcatataagttgacctgcatctctggaaggaccttgagattgatgcattttgagcaggtctcccttttactcttcccaactgggaacttggagctgaaaaacattggcactgaggccagatggccttgggtttaatcctggctcagtgcctcacagattgtgtgactttaggcaaacatacttctcctagctgagtattttttatcagtaagtacaaatacaatgcagagctcattttcagttaatattagtactttttaaatctttactctctatcttgaagcattagatgttaagactaatgtgtaaaaaccacgtctgagcttgcttttccctctggacactctgcttttgattgcctatccctataagtggctcattttactgtcttctgatcctggtggccttatttttgctatgttaaggttgtgttttttaatacttggatttattttcatatacttacataaaccgtggtgattgcacataaagaccctg

SEQ ID NO: 202085 - DNA, 3323 bp, Homo sapiens
  Payload ID: 19864
  Gene Name: zinc finger protein 300
  Uniprot ID: Q96RE9
  ENST ID: ENST00000446148
  CDS Start-End: 429-2291
agtacgaagacgaccgggctctcaagatggcggccccatgcggaaacagctccagggagcagccatgttgcttcctgaacaaagcctctgaagatgcggaacgggcaaaaccgcccagtacggaacggcgcagcctcgggagcccggtgtggtgctcgcggacaggaagcaggagagtttgccaatagggatgtgacagcggttcccattaagcggtgatggtggttttgggacctgataatcgagctgggagtcagaggcgggatgtgtgcggtgaaggatgttttgatacccccatataaaataatctgtctgtcatgggagcccccacgtcctctgaaatagttcagctctgtctgcatgacttgtcctgggactgaggaaaatttaccaggtacaagaggagtaaagaatgatccctcctccacatggtgcctgctgagacttcttcatctggccttttggaagagcaaaaaatgatgaagtcccaggggttagtatcattcaaggatgtggctgtggatttcacccaggaggagtggcagcaacttgacccttctcagaggaccctgtacagggatgtgatgctggagaactacagccacctggtctcaatggggtatccagtttccaaaccagatgtcatctccaagttggaacaaggagaagagccatggatcataaagggagacatatcaaattggatctatccagatgaatatcaggcagatgggagacaagacaggaagagtaaccttcacaactcccagtcatgtattttggggacagtttccttccatcataagatactgaaaggagtcacaagggatggttcattgtgctccattttaaaagtctgtcaaggtgatggtcagctgcagagatttctagagaatcaagacaaactcttcaggcaggtcacatttgttaacagcaaaacagtgactgaggcatcagggcataaatataatccactggggaaaatatttcaagagtgcatagaaacagatatatcaatacagagattccataaatatgatgcttttaaaaagaacttaaaaccaaatattgacctaccgagttgttataagagcaattcaagaaaaaaacctgatcagagttttggaggtggaaaatcatctagccagagtgagcccaattctaatcttgagaagattcacaatggagtaataccttttgatgataatcagtgtggaaacgtttttagaaatacacaatcccttattcaatatcagaatgtggaaactaaagagaaaagctgtgtatgtgttacatgtggaaaagcctttgctaagaagtcacaactcattgtacatcaaagaattcatactggaaagaaaccatatgattgtggtgcatgcggaaaagccttcagtgagaagtttcatcttgttgtacatcagagaactcatactggggagaaaccttatgattgttctgaatgtggaaaagccttctctcagaaatcgtcccttattatacatcagagagttcacactggggaaaaaccctatgaatgtagtgaatgcgggaaagccttctcccagaaatcacccctcattatacatcagagaatacatactggggaaaaaccctatgaatgtagagagtgtgggaaggccttttcccagaagtcacagctgattatacaccacagagctcatactggagagaagccgtatgagtgtaccgaatgtgggaaagccttctgtgagaagtcccacctcattatacataaaagaattcacactggtgagaaaccctacaaatgtgctcaatgtgaggaagccttcagcaggaagacagaactcattacacatcagttagttcatactggggaaaaaccttatgaatgtactgaatgtggaaagacattctcccgcaagtcacagctcatcatacatcagagaacacatactggagaaaaaccctataaatgtagtgaatgtggcaaagccttctgccagaagtcacatctcattggacatcagagaattcacacaggagaaaaaccttatatatgtactgaatgtgggaaagccttctctcagaagtcccaccttccgggacaccagcgaattcatacaggagagaaaccttacatatgtgctgaatgtggaaaggccttttctcagaagtcagaccttgttttacatcagaggattcatactggggaaagaccctatcaatgtgctatatgtgggaaggccttcatccagaagtcacaactaactgtacaccagagaattcacacagtggtaaaatcataatgaactggccacagaaaagccttagtattagctcaagccttaataattactagaaacccaattaatttgataagcttggggacaacatcccaatagataaaaatttttaagggaatttgtttctagtttggtgatgcctaacttttccagcaaagatgatggaaaatagttatataaatgaagaacatttttaatatggcatgtaaagcttttaaagttatgaactcagtgatcagcacagcaagttaagcatacagaatattgtcaagttgcatattccttatactacaaaatgataatcagccattgtgaaactgctaatattagcttgtcataattatggccataaactaatttttctataaaagacgtggaagaaagcttaagtaaacaataaaataaaacctatacactattttaagaaggggcttgagcatgacccctaaagctacatgtaaagttcttgtacaaaaaatggaatgataggttgatcagattcagtaaagttgatctgtatgcattttcccatctcaagcatataagttgacctgcatctctggaaggaccttgagattgatgcattttgagcaggtctcccttttactcttcccaactgggaacttggagctgaaaaacattggcactgaggccagatggccttgggtttaatcctggctcagtgcctcacagattgtgtgactttaggcaaacatacttctcctagctgagtattttttatcagtaagtacaaatacaatgcagagctcattttcagttaatattagtactttttaaatctttactctctatcttgaagcattagatgttaagactaatgtgtaaaaaccacgtctgagcttgcttttccctctggacactctgcttttgattgcctatccctataagtggctcattttactgtcttctgatcctggtggccttatttttgctatgttaaggttgtgttttttaatacttggatttattttcatatacttacataaaccgtggtgattgcacataaagaccctg

SEQ ID NO: 202086 - DNA, 4155 bp, Homo sapiens
  Payload ID: 19864
  Gene Name: zinc finger protein 300
  ENST ID: ENST00000427179
  CDS Start-End: 228-500
gacagcggttcccattaagcggtgatggtggttttgggacctgataatcgagctgggagtcagaggcgggatgtgtgcggtgaaggatgttttgatacccccatataaaataatctgtctgtcatgggagcccccacgtcctctgaaatagttcagctctgtctgcatgacttgtcctgggactgaggaaaatttaccagtcatctggccttttggaagagcaaaaaatgatgaagtcccaggggttagtatcattcaaggatgtggctgtggatttcacccaggaggagtggcagcaacttgacccttctcagaggaccctgtacagggatgtgatgctggagaactacagccacctggtctcaatggggtatccagtttccaaaccagatgtcatctccaagttggaacaaggagaagagccatggatcataaagggagacatatcaaattggatctatccagatgaatatcaggcagatgggagacaagggaagtgaaatatcaatttatgtttttttaattgattggtgcctgaggtttatgtttctatccttatcaaaatctcctattctttgcttctatgctgagaatttagtagtcactcaacaagtaattgtgaagcctttcagaggagttctatttgttgttgatcctgtctcttgtgtgtatatatatatgtttatatttgttgtctttcctgaaagggttttaaaggcaatagaaggcaaattcctttcaagaacacaagctgtgctttaaaaggcaatattcccagataaatgactgtattaaattaaatgtcaaatacagttactgttttagaagttcagagaaaattaagagtctaaagagatgtgagcgtatttgagaaacatttttcagagcatgcaactgtaactgctctgaatgacataaatgctgatgaggctgaaggaggagggtgaaggcaagcagtgttggagagagagtatatgaacaaaaccttagggtcaggaagatacagcttttctgggagaactttactagttttacttgacatgtatagaaagtagtttattgggagtagtggaatttacgtctgtattctcagtttgactctgatactgaatctgtagcaggatattggatttttctattatttgttagttgttaggaaaatagatggaggagagttaaagtattttgcatacagaagataccttgttttttagagtgatggtaggataataagaatgtgtagcacatgatttataatataaatgaaattaaaaggtgaaaaggggtttctattcagaaagcagaagtgaaatattctagaagaataatcaaaaattagtgatgagaccccactttttcatctcttttaagtttagtttttacatgaatatttctgtttaacattcttgtctgtctattcacctgataacactatatgctgtactgtcttctgagatgacctgtttccatcctttttttgtgagttcatctactatgttggatcatccatttgttctacttctttaccctcttaattgactcttgtgatgactcttaaattgtatcttttcttcttttagacaggaagagtaaccttcacaactcccagtcatgtattttggggacagtttccttccatcataagatactgaaaggagtcacaagggatggttcattgtgctccattttaaaagtctgtcaaggtgatggtcagctgcagagatttctagagaatcaagacaaactcttcaggcaggtcacatttgttaacagcaaaacagtgactgaggcatcagggcataaatataatccactggggaaaatatttcaagagtgcatagaaacagatatatcaatacagagattccataaatatgatgcttttaaaaagaacttaaaaccaaatattgacctaccgagttgttataagagcaattcaagaaaaaaacctgatcagagttttggaggtggaaaatcatctagccagagtgagcccaattctaatcttgagaagattcacaatggagtaataccttttgatgataatcagtgtggaaacgtttttagaaatacacaatcccttattcaatatcagaatgtggaaactaaagagaaaagctgtgtatgtgttacatgtggaaaagcctttgctaagaagtcacaactcattgtacatcaaagaattcatactggaaagaaaccatatgattgtggtgcatgcggaaaagccttcagtgagaagtttcatcttgttgtacatcagagaactcatactggggagaaaccttatgattgttctgaatgtggaaaagccttctctcagaaatcgtcccttattatacatcagagagttcacactggggaaaaaccctatgaatgtagtgaatgcgggaaagccttctcccagaaatcacccctcattatacatcagagaatacatactggggaaaaaccctatgaatgtagagagtgtgggaaggccttttcccagaagtcacagctgattatacaccacagagctcatactggagagaagccgtatgagtgtaccgaatgtgggaaagccttctgtgagaagtcccacctcattatacataaaagaattcacactggtgagaaaccctacaaatgtgctcaatgtgaggaagccttcagcaggaagacagaactcattacacatcagttagttcatactggggaaaaaccttatgaatgtactgaatgtggaaagacattctcccgcaagtcacagctcatcatacatcagagaacacatactggagaaaaaccctataaatgtagtgaatgtggcaaagccttctgccagaagtcacatctcattggacatcagagaattcacacaggagaaaaaccttatatatgtactgaatgtgggaaagccttctctcagaagtcccaccttccgggacaccagcgaattcatacaggagagaaaccttacatatgtgctgaatgtggaaaggccttttctcagaagtcagaccttgttttacatcagaggattcatactggggaaagaccctatcaatgtgctatatgtgggaaggccttcatccagaagtcacaactaactgtacaccagagaattcacacagtggtaaaatcataatgaactggccacagaaaagccttagtattagctcaagccttaataattactagaaacccaattaatttgataagcttggggacaacatcccaatagataaaaatttttaagggaatttgtttctagtttggtgatgcctaacttttccagcaaagatgatggaaaatagttatataaatgaagaacatttttaatatggcatgtaaagcttttaaagttatgaactcagtgatcagcacagcaagttaagcatacagaatattgtcaagttgcatattccttatactacaaaatgataatcagccattgtgaaactgctaatattagcttgtcataattatggccataaactaatttttctataaaagacgtggaagaaagcttaagtaaacaataaaataaaacctatacactattttaagaaggggcttgagcatgacccctaaagctacatgtaaagttcttgtacaaaaaatggaatgataggttgatcagattcagtaaagttgatctgtatgcattttcccatctcaagcatataagttgacctgcatctctggaaggaccttgagattgatgcattttgagcaggtctcccttttactcttcccaactgggaacttggagctgaaaaacattggcactgaggccagatggccttgggtttaatcctggctcagtgcctcacagattgtgtgactttaggcaaacatacttctcctagctgagtattttttatcagtaagtacaaatacaatgcagagctcattttcagttaatattagtactttttaaatctttactctctatcttgaagcattagatgttaagactaatgtgtaaaaaccacgtctgagcttgcttttccctctggacactctgcttttgattgcctatccctataagtggctcattttactgtcttctgatcctggtggccttatttttgctatgttaaggttgtgttttttaatacttggatttattttcatatacttacataaaccgtggtgattgcacataaa

SEQ ID NO: 202087 - DNA, 2600 bp, Homo sapiens
  Payload ID: 19865
  Gene Name: zinc finger protein 302
  Uniprot ID: Q9NR11
  ENST ID: ENST00000457781
  CDS Start-End: 241-1440
gtgggcggtgcactgggtcagtcccgcgatagcttcaggcctggcggcggcttccaagctaaggaacggtttggggcagtgtcgttcccggaggtcggccgccgttacccgctcaccagctacgcggcgcgtcaggtccgcggaggcgcgggctcggggcgcctgcgggacggacactgcccatctctaagataagaacctggaaaggggactctgttggccattggaaattgcagaataatgtctcaggtgacatttagtgatgtggctatagacttctctcatgaagagtgggcatgcctagattctgctcagagggacttatacaaggatgtgatggtccagaattatgagaacctggtctctgtaggtctttccgtaactaagccatatgtgatcatgttattggaggatggaaaagagccctggatgatggagaaaaaactgtcaaaagattgggaatcaagatgggaaaacaaggaattatcaacaaagaaggatatttatgatgaagattcaccccaaccagtaacaatggaaaaagttgtaaaacaaagttatgaattttcaaattctaataagaatttggaatatacagaatgcgacacatttagaagcacctttcattcaaagtctactctttctgaaccacaaaacaattctgctgaagggaattcacacaaatatgatatattaaagaagaatttatcaaaaaagtcagttataaaaagtgagagaataaatggtggaaagaaacttttaaattctaataaaagtggggcagccttcaaccagagcaaatctcttacccttccccagacttgtaatagagagaaaatctatacatgcagtgaatgtgggaaagcctttggcaaacagtcaatcctcagtcgccactggagaattcatacaggagagaagccctatgaatgtcgtgaatgtgggaagacttttagccatggttcatcccttacacgacatcagataagccatagtggagagaaaccttacaaatgcattgaatgtgggaaggcctttagccatggctcatcacttactaaccatcagagcactcacacgggagagaaaccgtatgaatgtatgaactgtggaaagtcttttagtcgtgtgtcccttctcattcagcatctaagaattcatacgcaagaaaaacgctatgagtgtcgtatatgtggaaaggccttcattcatagttcgtctctcattcaccatcagaaaagccatactggagagaagccttatgaatgtagagaatgtgggaaagctttctgctgtagctcacaccttactcaacatcaaagaattcacagtatgaagaaaaaatatgaatgcaacaaatgtctcaaggtctttagtagcttctcatttcttgttcaacatcagagtattcatactgaagaaaaaccgtttgaagtttagaaatgcaggaaatccttcaaccagcttgaatcactgaatatgcatttgagaaatcacattagattgaaaccctacgaatgcagtatatgtgggaaagcctttagtcataggtcgtccctgcttcaacatcacagtattcatactggagagaaaccttacgaatgtattaaatgtgggaagaccttcagctgtagttcaaaccttactgtacatcagagaattcatactggagaaaagccatataaatgtagtgagtgtgggaaagcttttagcaaaggctcgaatcttactgcccatcaaagagtacataatggagagaaacccaatagtgtggtaagtgtggaaaagcctttagatcatatgaatccctatacatgtgagaaatcttacagaagagaagcagtgtttatcacggtaaacttcattcatagatcctcccttatttaacatcagaaaaatgtatactggggaaaagttgtatgaaggtggtgaacatgggagacttttagcaatgatgcagatttttttattagagtttatactgtagagaaatcatatgaagtcaataaatgtgggaaagcctttgtcagtattaatcccttaattgacctaagtatactcacactaggaaaaatctgtgtacatgtagcaaatgtgggaaagactataggcaataggaatctcctgcaaactcctacaggagaaaagttgtatgaatgtggaaactttagaaattgaaggaatttttcagttccaagtgcatcccttattctataggaaataaactggagacaaatctcatttaagagatgcagcaaagtgttcactaagagtgtttatcttgccagacataagaagatgaatggtagagcaacctgaaggatttagaaattacatataaatctttgcagttatgctatttgtaaacaggattatataggagagcaaataaacataagtatgcatttcttagagcagtagcttgcagtttcagttgagttctacttagaaattctttttagctagtgggcatgtgaagatatttagtcacccagaggagccagtaaatgttataatgttaaaaattaaagctgcaaaagaaataaaatggtgttaataaaaatttggcatctaataaaatcattttgtatatcatgaac

SEQ ID NO: 202088 - DNA, 2635 bp, Homo sapiens
  Payload ID: 19865
  Gene Name: zinc finger protein 302
  ENST ID: ENST00000446502
  CDS Start-End: 209-1540
aagctaaggaacggtttggggcagtgtcgttcccggaggtcggccgccgttacccgctcaccagctacgcggcgcgtcaggtccgcggaggcgcgggctcggggcgcctgcgggacggtgaggccctgctgaggactccggacactgcccatctctaagataagaacctggaaaggggactctgttggccattggaaattgcagaataatgtctcagcgtcagtacccagagtgttacctggcaccaaatggatgcttagtaagtaattgtggagtgaataagatgagtaatgaagaactggtggggcagaatcatggcatggaaggtgaagcttgcacaggaggggatgtgacatttagtgatgtggctatagacttctctcatgaagagtgggcatgcctagattctgctcagagggacttatacaaggatgtgatggtccagaattatgagaacctggtctctgtaggtctttccgtaactaagccatatgtgatcatgttattggaggatggaaaagagccctggatgatggagaaaaaactgtcaaaagattgggaatcaagatgggaaaacaaggaattatcaacaaagaaggatatttatgatgaagattcaccccaaccagtaacaatggaaaaagttgtaaaacaaagttatgaattttcaaattctaataagaatttggaatatacagaatgcgacacatttagaagcacctttcattcaaagtctactctttctgaaccacaaaacaattctgctgaagggaattcacacaaatatgatatattaaagaagaatttatcaaaaaagtcagttataaaaagtgagagaataaatggtggaaagaaacttttaaattctaataaaagtggggcagccttcaaccagagcaaatctcttacccttccccagacttgtaatagagagaaaatctatacatgcagtgaatgtgggaaagcctttggcaaacagtcaatcctcagtcgccactggagaattcatacaggagagaagccctatgaatgtcgtgaatgtgggaagacttttagccatggttcatcccttacacgacatcagataagccatagtggagagaaaccttacaaatgcattgaatgtgggaaggcctttagccatggctcatcacttactaaccatcagagcactcacacgggagagaaaccgtatgaatgtatgaactgtggaaagtcttttagtcgtgtgtcccttctcattcagcatctaagaattcatacgcaagaaaaacgctatgagtgtcgtatatgtggaaaggccttcattcatagttcgtctctcattcaccatcagaaaagccatactggagagaagccttatgaatgtagagaatgtgggaaagctttctgctgtagctcacaccttactcaacatcaaagaattcacagtatgaagaaaaaatatgaatgcaacaaatgtctcaaggtctttagtagcttctcatttcttgttcaacatcagagtattcatactgaagaaaaaccgtttgaagtttagaaatgcaggaaatccttcaaccagcttgaatcactgaatatgcatttgagaaatcacattagattgaaaccctacgaatgcagtatatgtgggaaagcctttagtcataggtcgtccctgcttcaacatcacagtattcatactggagagaaaccttacgaatgtattaaatgtgggaagaccttcagctgtagttcaaaccttactgtacatcagagaattcatactggagaaaagccatataaatgtagtgagtgtgggaaagcttttagcaaaggctcgaatcttactgcccatcaaagagtacataatggagagaaacccaatagtgtggtaagtgtggaaaagcctttagatcatatgaatccctatacatgtgagaaatcttacagaagagaagcagtgtttatcacggtaaacttcattcatagatcctcccttatttaacatcagaaaaatgtatactggggaaaagttgtatgaaggtggtgaacatgggagacttttagcaatgatgcagatttttttattagagtttatactgtagagaaatcatatgaagtcaataaatgtgggaaagcctttgtcagtattaatcccttaattgacctaagtatactcacactaggaaaaatctgtgtacatgtagcaaatgtgggaaagactataggcaataggaatctcctgcaaactcctacaggagaaaagttgtatgaatgtggaaactttagaaattgaaggaatttttcagttccaagtgcatcccttattctataggaaataaactggagacaaatctcatttaagagatgcagcaaagtgttcactaagagtgtttatcttgccagacataagaagatgaatggtagagcaacctgaaggatttagaaattacatataaatctttgcagttatgctatttgtaaacaggattatataggagagcaaataaacataagtatgcatttcttagagcagtagcttgcagtttcagttgagttctacttagaaattctttttagctagtgggcatgtgaagatatttagtcacccagaggagccagtaaatgttataatgttaaaaattaaagctgc

SEQ ID NO: 202089 - DNA, 2590 bp, Homo sapiens
  Payload ID: 19865
  Gene Name: zinc finger protein 302
  Uniprot ID: Q9NR11
  ENST ID: ENST00000423823
  CDS Start-End: 237-1436
gatagcttcaggcctggcggcggcttccaagctaaggaacggtttggggcagtgtcgttcccggaggtcggccgccgttacccgctcaccagctacgcggcgcgtcaggtccgcggaggcgcgggctcggggcgcctgcgggacggtgaggccctgctgaggactccggacactgcccatctctaagataagaacctggaaaggggactctgttggccattggaaattgcagaataatgtctcaggtgacatttagtgatgtggctatagacttctctcatgaagagtgggcatgcctagattctgctcagagggacttatacaaggatgtgatggtccagaattatgagaacctggtctctgtaggtctttccgtaactaagccatatgtgatcatgttattggaggatggaaaagagccctggatgatggagaaaaaactgtcaaaagattgggaatcaagatgggaaaacaaggaattatcaacaaagaaggatatttatgatgaagattcaccccaaccagtaacaatggaaaaagttgtaaaacaaagttatgaattttcaaattctaataagaatttggaatatacagaatgcgacacatttagaagcacctttcattcaaagtctactctttctgaaccacaaaacaattctgctgaagggaattcacacaaatatgatatattaaagaagaatttatcaaaaaagtcagttataaaaagtgagagaataaatggtggaaagaaacttttaaattctaataaaagtggggcagccttcaaccagagcaaatctcttacccttccccagacttgtaatagagagaaaatctatacatgcagtgaatgtgggaaagcctttggcaaacagtcaatcctcagtcgccactggagaattcatacaggagagaagccctatgaatgtcgtgaatgtgggaagacttttagccatggttcatcccttacacgacatcagataagccatagtggagagaaaccttacaaatgcattgaatgtgggaaggcctttagccatggctcatcacttactaaccatcagagcactcacacgggagagaaaccgtatgaatgtatgaactgtggaaagtcttttagtcgtgtgtcccttctcattcagcatctaagaattcatacgcaagaaaaacgctatgagtgtcgtatatgtggaaaggccttcattcatagttcgtctctcattcaccatcagaaaagccatactggagagaagccttatgaatgtagagaatgtgggaaagctttctgctgtagctcacaccttactcaacatcaaagaattcacagtatgaagaaaaaatatgaatgcaacaaatgtctcaaggtctttagtagcttctcatttcttgttcaacatcagagtattcatactgaagaaaaaccgtttgaagtttagaaatgcaggaaatccttcaaccagcttgaatcactgaatatgcatttgagaaatcacattagattgaaaccctacgaatgcagtatatgtgggaaagcctttagtcataggtcgtccctgcttcaacatcacagtattcatactggagagaaaccttacgaatgtattaaatgtgggaagaccttcagctgtagttcaaaccttactgtacatcagagaattcatactggagaaaagccatataaatgtagtgagtgtgggaaagcttttagcaaaggctcgaatcttactgcccatcaaagagtacataatggagagaaacccaatagtgtggtaagtgtggaaaagcctttagatcatatgaatccctatacatgtgagaaatcttacagaagagaagcagtgtttatcacggtaaacttcattcatagatcctcccttatttaacatcagaaaaatgtatactggggaaaagttgtatgaaggtggtgaacatgggagacttttagcaatgatgcagatttttttattagagtttatactgtagagaaatcatatgaagtcaataaatgtgggaaagcctttgtcagtattaatcccttaattgacctaagtatactcacactaggaaaaatctgtgtacatgtagcaaatgtgggaaagactataggcaataggaatctcctgcaaactcctacaggagaaaagttgtatgaatgtggaaactttagaaattgaaggaatttttcagttccaagtgcatcccttattctataggaaataaactggagacaaatctcatttaagagatgcagcaaagtgttcactaagagtgtttatcttgccagacataagaagatgaatggtagagcaacctgaaggatttagaaattacatataaatctttgcagttatgctatttgtaaacaggattatataggagagcaaataaacataagtatgcatttcttagagcagtagcttgcagtttcagttgagttctacttagaaattctttttagctagtgggcatgtgaagatatttagtcacccagaggagccagtaaatgttataatgttaaaaattaaagctgcaaaagaaataaaatggtgttaataaaaatttggcatctaataaaatcattttgtatatc

SEQ ID NO: 202090 - DNA, 2849 bp, Homo sapiens
  Payload ID: 19865
  Gene Name: zinc finger protein 302
  Uniprot ID: Q9NR11
  ENST ID: ENST00000505242
  CDS Start-End: 495-1694
gtcagtcccgcgatagcttcaggcctggcggcggcttccaagctaaggaacggtttggggcagtgtcgttcccggaggtcggccgccgttacccgctcaccagctacgcggcgcgtcaggtccgcggaggcgcgggctcggggcgcctgcgggacggtgaggccctgctgaggactccggcaagtgtgggtcgcggcgacggcggggctaaggccctgggtccgcgcgcggtttgaccacggccggggccttgggcatttcctggccttcctgttgagccgtgtaaacgcggggtgatgacggcgccgacctcttggcactgttgtgagagcgaagtgggcgcgagagcagacgccagctacagttttttttgggttatgtcgtcatgaagccggcgctttcagttgtgcaaccttgaacaaatgggacactgcccatctctaagataagaacctggaaaggggactctgttggccattggaaattgcagaataatgtctcaggtgacatttagtgatgtggctatagacttctctcatgaagagtgggcatgcctagattctgctcagagggacttatacaaggatgtgatggtccagaattatgagaacctggtctctgtaggtctttccgtaactaagccatatgtgatcatgttattggaggatggaaaagagccctggatgatggagaaaaaactgtcaaaagattgggaatcaagatgggaaaacaaggaattatcaacaaagaaggatatttatgatgaagattcaccccaaccagtaacaatggaaaaagttgtaaaacaaagttatgaattttcaaattctaataagaatttggaatatacagaatgcgacacatttagaagcacctttcattcaaagtctactctttctgaaccacaaaacaattctgctgaagggaattcacacaaatatgatatattaaagaagaatttatcaaaaaagtcagttataaaaagtgagagaataaatggtggaaagaaacttttaaattctaataaaagtggggcagccttcaaccagagcaaatctcttacccttccccagacttgtaatagagagaaaatctatacatgcagtgaatgtgggaaagcctttggcaaacagtcaatcctcagtcgccactggagaattcatacaggagagaagccctatgaatgtcgtgaatgtgggaagacttttagccatggttcatcccttacacgacatcagataagccatagtggagagaaaccttacaaatgcattgaatgtgggaaggcctttagccatggctcatcacttactaaccatcagagcactcacacgggagagaaaccgtatgaatgtatgaactgtggaaagtcttttagtcgtgtgtcccttctcattcagcatctaagaattcatacgcaagaaaaacgctatgagtgtcgtatatgtggaaaggccttcattcatagttcgtctctcattcaccatcagaaaagccatactggagagaagccttatgaatgtagagaatgtgggaaagctttctgctgtagctcacaccttactcaacatcaaagaattcacagtatgaagaaaaaatatgaatgcaacaaatgtctcaaggtctttagtagcttctcatttcttgttcaacatcagagtattcatactgaagaaaaaccgtttgaagtttagaaatgcaggaaatccttcaaccagcttgaatcactgaatatgcatttgagaaatcacattagattgaaaccctacgaatgcagtatatgtgggaaagcctttagtcataggtcgtccctgcttcaacatcacagtattcatactggagagaaaccttacgaatgtattaaatgtgggaagaccttcagctgtagttcaaaccttactgtacatcagagaattcatactggagaaaagccatataaatgtagtgagtgtgggaaagcttttagcaaaggctcgaatcttactgcccatcaaagagtacataatggagagaaacccaatagtgtggtaagtgtggaaaagcctttagatcatatgaatccctatacatgtgagaaatcttacagaagagaagcagtgtttatcacggtaaacttcattcatagatcctcccttatttaacatcagaaaaatgtatactggggaaaagttgtatgaaggtggtgaacatgggagacttttagcaatgatgcagatttttttattagagtttatactgtagagaaatcatatgaagtcaataaatgtgggaaagcctttgtcagtattaatcccttaattgacctaagtatactcacactaggaaaaatctgtgtacatgtagcaaatgtgggaaagactataggcaataggaatctcctgcaaactcctacaggagaaaagttgtatgaatgtggaaactttagaaattgaaggaatttttcagttccaagtgcatcccttattctataggaaataaactggagacaaatctcatttaagagatgcagcaaagtgttcactaagagtgtttatcttgccagacataagaagatgaatggtagagcaacctgaaggatttagaaattacatataaatctttgcagttatgctatttgtaaacaggattatataggagagcaaataaacataagtatgcatttcttagagcagtagcttgcagtttcagttgagttctacttagaaattctttttagctagtgggcatgtgaagatatttagtcacccagaggagccagtaaatgttataatgttaaaaattaaagctgcaaaagaaataaaatggtgttaataaaaatttggcatctaataaaatcattttgtatatca

SEQ ID NO: 202091 - DNA, 854 bp, Homo sapiens
  Payload ID: 19865
  Gene Name: zinc finger protein 302
  ENST ID: ENST00000507959
  CDS Start-End: 224-622
ctggcggcggcttccaagctaaggaacggtttggggcagtgtcgttcccggaggtcggccgccgttacccgctcaccagctacgcggcgcgtcaggtccgcggaggcgcgggctcggggcgcctgcgggacggtgaggccctgctgaggactccggacactgcccatctctaagataagaacctggaaaggggactctgttggccattggaaattgcagaataatgtctcaggtgacatttagtgatgtggctatagacttctctcatgaagagtgggcatgcctagattctgctcagagggacttatacaaggatgtgatggtccagaattatgagaacctggtctctgtagcaggtctttccgtaactaagccatatgtgatcatgttattggaggatggaaaagagccctggatgatggagaaaaaactgtcaaaagcttacccatttcctttatcacactctgttcctgcttctgtgaactttggattctctgctctatttgagcattgttcagaagtcactgaaatatttgagttgtcagaactatgtgttttctgggtgcttcatttcttatccaattctcctaattccactgtagaagcttttttcaagaagtaaaaaaaaaaaaaaaaaaaaaaaaaaaaaaaaaaaaaaaaaaaaaaaaaggcagtgctttgctttcttgatatatttcagattgggaatcaagatgggaaaacaaggaattatcaacaaagaaggatatttatgatgaagattcaccccaaccagtaacaatggaaaaagttgtaaaacaaagttatgaattttcaaattctaataagaatttggaatatacagaatgcgacac

SEQ ID NO: 202092 - DNA, 572 bp, Homo sapiens
  Payload ID: 19865
  Gene Name: zinc finger protein 302
  ENST ID: ENST00000505163
  CDS Start-End: 146-572
gtcagtcccgcgatagcttcaggcctggcggcggcttccaagctaaggaacggtttggggcagtgtcgttcccggaggacactgcccatctctaagataagaacctggaaaggggactctgttggccattggaaattgcagaataatgtctcaggtgacatttagtgatgtggctatagacttctctcatgaagagtgggcatgcctagattctgctcagagggacttatacaaggatgtgatggtccagaattatgagaacctggtctctgtaggtctttccgtaactaagccatatgtgatcatgttattggaggatggaaaagagccctggatgatggagaaaaaactgtcaaaagattgggaatcaagatgggaaaacaaggaattatcaacaaagaaggatatttatgatgaagattcaccccaaccagtaacaatggaaaaagttgtaaaacaaagttatgaattttcaaattctaataagaatttggaatatacagaatgcgacacatttagaagcacctttcattcaaagtctactctttctgaaccacaaaacaattctgctg

SEQ ID NO: 202093 - DNA, 2955 bp, Homo sapiens
  Payload ID: 19865
  Gene Name: zinc finger protein 302
  ENST ID: ENST00000505365
  CDS Start-End: 337-732
gaggccctgctgaggactccggcaagtgtgggtcgcggcgacggcggggctaaggccctgggtccgcgcgcggtttgaccacggccggggccttgggcatttcctggccttcctgttgagccgtgtaaacgcggggtgatgacggcgccgacctcttggcactgttgtgagagcgaagtgggcgcgagagcagacgccagctacagttttttttgggttatgtcgtcatgaagccggcgctttcagttgtgcaaccttgaacaaatgggacactgcccatctctaagataagaacctggaaaggggactctgttggccattggaaattgcagaataatgtctcaggtgacatttagtgatgtggctatagacttctctcatgaagagtgggcatgcctagattctgctcagagggacttatacaaggatgtgatggtccagaattatgagaacctggtctctgtaggtctttccgtaactaagccatatgtgatcatgttattggaggatggaaaagagccctggatgatggagaaaaaactgtcaaaagcttacccatttcctttatcacactctgttcctgcttctgtgaactttggattctctgctctatttgagcattgttcagaagtcactgaaatatttgagttgtcagaactatgtgttttctgggtgcttcatttcttatccaattctcctaattccactgtagaagcttttttcaagaagtaaaaaaaaaaaaaaaaaaaaaaaaaaaaaaaaaaaaaaaaaaaaaaaaaggcagtgctttgctttcttgatatatttcagattgggaatcaagatgggaaaacaaggaattatcaacaaagaaggatatttatgatgaagattcaccccaaccagtaacaatggaaaaagttgtaaaacaaagttatgaattttcaaattctaataagaatttggaatatacagaatgcgacacatttagaagcacctttcattcaaagtctactctttctgaaccacaaaacaattctgctgaagggaattcacacaaatatgatatattaaagaagaatttatcaaaaaagtcagttataaaaagtgagagaataaatggtggaaagaaacttttaaattctaataaaagtggggcagccttcaaccagagcaaatctcttacccttccccagacttgtaatagagagaaaatctatacatgcagtgaatgtgggaaagcctttggcaaacagtcaatcctcagtcgccactggagaattcatacaggagagaagccctatgaatgtcgtgaatgtgggaagacttttagccatggttcatcccttacacgacatcagataagccatagtggagagaaaccttacaaatgcattgaatgtgggaaggcctttagccatggctcatcacttactaaccatcagagcactcacacgggagagaaaccgtatgaatgtatgaactgtggaaagtcttttagtcgtgtgtcccttctcattcagcatctaagaattcatacgcaagaaaaacgctatgagtgtcgtatatgtggaaaggccttcattcatagttcgtctctcattcaccatcagaaaagccatactggagagaagccttatgaatgtagagaatgtgggaaagctttctgctgtagctcacaccttactcaacatcaaagaattcacagtatgaagaaaaaatatgaatgcaacaaatgtctcaaggtctttagtagcttctcatttcttgttcaacatcagagtattcatactgaagaaaaaccgtttgaagtttagaaatgcaggaaatccttcaaccagcttgaatcactgaatatgcatttgagaaatcacattagattgaaaccctacgaatgcagtatatgtgggaaagcctttagtcataggtcgtccctgcttcaacatcacagtattcatactggagagaaaccttacgaatgtattaaatgtgggaagaccttcagctgtagttcaaaccttactgtacatcagagaattcatactggagaaaagccatataaatgtagtgagtgtgggaaagcttttagcaaaggctcgaatcttactgcccatcaaagagtacataatggagagaaacccaatagtgtggtaagtgtggaaaagcctttagatcatatgaatccctatacatgtgagaaatcttacagaagagaagcagtgtttatcacggtaaacttcattcatagatcctcccttatttaacatcagaaaaatgtatactggggaaaagttgtatgaaggtggtgaacatgggagacttttagcaatgatgcagatttttttattagagtttatactgtagagaaatcatatgaagtcaataaatgtgggaaagcctttgtcagtattaatcccttaattgacctaagtatactcacactaggaaaaatctgtgtacatgtagcaaatgtgggaaagactataggcaataggaatctcctgcaaactcctacaggagaaaagttgtatgaatgtggaaactttagaaattgaaggaatttttcagttccaagtgcatcccttattctataggaaataaactggagacaaatctcatttaagagatgcagcaaagtgttcactaagagtgtttatcttgccagacataagaagatgaatggtagagcaacctgaaggatttagaaattacatataaatctttgcagttatgctatttgtaaacaggattatataggagagcaaataaacataagtatgcatttcttagagcagtagcttgcagtttcagttgagttctacttagaaattctttttagctagtgggcatgtgaagatatttagtcacccagaggagccagtaaatgttataatgttaaaaattaaagctgcaaaagaaataaaatggtgttaataaaaatttggcatctaataaaatcattttgtatatcatgaa

SEQ ID NO: 202094 - DNA, 578 bp, Homo sapiens
  Payload ID: 19865
  Gene Name: zinc finger protein 302
  ENST ID: ENST00000502743
  CDS Start-End: 219-578
gaaatgtggttcgccgtgggcggtgcactgggtcagtcccgcgatagcttcaggcctggcggcggcttccaagctaaggaacggtttggggcagtgtcgttcccggaggtcggccgccgttacccgctcaccagctacgcggcgcgtcaggacactgcccatctctaagataagaacctggaaaggggactctgttggccattggaaattgcagaataatgtctcaggtgacatttagtgatgtggctatagacttctctcatgaagagtgggcatgcctagattctgctcagagggacttatacaaggatgtgatggtccagaattatgagaacctggtctctgtaggtctttccgtaactaagccatatgtgatcatgttattggaggatggaaaagagccctggatgatggagaaaaaactgtcaaaagcttacccatttcctttatcacactctgttcctgcttctgtgaactttggattctctgctctatttgagcattgttcagaagtcactgaaatatttgagttgtcagaactatgtgttttctgggtgcttcatttcttatccaattct

SEQ ID NO: 202095 - DNA, 675 bp, Homo sapiens
  Payload ID: 19865
  Gene Name: zinc finger protein 302
  ENST ID: ENST00000506901
  CDS Start-End: 278-675
ggttcgccgtgggcggtgcactgggtcagtcccgcgatagcttcaggcctggcggcggcttccaagctaaggaacggtttggggcagtgtcgttcccggaggtcggccgccgttacccgctcaccagctacgcggcgcgtcaggtccgcggaggcgcgggctcggggcgcctgcgggacggtgaggccctgctgaggactccggcaagtgacactgcccatctctaagataagaacctggaaaggggactctgttggccattggaaattgcagaataatgtctcaggtgacatttagtgatgtggctatagacttctctcatgaagagtgggcatgcctagattctgctcagagggacttatacaaggatgtgatggtccagaattatgagaacctggtctctgtagcaggtctttccgtaactaagccatatgtgatcatgttattggaggatggaaaagagccctggatgatggagaaaaaactgtcaaaagcttacccatttcctttatcacactctgttcctgcttctgtgaactttggattctctgctctatttgagcattgttcagaagtcactgaaatatttgagttgtcagaactatgtgttttctgggtgcttcatttcttatccaattctcctaattccactgtagaagcttttttcaagaagta

SEQ ID NO: 202096 - DNA, 577 bp, Homo sapiens
  Payload ID: 19865
  Gene Name: zinc finger protein 302
  ENST ID: ENST00000509528
  CDS Start-End: 279-365
gaaatgtggttcgccgtgggcggtgcactgggtcagtcccgcgatagcttcaggcctggcggcggcttccaagctaaggaacggtttggggcagtgtcgttcccggaggtcggccgccgttacccgctcaccagctacgcggcgcgtcaggtccgcggaggcgcgggctcggggcgcctgcgggacggtgaggccctgctgaggactccggacactgcccatctctaagataagaacctggaaaggggactctgttggccattggaaattgcagaataatgtctcagattgggaatcaagatgggaaaacaaggaattatcaacaaagaaggatatttatgatgaagattcaccccaaccagtaacaatggaaaaagttgtaaaacaaagttatgaattttcaaattctaataagaatttggaatatacagaatgcgacacatttagaagcacctttcattcaaagtctactctttctgaaccacaaaacaattctgctgaagggaattcacacaaatatgatatattaaagaagaatttatcaaaaaagtcagttataaaaagtgagagaataaat

SEQ ID NO: 202097 - DNA, 2893 bp, Homo sapiens
  Payload ID: 19865
  Gene Name: zinc finger protein 302
  ENST ID: ENST00000613363
  CDS Start-End: 534-1736
gattctgggaaatgtggttcgccgtgggcggtgcactgggtcagtcccgcgatagcttcaggcctggcggcggcttccaagctaaggaacggtttggggcagtgtcgttcccggaggtcggccgccgttacccgctcaccagctacgcggcgcgtcaggtccgcggaggcgcgggctcggggcgcctgcgggacggtgaggccctgctgaggactccggcaagtgtgggtcgcggcgacggcggggctaaggccctgggtccgcgcgcggtttgaccacggccggggccttgggcatttcctggccttcctgttgagccgtgtaaacgcggggtgatgacggcgccgacctcttggcactgttgtgagagcgaagtgggcgcgagagcagacgccagctacagttttttttgggttatgtcgtcatgaagccggcgctttcagttgtgcaaccttgaacaaatgggacactgcccatctctaagataagaacctggaaaggggactctgttggccattggaaattgcagaataatgtctcaggtgacatttagtgatgtggctatagacttctctcatgaagagtgggcatgcctagattctgctcagagggacttatacaaggatgtgatggtccagaattatgagaacctggtctctgtagcaggtctttccgtaactaagccatatgtgatcatgttattggaggatggaaaagagccctggatgatggagaaaaaactgtcaaaagattgggaatcaagatgggaaaacaaggaattatcaacaaagaaggatatttatgatgaagattcaccccaaccagtaacaatggaaaaagttgtaaaacaaagttatgaattttcaaattctaataagaatttggaatatacagaatgcgacacatttagaagcacctttcattcaaagtctactctttctgaaccacaaaacaattctgctgaagggaattcacacaaatatgatatattaaagaagaatttatcaaaaaagtcagttataaaaagtgagagaataaatggtggaaagaaacttttaaattctaataaaagtggggcagccttcaaccagagcaaatctcttacccttccccagacttgtaatagagagaaaatctatacatgcagtgaatgtgggaaagcctttggcaaacagtcaatcctcagtcgccactggagaattcatacaggagagaagccctatgaatgtcgtgaatgtgggaagacttttagccatggttcatcccttacacgacatcagataagccatagtggagagaaaccttacaaatgcattgaatgtgggaaggcctttagccatggctcatcacttactaaccatcagagcactcacacgggagagaaaccgtatgaatgtatgaactgtggaaagtcttttagtcgtgtgtcccttctcattcagcatctaagaattcatacgcaagaaaaacgctatgagtgtcgtatatgtggaaaggccttcattcatagttcgtctctcattcaccatcagaaaagccatactggagagaagccttatgaatgtagagaatgtgggaaagctttctgctgtagctcacaccttactcaacatcaaagaattcacagtatgaagaaaaaatatgaatgcaacaaatgtctcaaggtctttagtagcttctcatttcttgttcaacatcagagtattcatactgaagaaaaaccgtttgaagtttagaaatgcaggaaatccttcaaccagcttgaatcactgaatatgcatttgagaaatcacattagattgaaaccctacgaatgcagtatatgtgggaaagcctttagtcataggtcgtccctgcttcaacatcacagtattcatactggagagaaaccttacgaatgtattaaatgtgggaagaccttcagctgtagttcaaaccttactgtacatcagagaattcatactggagaaaagccatataaatgtagtgagtgtgggaaagcttttagcaaaggctcgaatcttactgcccatcaaagagtacataatggagagaaacccaatagtgtggtaagtgtggaaaagcctttagatcatatgaatccctatacatgtgagaaatcttacagaagagaagcagtgtttatcacggtaaacttcattcatagatcctcccttatttaacatcagaaaaatgtatactggggaaaagttgtatgaaggtggtgaacatgggagacttttagcaatgatgcagatttttttattagagtttatactgtagagaaatcatatgaagtcaataaatgtgggaaagcctttgtcagtattaatcccttaattgacctaagtatactcacactaggaaaaatctgtgtacatgtagcaaatgtgggaaagactataggcaataggaatctcctgcaaactcctacaggagaaaagttgtatgaatgtggaaactttagaaattgaaggaatttttcagttccaagtgcatcccttattctataggaaataaactggagacaaatctcatttaagagatgcagcaaagtgttcactaagagtgtttatcttgccagacataagaagatgaatggtagagcaacctgaaggatttagaaattacatataaatctttgcagttatgctatttgtaaacaggattatataggagagcaaataaacataagtatgcatttcttagagcagtagcttgcagtttcagttgagttctacttagaaattctttttagctagtgggcatgtgaagatatttagtcacccagaggagccagtaaatgttataatgttaaaaattaaagctgcaaaagaaataaaatggtgttaataaaaatttggcatctaataaaatcattttgtatatcatg

SEQ ID NO: 202098 - DNA, 1723 bp, Homo sapiens
  Payload ID: 19865
  Gene Name: zinc finger protein 302
  ENST ID: ENST00000627982
  CDS Start-End: 287-1723
gattctgggaaatgtggttcgccgtgggcggtgcactgggtcagtcccgcgatagcttcaggcctggcggcggcttccaagctaaggaacggtttggggcagtgtcgttcccggaggtcggccgccgttacccgctcaccagctacgcggcgcgtcaggtccgcggaggcgcgggctcggggcgcctgcgggacggtgaggccctgctgaggactccggacactgcccatctctaagataagaacctggaaaggggactctgttggccattggaaattgcagaataatgtctcaggtgacatttagtgatgtggctatagacttctctcatgaagagtgggcatgcctagattctgctcagagggacttatacaaggatgtgatggtccagaattatgagaacctggtctctgtagcaggtctttccgtaactaagccatatgtgatcatgttattggaggatggaaaagagccctggatgatggagaaaaaactgtcaaaagcttacccatttcctttatcacactctgttcctgcttctgtgaactttggattctctgctctatttgagcattgttcagaagtcactgaaatatttgagttgtcagaactatgtgttttctgggtgcttcatttcttatccaattctcctaattccactgtagaagcttttttcaagaaaaaaaaaaaaaaaaaaaaaaaaaaaaaaaggcagtgctttgctttcttgatatatttcagattgggaatcaagatgggaaaacaaggaattatcaacaaagaaggatatttagaagattcaccccaaccagtaacaatggaaaaagttgtaaaacaaagttatgaattttcaaattctaataagaatttggaatatacagaatgcgacacatttagaagcacctttcattcaaagtctactctttctgaaccacaaaacaattctgctgaagggaattcacacaaatatgatatattaaagaagaatttatcaaaaaagtcagttataaaaagtgagagaataaatggtggaaagaaacttttaaattctaataaaagtggggcagccttcaaccagagcaaatctcttacccttccccagacttgtaatagagagaaaatctatacatgcagtgaatgtgggaaagcctttggcaaacagtcaatcctcagtcgccactggagaattcatacaggagagaagccctatgaatgtcgtgaatgtgggaagacttttagccatggttcatcccttacacgacatcagataagccatagtggagagaaaccttacaaatgcattgaatgtgggaaggcctttagccatggctcatcacttactaaccatcagagcactcacacgggagagaaaccgtatgaatgtatgaactgtggaaagtcttttagtcgtgtgtcccttctcattcagcatctaagaattcatacgcaagaaaaacgctatgagtgtcgtatatgtggaaaggccttcattcatagttcgtctctcattcaccatcagaaaagccatactggagagaagccttatgaatgtagagaatgtgggaaagctttctgctgtagctcacaccttactcaacatcaaagaattcacagtatgaagaaaaaatatgaatgcaacaaatgtctcaaggtctttagtagcttctcatttcttgttcaacatcagagtattcatactgaagaaaaaccgtttgaagtttag

SEQ ID NO: 202099 - DNA, 4202 bp, Homo sapiens
  Payload ID: 19866
  Gene Name: zinc finger protein 304
  Uniprot ID: Q9HCX3
  ENST ID: ENST00000282286
  CDS Start-End: 174-2153
acacgtcctcttgtccttgtctcccccagaagcagccgccttagtcttgtgagcgtttttacaccgggtagattgagacttggagtgctacactcagcccgagggcgtccagcgcggtggaggcgtggggtttcggctgagcccacagggcacagactgttcatccgcttctcatggcagcggcggtgctgatggaccgggttcagagttgtgtgaccttcgaggatgtgttcgtgtacttctctcgggaggagtgggaactccttgaggaggcacagagattcctgtaccgtgatgtgatgctggagaactttgcacttgtggctacactaggtttttggtgtgaagcagaacatgaggcaccttctgagcagagcgtttctgtagaaggagtgtcacaggtcaggactgctgagtcaggtcttttccagaaagcacacccatgtgagatgtgtgacccactcttgaaagacattttgcacctggctgaacaccagggatcacaccttacacagaaactgtgcacacgtgggctgtgtaggagaagattctcgttcagtgcaaacttttaccagcaccagaagcaacataatggagagaattgcttcagaggggatgatggaggggcctcatttgtgaagagctgtacagtccacatgttagggagatcctttacgtgcagggaggaagggatggacttaccagatagctctggccttttccagcaccagaccacttacaatagggtgagtccatgcagaaggactgaatgcatggagtctttcccacacagctccagtctcaggcaacaccaaggagactatgatggacagatgcttttcagttgcggtgatgaagggaaagccttcctggacacctttactcttcttgacagccagatgactcatgctgaggtgagacccttcagatgcctaccatgtggaaatgtgttcaaggagaaatcagctcttattaatcacagaaaaatccacagtggagaaatatctcatgtgtgtaaggagtgtggaaaagccttcattcacttgcaccacctaaaaatgcaccagaaatttcacactggaaaaagacactatacatgcagtgaatgtgggaaggccttcagccgcaaggacacacttgttcagcatcagagagttcacactggagaaagatcttatgactgcagtgaatgtggaaaagcctacagcagaagctcccaccttgttcagcaccagagaattcacacaggagaaaggccttataagtgcaacaaatgtgggaaagcctttagccgtaaagacacacttgttcagcaccagagatttcatactggagaaaggccttatgagtgcagtgaatgtggaaaattctttagccaaagctcccaccttattgagcactggagaattcataccggggcaaggccctatgaatgcatagaatgtggaaaattctttagccataactctagcctcattaaacatcggagagtccacacaggagcaagatcctacgtgtgcagcaaatgtgggaaggcctttggctgcaaagacacacttgttcagcaccagataattcacactggagcaaggccttatgagtgcagtgaatgtgggaaggccttcagccgtaaagacacacttgtgcaacaccaaaaaatccacactggagaaaggccttatgagtgtggtgaatgtggtaaattcttcagccatagctccaaccttattgtacaccagagaattcacactggagcaaagccttatgagtgcaatgaatgtgggaaatgctttagccacaactccagcctcattttgcaccagagagttcacacaggagcaaggccttatgtgtgcagtgaatgtgggaaggcttacattagtagctcccaccttgttcaacacaagaaagttcacactggagcaagaccttatgagtgcagtgaatgtgggaaattctttagccgcaactctggcctcattctgcaccagagggttcacactggagaaaagccttacgtatgcagcgaatgtgggaaagcctatagcagaagctcccatcttgttcgtcaccagaaagctcacactggagaaagagctcacgagtgcaacagttttggtggccctttagctgcatctcttaaacttgtttaacaccagaaaattcacacaagagaaaggccttatgaatgcagaaaatatgtcatcttgttcatcctcataggactcacaccagagcaatgctctgtgagtaccctttgtgagggaaccatcagctagcagatgagcaccgtatattcattccaccctggggagattcctgataagcaccacatatgtgggaggctttcatgaggtgtgttgcactttgtaactgtctagagctcttgatggaattatatcactgccagtgcctgtggcggaagccatcttattgctaccagctgtgtgtgtcaatcactccattttgctcagggaaggcagacttctgtgctttctttcctgttccctacaggtaatcatgaatattttcaaggacttccccccccccccacttcaccccctaccattgagggtcctcatcttttccctcatgattaggttctgagcaaacatgatctagctctcaccaaaaggacctgagctagggtctgctgggatttcctgacacgattttccatcttcatggacaatgttaactgtaaacgtgatagctgtgacttacttgtcttactgccaaatcgcccaaatttggaactgcttgtcccatgctgctctgatttatacagtgataagggcctattgtggcagtctttactcttggggattttgttactgtgtagagtggattgagaaaagaattgggttctgtcatgaagggagtagcaccttttgtgggcaccacctttatgtgcctcagaggggaccaaaggatggcagaaaactgttctcagtctagtttgacctaatttacactattgccctaggcttgctaggaaagactgaaaaaatttttgtgcctaactttgtggcctggctgccaggatttcctgtgagcccagtgaggagggcatagttggtgcgaaaatctcctgtgcttgtggaagcaacataagttgggtcccttaactgtcacgtactccccagcactgttgagggattgctgtcttctgtacctgtacaggatcaagtccctgatatccagaaccccataggcaagtaacattgactgtaagacctctgtagggcaatgtgaaaatcatgattgctacagaagcactgagataatggagtggggatgactgtggcaaacaaaaggagattcgaacattctagaggggcatccacaagtctcggtgcagttatgatggtgtgggatgggagtgcatagaaattctcaggaccttcagacatctgtatctcctgtggccaaggccactgtcagaggaaataatctaaatgtttgtggattcctgtgtctccctgggcagttgacctgcacagacaggaacctcagcagtgacagaagagagatccagggatgggtcttctctgacccagccagcattccgagtgactgaggtggatgtggacatcattgcttaccaatttttaccaacattgaggcagggctcactctcctaaattgtagggagaggaatatggtaaagccaaaatagttgacagatctaactttcctagtggaacagtatatatagattttaatgaggaacatttatttaatagctttatggaggtatgattaacatgcaataaactgcaaatatgtaaagtgtaaaatgtgctgtttcagcatgtgtgtacacctatgaaaccaccacagtcaagatatccaacacaacaaaagattgtccctttataatcctcaatttttccttatcttgttttccacaattcacaagcaacagcaagcattttctataattttataaatgaaaccatatggtgtgtactttttagggggtggggctctggctttttcagtaaacataactattttaaggttaatccattatcttgttgcatgaatcaattgtttgctcatttgtattgctgcgtagtatttcagtatttcattgtataccacaatttttcttctttgtcaacttaattgttatggatgtttgggtaactttcagtttttggctattacaaataaacctctgaagatttgtgtgcaaa

SEQ ID NO: 202100 - DNA, 4313 bp, Homo sapiens
  Payload ID: 19866
  Gene Name: zinc finger protein 304
  Uniprot ID: Q9HCX3
  ENST ID: ENST00000391705
  CDS Start-End: 285-2264
tgaaggctgagttctagagatcgggtcggctttctacgcggctctcgtggaacctagcaaagaaagacagtgaagactgcaggaccttccttcgcgcttttgttacaatccacacgtcctcttgtccttgtctcccccagaagcagccgccttagtcttgtgagcgtttttacaccgggtagattgagacttggagtgctacactcagcccgagggcgtccagcgcggtggaggcgtggggtttcggctgagcccacagggcacagactgttcatccgcttctcatggcagcggcggtgctgatggaccgggttcagagttgtgtgaccttcgaggatgtgttcgtgtacttctctcgggaggagtgggaactccttgaggaggcacagagattcctgtaccgtgatgtgatgctggagaactttgcacttgtggctacactaggtttttggtgtgaagcagaacatgaggcaccttctgagcagagcgtttctgtagaaggagtgtcacaggtcaggactgctgagtcaggtcttttccagaaagcacacccatgtgagatgtgtgacccactcttgaaagacattttgcacctggctgaacaccagggatcacaccttacacagaaactgtgcacacgtgggctgtgtaggagaagattctcgttcagtgcaaacttttaccagcaccagaagcaacataatggagagaattgcttcagaggggatgatggaggggcctcatttgtgaagagctgtacagtccacatgttagggagatcctttacgtgcagggaggaagggatggacttaccagatagctctggccttttccagcaccagaccacttacaatagggtgagtccatgcagaaggactgaatgcatggagtctttcccacacagctccagtctcaggcaacaccaaggagactatgatggacagatgcttttcagttgcggtgatgaagggaaagccttcctggacacctttactcttcttgacagccagatgactcatgctgaggtgagacccttcagatgcctaccatgtggaaatgtgttcaaggagaaatcagctcttattaatcacagaaaaatccacagtggagaaatatctcatgtgtgtaaggagtgtggaaaagccttcattcacttgcaccacctaaaaatgcaccagaaatttcacactggaaaaagacactatacatgcagtgaatgtgggaaggccttcagccgcaaggacacacttgttcagcatcagagagttcacactggagaaagatcttatgactgcagtgaatgtggaaaagcctacagcagaagctcccaccttgttcagcaccagagaattcacacaggagaaaggccttataagtgcaacaaatgtgggaaagcctttagccgtaaagacacacttgttcagcaccagagatttcatactggagaaaggccttatgagtgcagtgaatgtggaaaattctttagccaaagctcccaccttattgagcactggagaattcataccggggcaaggccctatgaatgcatagaatgtggaaaattctttagccataactctagcctcattaaacatcggagagtccacacaggagcaagatcctacgtgtgcagcaaatgtgggaaggcctttggctgcaaagacacacttgttcagcaccagataattcacactggagcaaggccttatgagtgcagtgaatgtgggaaggccttcagccgtaaagacacacttgtgcaacaccaaaaaatccacactggagaaaggccttatgagtgtggtgaatgtggtaaattcttcagccatagctccaaccttattgtacaccagagaattcacactggagcaaagccttatgagtgcaatgaatgtgggaaatgctttagccacaactccagcctcattttgcaccagagagttcacacaggagcaaggccttatgtgtgcagtgaatgtgggaaggcttacattagtagctcccaccttgttcaacacaagaaagttcacactggagcaagaccttatgagtgcagtgaatgtgggaaattctttagccgcaactctggcctcattctgcaccagagggttcacactggagaaaagccttacgtatgcagcgaatgtgggaaagcctatagcagaagctcccatcttgttcgtcaccagaaagctcacactggagaaagagctcacgagtgcaacagttttggtggccctttagctgcatctcttaaacttgtttaacaccagaaaattcacacaagagaaaggccttatgaatgcagaaaatatgtcatcttgttcatcctcataggactcacaccagagcaatgctctgtgagtaccctttgtgagggaaccatcagctagcagatgagcaccgtatattcattccaccctggggagattcctgataagcaccacatatgtgggaggctttcatgaggtgtgttgcactttgtaactgtctagagctcttgatggaattatatcactgccagtgcctgtggcggaagccatcttattgctaccagctgtgtgtgtcaatcactccattttgctcagggaaggcagacttctgtgctttctttcctgttccctacaggtaatcatgaatattttcaaggacttccccccccccccacttcaccccctaccattgagggtcctcatcttttccctcatgattaggttctgagcaaacatgatctagctctcaccaaaaggacctgagctagggtctgctgggatttcctgacacgattttccatcttcatggacaatgttaactgtaaacgtgatagctgtgacttacttgtcttactgccaaatcgcccaaatttggaactgcttgtcccatgctgctctgatttatacagtgataagggcctattgtggcagtctttactcttggggattttgttactgtgtagagtggattgagaaaagaattgggttctgtcatgaagggagtagcaccttttgtgggcaccacctttatgtgcctcagaggggaccaaaggatggcagaaaactgttctcagtctagtttgacctaatttacactattgccctaggcttgctaggaaagactgaaaaaatttttgtgcctaactttgtggcctggctgccaggatttcctgtgagcccagtgaggagggcatagttggtgcgaaaatctcctgtgcttgtggaagcaacataagttgggtcccttaactgtcacgtactccccagcactgttgagggattgctgtcttctgtacctgtacaggatcaagtccctgatatccagaaccccataggcaagtaacattgactgtaagacctctgtagggcaatgtgaaaatcatgattgctacagaagcactgagataatggagtggggatgactgtggcaaacaaaaggagattcgaacattctagaggggcatccacaagtctcggtgcagttatgatggtgtgggatgggagtgcatagaaattctcaggaccttcagacatctgtatctcctgtggccaaggccactgtcagaggaaataatctaaatgtttgtggattcctgtgtctccctgggcagttgacctgcacagacaggaacctcagcagtgacagaagagagatccagggatgggtcttctctgacccagccagcattccgagtgactgaggtggatgtggacatcattgcttaccaatttttaccaacattgaggcagggctcactctcctaaattgtagggagaggaatatggtaaagccaaaatagttgacagatctaactttcctagtggaacagtatatatagattttaatgaggaacatttatttaatagctttatggaggtatgattaacatgcaataaactgcaaatatgtaaagtgtaaaatgtgctgtttcagcatgtgtgtacacctatgaaaccaccacagtcaagatatccaacacaacaaaagattgtccctttataatcctcaatttttccttatcttgttttccacaattcacaagcaacagcaagcattttctataattttataaatgaaaccatatggtgtgtactttttagggggtggggctctggctttttcagtaaacataactattttaaggttaatccattatcttgttgcatgaatcaattgtttgctcatttgtattgctgcgtagtatttcagtatttcattgtataccacaatttttcttctttgtcaacttaattgttatggatgtttgggtaactttcagtttttggctattacaaataaacctctgaagatttgtgtgcaaa

SEQ ID NO: 202101 - DNA, 3391 bp, Homo sapiens
  Payload ID: 19866
  Gene Name: zinc finger protein 304
  ENST ID: ENST00000443917
  CDS Start-End: 340-2460
atcgggtcggctttctacgcggctctcgtggaacctagcaaagaaagacagtgaagactgcaggaccttccttcgcgcttttgttacaatccatgacccctgtcgtgggacgggcggcctctcgcggaggtgtctgccggggctgggctcttaccgaggcctccacacacgtcctcttgtccttgtctcccccagaagcagccgccttagtcttgtgagcgtttttacaccgggtagattgagacttggagtgctacactcagcccgagggcgtccagcgcggtggaggcgtggggtttcggctgagcccacagggcacagactgttcatccgcttctcatggcagcggcggtgctgatggaccgggttcagagttgtgtgaccttcgaggatgtgttcgtgtacttctctcgggaggagtgggaactccttgaggaggcacagagattcctgtaccgtgatgtgatgctggagaactttgcacttgtggctacactagctttcattttcccagtcccatgcagttgcgcagttggagggggcagaaaaccttgggtgcctgacagggcagacatcactgcagccacagtaaaggagacctacagagggcatggccctgctgaatgggagctggaagagggtttttggtgtgaagcagaacatgaggcaccttctgagcagagcgtttctgtagaaggagtgtcacaggtcaggactgctgagtcaggtcttttccagaaagcacacccatgtgagatgtgtgacccactcttgaaagacattttgcacctggctgaacaccagggatcacaccttacacagaaactgtgcacacgtgggctgtgtaggagaagattctcgttcagtgcaaacttttaccagcaccagaagcaacataatggagagaattgcttcagaggggatgatggaggggcctcatttgtgaagagctgtacagtccacatgttagggagatcctttacgtgcagggaggaagggatggacttaccagatagctctggccttttccagcaccagaccacttacaatagggtgagtccatgcagaaggactgaatgcatggagtctttcccacacagctccagtctcaggcaacaccaaggagactatgatggacagatgcttttcagttgcggtgatgaagggaaagccttcctggacacctttactcttcttgacagccagatgactcatgctgaggtgagacccttcagatgcctaccatgtggaaatgtgttcaaggagaaatcagctcttattaatcacagaaaaatccacagtggagaaatatctcatgtgtgtaaggagtgtggaaaagccttcattcacttgcaccacctaaaaatgcaccagaaatttcacactggaaaaagacactatacatgcagtgaatgtgggaaggccttcagccgcaaggacacacttgttcagcatcagagagttcacactggagaaagatcttatgactgcagtgaatgtggaaaagcctacagcagaagctcccaccttgttcagcaccagagaattcacacaggagaaaggccttataagtgcaacaaatgtgggaaagcctttagccgtaaagacacacttgttcagcaccagagatttcatactggagaaaggccttatgagtgcagtgaatgtggaaaattctttagccaaagctcccaccttattgagcactggagaattcataccggggcaaggccctatgaatgcatagaatgtggaaaattctttagccataactctagcctcattaaacatcggagagtccacacaggagcaagatcctacgtgtgcagcaaatgtgggaaggcctttggctgcaaagacacacttgttcagcaccagataattcacactggagcaaggccttatgagtgcagtgaatgtgggaaggccttcagccgtaaagacacacttgtgcaacaccaaaaaatccacactggagaaaggccttatgagtgtggtgaatgtggtaaattcttcagccatagctccaaccttattgtacaccagagaattcacactggagcaaagccttatgagtgcaatgaatgtgggaaatgctttagccacaactccagcctcattttgcaccagagagttcacacaggagcaaggccttatgtgtgcagtgaatgtgggaaggcttacattagtagctcccaccttgttcaacacaagaaagttcacactggagcaagaccttatgagtgcagtgaatgtgggaaattctttagccgcaactctggcctcattctgcaccagagggttcacactggagaaaagccttacgtatgcagcgaatgtgggaaagcctatagcagaagctcccatcttgttcgtcaccagaaagctcacactggagaaagagctcacgagtgcaacagttttggtggccctttagctgcatctcttaaacttgtttaacaccagaaaattcacacaagagaaaggccttatgaatgcagaaaatatgtcatcttgttcatcctcataggactcacaccagagcaatgctctgtgagtaccctttgtgagggaaccatcagctagcagatgagcaccgtatattcattccaccctggggagattcctgataagcaccacatatgtgggaggctttcatgaggtgtgttgcactttgtaactgtctagagctcttgatggaattatatcactgccagtgcctgtggcggaagccatcttattgctaccagctgtgtgtgtcaatcactccattttgctcagggaaggcagacttctgtgctttctttcctgttccctacaggtaatcatgaatattttcaaggacttccccccccccccacttcaccccctaccattgagggtcctcatcttttccctcatgattaggttctgagcaaacatgatctagctctcaccaaaaggacctgagctagggtctgctgggatttcctgacacgattttccatcttcatggacaatgttaactgtaaacgtgatagctgtgacttacttgtcttactgccaaatcgcccaaatttggaactgcttgtcccatgctgctctgatttatacagtgataagggcctattgtggcagtctttactcttggggattttgttactgtgtagagtggattgagaaaagaattgggttctgtcatgaagggagtagcaccttttgtgggcaccacctttatgtgcctcagaggggaccaaaggatggcagaaaactgttctcagtctagtttgacctaatttacactattgccctaggcttgctaggaaagactgaaaaaatttttgtgcctaactttgtggcctggctgccaggatttcctgtgagcccagtgaggagggcatagttggtgcga

SEQ ID NO: 202102 - DNA, 3331 bp, Homo sapiens
  Payload ID: 19866
  Gene Name: zinc finger protein 304
  ENST ID: ENST00000598744
  CDS Start-End: 547-2400
atcgggtcggctttctacgcggctctcgtggaacctagcaaagaaagacagtgaagactgcaggaccttccttcgcgcttttgttacaatccatgacccctgtcgtgggacgggcggcctctcgcggaggtgtctgccggggctgggctcttaccgaggcctccacacacgtcctcttgtccttgtctcccccagaagcagccgccttagtcttgtgagcgtttttacaccgggtagattgagacttggagtgctacactcagcccgagggcgtccagcgcggtggaggcgtggggtttcggctgagcccacagggcacagactgttcatccgcttctcatggcagcggcggtgctgatggaccgggttcaggttgagaacagactgtgagcatgagggagcagctactgcagtagtgttgatggtgtctggtctagaggtgtggctgtggagagttgtgtgaccttcgaggatgtgttcgtgtacttctctcgggaggagtgggaactccttgaggaggcacagagattcctgtaccgtgatgtgatgctggagaactttgcacttgtggctacactaggtttttggtgtgaagcagaacatgaggcaccttctgagcagagcgtttctgtagaaggagtgtcacaggtcaggactgctgagtcaggtcttttccagaaagcacacccatgtgagatgtgtgacccactcttgaaagacattttgcacctggctgaacaccagggatcacaccttacacagaaactgtgcacacgtgggctgtgtaggagaagattctcgttcagtgcaaacttttaccagcaccagaagcaacataatggagagaattgcttcagaggggatgatggaggggcctcatttgtgaagagctgtacagtccacatgttagggagatcctttacgtgcagggaggaagggatggacttaccagatagctctggccttttccagcaccagaccacttacaatagggtgagtccatgcagaaggactgaatgcatggagtctttcccacacagctccagtctcaggcaacaccaaggagactatgatggacagatgcttttcagttgcggtgatgaagggaaagccttcctggacacctttactcttcttgacagccagatgactcatgctgaggtgagacccttcagatgcctaccatgtggaaatgtgttcaaggagaaatcagctcttattaatcacagaaaaatccacagtggagaaatatctcatgtgtgtaaggagtgtggaaaagccttcattcacttgcaccacctaaaaatgcaccagaaatttcacactggaaaaagacactatacatgcagtgaatgtgggaaggccttcagccgcaaggacacacttgttcagcatcagagagttcacactggagaaagatcttatgactgcagtgaatgtggaaaagcctacagcagaagctcccaccttgttcagcaccagagaattcacacaggagaaaggccttataagtgcaacaaatgtgggaaagcctttagccgtaaagacacacttgttcagcaccagagatttcatactggagaaaggccttatgagtgcagtgaatgtggaaaattctttagccaaagctcccaccttattgagcactggagaattcataccggggcaaggccctatgaatgcatagaatgtggaaaattctttagccataactctagcctcattaaacatcggagagtccacacaggagcaagatcctacgtgtgcagcaaatgtgggaaggcctttggctgcaaagacacacttgttcagcaccagataattcacactggagcaaggccttatgagtgcagtgaatgtgggaaggccttcagccgtaaagacacacttgtgcaacaccaaaaaatccacactggagaaaggccttatgagtgtggtgaatgtggtaaattcttcagccatagctccaaccttattgtacaccagagaattcacactggagcaaagccttatgagtgcaatgaatgtgggaaatgctttagccacaactccagcctcattttgcaccagagagttcacacaggagcaaggccttatgtgtgcagtgaatgtgggaaggcttacattagtagctcccaccttgttcaacacaagaaagttcacactggagcaagaccttatgagtgcagtgaatgtgggaaattctttagccgcaactctggcctcattctgcaccagagggttcacactggagaaaagccttacgtatgcagcgaatgtgggaaagcctatagcagaagctcccatcttgttcgtcaccagaaagctcacactggagaaagagctcacgagtgcaacagttttggtggccctttagctgcatctcttaaacttgtttaacaccagaaaattcacacaagagaaaggccttatgaatgcagaaaatatgtcatcttgttcatcctcataggactcacaccagagcaatgctctgtgagtaccctttgtgagggaaccatcagctagcagatgagcaccgtatattcattccaccctggggagattcctgataagcaccacatatgtgggaggctttcatgaggtgtgttgcactttgtaactgtctagagctcttgatggaattatatcactgccagtgcctgtggcggaagccatcttattgctaccagctgtgtgtgtcaatcactccattttgctcagggaaggcagacttctgtgctttctttcctgttccctacaggtaatcatgaatattttcaaggacttccccccccccccacttcaccccctaccattgagggtcctcatcttttccctcatgattaggttctgagcaaacatgatctagctctcaccaaaaggacctgagctagggtctgctgggatttcctgacacgattttccatcttcatggacaatgttaactgtaaacgtgatagctgtgacttacttgtcttactgccaaatcgcccaaatttggaactgcttgtcccatgctgctctgatttatacagtgataagggcctattgtggcagtctttactcttggggattttgttactgtgtagagtggattgagaaaagaattgggttctgtcatgaagggagtagcaccttttgtgggcaccacctttatgtgcctcagaggggaccaaaggatggcagaaaactgttctcagtctagtttgacctaatttacactattgccctaggcttgctaggaaagactgaaaaaatttttgtgcctaactttgtggcctggctgccaggatttcctgtgagcccagtgaggagggcatagttggtgcga

SEQ ID NO: 202103 - DNA, 2730 bp, Homo sapiens
  Payload ID: 19867
  Gene Name: zinc finger protein 311
  Uniprot ID: Q5JNZ3
  ENST ID: ENST00000377179
  CDS Start-End: 514-2514
agcatccattcatatattcattcagtcagctaatttttaatccagcacatactattgcaagcgctgttttaggcgttgagaatacaactgtgaacaagacgacaaaaattcctgccctcatggagcctaagagcctagattttagcgaaggtagaaccaccgtaaacaatgtatatattaataagtaacttatgcaccatactggaaaattataaagtgctatagaggaaaagaagaattcatgtaaagcaagggaaacaagatgtgagatcacagcggtttagtgttgctaatgaaccccaaatccagggcagtgtttgacacattaagccaaacagtagcggcactgtgggtcaagaagggccctttggctggcaccaccaaaacatgtgttctccaaaggaggctggcatcaactggagccacttcacagcttgtttgagaactggatctgaccagtaggaagaaaccaggacagcagtggaagactgttaaagaaacctgagtaaaaagatgcaggaggttgtgctgttggatgagagttcaggaccaccaagccagctgctttggacccgccaggatacccagctccctcaggaaagcgctctattacctgctccatatcctgccttcactaaagatggaagccaaggaaacctgccgcaagcagatatcacactaatgagccaggcccaagagtcagtgacatttgaggatgtagctgtgaacttcactaacagggagtggcagtgtctgacctacgctcaaaggcatctctataaggatgtgatgttggaaaattatgggaacatggtatcacttggatttccatttcctaaacctcctttaatctctcatctggagcgagaagtagacccctgtgtgcaggatccacaggacagggagtccctaagctgctcctacccagtgtcagctgacaagatgtggcctgagaatgaaaaggcaagttcacaacaagagatttttgaaaatggagaagcctactggatgaaatttaacagtctcctaaaagttgattcccgggatcctaaggttagagaagtttgtgttcaggatgtcaaattagagaatcaatgggaaacatctataagggagaaactgagagaagagaaagaaggctctgaggaagtgacctgcaaaaaaggaaagaaccagaaagtgcttagtaaaaacttgaatccaaactcaaaacatagtcaatgtaataaagttcttatagcacagaaactccatgaatgtgccaggtgtggcaaaaacttcagttggcactcagatctaattctccatgagcaaattcattctggtgagaaaccccatgtgtgtaatgagtgtgggaaagcattcaagaccagaaatcagctttctatgcaccggataatccacacaggggagaaaccttttaattgcacccagtgtgggaaggctttcaacagtagatcagctctttgccgacataaaaaaacccacagtggggagaagcctcacgagtgcagggactgtgggaaggccttcaagaccaggaaccgtctctgtatgcatcagcttatccacaccggggagaagccttacaaatgtaactgctgtgggaaggccttccagtttaagcattcccttaccatccatggcagaatccacactggggagaagccatatgaatgtgaggagtgcgggaaggccttcagtgggagttcagacctcaccaaacacataagaatccacactggggaacgaccttatgagtgcagcaagtgtggaagggccttcagtcggagctcagacctaagcaaacacaaacgaatccatactcgggagaaacactatgggtgtccccagtgtggaaaagacttcagcatcaaggcagaactcaccaaacacagaaggatccacactgaagagaaacgttacaggtgtgaggagtgtgggaaagcctttcgtcataactgtaagcgcagggctcatgaacgagagcatacaggggagaagccctatcaatgcagggattgtgggaaaaccttccaagataagcactgccttaccatccatcagagaatccacactggagagaaaccttacaaatgtttagagtgtgggaaagctttcagtgggaagtcaaacttgaccaatcatcgaagaattcacactggagagaagcctcacaaatgtgaggtatgtggaatggccttccatcatagttcagtcctgaggcagcacaaaagaatccacactggtgagaagccatacacctgcagtgagtgtggcacgtccttccgtcagggctcagctctgattggacataagcgagttcatactggggagaaaccttatgaatgtgaggaatgtggaaaagcttttagagtgagctcaaatcttactggacataagaaaagaaaacatcaagtatggagtacccatgaacttgatgggagtaggaaatccctctctccagtgactgtttctcagacctcagtagtcagtattttgaccagtgcctgagtataacgattctggtgttactttctgtttttcctacctcttaggctggtccttctgtctcttatattagttattcctgatttcctgacccttaattgtgagattccccaaagacattgtcctttaccttcttattcactattttttcagtgagcacatttacttccaagagtttatcaatcacttcctaatattaataaacacttattagtgctt

SEQ ID NO: 202104 - DNA, 2700 bp, Homo sapiens
  Payload ID: 19867
  Gene Name: zinc finger protein 311
  Uniprot ID: Q5JNZ3
  ENST ID: ENST00000383655
  CDS Start-End: 484-2484
taatttttaatccagcacatactattgcaagcgctgttttaggcgttgagaatacaactgtgaacaagacgacaaaaattcctgccctcatggagcctaagagcctaaattttagcgaaggtagaaccaccgtaaacaatgtatatattaataagtaacttatgcaccatactggaaaattataaagtgctatagaggaaaagaagaattcatgtaaagcaagggaaacaagatgtgagatcacagcggtttagtgttgctaatgaaccccaaatccagggcagtgtttgacacattaagccaaacagtagcggcactgtgggtcaagaagggccctttggctggcaccaccaaaacatgtgttctccaaaggaggctggcatcaactggagccacttcacagcttgtttgagaactggatctgaccagtaggaagaaaccaggacagcagtggaagactgttaaagaaacctgagtaaaaagatgcaggaggttgtgctgttggatgagagttcaggaccaccaagccagctgctttggacccgccaggatacccagctccctcaggaaagcgctctattacctgctccatatcctgccttcactaaagatggaagccaaggaaacctgccgcaagcagatatcacactaatgagccaggcccaagagtcagtgacatttgaggatgtagctgtgaacttcactaacagggagtggcagtgtctgacctacgctcaaaggcatctctataaggatgtgatgttggaaaattatgggaacatggtatcacttggatttccatttcctaaacctcctttaatctctcatctggagcgagaagtagacccctgtgtgcaggatccacaggacagggagtccctaagctgctcctacccagtgtcagctgacaagatgtggcctgagaatgaaaaggcaagttcacaacaagagatttttgaaaatggagaagcctactggatgaaatttaacagtctcctaaaagttgattcccgggatcctaaggttagagaagtttgtgttcaggatgtcaaattagagaatcaatgggaaacatctataagggagaaactgagagaagagaaagaaggctctgaggaagtgacctgcaaaaaaggaaagaaccagaaagtgcttagtaaaaacttgaatccaaactcaaaacatagtcaatgtaataaagttcttatagcacagaaactccatgaatgtgccaggtgtggcaaaaacttcagttggcactcagatctaattctccatgagcaaattcattctggtgagaaaccccatgtgtgtaatgagtgtgggaaagcattcaagaccagaaatcagctttctatgcaccggataatccacacaggggagaaaccttttaattgcacccagtgtgggaaggctttcaacagtagatcagctctttgccgacataaaaaaacccacagtggggagaagcctcacgagtgcagggactgtgggaaggccttcaagaccaggaaccgtctctgtatgcatcagcttatccacaccggggagaagccttacaaatgtaactgctgtgggaaggccttccagtttaagcattcccttaccatccatggcagaatccacactggggagaagccatatgaatgtgaggagtgcgggaaggccttcagtgggagttcagacctcaccaaacacataagaatccacactggggaacgaccttatgagtgcagcaagtgtggaagggccttcagtcggagctcagacctaagcaaacacaaacgaatccatactcgggagaaacactatgggtgtccccagtgtggaaaagacttcagcatcaaggcagaactcaccaaacacagaaggatccacactgaagagaaacgttacaggtgtgaggagtgtgggaaagcctttcgtcataactgtaagcgcagggctcatgaacgagagcatacaggggagaagccctatcaatgcagggattgtgggaaaaccttccaagataagcactgccttaccatccatcagagaatccacactggagagaaaccttacaaatgtttagagtgtgggaaagctttcagtgggaagtcaaacttgaccaatcatcgaagaattcacactggagagaagcctcacaaatgtgaggtatgtggaatggccttccatcatagttcagtcctgaggcagcacaaaagaatccacactggtgagaagccatacacctgcagtgagtgtggcacgtccttccgtcagggctcagctctgattggacataagcgagttcatactggggagaaaccttatgaatgtgaggaatgtggaaaagcttttagagtgagctcaaatcttactggacataagaaaagaaaacatcaagtatggagtacccatgaacttgatgggagtaggaaatccctctctccagtgactgtttctcagacctcagtagtcagtattttgaccagtgcctgagtataacgattctggtgttactttctgtttttcctacctcttaggctggtccttctgtctcttatattagttattcctgatttcctgacccttaattgtgagattccccaaagacattgtcctttaccttcttattcactattttttcagtgagcacatttacttccaagagtttatcaatcacttcctaatattaataaacacttattagtgctt

SEQ ID NO: 202105 - DNA, 2730 bp, Homo sapiens
  Payload ID: 19867
  Gene Name: zinc finger protein 311
  Uniprot ID: Q5JNZ3
  ENST ID: ENST00000458265
  CDS Start-End: 514-2514
agcatccattcatatattcattcagtcagctaatttttaatccagcacatactattgcaagcgctgttttaggcgttgagaatacaactgtgaacaagacgacaaaaattcctgccctcatggagcctaagagcctagattttagcgaaggtagaaccaccgtaaacaatgtatatattaataagtaacttatgcaccatactggaaaattataaagtgctatagaggaaaagaagaattcatgtaaagcaagggaaacaagatgtgagatcacagcggtttagtgttgctaatgaaccccaaatccagggcagtgtttgacacattaagccaaacagtagcggcactgtgggtcaagaagggccctttggctggcaccaccaaaacatgtgttctccaaaggaggctggcatcaactggagccacttcacagcttgtttgagaactggatctgaccagtaggaagaaaccaggacagcagtggaagactgttaaagaaacctgagtaaaaagatgcaggaggttgtgctgttggatgagagttcaggaccaccaagccagctgctttggacccgccaggatacccagctccctcaggaaagcgctctattacctgctccatatcctgccttcactaaagatggaagccaaggaaacctgccgcaagcagatatcacactaatgagccaggcccaagagtcagtgacatttgaggatgtagctgtgaacttcactaacagggagtggcagtgtctgacctacgctcaaaggcatctctataaggatgtgatgttggaaaattatgggaacatggtatcacttggatttccatttcctaaacctcctttaatctctcatctggagcgagaagtagacccctgtgtgcaggatccacaggacagggagtccctaagctgctcctacccagtgtcagctgacaagatgtggcctgagaatgaaaaggcaagttcacaacaagagatttttgaaaatggagaagcctactggatgaaatttaacagtctcctaaaagttgattcccgggatcctaaggttagagaagtttgtgttcaggatgtcaaattagagaatcaatgggaaacatctataagggagaaactgagagaagagaaagaaggctctgaggaagtgacctgcaaaaaaggaaagaaccagaaagtgcttagtaaaaacttgaatccaaactcaaaacatagtcaatgtaataaagttcttatagcacagaaactccatgaatgtgccaggtgtggcaaaaacttcagttggcactcagatctaattctccatgagcaaattcattctggtgagaaaccccatgtgtgtaatgagtgtgggaaagcattcaagaccagaaatcagctttctatgcaccggataatccacacaggggagaaaccttttaattgcacccagtgtgggaaggctttcaacagtagatcagctctttgccgacataaaaaaacccacagtggggagaagcctcacgagtgcagggactgtgggaaggccttcaagaccaggaaccgtctctgtatgcatcagcttatccacaccggggagaagccttacaaatgtaactgctgtgggaaggccttccagtttaagcattcccttaccatccatggcagaatccacactggggagaagccatatgaatgtgaggagtgcgggaaggccttcagtgggagttcagacctcaccaaacacataagaatccacactggggaacgaccttatgagtgcagcaagtgtggaagggccttcagtcggagctcagacctaagcaaacacaaacgaatccatactcgggagaaacactatgggtgtccccagtgtggaaaagacttcagcatcaaggcagaactcaccaaacacagaaggatccacactgaagagaaacgttacaggtgtgaggagtgtgggaaagcctttcgtcataactgtaagcgcagggctcatgaacgagagcatacaggggagaagccctatcaatgcagggattgtgggaaaaccttccaagatcagcactgccttaccatccatcagagaatccacactggagagaaaccttacaaatgtttagagtgtgggaaagctttcagtgggaagtcaaacttgaccaatcatcgaagaattcacactggagagaagcctcacaaatgtgaggtatgtggaatggccttccatcatagttcagtcctgaggcagcacaaaagaatccacactggtgagaagccatacacctgcagtgagtgtggcacgtccttccgtcagggctcagctctgattggacataagcgagttcatactggggagaaaccttatgaatgtgaggaatgtggaaaagcttttagagtgagctcaaatcttactggacataagaaaagaaaacatcaagtatggagtacccatgaacttgatgggagtaggaaatccctctctccagtgactgtttctcagacctcagtagtcagtattttgaccagtgcctgagtataacgattctggtgttactttctgtttttcctacctcttaggctggtccttctgtctcttatattagttattcctgatttcctgacccttaattgtgagattccccaaagacattgtcctttaccttcttattcactattttttcagtgagcacatttacttccaagagtttatcaatcacttcctaatattaataaacacttattagtgctt

SEQ ID NO: 202106 - DNA, 2730 bp, Homo sapiens; identical to SEQ ID NO: 202103
  Payload ID: 19867
  Gene Name: zinc finger protein 311
  Uniprot ID: Q5JNZ3
  ENST ID: ENST00000426120
  CDS Start-End: 514-2514

SEQ ID NO: 202107 - DNA, 2730 bp, Homo sapiens; identical to SEQ ID NO: 202103
  Payload ID: 19867
  Gene Name: zinc finger protein 311
  Uniprot ID: Q5JNZ3
  ENST ID: ENST00000429714
  CDS Start-End: 514-2514

SEQ ID NO: 202108 - DNA, 2730 bp, Homo sapiens; identical to SEQ ID NO: 202103
  Payload ID: 19867
  Gene Name: zinc finger protein 311
  Uniprot ID: Q5JNZ3
  ENST ID: ENST00000436574
  CDS Start-End: 514-2514

SEQ ID NO: 202109 - DNA, 2643 bp, Homo sapiens
  Payload ID: 19867
  Gene Name: zinc finger protein 311
  Uniprot ID: Q5JNZ3
  ENST ID: ENST00000452316
  CDS Start-End: 514-2514
agcatccattcatatattcattcagtcagctaatttttaatccagcacatactattgcaagcgctgttttaggcgttgagaatacaactgtgaacaagacgacaaaaattcctgccctcatggagcctaagagcctagattttagcgaaggtagaaccaccgtaaacaatgtatatattaataagtaacttatgcaccatactggaaaattataaagtgctatagaggaaaagaagaattcatgtaaagcaagggaaacaagatgtgagatcacagcggtttagtgttgctaatgaaccccaaatccagggcagtgtttgacacattaagccaaacagtagcggcactgtgggtcaagaagggccctttggctggcaccaccaaaacatgtgttctccaaaggaggctggcatcaactggagccacttcacagcttgtttgagaactggatctgaccagtaggaagaaaccaggacagcagtggaagactgttaaagaaacctgagtaaaaagatgcaggaggttgtgctgttggatgagagttcaggaccaccaagccagctgctttggacccgccaggatacccagctccctcaggaaagcgctctattacctgctccatatcctgccttcactaaagatggaagccaaggaaacctgccgcaagcagatatcacactaatgagccaggcccaagagtcagtgacatttgaggatgtagctgtgaacttcactaacagggagtggcagtgtctgacctacgctcaaaggcatctctataaggatgtgatgttggaaaattatgggaacatggtatcacttggatttccatttcctaaacctcctttaatctctcatctggagcgagaagtagacccctgtgtgcaggatccacaggacagggagtccctaagctgctcctacccagtgtcagctgacaagatgtggcctgagaatgaaaaggcaagttcacaacaagagatttttgaaaatggagaagcctactggatgaaatttaacagtctcctaaaagttgattcccgggatcctaaggttagagaagtttgtgttcaggatgtcaaattagagaatcaatgggaaacatctataagggagaaactgagagaagagaaagaaggctctgaggaagtgacctgcaaaaaaggaaagaaccagaaagtgcttagtaaaaacttgaatccaaactcaaaacatagtcaatgtaataaagttcttatagcacagaaactccatgaatgtgccaggtgtggcaaaaacttcagttggcactcagatctaattctccatgagcaaattcattctggtgagaaaccccatgtgtgtaatgagtgtgggaaagcattcaagaccagaaatcagctttctatgcaccggataatccacacaggggagaaaccttttaattgcacccagtgtgggaaggctttcaacagtagatcagctctttgccgacataaaaaaacccacagtggggagaagcctcacgagtgcagggactgtgggaaggccttcaagaccaggaaccgtctctgtatgcatcagcttatccacaccggggagaagccttacaaatgtaactgctgtgggaaggccttccagtttaagcattcccttaccatccatggcagaatccacactggggagaagccatatgaatgtgaggagtgcgggaaggccttcagtgggagttcagacctcaccaaacacataagaatccacactggggaacgaccttatgagtgcagcaagtgtggaagggccttcagtcggagctcagacctaagcaaacacaaacgaatccatactcgggagaaacactatgggtgtccccagtgtggaaaagacttcagcatcaaggcagaactcaccaaacacagaaggatccacactgaagagaaacgttacaggtgtgaggagtgtgggaaagcctttcgtcataactgtaagcgcagggctcatgaacgagagcatacaggggagaagccctatcaatgcagggattgtgggaaaaccttccaagataagcactgccttaccatccatcagagaatccacactggagagaaaccttacaaatgtttagagtgtgggaaagctttcagtgggaagtcaaacttgaccaatcatcgaagaattcacactggagagaagcctcacaaatgtgaggtatgtggaatggccttccatcatagttcagtcctgaggcagcacaaaagaatccacactggtgagaagccatacacctgcagtgagtgtggcacgtccttccgtcagggctcagctctgattggacataagcgagttcatactggggagaaaccttatgaatgtgaggaatgtggaaaagcttttagagtgagctcaaatcttactggacataagaaaagaaaacatcaagtatggagtacccatgaacttgatgggagtaggaaatccctctctccagtgactgtttctcagacctcagtagtcagtattttgaccagtgcctgagtataacgattctggtgttactttctgtttttcctacctcttaggctggtccttctgtctcttatattagttattcctgatttcctgacccttaattgtgagattccccaaagacattgtcctttacct

SEQ ID NO: 202110 - DNA, 5392 bp, Homo sapiens
  Payload ID: 19868
  Gene Name: zinc finger protein 316
  Uniprot ID: A6NFI3
  ENST ID: ENST00000382252
  CDS Start-End: 557-3571
ccggtgcccacgcgccgccgtcgcgcagctcccgggccgtcactttgtgtagcgcggggtccgccgccggcccgcaggccccggccccggtgtccggcccgtggctcggccagcccggcccgcgcggtctctgcaggaggaggcggctccggacgccccctggggggcgggaggcgctcggcccgtcgccccaggagcccgctttgtgaccttgggggccttatccgggctttccctcatctgcagaaggagccccggtgggctgctcggctgtcttctgctgccggcaggagctggtcctccaccttctctggtcatccgtgggtggacttcttgggagaaagaactcagtgtcgtctttggaggcagagactctccactgcttctggggaagaagcctgacctgccggcttcctggcacctgtctctcctcctagccccgttgtgccttgcaagtgcctgcatcctgtctgtgctgagacctcttggcgttccctgctggcctggttcatgtgtgttgaggaccaggccacgtggaggctcgctcccagggaggatggcggcgctccacacgactcccgactccccagctgcccagctggagcgggcagaggacgggtcagagtgcgaccctgaccaggaagaagaggaggaggaggaggaaaagggggaagaggtgcaggaggtggaagaagaggaggaggagatagtggtggaggaggaggaggagggtgtggcagaggtagtgcaggatgcgcaggtggaggcggtggccgaggtggaggtggaggcggacgtggaggaggaggatgtgaaggaggtgctggcagaggaggagtgtccggcgttggggacccaggagcgacttagccgtggtggtgatgccaagtccccagttcttcaggaaaagggcctgcaggcctcccgggctccagccactcctagggatgaggacctggaggaggaggaagaggaggaggaggatgaggacgaggatgatttgctgacggctgggtgtcaggagctggtgacgtttgaagatgtggctgtgtacttctccctggaggagtgggaaaggctggaagcagaccagcggggcctctaccaggaagtcatgcaggagaactatgggattctcgtgtccttgggatacccaattcccaagcccgatctgatcttccggctggaacaaggggaagaaccttgggtcccagatagtccccgacctgaggaaggagacatcgtcactggcgtctacacaggagcctggttctggacggacgacatagaggaccacgaggaggaagacgacgaggacttcctggcggaggtggccgaggaggagaacgagcccccagggctctggtcggcggcctacggcgtgggggacgtgcctgggacgtgggggcccgacgactcggattcggcgcagactccagaggggtggggacccgacccaggcggcctgggggtcctggccgacggctctgaagcgaagcctttcctgcccggccgggagccgggtgcgaacctgctgtcgccctgggcgttccccgccgcagtggccccgccggccgggaggccggagaccacgtgcgacgtgtgcggcaaggtcttcccgcaccgctcgcggctggccaagcaccagcgctaccacgcggccgtcaagcccttcggctgcgaggagtgcggcaagggcttcgtgtaccgctcgcacttggccatccaccagcgcacgcacaccggcgagaagcccttcccgtgcccggactgcggcaagcgcttcgtctacaagtcgcacctggttacgcaccgacgcatccatactggcgagcggccctaccgctgcgccttctgcggcgcgggcttcgggcgccgctcctacctggtcacgcaccagcgcacgcacaccggcgagcgaccctacccgtgttcgcactgcggccgcagcttcagccagagctcggcgctggcacggcaccaggcggtgcacacggccgaccgcccgcactgctgtcccgactgcggccaggccttccgcctgcgcgccgacttccagcgccaccgacgcggcgggggctgcgcggaggcgggtggtgacggcccccggcgggagcccggcgagacggcggccgccgcggggcccgaggacacggaccctgggccagagggatctgaagttggcgaggcggacggagaggcggaggccgcggccgaggagagagaggaggcggcggtggcggcgcccacccccagcggcaaggtggaccccgcgccggaacggcgcttcctggagctgggcaacggcctgggggagggcgaaggcccctcctcccacccgctgggcttccacttccccgtgcaccccaagtcctggctgcacccggacagcttcccgatcctgggcctacccgacttccgagagcggctgccggtcgacgggcgcccgctcccggcgcccctggggggcccgctctccctggtggagggtaccgggctggcgtgcgaccctttcggcggcggcggggccgcgggcggcggaggcggcctgcgcgcgttcgggcccgccatcgggggtctgctggcggagcccgcgccggccgcgctggcggaggaggagagcccgtggatctgctcggactgcggcaagacgtttgggcgccgggccgcgctggccaagcaccagcgctaccacgcgggcgagcggccgcatcgctgcgccgactgcggcaagagcttcgtgtacggctcgcacctggcgcgccaccggcgcacacacaccggcgagcggcccttcccgtgccccgagtgcggcgcgcggttcgcccgcggctcgcacttggcggcgcacgtgcgcggccacacgggcgagaagccgttcgtgtgcggcgtgtgcggtgcggggttcagccgtcgcgcgcacttgacggcgcacgggcgcgcgcacaccggggagcggccttacgcgtgtggagagtgcggccggcgcttcgggcagagcgcggcgctgacgcggcatcagtgggcgcacgccgaggagaagccgcaccgctgccccgactgcggcaagggcttcggccacagctcggacttcaagcggcatcggcgcacgcacacgggcgagaagcccttccgctgcgccgactgcggccgcggcttcgcgcagcgctccaacctggccaagcaccggcgcggccacacgggcgaacgccccttcccgtgccctgagtgcggcaagcgcttttcgcagcgctcggtgctggtcacgcaccagcgcacacatacgggcgagcggccctacgcctgcgccaactgcggccgccgcttctcgcagagctcgcacttgctcacccacatgaagacgcaccgcggagccaccgcagcgccgggctcgggttcggccccagcccccgcgcccaagcccgaggcggccgccaaggggccgtccagtgccggccccggtgagcgcggcagcgccctgctggagttcgcgggcggcacaagcttcggctccgagcaccaggccgcgttcgccgggccctcgggcgcctaccgggagggcgtcctgtgaggggcccggggccgacagcagcgcagcctgcagggccaccggcccctcccttggacggccggccccccgctcctcgggccccgggaggctgagggtcccagtcctgggtgcggtgccttccctcagccctcgccctgcggccccgggtctcatgcccgccgggtccgtgtgctcagccggagacgtgggggagctctggggagaagagcagcgcggaggcagcgaggccaggacgtcacccccacggagactgcgatatcccctgggtgggcccgggctgtgaagcagggcggtagttggcgggcgatgctatttatttcactcggattccgacttgggtggtctggggagcaagggatttgtgtgtttgcaaccgggtgtggcggcgagggaggggcccggccacccaggtgggccagcgggatgcctgggaggccggtgggtttggctgaccacttcttcccattcctcagtgagagacttgggccctcccggtcatccgagtctgtcccgaaggtttaactgcgcgcggcgaggggaggccttgtaggtttccaaagggcggagctccagtgggaaaacttgaaacttgtcgtctgcggatatttatttccacttcttgtatggcctgaagaatctaggaggagaaaaagccagataccaaacttacggccaggcagacgggtcgcgggtgttgacagggtcctgagggagtttgaagccttattctcgagccgcctcctcttctctacccacacttgcaccgaggtcaccccggcaccctccgcaccggttcggttttggtctctgcttgtcctctcagtccttggtactttcgtctccctcagccggaggtggcaaactcagacatctacgggcgcccgaggccctcgcagccctgagccccagctttcacttccctgggctgcccctctccgggagcaggcagacgccccgttctcggagcccagcgctcacttagagcgactgaggttggtcgaaggatctttccccacatcccataatcagggccctaggacactcgcaggtccctttaactctgcttctgtcattacactagaacaagtagtgtttctgtttagagtcccatttcacaaattggttagtggaggcacccgtggcctggcagcttgcacagtggctgtccacctcgggggggtgtggacctgagccgtggctcagtgacaaaccaggcacccaactatgcaaggcccctgcctggtgggcatcctaccctctggactgggcccatggaagccactgggcgggcagctggggtgtagttcatgtgaagccccattcccctcacgcttttggggccactgtgaatggggccaggaaacggatttttggtgcagctgcattccctaatagacctagttccctccacgttagtgtagacatggccttgggggctgagcgcagcagccaggctgccagggctgggggcgggtaggaggcacggtagttggtgggtgggaagagggcctgggtggtggcggtcagttagcctggctgggtgaggttggtgaggttgcggggcggggtggtgaggagagcaggggtcccagggaggcattggggtgctgggtaatgacctcggccctgggtttctcctctccctgcgggacaggagcctcagaaagggccaagggcaaggtgggcttggggggctctgggaatctcagctctagccctgtatggccaggatctgctgtctccgtccctcctgggccccagcagctgtcctgcagctgtcagcaggagggcctggctttaataaagagtggacaaactgaa

SEQ ID NO: 202111 - DNA, 520 bp, Homo sapiens
  Payload ID: 19868
  Gene Name: zinc finger protein 316
  ENST ID: ENST00000427912
  CDS Start-End: 401-520
tgcaagtgcctgcatcctgtctgtgctgagacctcttggcgttccctgctggcctggttcatgtgtgttgaggaccaggtaagcgtctctttgtcctgtgtatcaggtgctggcagaggaggagtgtccggcgttggggacccaggagcgacttagccgtggtggtgatgccaagtccccagttcttcaggaaaagggcctgcaggcctcccgggctccagccactcctagggatgaggacctggaggaggaggaagaggaggaggaggatgaggacgaggatgatttgctgacggctgggtgtcaggagctggtgacgtttgaagatgtggctgtgtacttctccctggaggagtgggaaaggctggaagcagaccagcggggcctctaccaggaagtcatgcaggagaactatgggattctcgtgtccttgggatacccaattcccaagcccgatctgatcttccggctggaacaaggggaagaaccttgggtcccagatagtccccgacctgaggaa

SEQ ID NO: 202112 - DNA, 4073 bp, Homo sapiens
  Payload ID: 19869
  Gene Name: zinc finger protein 317
  Uniprot ID: Q96PQ6
  ENST ID: ENST00000247956
  CDS Start-End: 306-2093
gagaattggaaggcggcagtgaagcggaagccattactctctggagtcgattgccccgagacacatgggccaaggaggggtcagcggcgaattctttcggcctgttggggacccctcgtgtccccacgccagactggacctcccgtatgaacttctcttcgcatcggcggcggcttccgtcacctccgctcccccgatcctattcccagtcgtatgccagcttggagagtcacgtgagagcaagagagtagctttctggttgtcctggtgccctgctcaggcaaactgactgccattctctgaggatggcagctctgtcccccacatttgccacgtccacccaggattccacctgtctccaggactcagaatttcctgtttcttcaaaagaccattcctgtccccagaatttggacctgttcgtgtgcagtggtctggagcctcacacacccagtgttggttcccaggaatcggtgactttccaagatgtcgctgtggactttaccgagaaggagtggcccttgctggattcttctcagagaaaactgtacaaagatgtaatgctggagaactacagcaacctcacttcactggggtatcaggtcggcaaacccagcctcatctcacacttggagcaggaggaggagccgaggacagaggagaggggcgctcaccagggcgcttgtgcagattgggagactccatctaaaaccaagtggtcacttcttatggaagatatttttgggaaggaaacgcccagtggtgtgacgatggaaagagccggtcttggagagaagtccactgaatacgctcacttgttcgaagtctttggcatggaccctcatctcactcagccaatgggaaggcacgctggcaagaggccctatcaccgccgcgactatggggtagcgttcaagggcaggccgcacctcactcagcacatgagcatgtacgacgggagaaaaatgcatgaatgtcatcagtgccaaaaagccttcaccacgagcgcgtccctcacacggcacaggagaatccacaccggggagaagccttacgagtgcagcgactgcgggaaagccttcaacgacccttcagcccttaggagccacgcaagaactcacctcaaagagaagccctttgactgcagtcagtgtggaaatgcattccggaccctctcggccctgaaaatccacatgcgagttcacactggcgagaggccttacaagtgtgatcagtgcgggaaggcttacggccggagctgccacctcatcgcacacaagagaacgcacaccggagagaggccctacgagtgtcacgactgtgggaaagctttccagcacccctcccacctcaaagagcacgtgaggaatcacacgggggagaagccctacgcgtgcacgcagtgcggcaaagccttccgctggaagtccaactttaatttgcacaagaagaaccacatggtggagaagacctacgaatgtaaagaatgcgggaaatcctttggcgatctcgtgtcccggaggaaacacatgaggattcacatcgtcaagaaacccgtggaatgtcggcagtgcgggaagaccttccgaaaccagtccatccttaagactcacatgaactctcacactggagagaaaccatacgggtgcgatctctgcgggaaagctttcagcgcgagttcaaacctcaccgcacacaggaagatacacacgcaagagagacgctacgaatgcgccgcctgcgggaaagtcttcggtgactatttatcccggcggaggcacatgagcgttcaccttgtaaagaaacgagttgagtgtaggcagtgtggcaaggccttcaggaaccagtcaacgctgaagacgcacatgcgaagccacacgggggagaaaccgtacgaatgcgatcactgtgggaaggccttcagcataggctccaacctgaatgtgcacaggcggatccacaccggggagaagccctacgaatgccttgtctgcgggaaagccttcagcgaccactcatccctcaggagccacgtgaaaactcaccggggagagaagctctttgtgtcatccgtgtggaaaaggctccagtgagcgcgcctgctttagagacacaggatgattcagaccggaaacagacctcgtgggtgtaagaggaagcctctgtgagctcgcaccttactgggtgcaaaagaatccacggaacttgggagaagtccagttcctgtaaaaactgggaagacgaggcgttctcatcccataggaggtttgtgagaactcacgccgggggtgaaaatgtacgtctgtagcatggagaagccttcagggtacattcagctcttaacaaacacaggaggacttaatggcagcttggcatttaatgtcaaaatccaagccgtggcatttaatgtcaaaatgacttcagaccacttctagccttctgggcccatgagtaataatgagcacactagggagcatctctgtaaacacagtggctggggaaacccttcctagtctcacttgattcctcatgacggaaatcacactaaagagagaaatcagtgaagtaaggaacgtggaaggtcatgaatgggccgcaaaccacggccagctgcttgtctttgtatggcttgccagctaacaatagtggttccatctttaaggaagaagaatgtttgatggagaaaatttgtggccaatgaagtctgaaatacttcctgtcatctgcccctttccagaaaaacttggccgacccttggtctacagcacgggttctcagtcgggcgacgatttggctgtctaggcgtcatttggcaatgtctagagacatttttggtagttagaatggggggaagatactcctgacttgtaataagaagacatcagagatgctgctaagtcggctccagcacacaggagccccccacaacgaagagttagtgcccccaaacgtcactgttgctgaggttgaaaataatcatgcagtcattcctcaattactgcctgcagcaattcctccatttttatgaatcttgtgagcacttacgctaggagaaatttcttttacaaaacttttaaaatacaattagtgctgataattcctatgtggaaatgattccagccatggtcccctcacttgagcatgtgaatattctcacggagagaagccccagcgagattttccggtgaatacgggattgcacttactctttcatcacggaaacagaccccccgagagaagccccaacgagattttccggtgaatacgggactgcacgtactctctcatcatgaaaacagagccccgttcataaatttttcatctttatttttaaggttatactcctctaaataacccttaagcctcatcaagaaaggtttgtttatagtatttttactatagcttcatccttgataacgtcctaatttccttctggacaacctccttgaccaatggcatattgagatctatgtgacatgaggatatttctcagtaccactttgttactggtacctgatgcacacggattgcgaccagagcatgatgcctccatcaagtggtaatatgtttgcagcctgctgtccagccaagagtgacagatacttctagtgacttccccggtatccactctcatcttcttccaatatcaagagaatccaggttctgtcagattagtaaggtgtgctaatctaaattttaaaaaatctcttacaggttttcttgcagctggtaccatccatgtctcacagccctggccactgacagatcagcagatgtcaccacatgggcttctgagaaagctcttgaatggggatcgttcttaaacatgaattcctccctgtatgttttgttctttgctttacttttcaccttgcaaagagatccagtacctagtattggaagatccaccttaacgaccgtgcatatgaaaaccacagtctaaggaagtgactgcagaaagctcacagcgaccctggcctcccctgtggcctctttgagtgtctgcagcagccctggacttccagacttctatcacatgagaaaaaataaaactgattattggtttaagctgc

SEQ ID NO: 202113 - DNA, 3955 bp, Homo sapiens
  Payload ID: 19869
  Gene Name: zinc finger protein 317
  Uniprot ID: Q96PQ6
  ENST ID: ENST00000360385
  CDS Start-End: 289-1980
agtgaagcggaagccattactctctggagtcgattgccccgagacacatgggccaaggaggggtcagcggcgaattctttcggcctgttggggacccctcgtgtccccacgccagactggacctcccgtatgaacttctcttcgcatcggcggcggcttccgtcacctccgctcccccgatcctattcccagtcgtatgccagcttggagagtcacgtgagagcaagagagtagctttctggttgtcctggtgccctgctcaggcaaactgactgccattctctgaggatggcagctctgtcccccacatttgccacgtccacccaggattccacctgtctccaggactcagaatttcctgtttcttcaaaagaccattcctgtccccagaatttggacctgttcgtgtgcagtggtctggagcctcacacacccagtgttggttcccaggaatcggtgactttccaagatgtcgctgtggactttaccgagaaggagtggcccttgctggattcttctcagagaaaactgtacaaagatgtaatgctggagaactacagcaacctcacttcactggattgggagactccatctaaaaccaagtggtcacttcttatggaagatatttttgggaaggaaacgcccagtggtgtgacgatggaaagagccggtcttggagagaagtccactgaatacgctcacttgttcgaagtctttggcatggaccctcatctcactcagccaatgggaaggcacgctggcaagaggccctatcaccgccgcgactatggggtagcgttcaagggcaggccgcacctcactcagcacatgagcatgtacgacgggagaaaaatgcatgaatgtcatcagtgccaaaaagccttcaccacgagcgcgtccctcacacggcacaggagaatccacaccggggagaagccttacgagtgcagcgactgcgggaaagccttcaacgacccttcagcccttaggagccacgcaagaactcacctcaaagagaagccctttgactgcagtcagtgtggaaatgcattccggaccctctcggccctgaaaatccacatgcgagttcacactggcgagaggccttacaagtgtgatcagtgcgggaaggcttacggccggagctgccacctcatcgcacacaagagaacgcacaccggagagaggccctacgagtgtcacgactgtgggaaagctttccagcacccctcccacctcaaagagcacgtgaggaatcacacgggggagaagccctacgcgtgcacgcagtgcggcaaagccttccgctggaagtccaactttaatttgcacaagaagaaccacatggtggagaagacctacgaatgtaaagaatgcgggaaatcctttggcgatctcgtgtcccggaggaaacacatgaggattcacatcgtcaagaaacccgtggaatgtcggcagtgcgggaagaccttccgaaaccagtccatccttaagactcacatgaactctcacactggagagaaaccatacgggtgcgatctctgcgggaaagctttcagcgcgagttcaaacctcaccgcacacaggaagatacacacgcaagagagacgctacgaatgcgccgcctgcgggaaagtcttcggtgactatttatcccggcggaggcacatgagcgttcaccttgtaaagaaacgagttgagtgtaggcagtgtggcaaggccttcaggaaccagtcaacgctgaagacgcacatgcgaagccacacgggggagaaaccgtacgaatgcgatcactgtgggaaggccttcagcataggctccaacctgaatgtgcacaggcggatccacaccggggagaagccctacgaatgccttgtctgcgggaaagccttcagcgaccactcatccctcaggagccacgtgaaaactcaccggggagagaagctctttgtgtcatccgtgtggaaaaggctccagtgagcgcgcctgctttagagacacaggatgattcagaccggaaacagacctcgtgggtgtaagaggaagcctctgtgagctcgcaccttactgggtgcaaaagaatccacggaacttgggagaagtccagttcctgtaaaaactgggaagacgaggcgttctcatcccataggaggtttgtgagaactcacgccgggggtgaaaatgtacgtctgtagcatggagaagccttcagggtacattcagctcttaacaaacacaggaggacttaatggcagcttggcatttaatgtcaaaatccaagccgtggcatttaatgtcaaaatgacttcagaccacttctagccttctgggcccatgagtaataatgagcacactagggagcatctctgtaaacacagtggctggggaaacccttcctagtctcacttgattcctcatgacggaaatcacactaaagagagaaatcagtgaagtaaggaacgtggaaggtcatgaatgggccgcaaaccacggccagctgcttgtctttgtatggcttgccagctaacaatagtggttccatctttaaggaagaagaatgtttgatggagaaaatttgtggccaatgaagtctgaaatacttcctgtcatctgcccctttccagaaaaacttggccgacccttggtctacagcacgggttctcagtcgggcgacgatttggctgtctaggcgtcatttggcaatgtctagagacatttttggtagttagaatggggggaagatactcctgacttgtaataagaagacatcagagatgctgctaagtcggctccagcacacaggagccccccacaacgaagagttagtgcccccaaacgtcactgttgctgaggttgaaaataatcatgcagtcattcctcaattactgcctgcagcaattcctccatttttatgaatcttgtgagcacttacgctaggagaaatttcttttacaaaacttttaaaatacaattagtgctgataattcctatgtggaaatgattccagccatggtcccctcacttgagcatgtgaatattctcacggagagaagccccagcgagattttccggtgaatacgggattgcacttactctttcatcacggaaacagaccccccgagagaagccccaacgagattttccggtgaatacgggactgcacgtactctctcatcatgaaaacagagccccgttcataaatttttcatctttatttttaaggttatactcctctaaataacccttaagcctcatcaagaaaggtttgtttatagtatttttactatagcttcatccttgataacgtcctaatttccttctggacaacctccttgaccaatggcatattgagatctatgtgacatgaggatatttctcagtaccactttgttactggtacctgatgcacacggattgcgaccagagcatgatgcctccatcaagtggtaatatgtttgcagcctgctgtccagccaagagtgacagatacttctagtgacttccccggtatccactctcatcttcttccaatatcaagagaatccaggttctgtcagattagtaaggtgtgctaatctaaattttaaaaaatctcttacaggttttcttgcagctggtaccatccatgtctcacagccctggccactgacagatcagcagatgtcaccacatgggcttctgagaaagctcttgaatggggatcgttcttaaacatgaattcctccctgtatgttttgttctttgctttacttttcaccttgcaaagagatccagtacctagtattggaagatccaccttaacgaccgtgcatatgaaaaccacagtctaaggaagtgactgcagaaagctcacagcgaccctggcctcccctgtggcctctttgagtgtctgcagcagccctggacttccagacttctatcacatgagaaaaaataaaactgattattggtttaa

SEQ ID NO: 202114 - DNA, 4186 bp, Homo sapiens
  Payload ID: 19869
  Gene Name: zinc finger protein 317
  ENST ID: ENST00000591278
  CDS Start-End: 271-591
actctctggagtcgattgccccgagacacatgggccaaggaggggtcagcggcgaattctttcggcctgttggggacccctcgtgtccccacgccagactggacctcccgtatgaacttctcttcgcatcggcggcggcttccgtcacctccgctcccccgatcctattcccagtcgtatgccagcttggagagtcacgtgagagcaagagagtagctttctggttgtcctggtgccctgctcaggcaaactgactgccattctctgaggatggcagctctgtcccccacatttgccacgtccacccaggattccacctgtctccaggactcagaatttcctgtttcttcaaaagaccattcctgtccccagaatttggacctgttcgtgtgcagtggtctggagcctcacacacccagtgttggttcccaggaatcggtgactttccaagatgtcgctgtggactttaccgagaaggagtggcccttgctggattcttctcagagaaaactgtacaaagatgtaatgctggagaactacagcaacctcacttcactggaaattttggcaccaccattttgctgctcctaagtcagacttgtccaccctcagaacactgaagacccaagtgttgagcccaggctactggaaggggttgtcctctgcatggccctccctcaacctgtgtctttcccgtgagtgtagggtatcaggtcggcaaacccagcctcatctcacacttggagcaggaggaggagccgaggacagaggagaggggcgctcaccagggcgcttgtgcagattgggagactccatctaaaaccaagtggtcacttcttatggaagatatttttgggaaggaaacgcccagtggtgtgacgatggaaagagccggtcttggagagaagtccactgaatacgctcacttgttcgaagtctttggcatggaccctcatctcactcagccaatgggaaggcacgctggcaagaggccctatcaccgccgcgactatggggtagcgttcaagggcaggccgcacctcactcagcacatgagcatgtacgacgggagaaaaatgcatgaatgtcatcagtgccaaaaagccttcaccacgagcgcgtccctcacacggcacaggagaatccacaccggggagaagccttacgagtgcagcgactgcgggaaagccttcaacgacccttcagcccttaggagccacgcaagaactcacctcaaagagaagccctttgactgcagtcagtgtggaaatgcattccggaccctctcggccctgaaaatccacatgcgagttcacactggcgagaggccttacaagtgtgatcagtgcgggaaggcttacggccggagctgccacctcatcgcacacaagagaacgcacaccggagagaggccctacgagtgtcacgactgtgggaaagctttccagcacccctcccacctcaaagagcacgtgaggaatcacacgggggagaagccctacgcgtgcacgcagtgcggcaaagccttccgctggaagtccaactttaatttgcacaagaagaaccacatggtggagaagacctacgaatgtaaagaatgcgggaaatcctttggcgatctcgtgtcccggaggaaacacatgaggattcacatcgtcaagaaacccgtggaatgtcggcagtgcgggaagaccttccgaaaccagtccatccttaagactcacatgaactctcacactggagagaaaccatacgggtgcgatctctgcgggaaagctttcagcgcgagttcaaacctcaccgcacacaggaagatacacacgcaagagagacgctacgaatgcgccgcctgcgggaaagtcttcggtgactatttatcccggcggaggcacatgagcgttcaccttgtaaagaaacgagttgagtgtaggcagtgtggcaaggccttcaggaaccagtcaacgctgaagacgcacatgcgaagccacacgggggagaaaccgtacgaatgcgatcactgtgggaaggccttcagcataggctccaacctgaatgtgcacaggcggatccacaccggggagaagccctacgaatgccttgtctgcgggaaagccttcagcgaccactcatccctcaggagccacgtgaaaactcaccggggagagaagctctttgtgtcatccgtgtggaaaaggctccagtgagcgcgcctgctttagagacacaggatgattcagaccggaaacagacctcgtgggtgtaagaggaagcctctgtgagctcgcaccttactgggtgcaaaagaatccacggaacttgggagaagtccagttcctgtaaaaactgggaagacgaggcgttctcatcccataggaggtttgtgagaactcacgccgggggtgaaaatgtacgtctgtagcatggagaagccttcagggtacattcagctcttaacaaacacaggaggacttaatggcagcttggcatttaatgtcaaaatccaagccgtggcatttaatgtcaaaatgacttcagaccacttctagccttctgggcccatgagtaataatgagcacactagggagcatctctgtaaacacagtggctggggaaacccttcctagtctcacttgattcctcatgacggaaatcacactaaagagagaaatcagtgaagtaaggaacgtggaaggtcatgaatgggccgcaaaccacggccagctgcttgtctttgtatggcttgccagctaacaatagtggttccatctttaaggaagaagaatgtttgatggagaaaatttgtggccaatgaagtctgaaatacttcctgtcatctgcccctttccagaaaaacttggccgacccttggtctacagcacgggttctcagtcgggcgacgatttggctgtctaggcgtcatttggcaatgtctagagacatttttggtagttagaatggggggaagatactcctgacttgtaataagaagacatcagagatgctgctaagtcggctccagcacacaggagccccccacaacgaagagttagtgcccccaaacgtcactgttgctgaggttgaaaataatcatgcagtcattcctcaattactgcctgcagcaattcctccatttttatgaatcttgtgagcacttacgctaggagaaatttcttttacaaaacttttaaaatacaattagtgctgataattcctatgtggaaatgattccagccatggtcccctcacttgagcatgtgaatattctcacggagagaagccccagcgagattttccggtgaatacgggattgcacttactctttcatcacggaaacagaccccccgagagaagccccaacgagattttccggtgaatacgggactgcacgtactctctcatcatgaaaacagagccccgttcataaatttttcatctttatttttaaggttatactcctctaaataacccttaagcctcatcaagaaaggtttgtttatagtatttttactatagcttcatccttgataacgtcctaatttccttctggacaacctccttgaccaatggcatattgagatctatgtgacatgaggatatttctcagtaccactttgttactggtacctgatgcacacggattgcgaccagagcatgatgcctccatcaagtggtaatatgtttgcagcctgctgtccagccaagagtgacagatacttctagtgacttccccggtatccactctcatcttcttccaatatcaagagaatccaggttctgtcagattagtaaggtgtgctaatctaaattttaaaaaatctcttacaggttttcttgcagctggtaccatccatgtctcacagccctggccactgacagatcagcagatgtcaccacatgggcttctgagaaagctcttgaatggggatcgttcttaaacatgaattcctccctgtatgttttgttctttgctttacttttcaccttgcaaagagatccagtacctagtattggaagatccaccttaacgaccgtgcatatgaaaaccacagtctaaggaagtgactgcagaaagctcacagcgaccctggcctcccctgtggcctctttgagtgtctgcagcagccctggacttccagacttctatcacatgagaaaaaataaaactgattattggtttaagctgcta

SEQ ID NO: 202115 - DNA, 457 bp, Homo sapiens
  Payload ID: 19869
  Gene Name: zinc finger protein 317
  ENST ID: ENST00000591508
  CDS Start-End: 1-135
gcagattgggagactccatctaaaaccaagtggtcacttcttatggaagatatttttgggaaggaaacgcccagtggtgtgacgatggttttcttgcagctggtaccatccatgtctcacagccctggccactgacagatcagcagatgtcaccacatgggcttctgagaaagctcttgaatggggatcgttcttaaacatgaattcctccctgtatgttttgttctttgctttacttttcaccttgcaaagagatccagtacctagtattggaagatccaccttaacgaccgtgcatatgaaaaccacagtctaaggaagtgactgcagaaagctcacagcgaccctggcctcccctgtggcctctttgagtgtctgcagcagccctggacttccagacttctatcacatgagaaaaaataaaactgattattggtttaagctgctatggatattt

SEQ ID NO: 202116 - DNA, 8006 bp, Homo sapiens
  Payload ID: 19870
  Gene Name: zinc finger protein 318
  Uniprot ID: Q5VUA4
  ENST ID: ENST00000361428
  CDS Start-End: 79-6918
ctgcggcggcgcgctccgagcctgcgtctagggcgcccccgggtcagagctgtcgccgtggccgccgctgcaagaaccatgtaccgcagcagcgctcgctcctccgtctcttcccaccggcctaaagacgacggcgggggcggcccgcgcagcggccgcagctctggctcctcctcaggcccggctcgccgcagctcaccgccgcctccgccctccggctcctcgtcgcggaccccggctcgccgaccccgctcgccctcagggcaccgcggccgccgggcctcgccgtccccgccacggggtcgtcgcgtctccccgtccccgcctcgggcccgtcgcggctccccgtcgccaccgcggggccgacgactcttcccgccgggcccggccggcttcagaggcagcagccggggggagtcccgcgccgactatgcccgggacggccgcggagaccatccaggcgacagcggcagccggagacgctctcctggtctgtgttctgactctttggaaaagagcttaaggatcactgttggcaatgaccacttctgtgttagcacaccagaacggcgacggcttagtgatcggctggggtcaccagtggataatctggaagacatggacagggatgacctgactgatgattctgtcttcactcgaagctcccagtgctctcggggtcttgagcgatatatttcccaggaggaagggcctctcagtcccttcttgggacaacttgatgaggactaccgaacaaaagaaactttcctgcatcgatctgattatagtccccatatcagttgtcatgatgagctgttgcggggaacagaacggaatcgagaaaaactcaaaggctactccatacgatctgaagaaaggagccgggaggccaaaagaccccgttatgatgacacagtgaagataaacagcatgggaggggatcacccaagttttacatcaggaactcgcaactatcgacagcgtagaagaagcccaagtcctaggtttctcgaccctgagtttcgagaactggatcttgccagacgaaagcgagaggaagaggaggagcgaagtaggagcttgagtcaggagctggttggagttgatggtggtggtactggctgttccatccctggattgtcaggtgtcctaacagcatcggagccaggatattctttgcatcggcctgaggaagtatctgtgatgcccaagaaatccattttgaagaagcggattgaggtggacataatggagccctccatgcagcttgagagtttttccagcagtaccagctccagccaggatcaccctctctactctgggcacccatcccttccactaagtggtgctattgctgcttttgcctcagagattgaaaacaaggggactatggtagagactgccttgaaggaacctcagggcaacctctaccaatggggtccccttcctgggattcccaaagacaacagtcctctcagagaaaaatttggaagttttctatgccacaaggataatttggatttgaaggctgagggacctgagcgacacacagacttcctgctgccccatgagagagctagccaggatggcagtggtttttcccgcattctgagcatgttggctgattctaccagtacacaggaaaaaaggcgacgtagctttcccgacattgaagatgaggagaaatttctctatggggatgaagaagaggatttaaaggcagaatccgtaccaaagccccttgggagctctgagagtgaagttatgaggcagaaggcaagctccctgccgtcttcagctccagctgtaaagctagaatcactagaagagaccaatccagaatatgcgaagatccatgacttgctcaagacaatagggctggatattggagtagcagagattagtcaattggctgcacgcacccaggaacgacttcatggcaagaagccatcattacgctcctcagctgaccgccgttcctcagttgaccgatacttttcagctgaccactgttcctcagttgaccaccgcttctcagctgaccgctgttcctcagttgaccactgcttctcagctgatcgacgttcctcagatccccacagactagagagcagggaggcacatcatagcaatacccactctccagaggtgtcccatccacacccaccttctcctgtggatccttacctgctcacaaaaaacagccctccattcctaaagtctgaccatccagtgggtcatatttcaggaccagaggtggttggtagtgggtttcagtcatctgttgcagtcaggtgcatgttgccatcagccccatctgccccaattagacttccacacactgctgctttatctcagtttcacatgccaagggcctctcagtttgctgcagctcggatacctccgaactaccagggacctgccattccccctgcctcttttgatgcctataggcactacatggcatatgcagcctccagatggcccatgtatcccacctctcaaccgtcaaaccaccctgtacctgaaccacacaggataatgccaataaccaaacaagctactcgtagccgtcccaatcttcgtgtgatccccactgtgactcctgataagcctaagcagaaagagtctctgcgaggctcaattcctgcggcccaagtgcctgtccaggtgtccattccatcactcataagatataatccagagaagatctctgatgagaagaaccgtgcttcccagaagcaaaaggttattgaagagagggaaaaactaaagaatgaccgggaagcccgccagaagaagatgtactatcttaggaccgagttagagcggcttcataaacaacaaggagaaatgctgcgcaagaaacgaagggagaaggatggccacaaagatcctctcttggtggaggtgagtcggcttcaggataacattatgaaggacattgcagagctacggcaagaggcagaagaggcagaaaagaagcaatctgaactggacaaagtggctcagatcttgggaattaacatcttcgataaatcccagaagtctttaagtgacagtagagagcctacagagaagcctgggaaagcagaaaaatctaagagcccagaaaaagtgtcatcgttctcaaactcctcctccaacaaggaatcaaaagtaaacaatgagaagtttcgtactaagagccccaagcctgccgaaagcccccagtcagccactaagcagttggatcagcccactgctgcttatgagtattatgatgctggcaatcactggtgcaaagactgcaacaccatctgtgggaccatgtttgatttcttcactcatatgcacaataagaagcacacacagacactggatccctacaacagaccttgggcttcaaagacccagagtgaggccaagcaagatgccataaagcgcactgacaagataactgttcctgcaaaaggctctgagtttctggttcccatcagtggattttattgccagctctgtgaggaatttttgggggatccaatttctggggagcaacatgtgaagggtcaccaacacaatgagaaatacaagaaatatgtggatgaaaacccattatatgaggagcggcggaatctggaccgccaagctggcttggctgtggtcctagagacagaacggcgacggcagagtgagctaaagcgcaaacttagtgagaaaccaaaggaggagaagaaagaaaaaaaggcaaaggctgtgaaagaagtaaaggaggatgacaaggtctctgagaaattagaagaccaactctctgagggtaggaactcccctgaaaaagctgaaaataaaaggaacactggcatcaaactccagttaaaagaagaggtaaagaaggaatcaccaacatcatcttcttttgggaaattcagctggaagaagccagaaaaagaagaggagaaaagttcattggtgaccccaagtatctctaaagaagagattctagaaagtagtaaggacaaagaggatggcaaaactgaagctgggaaggcaaagcctatcaaaatcaagctctctgggaaaactgttgttgcacataccagcccttggatgcctgttgtgacaacttccacacagactaagatccgacccaacctgcctattccatccacagtactccgcaagtcatgttcagccacaatgagcaagccagctcctcttaacacctttctgtctattaagtcctctggaaccactgctaaacctctgccagtggttaaagagtcttcagctgatctcctcttacctccagacatcatctccaaagcatttggaggggaagaggtgattctaaaagggtctccagaggaaaaagtggtgttggctgaaaagagtgagccatctcatttacctgaacaaatactaccacctcctccaccacccccacctccaccacctccaccaccccccgttatacctcatccagctgccccgtctgctgctcaagcaaatgctatcttggctccagtaaaatcaaacccagttgtatctcagactctcagccctggcttcgtgggtcctaacattttgaacccagtgttgcctgtagccatcatggcctcagcacagccagctgccattccttctgatgagacagctcctggggtgagtgagagtgaccgagaccagaccctgttctctgtgttagtacgtcctccaccacccctctcaagtgtgttcagtgaacaagccaaaaaattagagaagcgaaattcatgcttagccacagccaatgctaaggacctgtatgacatattctatagtagtggtggaaagggggcccctgagactaagggggcccctgagactaagctaagtggtggtccattggccaatggggaaaatagcaacctctctagaaccaaaagttcagacacctcttctacttctcctttgaacagcagtgcatcccaagaggagttgcatcaagatgagggtttggtcgctgctcctatagttagcaactctgaaaagcccattgcaaaaactctggtggccctagggaaatggtcagttgtagaacatgtaggcccaaaaagcacaggcagcacctatggcttcctacagcctctgacaaggttgtgccaaagcaggccttatgaaacaattaccccaaagacagacactttggccatatggacctctagttccttccagagtgacactagtagggatatatctccagagaagagtgagcttgacctgggagagccaggaccacctggtgtagaaccacctcctcaactgttagatatacagtgcaaagaatctcagaagttggtagaaatccacctcagagaatctgttaaccaggataaggaaagccaagagctccgtaaatctgaggattgtagagaaagtgagatagagacaaacactgaactaaaagaaagggtaaaggagctgtctgaggggatagttgatgagggagtaagtaccagcattggaccccacagcatagatgattctaatttgaaccatggaaacagatacatgtgggagggagaagtaaaacagcccaacttgctaatgattgacaaagaggctgaacagtccaataaattgatgacaggaagtgaaactccaagtaaagtagtgatcaaattgagtccacaggcttgctctttcacaaaggcaaaattagactcatttttatcagaagctaggtctttactcaacccacaagatacacctgtgaaaatttctgccccagagttgctgcttcattccccagccagatcagctatgtgtttaacaggtagtccacaagagcaaggagtttcagttgttagtgaggaggggctagagaattcagctccagaatcagcttctagaacttctaggtacagaagtctcaaactcaagagagaaagatcaaaagactttcaagttaaaaagatctatgagttggctgtttgggatgaaaacaagaagaggccagagacctgggagagcccagagaaaccaaaaacagaagcactggagctacaagatgtccatccagagttaacagtgacaatagaaagcaaggccctagaagactttgaagctacagacttaaaggtagaggagcttactgccctggggaatctgggggatatgcctgttgatttctgcactactcgggtaagcccagcacatagatccccaactgtcttgtgtcagaaagtgtgtgaagaaaattctgtatcacctatagggtgtaattcctccgatcccgctgacttcgaaccaatcccatctttttctgggtttccgttagattctcccaaaaccttggtgcttgactttgagacagagggtgaacgaaactcacctaatcccaggagtgttaggatcccttctcctaacattttgaaaactggacttacagaaaatgttgaccgtggcttggggggcctagagggaacacaccaggcccttgacctgttagcaggaggaatgatgcctgaggaagtaaaagaatcttcccaattagacaaacaagagtcactcggattggaattaaaaacaattaattctgcaggccttgggccatctccttgccttccagaccttgttgactttgtcacacggacctctggagttcaaaaagataaactgtgttctccactctctgagccaggtgacccttctaaatgtagttccctggagttggggccattacagctagaaatatcgaatgcatccaccacagaggtggcaattctgcaagtagatgatgacagtggcgaccctctgaatttggttaaagctccagtgtcaaggtcccctccaagggagcaggtaattgaagacaatatggtccctcagggaatgcctgaacaggaaactacagttggtgccatccaggaccacacagaatccagtgttcacaactaagaataaatacctagagctacttgtgagtgaatcattggcttctagaaatcagatgcccagatgatccaagactagtttgttatctcatctggaacctacaccaagagatgcagtcagcatcttaaagtaaatgttcatggaagctaaaaaatttacctcctttccttttccctttccccttaaaacaccagacaaatcgataacaacttatatatatatatatatatctgtaaaaatgtattttgttaatttttttggccaatttattttctcccactttgtcattaaaatcacatgtctaactggctcaccacatagtgtgctttgattgtattttggctttgactctgccatttctgaaatgtgggggaggatggaggcagctgacctctccagttgctgtgttgtattcctacccaatttcctgggcagttgatgcatctctgggaaaaacaccagaaagcttgctgaaatggaaaacttggaagaattgttcatctcttaggcttccatttggatgggcctgccttaacattgtttgaaatgcagcgtgagtagctcttttgtttactgtttacaccccttattggcatgtcaactcctgtacttcccttactctgttgcctttcttgagatgcattgtcctgctaacccacaaacctgtttggaaataaacatggaagaatatctggcaggcttacttttagaagacgacaaatcggtaaggcttattcatggttcattgccaggagcagatatgcttttgagatcacttttatttttgaaatggcctttgttcattgtattgtgatccaataacactttgtattaaattgtttagcagccatttgtgttgtgaaggggtagaagatctctgaaacttgtcttgagattgaactcattccctgttccacaaacccatatgtatcctttcctctacctcctcctttcccaattaatttcaaccatagtacgatgtttggggttgtatattttgttaaaaagattaaagaatttatgagttggcttggacaagtttaactttatttttaatgtgttaattacttggaataaatgcattaatctca

SEQ ID NO: 202117 - DNA, 525 bp, Homo sapiens
  Payload ID: 19870
  Gene Name: zinc finger protein 318
  ENST ID: ENST00000606599
  CDS Start-End: 1-239
agcctgccgaaagcccccagtcagccactaagcagttggatcagcccactgctgcttatgagtattatgatgctggcaatcactggtgcaaagactgcaacaccatctgtgggaccatgtttgatttcttcactcatatgcacaataagaagcacacacaggggcaattccaaaagtcttcagatttccaaaaggaaggactgcagcagacatttctgcccccagaaaggcagggatagaaaccacagaggccacggaaatgatgggtgcccttgtggccagtaggcaatcacctgaaggatctgacttccagaaggtgggtatgactgatgggggtggggataagttgtagagaagatcctgtcattttagctgccaggaaatggtgagttgggtgagtgaatgtgtatattgttgtacctgtagaggatgaacaagattagaatgtacatagagggtatgtattttagacttgccactcctcaccttatttagcattgaataaattattcctgaagtcccata

SEQ ID NO: 202118 - DNA, 3836 bp, Homo sapiens
  Payload ID: 19870
  Gene Name: zinc finger protein 318
  Uniprot ID: Q5VUA4
  ENST ID: ENST00000605935
  CDS Start-End: 114-3467
gcggcgcgcagcggccgaggtggcggcggctgcagctgcggcggcgcgctccgagcctgcgtctagggcgcccccgggtcagagctgtcgccgtggccgccgctgcaagaaccatgtaccgcagcagcgctcgctcctccgtctcttcccaccggcctaaagacgacggcgggggcggcccgcgcagcggccgcagctctggctcctcctcaggcccggctcgccgcagctcaccgccgcctccgccctccggctcctcgtcgcggaccccggctcgccgaccccgctcgccctcagggcaccgcggccgccgggcctcgccgtccccgccacggggtcgtcgcgtctccccgtccccgcctcgggcccgtcgcggctccccgtcgccaccgcggggccgacgactcttcccgccgggcccggccggcttcagaggcagcagccggggggagtcccgcgccgactatgcccgggacggccgcggagaccatccaggcgacagcggcagccggagacgctctcctggtctgtgttctgactctttggaaaagagcttaaggatcactgttggcaatgaccacttctgtgttagcacaccagaacggcgacggcttagtgatcggctggggtcaccagtggataatctggaagacatggacagggatgacctgactgatgattctgtcttcactcgaagctcccagtgctctcggggtcttgagcgatatatttcccaggaggaagggcctctcagtcccttcttgggacaacttgatgaggactaccgaacaaaagaaactttcctgcatcgatctgattatagtccccatatcagttgtcatgatgagctgttgcggggaacagaacggaatcgagaaaaactcaaaggctactccatacgatctgaagaaaggagccgggaggccaaaagaccccgttatgatgacacagtgaagataaacagcatgggaggggatcacccaagttttacatcaggaactcgcaactatcgacagcgtagaagaagcccaagtcctaggtttctcgaccctgagtttcgagaactggatcttgccagacgaaagcgagaggaagaggaggagcgaagtaggagcttgagtcaggagctggttggagttgatggtggtggtactggctgttccatccctggattgtcaggtgtcctaacagcatcggagccaggatattctttgcatcggcctgaggaagtatctgtgatgcccaagaaatccattttgaagaagcggattgaggtggacataatggagccctccatgcagcttgagagtttttccagcagtaccagctccagccaggatcaccctctctactctgggcacccatcccttccactaagtggtgctattgctgcttttgcctcagagattgaaaacaaggggactatggtagagactgccttgaaggaacctcagggcaacctctaccaatggggtccccttcctgggattcccaaagacaacagtcctctcagagaaaaatttggaagttttctatgccacaaggataatttggatttgaaggctgagggacctgagcgacacacagacttcctgctgccccatgagagagctagccaggatggcagtggtttttcccgcattctgagcatgttggctgattctaccagtacacaggaaaaaaggcgacgtagctttcccgacattgaagatgaggagaaatttctctatggggatgaagaagaggatttaaaggcagaatccgtaccaaagccccttgggagctctgagagtgaagttatgaggcagaaggcaagctccctgccgtcttcagctccagctgtaaagctagaatcactagaagagaccaatccagaatatgcgaagatccatgacttgctcaagacaatagggctggatattggagtagcagagattagtcaattggctgcacgcacccaggaacgacttcatggcaagaagccatcattacgctcctcagctgaccgccgttcctcagttgaccgatacttttcagctgaccactgttcctcagttgaccaccgcttctcagctgaccgctgttcctcagttgaccactgcttctcagctgatcgacgttcctcagatccccacagactagagagcagggaggcacatcatagcaatacccactctccagaggtgtcccatccacacccaccttctcctgtggatccttacctgctcacaaaaaacagccctccattcctaaagtctgaccatccagtgggtcatatttcaggaccagaggtggttggtagtgggtttcagtcatctgttgcagtcaggtgcatgttgccatcagccccatctgccccaattagacttccacacactgctgctttatctcagtttcacatgccaagggcctctcagtttgctgcagctcggatacctccgaactaccagggacctgccattccccctgcctcttttgatgcctataggcactacatggcatatgcagcctccagatggcccatgtatcccacctctcaaccgtcaaaccaccctgtacctgaaccacacaggataatgccaataaccaaacaagctactcgtagccgtcccaatcttcgtgtgatccccactgtgactcctgataagcctaagcagaaagagtctctgcgaggctcaattcctgcggcccaagtgcctgtccaggtgtccattccatcactcataagatataatccagagaagatctctgatgagaagaaccgtgcttcccagaagcaaaaggttattgaagagagggaaaaactaaagaatgaccgggaagcccgccagaagaagatgtactatcttaggaccgagttagagcggcttcataaacaacaaggagaaatgctgcgcaagaaacgaagggagaaggatggccacaaagatcctctcttggtggaggtgagtcggcttcaggataacattatgaaggacattgcagagctacggcaagaggcagaagaggcagaaaagaagcaatctgaactggacaaagtggctcagatcttgggaattaacatcttcgataaatcccagaagtctttaagtgacagtagagagcctacagagaagcctgggaaagcagaaaaatctaagagcccagaaaaagtgtcatcgttctcaaactcctcctccaacaaggaatcaaaagtaaacaatgagaagtttcgtactaagagccccaagcctgccgaaagcccccagtcagccactaagcagttggatcagcccactgctgcttatgagtattatgatgctggcaatcactggtgcaaagactgcaacaccatctgtgggaccatgtttgatttcttcactcatatgcacaataagaagcacacacaggggcaattccaaaagtcttcagatttccaaaaggaaggactgcagcagacatttctgcccccagaaaggcagggatagaaaccacagaggccacggaaatgatgggtgcccttgtggccagtaggcaatcacctgaaggatctgacttccagaaggagggtagaaattacaaataagcgctttatagctctgcctgttccaaaagcccaggagaagaagaggaaaagcccaatcattttggatttgggaagagggtggaatttgactcctgattctgtgaccttgagcttcatagaggaaatgaaagactcctctatggaaagagaagcttcgaacccattagtggacatttccaattccatctccttgactggccaaccactaatctactgtctgtctctgtggatttacctattctaaatatttcatatgaattgattcatatga

SEQ ID NO: 202119 - DNA, 4221 bp, Homo sapiens
  Payload ID: 19871
  Gene Name: zinc finger protein 319
  Uniprot ID: Q9P2F9
  ENST ID: ENST00000299237
  CDS Start-End: 624-2372
cacagcggacctacaggcgctcagagaagcccaccttccccctctctgtcccgagaaggcttagagtggtacctgcttgctcaagcaacctgctgcctccacccagagcagccgctcctctcctccctcccttccggaagatgctgaggatgacagcttttagcctgactcttacatttctttggcagagcagttagaggccagactgtcctgtgaaggcttctccttccttcttcctctgctcaggagaaaacttacaaacttttaaatgtaagaggcagatgagctgggaacctggaagtgggttgcatctgactctgaaagttcctccctctcgctggcattacctcatgctgccacaaagtgaacggatcactggggaaggcagagtctccccggcactgctgggaccctcccttgaagagcccccatgtcctgtaggcagagccttgtagtctgtccgcttggttactgactcgggctgtctgaccagcccctcttctgtgccttgtctgaggtccttgtccatctctgtgattgggcagcttctctctctggattgggtcacgtgaagcgggaaactgaagccattactctccaaaccctgtttcatcttcccaagcatgtcggaaagctggcaacagccgccacagacgcagccgcagcagccacagccaccgcagcctcagcaccatgcagagccaccgccagccctggcagagcacacgctgcctccgggcacggcggagaaccccctgggctgtgccgtctatggcatcctcctgcagccagaccccggcctgcagcccccacaacacgcacccctgcaggcagcaggagagccaggccccaaatgtggcgtgtgtggtcacgacctggcgcacctgtccagtccgcatgagcaccagtgtctggcgggccatgaccgctcattccagtgcacacagtgtctcaagatcttccaccaggccactgacctgctggagcaccagtgcgtgcaggctgagcagaagcccttcgtctgtggggtctgcaagatgggcttctcactactcacctcactggcacagcaccacagctcccacagtggcctggtgaagtgttccatctgtgaaaagacctacaagccagctgaggcagcggagccagccaccacagccgccccgtcgcttcccgcagcacccgcgccttccactgtcacccctgctgaacaggccgacaagccctacagctgccccatctgccaaaagcccttcaagcacctgtcggagctctctcggcatgagcggatccacaccggtgagaagccctacaagtgcacgctgtgtgacaaaagcttcagccagtcgtcgcacctggtgcaccacaagcgcacgcacagctccgagcggccctacaagtgcgcagtctgcgagaagaccttcaagcaccgctctcacctggtgcgccacatgtacgcgcactcgggcgagcaccacctgttccgctgcaacgtgtgcgagttgcatttcaaggagtcgtcggagctgctgcagcacccgtgcacgccaagtggggagcggcccttccgctgcggcgagtgccagaaggccttcaagcggccctcggacctgcggcagcatgagcgcacacacagcgccgagcggcccttcaagtgcgacctgtgccccatgggcttcaagcagcagtacgcactgatgcgccaccggcgcacacacaagaccgaggagcccttcaaatgcggcctatgtgagaagggctttgggcagcccagccacctgctctaccaccagcacgtgcacaccctcgagactctcttcaagtgccccgtgtgccagaaaggctttgaccaatctgccgagctgctgcggcacaagtgcctgcccggcgcggccgagcggcccttcaagtgccctgtgtgcaacaaggcctacaagcgcgcgtcggccctgcagaagcaccagctggcccactgtgcggcggcagagaagcccctgcgctgcacgctttgcgaacgccgcttcttctcctcttccgagttcgtgcagcaccgctgcgatccggcccgcgagaagccactcaagtgcccagactgcgagaaacgcttcaagtacgcgtcagacctgcagcggcaccggcgggtacacacaggcgagaagccctacaagtgccccaactgcgacaaggccttcaagcagcgggagcatctcaacaagcaccagggcgtgcacgcccgcgagcagcagttcaagtgtgtatggtgcggggagcgcttcctagacgtggccttgttgcaggagcacagcgcgcagcacagtgccgccgccgcggcagcggagggcgcctaccaggtagccgcctgcctgccctgactctgcggctgtggcccctaccagcctgacctgagtcggcgccgtgggcccagcaggcctcgcgcagcctagctcctcacagctgccttgcaccaagggccccacccagctcggtgttctgagacctcgggagtgaggacgcaggggtatgaggcagggagagggtgtgccgctcgtactcctggcaccagcgggcagtgcgggcggccagattgctgtggcccatcctgattccacaaacctctttcccatgacaagattcactttcttgagagccatcagcaccccccttatttccggggcactggagccaggctggaagtcaagtggcttctccctgccctaaggagggtgtgatgccagcccaaccttcccatatctttcaagctagcagccacataggttaggaaagcggaggctcatggtggggctggggccccagaggtgggctaggtgtaaggcatcagttgccgtgtgggggagaaggccagctttaagacgtaggcctggggactgggagggcagagggtgagtcacagccctctccgtctgctctagccaggggcgacgtgtccccaggtttctggcaggggagatgtgcagggtgggtcttggggctgggtctgcctggagaccagtgggcccagggggaagggggaagctgagaagttcgtgtgacaccctcagccaagggacagtgccatccttggggacaggaggaaaagcagcctgtctctgctaagggcaaatcctccggttttggaagcgcccctcccacctttgtagtgcagttcctaggtgtggtggggaatgtgccgtgctctcagcagacagaactgctggtgtgaaaggcagggattgtcagcccacctgaggctgggaggaagcaggaccaggcctaggatctccccagcagatgcaaacaagtgtcctcccctgaattgtgtgaaccaaagcgtcaggggcttggggcacagccccagtcagctcaacccagtcctgcttcagagccaagactaggccagggtggggacccccccagtaccctccctacatcaatgtggctgctggcctggaccccaggggtctggtacagccaagatgttctggacaacatccagctacttcaaaggccagagtgtcctttgggtcctcctagagtccccctaggtctctggctgcccatgaggctcatgaagcagagggtatcccagtcatagggagcagaaagagcaagtgggttaaggaagcctgtgggggacctggtggatggagttgaccaacatcgctgggtggctacggccctccttaggaagcccagaaggacctttattattaaaataatcattttgaaccctgctctatcccctgccctcttccagccccacccctccctggtcttgaaagaagactaatcagtgggcacaccaagggccctgaggggcagggagatgccaccatgcttctctgtcaccgtaagaaggctgaccagccacgcccacctcctctgtctgactgagttccttcctgtggccacagggaggggctggtccttcccctcggtgctggctctctgtcacaatgcctcaaaagacatggaacccaggcctacaaccgtcccaactgctaattcttttcctttcattttgctttctgaaagcagtttgttatactattcataacattgtagagtttaatttcatgtcattttggatcttatataaaaatgtgaggatttggatttttaaaaagaatgactccattttaggtagccacttttgatgttaatatatagtgagtccaatgtatgctttagaagtaaagacattgaccgtcacagaccactgca

SEQ ID NO: 202120 - DNA, 517 bp, Homo sapiens
  Payload ID: 19871
  Gene Name: zinc finger protein 319
  ENST ID: ENST00000562909
  CDS Start-End: 311-517
gagcagctggtcgccgctcgccccgcgcctgccctgcaggcggcctggagcagaacggatcactggggaaggcagagtctccccggcactgctgggaccctcccttgaagagcccccatgtcctgtaggcagagccttgtagtctgtccgcttggttactgactcgggctgtctgaccagcccctcttctgtgccttgtctgaggtccttgtccatctctgtgattgggcagcttctctctctggattgggtcacgtgaagcgggaaactgaagccattactctccaaaccctgtttcatcttcccaagcatgtcggaaagctggcaacagccgccacagacgcagccgcagcagccacagccaccgcagcctcagcaccatgcagagccaccgccagccctggcagagcacacgctgcctccgggcacggcggagaaccccctgggctgtgccgtctatggcatcctcctgcagccagaccccggcctgcagcccccacaacacgcacccctgcag

SEQ ID NO: 202121 - DNA, 1137 bp, Homo sapiens
  Payload ID: 19872
  Gene Name: zinc finger protein 32
  Uniprot ID: P17041
  ENST ID: ENST00000374433
  CDS Start-End: 125-946
ctggcgctgctgcgggctcggcgccggcctttgtctgcgggcacgcgccgctgcggtgctcaggaacagcccatggaagaatcatatgaagaggtggtgactgaggtcgtaagcaggagtggacatgtttggatttccaacagctaccctgctggactgtcatggaagatatgcccagaatgtagcgttcttcaatgtgatgactgaagcccaccacaaatatgaccactctgaggctacaggatcctcaagctgggatatccaaaattctttcagaagagagaagctggaacaaaaatccccagattcgaagacactacaggaagattcacctggagtgagacaaagggtctatgagtgccaggagtgtggaaaatccttccggcaaaaaggtagtctaacgttacatgagagaatccacactggtcaaaagccttttgagtgcacccactgtggaaaaagcttcagggccaaaggcaatcttgttacacatcaacggatacacacgggagagaagccttatcagtgcaaggagtgtgggaaaagcttcagtcaacgaggtagtctcgctgtccacgagagactccacactggacagaaaccctacgagtgtgctatttgtcagagaagcttcaggaatcagagtaaccttgctgttcacaggagagttcacagtggtgagaagccctatagatgtgatcagtgtggaaaagccttcagtcagaaaggaagcttaattgttcacatcagagtccacacaggcctgaagccctatgcctgtacccagtgcaggaagagtttccacaccagggggaattgtattctgcatggcaaaatccacacaggagagacaccctatctgtgcggccagtgtggaaaaagcttcacccagagagggagtctggctgtgcaccagcgaagctgctcacagaggctcaccctttgaccactttcctgaagagaagttctctttatgaattaagagtacaaaatcctctgagatgaagcaacctatccagttctatggaatgaatggagaatctttcagaaagaccatcattgggtagggcaaactgatttttttcctttcccccaaaagagtatgaaaaataaatgtcttgtttattatcattatca

SEQ ID NO: 202122 - DNA, 1201 bp, Homo sapiens
  Payload ID: 19872
  Gene Name: zinc finger protein 32
  Uniprot ID: P17041
  ENST ID: ENST00000395797
  CDS Start-End: 190-1011
gcggccgccaaggaaatgagcaggcctggccggcccgggccccgagggaggccagccgcgagcggagaggtcggcggtccgcagagcagggtcccgtggaccggagagcgggatgccgaggtgctcaggaacagcccatggaagaatcatatgaagaggtggtgactgaggtcgtaagcaggagtggacatgtttggatttccaacagctaccctgctggactgtcatggaagatatgcccagaatgtagcgttcttcaatgtgatgactgaagcccaccacaaatatgaccactctgaggctacaggatcctcaagctgggatatccaaaattctttcagaagagagaagctggaacaaaaatccccagattcgaagacactacaggaagattcacctggagtgagacaaagggtctatgagtgccaggagtgtggaaaatccttccggcaaaaaggtagtctaacgttacatgagagaatccacactggtcaaaagccttttgagtgcacccactgtggaaaaagcttcagggccaaaggcaatcttgttacacatcaacggatacacacgggagagaagccttatcagtgcaaggagtgtgggaaaagcttcagtcaacgaggtagtctcgctgtccacgagagactccacactggacagaaaccctacgagtgtgctatttgtcagagaagcttcaggaatcagagtaaccttgctgttcacaggagagttcacagtggtgagaagccctatagatgtgatcagtgtggaaaagccttcagtcagaaaggaagcttaattgttcacatcagagtccacacaggcctgaagccctatgcctgtacccagtgcaggaagagtttccacaccagggggaattgtattctgcatggcaaaatccacacaggagagacaccctatctgtgcggccagtgtggaaaaagcttcacccagagagggagtctggctgtgcaccagcgaagctgctcacagaggctcaccctttgaccactttcctgaagagaagttctctttatgaattaagagtacaaaatcctctgagatgaagcaacctatccagttctatggaatgaatggagaatctttcagaaagaccatcattgggtagggcaaactgatttttttcctttcccccaaaagagtatgaaaaataaatgtcttgtttattatcattatc

SEQ ID NO: 202123 - DNA, 6074 bp, Homo sapiens
  Payload ID: 19873
  Gene Name: zinc finger protein 320
  Uniprot ID: A2RRD8
  ENST ID: ENST00000391781
  CDS Start-End: 121-1650
ggggtgtgttgattctcagtgataaacaacatatttctaacatttaggattgacttctaaagactcttggtacctgaggaagaaacccagaagaggaagaggaaagcaaaggagtcggggatggctctttctcagggtctactgacattcagggatgtggccatagaattctctcaggaggagtggaaatgcctggaccctgctcagaggactctatacagagacgtgatgctggagaattataggaacctggtctccctggatatctcttccaaatgcatgatgaatacattgtcatcaacagggcaaggcaatacagaagtgatccacacagggacattgcagagacaagcaagttatcacattggagcattttgctcccaggaaattgagaaagacattcatgactttgtgtttcagtggcaagaagatgaaacaaatgaccatgaagcacccatgacagaaataaaaaagttgactagtagtacagaccgatatgatcaaaggcatgctggaaacaagcctattaaaggtcagcttgaatcaagatttcatttgcatttgcgaagacataggagaattcatactggagagaaaccttacaaatgtgaagaatgtgagaaagttttcagttgcaaatcacatcttgaaatacataggataattcatactggagagaaaccatacaaatgtaaggtttgcgacaaggcttttaagcatgattcacacctggcaaaacatactagaattcacaggggagacaaacattacacatgtaatgaatgtggcaaggtttttgatcaaaaagcaacccttgcatgtcatcatagaagtcatactggagagaaaccttataagtgtaatgagtgtggcaagacctttagtcagacatcacaccttgtgtaccatcatagactgcatactggagagaaaccttacaaatgtaatgagtgtggcaagaccttcgctcgaaattcagtcctcgtaattcataaggcagttcatactgcagagaaaccctataagtgtaatgaatgtggcaaggtttttaagcaacgagcaactcttgcaggacatcgtagagttcacactggagagaaaccttacagatgtgaagaatgcgacaaagttttcagtcgcaaatcacatcttgaaagacataggaggattcatactggagagaaaccatacaaatgtaaggtttgtgacaaggctttccggagtgattcacgtcttgcagaacatcagagagttcatactggagagagaccttacacatgtaatgaatgtggcaaggtttttagtacaaaagcgtacctcgcatgtcatcaaaaacttcatactggagagaaactttacgaatgtgaagaatgtgacaaagtttacattcgcaaatcacaccttgaaagacataggaggattcatacaggagagaaacctcacaagtgtggtgattgtggtaaagcctttaattcaccttcacaccttattaggcatcagagaatccatactggacagaaatcttacaaatgtcatcagtgtggcaaggtctttagtctgaggtcactccttgcagaacatcagaaaattccttttggagacaattgtttcaagtgcaatgagtatagcaaaccatcaagcattaattgacatcagagtcaaatcagcattgacctgagtttgagttgacttaacattgatttcaagcattaatcgacattaaactgtttatgttaagaggattgggccaggcgtggtgtctcacacctgtaatcccagcactttgagaggccaagacaggtaggtcacttgaggtcatgaatttgagaccagcctggccaacagacgggagccacttttcccagcctgtatgttcttttatttatttatttatttttaagatggaatcttgctctgtcgcccacgttggagtgcagtgatgtgatctcggttcactgcaacattcacctcccaggttcatgcaattctcctgcctcagtctcctgagtagctgggactacaggtgcgtgccaccatgcccgggtaattttttgtatttttagtagagactgggtttcaccgtgttagctaggatggtctcgatcttctgtccttaaaatccacctgcctccacctgccaaagtgctgagattacaggcgtgagccaccacacctggcctgttttttgtttctttaacaaaaagttatagaaatttctctgggtattgtgttgaatctacatcacattcagttataatcatttagcaatattattccattcaatatggcttgtatctcttatttgcacatgtttttatcactttgatcaatgtttgtagatttgaaggtagaaacttctcaacttttttcatttattcctaagtatttcttactttaagttctttagcaaatgaaagtgtttttttaattttctttttaaattgtttattgttaatgtatggaaattcaactaatttttggtgctgttattctattcttcaaatccactgcatatgttttttagttccagttgcattttggttgactctttgtgattttctacacagaagatcatgtcatctacaaagaaatagttttacttctttctttctgatttggatgagtttgatttcttttgctatttcattgctctagctaggacagccagtattgattgaatagaaggggtgagagcattcttgcatcatgtgagatcctacaggaaaagcattccattttccctgactggttatttctgctgtggtcatttcatggatggtctttgtattgttgaggtaaatttccttctctttctattttgtttaggatttccatgatgactggatgttgaattttgtgaaatgctttttctccatgtattgagatgatgtggttttcatctttcattatgttcaagtggtatatcacattgatttgcttgactatgttgaaccattttgcatcccagaaataagtggcacttgcatatcaacaatcctttttataacctcttgaatacagttcgctagtacaaggggtcttcaggaagttcatggaaaaatacatattatgagaaaattgtgcatgatatcacattttttgcaccaagataaactgatacaaatccgttataacatgtctgaacagggtttggtttgaggcactcagatgggtaagacatgagtttgaaaagagactcaatcaaggcaatgtaaattctgctaaaactgaaacaagaagaaacatcaaatttgcgatgagaccagatgctgtggctcaggcctgtaatcccataattttcagaggctgagacagttgggtcacgtgggccccggtactcaagaccagcctgggcagaatggtgaaaccaccttctctacaaaaaatacataaattagctgggcattgtggcacatgtctgctggttcagcttctgtggagtctgcagtgggaggatggcttgagcctaggagttcgaggctgcagggagccatgatcatgccattgtactccagcatgggtgacagagacagatagtgtatcgaaaaatgaatctggtaaagtttgggtagagggacaatgaaatcattgatgctttatgaaaaggttatggggacgattcccaaaataaatcaccagtttgtaaatggaaaacttattttaagttgggacaagatgatgttgaaagtgatgcacaggacaggtgtggtggctcacacctgtaatcccagcactttgggaggccgaggcaagagcatcacgaggtcaggagatcgagaaaatcctggctaacacggtgaaaccccatctctactaaaaatacaaaaaattagccaggcgtggttgtgggcgcctgtagtcccagctactcaggaggctgaggcaggagaatggcatgaaccgaggaggtggagcttgccatgagcagagatcatgctactgcactccagcctgggtgacagagcgagactccatctcaaaaaaaaaaaaaaaaaaaaaaaaaagaaagtgatgcacagagtggcaggcagaccatccacataagttttataggtacaactgtcaaagacgacactggagaagagccaagctggatctataaggaattgcatatgagatggcacacatattcatgctgtctgaagattcagtcacgttaccatatcaagctgaaaatgtcaccactatctggagagttggacatgttttattgagaatgtattttttttctctggatctgttatgaacacctttgttggcttggttcagtaataaatatgtgagacttttcatttaaaaaaagtcaaatgacttaattctgtattttaaattctgttttgtttgttttgtttttttgagatggagtcttctgaaaattttctcatcttctctaacccggttcatgacagacccttggactttactgttgtggaaaaatctatataaaacagtatcagtgtgtcaaagcattatggctgtcacaagcttgtgaaaggaaaataaaaattactaagccaaagagaaaagtcaatctgggaactgcgtcagacaaacctgccttccattttattcctaaacaagatagttacaaagattttttaaaaagctacatatgcccctcccaaaccgggaacctcaagatctccaccctaaaatagttctgttgaatttcaccctggcgatgtaaactgagagcttatcttcacagatgtgggaaagagcccatccctctgcacacctgagtcaaatgtctatctgattgcttcccttgccctatttatgtaaaaatacagggtccctgagccagcctaaggcataagtgacttatccctcctccctgctcacatataaattgtgtatttagtgaaaggctgatcaaagattcaaagaatgttatttgttatctacctgtgacccagaaggtccccaattccagttattccacctttccagaccggaccaatgtatatatgtactgattgctgtctcgtgtgtctgtaaaatgtgtgaaaccaaactgcagcctcaacaccatggacacacgtcatcaggacctcctgaggttcgtgttaattggccttagactctccctgtccccagacccaggacgcatgtgtttcctttttcttcatttctattaaagatgggtctcattctgttggccaggcatgagagcggtgacaggatcagccctcactgaagcttcaatctcctgggttcaagggatcctcccacctcagcctccaaagttgctaggaccatagccaggtgccaccgcaccgggcaaatttttgtgttcctagtagagatgggctttcaccatgttgcccgagctggtcttgaattccagggctcaagcgatccagccgtattggcctcccaaggtgctgggattacagccatgagccaccatgaccaacgtgtttcttaatttaaaaaaaaaaaaatagaccaggtgctctggctcatgcctgtaatcccagcactttgggaggccaaggtgggcagatcacctgagatcaagtatttgagaacagcctggctaacatggcgaatcctcgttttgaccaaaatatagaaattagcctggtgtggtggcgagtgcctgtaatcccagctattcaggagggtgaggcagaagaatggcttgaattcgggaggcggaggttgcagtgagctgagatcctgcaactgcactctggctgggcaagagcgagactccatctctaaaataaaattaaagtaatataaaaaactgcttctcatgaaagctttggtataatcttacgaggtaacatcattgttttgcaactacggtatgtgttcaaaatgttcttctttgaccccacatttcattagatatatttttaagccattttaaaattgtttttctctgaaatttattgtgtttagtttacattgaggactgcatgctttctagtctgtatcatacattggaaacattttctagtacctgataaatgattttaggttgtttcgatgtgtacttgataaagatatcaaggaactttttctttatgctaacattaaaatttagttgaagtagcctatta

SEQ ID NO: 202124 - DNA, 658 bp, Homo sapiens
  Payload ID: 19873
  Gene Name: zinc finger protein 320
  ENST ID: ENST00000597091
  CDS Start-End: 192-658
agtctcactctgtccttcaggctgtgagtgcagtctcctgatcttggctcactgcaacctctgtctcctgggttcaagtgattcttgtgcctcagcctaccaagtagctgagatacaggattgacttctaaagactcttggtacctgaggaagaaacccagaagaggaagaggaaagcaaaggagtcggggatggctctttctcagggtctactgacattcagggatgtggccatagaattctctcaggaggagtggaaatgcctggaccctgctcagaggactctatacagagacgtgatgctggagaattataggaacctggtctccctggggcaaggcaatacagaagtgatccacacagggacattgcagagacaagcaagttatcacattggagcattttgctcccaggaaattgagaaagacattcatgactttgtgtttcagtggcaagaagatgaaacaaatgaccatgaagcacccatgacagaaataaaaaagttgactagtagtacagaccgatatgatcaaaggcatgctggaaacaagcctattaaaggtcagcttgaatcaagatttcatttgcatttgcgaagacataggagaattcatactggagagaaaccttacaaatgtgaagaatgtgagaaagtttt

SEQ ID NO: 202125 - DNA, 590 bp, Homo sapiens
  Payload ID: 19873
  Gene Name: zinc finger protein 320
  ENST ID: ENST00000594741
  CDS Start-End: 333-590
cgcgtgagtttcgctctgttttatgtgtgcttcccagtcctgtggtgctgctataccggggacgttgagtccccacagacctggaaattgcggcccctctttctcaacccagagcaaattgagacgtccgggtgagagtccagtctcactctgtccttcaggctgtgagtgcagtctcctgatcttggctcactgcaacctctgtctcctgggttcaagtgattcttgtgcctcagcctaccaagtagctgagatacaggattgacttctaaagactcttggtacctgaggaagaaacccagaagaggaagaggaaagcaaaggagtcggggatggctctttctcagggtctactgacattcagggatgtggccatagaattctctcaggaggagtggaaatgcctggaccctgctcagaggactctatacagagacgtgatgctggagaattataggaacctggtctccctggatatctcttccaaatgcatgatgaatacattgtcatcaacagggcaaggcaatacagaagtgatccacacagggacattgcagagacaagcaagttatcacattggagcattttgc

SEQ ID NO: 202126 - DNA, 552 bp, Homo sapiens
  Payload ID: 19873
  Gene Name: zinc finger protein 320
  ENST ID: ENST00000597111
  CDS Start-End: 476-552
acagcgcgtgagtttcgctctgttttatgtgtgcttcccagtcctgtggtgctgctataccggggacgttgagtccccacagacctggaaattgcggcccctctttctcaacccagagcaaattgagacgtccggttgtatcttaattcagtgagcttccaactttttggggggtggaggtgatggagtttcgctgtgtcccccaggctggagggcagttgtgcgatcttgattcacttcaacctctgctctccgggctcaagcaattctcccacctcagcctgagtctcactctgtccttcaggctgtgagtgcagtctcctgatcttggctcactgcaacctctgtctcctgggttcaagtgattcttgtgcctcagcctaccaagtagctgagatacaggattgacttctaaagactcttggtacctgaggaagaaacccagaagaggaagaggaaagcaaaggagtcggggatggctctttctcagggtctactgacattcagggatgtggccatagaattctctcaggaggagtggaaatgcctgga

SEQ ID NO: 202127 - DNA, 583 bp, Homo sapiens
  Payload ID: 19873
  Gene Name: zinc finger protein 320
  ENST ID: ENST00000597265
  CDS Start-End: 412-583
ttcaagtgattctcctgcctcaaccttcctgagtagctgggattacaaccatgagccaccatgcctagataatttttgtatttttagtagagacgggggtttctccatattgctcaggctggtctcgaactcctgacctcaggtgatctgcctgccttggcctcccaaagtgctgtgattacaggcctcagccaccctgcctggcctccctgttttcaagagtctcactctgtccttcaggctgtgagtgcagtctcctgatcttggctcactgcaacctctgtctcctgggttcaagtgattcttgtgcctcagcctaccaagtagctgagatacaggattgacttctaaagactcttggtacctgaggaagaaacccagaagaggaagaggaaagcaaaggagtcggggatggctctttctcagggtctactgacattcagggatgtggccatagaattctctcaggaggagtggaaatgcctggaccctgctcagaggactctatacagagacgtgatgctggagaattataggaacctggtctccctggatatctcttccaaatgcatgatgaatacat

SEQ ID NO: 202128 - DNA, 598 bp, Homo sapiens
  Payload ID: 19873
  Gene Name: zinc finger protein 320
  ENST ID: ENST00000593618
  CDS Start-End: 229-598
aagcggatggcagggactgaaggtcacaccacagcgcagtctcactctgtccttcaggctgtgagtgcagtctcctgatcttggctcactgcaacctctgtctcctgggttcaagtgattcttgtgcctcagcctaccaagtagctgagatacaggattgacttctaaagactcttggtacctgaggaagaaacccagaagaggaagaggaaagcaaaggagtcggggatggctctttctcagggtctactgacattcagggatgtggccatagaattctctcaggaggagtggaaatgcctggaccctgctcagaggactctatacagagacgtgatgctggagaattataggaacctggtctccctggatatctcttccaaatgcatgatgaatacattgtcatcaacagggcaaggcaatacagaagtgatccacacagggacattgcagagacaagcaagttatcacattggagcattttgctcccaggaaattgagaaagacattcatgactttgtgtttcagtggcaagaagatgaaacaaatgaccatgaagcacccatgacagaaataaaaaagttgactagtagtacag

SEQ ID NO: 202129 - DNA, 754 bp, Homo sapiens
  Payload ID: 19873
  Gene Name: zinc finger protein 320
  ENST ID: ENST00000597909
  CDS Start-End: 238-591
tagacccggaagcggatggcagggactgaaggtcacaccacagcgcagtctcactctgtccttcaggctgtgagtgcagtctcctgatcttggctcactgcaacctctgtctcctgggttcaagtgattcttgtgcctcagcctaccaagtagctgagatacaggattgacttctaaagactcttggtacctgaggaagaaacccagaagaggaagaggaaagcaaaggagtcggggatggctctttctcagggtctactgacattcagggatgtggccatagaattctctcaggaggagtggaaatgcctggaccctgctcagaggactctatacagagacgtgatgctggagaattataggaacctggtctccctgggattgatttccagagacttatgttacttgaggaagacaccaagaaggcaaagaaaaggagccagggatggctcttcctcagggatacttgactttcagagatgtggctatagagttctctttgctggagtggaaacgcctggaccctgcacagaacgctttatacagggctgtgatgtgggagaactacaggaacctggagtctgtgggtgaggaaaatgttcctccagacatgaagaatctgtccttgtgtatcttggcttttcctggttttgtattctcttttgtgattttgccccatacgtgcttttgatgtacacagctgggattccaggcacgtgccaccatgcccagcatgttattttgtatctttagt

SEQ ID NO: 202130 - DNA, 6448 bp, Homo sapiens
  Payload ID: 19873
  Gene Name: zinc finger protein 320
  Uniprot ID: A2RRD8
  ENST ID: ENST00000595635
  CDS Start-End: 503-2032
cggcccctctttctcaacccagagcaaattgagacgtccgggctggagtgcaatggcgcgatcttggctcaccacaacctccgcctcctgggttcaagtgatctcctgcctcagcctccccagtagccgggattacagtagagacaaggtttcaccatattggccagactgttctctgaactcgacctcaagtgatccacccacctcggcctcccagagtcctgggattacaggctggagggcagttgtgcgatcttgattcacttcaacctctgctctccgggctcaagcaattctcccacctcagcctgagtctcactctgtccttcaggctgtgagtgcagtctcctgatcttggctcactgcaacctctgtctcctgggttcaagtgattcttgtgcctcagcctaccaagtagctgagatacaggattgacttctaaagactcttggtacctgaggaagaaacccagaagaggaagaggaaagcaaaggagtcggggatggctctttctcagggtctactgacattcagggatgtggccatagaattctctcaggaggagtggaaatgcctggaccctgctcagaggactctatacagagacgtgatgctggagaattataggaacctggtctccctggatatctcttccaaatgcatgatgaatacattgtcatcaacagggcaaggcaatacagaagtgatccacacagggacattgcagagacaagcaagttatcacattggagcattttgctcccaggaaattgagaaagacattcatgactttgtgtttcagtggcaagaagatgaaacaaatgaccatgaagcacccatgacagaaataaaaaagttgactagtagtacagaccgatatgatcaaaggcatgctggaaacaagcctattaaaggtcagcttgaatcaagatttcatttgcatttgcgaagacataggagaattcatactggagagaaaccttacaaatgtgaagaatgtgagaaagttttcagttgcaaatcacatcttgaaatacataggataattcatactggagagaaaccatacaaatgtaaggtttgcgacaaggcttttaagcatgattcacacctggcaaaacatactagaattcacaggggagacaaacattacacatgtaatgaatgtggcaaggtttttgatcaaaaagcaacccttgcatgtcatcatagaagtcatactggagagaaaccttataagtgtaatgagtgtggcaagacctttagtcagacatcacaccttgtgtaccatcatagactgcatactggagagaaaccttacaaatgtaatgagtgtggcaagaccttcgctcgaaattcagtcctcgtaattcataaggcagttcatactgcagagaaaccctataagtgtaatgaatgtggcaaggtttttaagcaacgagcaactcttgcaggacatcgtagagttcacactggagagaaaccttacagatgtgaagaatgcgacaaagttttcagtcgcaaatcacatcttgaaagacataggaggattcatactggagagaaaccatacaaatgtaaggtttgtgacaaggctttccggagtgattcacgtcttgcagaacatcagagagttcatactggagagagaccttacacatgtaatgaatgtggcaaggtttttagtacaaaagcgtacctcgcatgtcatcaaaaacttcatactggagagaaactttacgaatgtgaagaatgtgacaaagtttacattcgcaaatcacaccttgaaagacataggaggattcatacaggagagaaacctcacaagtgtggtgattgtggtaaagcctttaattcaccttcacaccttattaggcatcagagaatccatactggacagaaatcttacaaatgtcatcagtgtggcaaggtctttagtctgaggtcactccttgcagaacatcagaaaattccttttggagacaattgtttcaagtgcaatgagtatagcaaaccatcaagcattaattgacatcagagtcaaatcagcattgacctgagtttgagttgacttaacattgatttcaagcattaatcgacattaaactgtttatgttaagaggattgggccaggcgtggtgtctcacacctgtaatcccagcactttgagaggccaagacaggtaggtcacttgaggtcatgaatttgagaccagcctggccaacagacgggagccacttttcccagcctgtatgttcttttatttatttatttatttttaagatggaatcttgctctgtcgcccacgttggagtgcagtgatgtgatctcggttcactgcaacattcacctcccaggttcatgcaattctcctgcctcagtctcctgagtagctgggactacaggtgcgtgccaccatgcccgggtaattttttgtatttttagtagagactgggtttcaccgtgttagctaggatggtctcgatcttctgtccttaaaatccacctgcctccacctgccaaagtgctgagattacaggcgtgagccaccacacctggcctgttttttgtttctttaacaaaaagttatagaaatttctctgggtattgtgttgaatctacatcacattcagttataatcatttagcaatattattccattcaatatggcttgtatctcttatttgcacatgtttttatcactttgatcaatgtttgtagatttgaaggtagaaacttctcaacttttttcatttattcctaagtatttcttactttaagttctttagcaaatgaaagtgtttttttaattttctttttaaattgtttattgttaatgtatggaaattcaactaatttttggtgctgttattctattcttcaaatccactgcatatgttttttagttccagttgcattttggttgactctttgtgattttctacacagaagatcatgtcatctacaaagaaatagttttacttctttctttctgatttggatgagtttgatttcttttgctatttcattgctctagctaggacagccagtattgattgaatagaaggggtgagagcattcttgcatcatgtgagatcctacaggaaaagcattccattttccctgactggttatttctgctgtggtcatttcatggatggtctttgtattgttgaggtaaatttccttctctttctattttgtttaggatttccatgatgactggatgttgaattttgtgaaatgctttttctccatgtattgagatgatgtggttttcatctttcattatgttcaagtggtatatcacattgatttgcttgactatgttgaaccattttgcatcccagaaataagtggcacttgcatatcaacaatcctttttataacctcttgaatacagttcgctagtacaaggggtcttcaggaagttcatggaaaaatacatattatgagaaaattgtgcatgatatcacattttttgcaccaagataaactgatacaaatccgttataacatgtctgaacagggtttggtttgaggcactcagatgggtaagacatgagtttgaaaagagactcaatcaaggcaatgtaaattctgctaaaactgaaacaagaagaaacatcaaatttgcgatgagaccagatgctgtggctcaggcctgtaatcccataattttcagaggctgagacagttgggtcacgtgggccccggtactcaagaccagcctgggcagaatggtgaaaccaccttctctacaaaaaatacataaattagctgggcattgtggcacatgtctgctggttcagcttctgtggagtctgcagtgggaggatggcttgagcctaggagttcgaggctgcagggagccatgatcatgccattgtactccagcatgggtgacagagacagatagtgtatcgaaaaatgaatctggtaaagtttgggtagagggacaatgaaatcattgatgctttatgaaaaggttatggggacgattcccaaaataaatcaccagtttgtaaatggaaaacttattttaagttgggacaagatgatgttgaaagtgatgcacaggacaggtgtggtggctcacacctgtaatcccagcactttgggaggccgaggcaagagcatcacgaggtcaggagatcgagaaaatcctggctaacacggtgaaaccccatctctactaaaaatacaaaaaattagccaggcgtggttgtgggcgcctgtagtcccagctactcaggaggctgaggcaggagaatggcatgaaccgaggaggtggagcttgccatgagcagagatcatgctactgcactccagcctgggtgacagagcgagactccatctcaaaaaaaaaaaaaaaaaaaaaaaaaagaaagtgatgcacagagtggcaggcagaccatccacataagttttataggtacaactgtcaaagacgacactggagaagagccaagctggatctataaggaattgcatatgagatggcacacatattcatgctgtctgaagattcagtcacgttaccatatcaagctgaaaatgtcaccactatctggagagttggacatgttttattgagaatgtattttttttctctggatctgttatgaacacctttgttggcttggttcagtaataaatatgtgagacttttcatttaaaaaaagtcaaatgacttaattctgtattttaaattctgttttgtttgttttgtttttttgagatggagtcttctgaaaattttctcatcttctctaacccggttcatgacagacccttggactttactgttgtggaaaaatctatataaaacagtatcagtgtgtcaaagcattatggctgtcacaagcttgtgaaaggaaaataaaaattactaagccaaagagaaaagtcaatctgggaactgcgtcagacaaacctgccttccattttattcctaaacaagatagttacaaagattttttaaaaagctacatatgcccctcccaaaccgggaacctcaagatctccaccctaaaatagttctgttgaatttcaccctggcgatgtaaactgagagcttatcttcacagatgtgggaaagagcccatccctctgcacacctgagtcaaatgtctatctgattgcttcccttgccctatttatgtaaaaatacagggtccctgagccagcctaaggcataagtgacttatccctcctccctgctcacatataaattgtgtatttagtgaaaggctgatcaaagattcaaagaatgttatttgttatctacctgtgacccagaaggtccccaattccagttattccacctttccagaccggaccaatgtatatatgtactgattgctgtctcgtgtgtctgtaaaatgtgtgaaaccaaactgcagcctcaacaccatggacacacgtcatcaggacctcctgaggttcgtgttaattggccttagactctccctgtccccagacccaggacgcatgtgtttcctttttcttcatttctattaaagatgggtctcattctgttggccaggcatgagagcggtgacaggatcagccctcactgaagcttcaatctcctgggttcaagggatcctcccacctcagcctccaaagttgctaggaccatagccaggtgccaccgcaccgggcaaatttttgtgttcctagtagagatgggctttcaccatgttgcccgagctggtcttgaattccagggctcaagcgatccagccgtattggcctcccaaggtgctgggattacagccatgagccaccatgaccaacgtgtttcttaatttaaaaaaaaaaaaatagaccaggtgctctggctcatgcctgtaatcccagcactttgggaggccaaggtgggcagatcacctgagatcaagtatttgagaacagcctggctaacatggcgaatcctcgttttgaccaaaatatagaaattagcctggtgtggtggcgagtgcctgtaatcccagctattcaggagggtgaggcagaagaatggcttgaattcgggaggcggaggttgcagtgagctgagatcctgcaactgcactctggctgggcaagagcgagactccatctctaaaataaaattaaagtaatataaaaaactgcttctcatgaaagctttggtataatcttacgaggtaacatcattgttttgcaactacggtatgtgttcaaaatgttcttctttgaccccacatttcattagatatatttttaagccattttaaaattgtttttctctgaaatttattgtgtttagtttacattgaggactgcatgctttctagtctgtatcatacattggaaacattttctagtacctgataaatgattttaggttgtttcgatgtgtacttgataaagatatcaaggaactttttctttatgctaacattaaaatttagttgaagta

SEQ ID NO: 202131 - DNA, 4817 bp, Homo sapiens
  Payload ID: 19874
  Gene Name: zinc finger protein 322
  Uniprot ID: Q6U7Q0
  ENST ID: ENST00000415922
  CDS Start-End: 647-1855
gggggtggggctgcgccggcctcttcccagccagcttgaaagggtttgcgtagccggccttgtgggcccttgaagcgctctgttaaagcgctctgtgggcggcctggccccaactcctctagtctaggcgcacgaagggagttgctcctaggtcttgtccgtgccgggttcgcttttctttccttcccgaagcctggcccttagatctactatcgcagagtctgcggccgccaggaagcccagattcgagtgtccggagagtaaccggaagtgctgtccccaggcctaggggcggcgccggcggctgccagggagaggcaagaattgagtgttgtgaatagttctgaactagagaccttttgaaaccaaaaggaagatggtcttgagtctttcttgttacgaatgctatcttctttgagaagtcaaattgtcaggatcaggaatgtatgttttcttccatctggattctagggttggaaataccaagtaaggaattaacatatatgatgctggaaacttgtagaggctcatgattgaaaggcctgaaacagatgtatcttccaagttcttatcaagaaaatgactgtgagggcaacgatgggtcaagaagaccagcggaaaactccctaggagagagccatagaaaatgtacacttcagaagagaaatgtaatcagagaactcaaaaaaggaaaatatataatgtatgccctcggaagggtaaaaagatttttattcatatgcatgagattattcagatagatggtcatatataccagtgccttgaatgcaagcaaaacttctgtgaaaacttagctcttattatgtgtgagagaacccatactggggagaaaccttataaatgtgatatgtgtgagaaaacctttgtccaaagctcagatcttacttcacaccagaggatccacaattacgagaaaccttataaatgtagcaaatgtgagaagagcttttggcatcacttagcgctttcaggacatcagagaacacatgcaggtaaaaaattctatacatgtgacatttgtggcaagaattttggtcagagttctgatctgcttgtccaccagcgaagccatactggcgagaaaccatatctatgtagtgagtgtgacaaatgcttcagtagaagtacaaacctcataaggcatcgaagaactcacacaggtgagaaaccatttaagtgtctcgagtgtgaaaaagcttttagtgggaaatcagatcttattagccaccagagaactcacactggggaaaggccctacaaatgtaataagtgtgagaaaagttaccgacaccgttcagccttcattgtacataaaagagttcatactggggagaagccctataagtgtggtgcctgtgaaaaatgctttggccagaaatcagaccttatcgtgcaccagagagtccacacaggtgagaagccgtataaatgcctggaatgtatgagaagttttactcggagtgccaacctaattaggcaccaggcaactcacactcacacttttaaatgccttgaatatgaaaaaagctttaactgtagctcagatcttattgtacatcagagaattcacatggaagagaaaccacatcagtggtctgcgtgtgagagtggcttcctcctaggaatggactttgttgcccaacagaaaatgagaactcaaacagaggagctacactataaatacactgtatgtgataaaagcttccaccagagttcagcccttcttcaacatcagacagtacacattggtgaaaaaccgtttgtctgtaatgtgagtgaaaaaggtcttgagcttagccctccccatgcgtcagaagcctcacagatgtcttgaccaggcgagaagctgtaataccaatattaaaaattatttatgtatcagagaactcattaagatgaggacaaatctcagactttgctcagagctcagaattcagtggggaccagagagcctgcaattggaaatatgagaaattctttgcccagagagctgccctaacagaacacttcatcctcactccaacgagaaatctacagatgcccagaggttttgaaaacttaccgtctgagctcaaatttgatcactcacaagaggattcatacaagtgggaaaccttagaaatgcactgagtgtgagagagctttctactaatgctcagcccttctcgttgtaagagaattcacaccggagaacaactttttaaatgccttcagtgtcagttgtgctgcagacagtatgaacatctcattggacctcagaaaacccaccctggggagaagccccagcaagtgtgaaaaaagcttctaacaaaactctgacttacccatcagagaagccatactggtgaaaaattgtatatttgtcttaagtatggcaaaagcattcgttggagagccttacttgggtttgcacccaaaaaaaaaaacccaatctgaggaaagactgcaagtgtctgaatgaagagtgcttgtcaatgatcaactcttgtggtacatcagggaactcacataggtgaaaaaacccatacttaccttgagtctgagaaaacctttggtagaagctcctgtcttatcaggccccaaaaaacctgttctgcagtgagagatttaattgtgggtgagaatctatgtacatataatatgtatgagaagactgttctcatagttagttgactcatatggtagagaggactttacatgaaatcagtatgaaaatagttttttagatacccagaagcttgttctgggagaagctagggtgggtcagagtagacctgatgggtaactcaggtaaagatgcttttcttttatctgaactacttaatgattgctttacttttactttttaaaaaattcagaaatccaataaaggaaaggacggtaaccttatgatagaaggtgtggcatgtgttactgttgggggaaaggagtatattgactttgccttggttgatatttttatgcttgtctaggatgggactagagtgttgatagtaacatggcagccttttgctggcagtgaaatgaacttaagaagctagggagtagctatcctagatcaaaactctcctaatagtttttcctttgcaggaccaatcttataaagaaacagcatactcagctttttacttagtgtcagttgaggcatactctcaaaagttttttcccctaaaatatctttcaagttattactggtatttgaaatttcaagtttagaaattcatttctttttaactcaaagtgcaaatttcatataatgattatgatggttttagtgtccatatttttgtggcttcacttatcatctctttcagcagtagctacccacagtcagctcctagtaaaatggctacaggaaaactgaaagaaaagtttaagcctgagtaggcatagagtaaaaaatgcataatgatgcattattaatataagagtaaggctttttttattttgagtatcctaactccaaacctagtgttcttttcactccattatcctgctgtttatagcaaatcaagacccataatgatacgtctttcatttatttcagttctgccaaggaaagagaaaataccttttaatcccagggaaaggattgcaatcaccacattataaggtatatggcgtggaatgcagaattctaaatactagaagggaaaagtagttggcagattcatcagaggcttaaggataagtacttgtttccaatttaaaagtataattaggattgtctttaatgttctctagaaatactataattaatctagagatctatcaatggtcacatctcagtttttttcttccctgagattcaaagacgtgtaataccaatacttcagattcctatagtatttgggactttgtagactagtgaatagatactttgttgctagtccaaatcctctgattttggtttgatttgtcctagcagatccctgaacttcagagagtattgccatttggattcatggagttggcgaactgctacactgctaccttgtgtatggctctaagctttgatcctaatgactggttgatgatcatgataatattagggccagtgaatatagctcatagtgataataaggattctagggtatttttttttcttttagaaaaagatcctggaagtttatttgatctgacatgtttttgtaatatttagaaatagctcttgtatcataaaaagttgcccagtataagacacacaagatgtattttttttctctggtgaaaatcatgcctatcactagtatatgtttgacatttgtagtatacttaaaatagtattgggtgtgaggcatggtggtgatgaaaagtagtccttacggctacttgttagtcattagagagaacatggagaaggggtcaaagttggtatcattaacagggcaatgacttgacccttctttcaactgatcttactggtagttgtctctagtttttaagtaaattaatgatggaccatcccccaaacagagaactatgggggtatgaaacaaggctgaaggcttttaaccatgggagaaaaaggtgttggtattattcatatagcataacctgaggttggagaggaccacttgggagcctgtaaccaaaactagaaggtaacttctgggatggacggaggttcccttgaagcagtgccaacctaaatctacctcaggtaagtagttagattaactttttcaagatttcagaccaaacaagacaacttgtattcagttgatgtattcctatgctttaatgtttttgtttgcccttaattattaaataaacatttgttctgaaaaactcca

SEQ ID NO: 202132 - DNA, 2675 bp, Homo sapiens
  Payload ID: 19874
  Gene Name: zinc finger protein 322
  Uniprot ID: Q6U7Q0
  ENST ID: ENST00000471278
  CDS Start-End: 413-1621
attcctcctgtttaactgaaattttgtatcctttgaccaatttcttcccaaccctgctatgtctcagcctctggtaaccaccattttaccatctgtttctatcagttagactgttttatactccatatcattatctctctattccagtattatgttgaaaagcagtgaatgctatcttctttgagaagtcaaattgtcaggatcaggaatgtatgttttcttccatctggattctagggttggaaataccaagtaaggaattaacatatatgatgctggaaacttgtagaggctcatgattgaaaggcctgaaacagatgtatcttccaagttcttatcaagaaaatgactgtgagggcaacgatgggtcaagaagaccagcggaaaactccctaggagagagccatagaaaatgtacacttcagaagagaaatgtaatcagagaactcaaaaaaggaaaatatataatgtatgccctcggaagggtaaaaagatttttattcatatgcatgagattattcagatagatggtcatatataccagtgccttgaatgcaagcaaaacttctgtgaaaacttagctcttattatgtgtgagagaacccatactggggagaaaccttataaatgtgatatgtgtgagaaaacctttgtccaaagctcagatcttacttcacaccagaggatccacaattacgagaaaccttataaatgtagcaaatgtgagaagagcttttggcatcacttagcgctttcaggacatcagagaacacatgcaggtaaaaaattctatacatgtgacatttgtggcaagaattttggtcagagttctgatctgcttgtccaccagcgaagccatactggcgagaaaccatatctatgtagtgagtgtgacaaatgcttcagtagaagtacaaacctcataaggcatcgaagaactcacacaggtgagaaaccatttaagtgtctcgagtgtgaaaaagcttttagtgggaaatcagatcttattagccaccagagaactcacactggggaaaggccctacaaatgtaataagtgtgagaaaagttaccgacaccgttcagccttcattgtacataaaagagttcatactggggagaagccctataagtgtggtgcctgtgaaaaatgctttggccagaaatcagaccttatcgtgcaccagagagtccacacaggtgagaagccgtataaatgcctggaatgtatgagaagttttactcggagtgccaacctaattaggcaccaggcaactcacactcacacttttaaatgccttgaatatgaaaaaagctttaactgtagctcagatcttattgtacatcagagaattcacatggaagagaaaccacatcagtggtctgcgtgtgagagtggcttcctcctaggaatggactttgttgcccaacagaaaatgagaactcaaacagaggagctacactataaatacactgtatgtgataaaagcttccaccagagttcagcccttcttcaacatcagacagtacacattggtgaaaaaccgtttgtctgtaatgtgagtgaaaaaggtcttgagcttagccctccccatgcgtcagaagcctcacagatgtcttgaccaggcgagaagctgtaataccaatattaaaaattatttatgtatcagagaactcattaagatgaggacaaatctcagactttgctcagagctcagaattcagtggggaccagagagcctgcaattggaaatatgagaaattctttgcccagagagctgccctaacagaacacttcatcctcactccaacgagaaatctacagatgcccagaggttttgaaaacttaccgtctgagctcaaatttgatcactcacaagaggattcatacaagtgggaaaccttagaaatgcactgagtgtgagagagctttctactaatgctcagcccttctcgttgtaagagaattcacaccggagaacaactttttaaatgccttcagtgtcagttgtgctgcagacagtatgaacatctcattggacctcagaaaacccaccctggggagaagccccagcaagtgtgaaaaaagcttctaacaaaactctgacttacccatcagagaagccatactggtgaaaaattgtatatttgtcttaagtatggcaaaagcattcgttggagagccttacttgggtttgcacccaaaaaaaaaaacccaatctgaggaaagactgcaagtgtctgaatgaagagtgcttgtcaatgatcaactcttgtggtacatcagggaactcacataggtgaaaaaacccatacttaccttgagtctgagaaaacctttggtagaagctcctgtcttatcaggccccaaaaaacctgttctgcagtgagagatttaattgtgggtgagaatctatgtacatataatatgtatgagaagactgttctcatagttagttgactcatatggtagagaggactttacatgaaatcagtatgaaaatagttttttagatacccagaagcttgttctgggagaagctagggtgggtcagagtagacctgatgggtaactcaggtaaagatgcttttcttttatctgaactacttaatgattgctttacttttactttttaaaaaattcagaaatccaataaaggaaaggacggtaacctt

SEQ ID NO: 202133 - DNA, 587 bp, Homo sapiens
  Payload ID: 19874
  Gene Name: zinc finger protein 322
  ENST ID: ENST00000480036
  CDS Start-End: 510-587
ccttgaagcgctctgttaaagcgctctgtgggcggcctggccccaactcctctagtctaggcgcacgaagggagttgctcctaggtcttgtccgtgccgggttcgcttttctttccttcccgaagcctggcccttagatctactatcgcagagtctgcggccgccaggaagcccagattcgagtgtccggagagtaaccggaagtgctgtccccaggcctaggggcggcgccggcggctgccagggagaggcaagaattgagtgttgtgaatagttctgaactagagaccttttgaaaccaaaaggaagatggtcttgagtctttcttgttacgggttggaaataccaagtaaggaattaacatatatgatgctggaaacttgtagaggctcatgattgaaaggcctgaaacagatgtatcttccaagttcttatcaagaaaatgactgtgagggcaacgatgggtcaagaagaccagcggaaaactccctaggagagagccatagaaaatgtacacttcagaagagaaatgtaatcagagaactcaaaaaaggaaaatatataatgtatgccctcggaagggtaaa

SEQ ID NO: 202134 - DNA, 4718 bp, Homo sapiens
  Payload ID: 19874
  Gene Name: zinc finger protein 322
  Uniprot ID: Q6U7Q0
  ENST ID: ENST00000456172
  CDS Start-End: 558-1766
gggggtggggctgcgccggcctcttcccagccagcttgaaagggtttgcgtagccggccttgtgggcccttgaagcgctctgttaaagcgctctgtgggcggcctggccccaactcctctagtctaggcgcacgaagggagttgctcctaggtcttgtccgtgccgggttcgcttttctttccttcccgaagcctggcccttagatctactatcgcagagtctgcggccgccaggaagcccagattcgagtgtccggagagtaaccggaagtgctgtccccaggcctaggggcggcgccggcggctgccaggaatgctatcttctttgagaagtcaaattgtcaggatcaggaatgtatgttttcttccatctggattctagggttggaaataccaagtaaggaattaacatatatgatgctggaaacttgtagaggctcatgattgaaaggcctgaaacagatgtatcttccaagttcttatcaagaaaatgactgtgagggcaacgatgggtcaagaagaccagcggaaaactccctaggagagagccatagaaaatgtacacttcagaagagaaatgtaatcagagaactcaaaaaaggaaaatatataatgtatgccctcggaagggtaaaaagatttttattcatatgcatgagattattcagatagatggtcatatataccagtgccttgaatgcaagcaaaacttctgtgaaaacttagctcttattatgtgtgagagaacccatactggggagaaaccttataaatgtgatatgtgtgagaaaacctttgtccaaagctcagatcttacttcacaccagaggatccacaattacgagaaaccttataaatgtagcaaatgtgagaagagcttttggcatcacttagcgctttcaggacatcagagaacacatgcaggtaaaaaattctatacatgtgacatttgtggcaagaattttggtcagagttctgatctgcttgtccaccagcgaagccatactggcgagaaaccatatctatgtagtgagtgtgacaaatgcttcagtagaagtacaaacctcataaggcatcgaagaactcacacaggtgagaaaccatttaagtgtctcgagtgtgaaaaagcttttagtgggaaatcagatcttattagccaccagagaactcacactggggaaaggccctacaaatgtaataagtgtgagaaaagttaccgacaccgttcagccttcattgtacataaaagagttcatactggggagaagccctataagtgtggtgcctgtgaaaaatgctttggccagaaatcagaccttatcgtgcaccagagagtccacacaggtgagaagccgtataaatgcctggaatgtatgagaagttttactcggagtgccaacctaattaggcaccaggcaactcacactcacacttttaaatgccttgaatatgaaaaaagctttaactgtagctcagatcttattgtacatcagagaattcacatggaagagaaaccacatcagtggtctgcgtgtgagagtggcttcctcctaggaatggactttgttgcccaacagaaaatgagaactcaaacagaggagctacactataaatacactgtatgtgataaaagcttccaccagagttcagcccttcttcaacatcagacagtacacattggtgaaaaaccgtttgtctgtaatgtgagtgaaaaaggtcttgagcttagccctccccatgcgtcagaagcctcacagatgtcttgaccaggcgagaagctgtaataccaatattaaaaattatttatgtatcagagaactcattaagatgaggacaaatctcagactttgctcagagctcagaattcagtggggaccagagagcctgcaattggaaatatgagaaattctttgcccagagagctgccctaacagaacacttcatcctcactccaacgagaaatctacagatgcccagaggttttgaaaacttaccgtctgagctcaaatttgatcactcacaagaggattcatacaagtgggaaaccttagaaatgcactgagtgtgagagagctttctactaatgctcagcccttctcgttgtaagagaattcacaccggagaacaactttttaaatgccttcagtgtcagttgtgctgcagacagtatgaacatctcattggacctcagaaaacccaccctggggagaagccccagcaagtgtgaaaaaagcttctaacaaaactctgacttacccatcagagaagccatactggtgaaaaattgtatatttgtcttaagtatggcaaaagcattcgttggagagccttacttgggtttgcacccaaaaaaaaaaacccaatctgaggaaagactgcaagtgtctgaatgaagagtgcttgtcaatgatcaactcttgtggtacatcagggaactcacataggtgaaaaaacccatacttaccttgagtctgagaaaacctttggtagaagctcctgtcttatcaggccccaaaaaacctgttctgcagtgagagatttaattgtgggtgagaatctatgtacatataatatgtatgagaagactgttctcatagttagttgactcatatggtagagaggactttacatgaaatcagtatgaaaatagttttttagatacccagaagcttgttctgggagaagctagggtgggtcagagtagacctgatgggtaactcaggtaaagatgcttttcttttatctgaactacttaatgattgctttacttttactttttaaaaaattcagaaatccaataaaggaaaggacggtaaccttatgatagaaggtgtggcatgtgttactgttgggggaaaggagtatattgactttgccttggttgatatttttatgcttgtctaggatgggactagagtgttgatagtaacatggcagccttttgctggcagtgaaatgaacttaagaagctagggagtagctatcctagatcaaaactctcctaatagtttttcctttgcaggaccaatcttataaagaaacagcatactcagctttttacttagtgtcagttgaggcatactctcaaaagttttttcccctaaaatatctttcaagttattactggtatttgaaatttcaagtttagaaattcatttctttttaactcaaagtgcaaatttcatataatgattatgatggttttagtgtccatatttttgtggcttcacttatcatctctttcagcagtagctacccacagtcagctcctagtaaaatggctacaggaaaactgaaagaaaagtttaagcctgagtaggcatagagtaaaaaatgcataatgatgcattattaatataagagtaaggctttttttattttgagtatcctaactccaaacctagtgttcttttcactccattatcctgctgtttatagcaaatcaagacccataatgatacgtctttcatttatttcagttctgccaaggaaagagaaaataccttttaatcccagggaaaggattgcaatcaccacattataaggtatatggcgtggaatgcagaattctaaatactagaagggaaaagtagttggcagattcatcagaggcttaaggataagtacttgtttccaatttaaaagtataattaggattgtctttaatgttctctagaaatactataattaatctagagatctatcaatggtcacatctcagtttttttcttccctgagattcaaagacgtgtaataccaatacttcagattcctatagtatttgggactttgtagactagtgaatagatactttgttgctagtccaaatcctctgattttggtttgatttgtcctagcagatccctgaacttcagagagtattgccatttggattcatggagttggcgaactgctacactgctaccttgtgtatggctctaagctttgatcctaatgactggttgatgatcatgataatattagggccagtgaatatagctcatagtgataataaggattctagggtatttttttttcttttagaaaaagatcctggaagtttatttgatctgacatgtttttgtaatatttagaaatagctcttgtatcataaaaagttgcccagtataagacacacaagatgtattttttttctctggtgaaaatcatgcctatcactagtatatgtttgacatttgtagtatacttaaaatagtattgggtgtgaggcatggtggtgatgaaaagtagtccttacggctacttgttagtcattagagagaacatggagaaggggtcaaagttggtatcattaacagggcaatgacttgacccttctttcaactgatcttactggtagttgtctctagtttttaagtaaattaatgatggaccatcccccaaacagagaactatgggggtatgaaacaaggctgaaggcttttaaccatgggagaaaaaggtgttggtattattcatatagcataacctgaggttggagaggaccacttgggagcctgtaaccaaaactagaaggtaacttctgggatggacggaggttcccttgaagcagtgccaacctaaatctacctcaggtaagtagttagattaactttttcaagatttcagaccaaacaagacaacttgtattcagttgatgtattcctatgctttaatgtttttgtttgcccttaattattaaataaacatttgttctg

SEQ ID NO: 202135 - DNA, 4882 bp, Homo sapiens
  Payload ID: 19874
  Gene Name: zinc finger protein 322
  Uniprot ID: Q6U7Q0
  ENST ID: ENST00000622479
  CDS Start-End: 722-1930
gggggtggggctgcgccggcctcttcccagccagcttgaaagggtttgcgtagccggccttgtgggcccttgaagcgctctgttaaagcgctctgtgggcggcctggccccaactcctctagtctaggcgcacgaagggagttgctcctaggtcttgtccgtgccgggttcgcttttctttccttcccgaagcctggcccttagatctactatcgcagagtctgcggccgccaggaagcccagattcgagtgtccggagagtaaccggaagtgctgtccccaggcctaggggcggcgccggcggctgccaggagctggtcggaactgatggctaccagtggcaggtacttcctgcaggagaaacagtgtaagcaaagatgggaagaggagaggcaagaattgagtgttgtgaatagttctgaactagagaccttttgaaaccaaaaggaagatggtcttgagtctttcttgttacgaatgctatcttctttgagaagtcaaattgtcaggatcaggaatgtatgttttcttccatctggattctagggttggaaataccaagtaaggaattaacatatatgatgctggaaacttgtagaggctcatgattgaaaggcctgaaacagatgtatcttccaagttcttatcaagaaaatgactgtgagggcaacgatgggtcaagaagaccagcggaaaactccctaggagagagccatagaaaatgtacacttcagaagagaaatgtaatcagagaactcaaaaaaggaaaatatataatgtatgccctcggaagggtaaaaagatttttattcatatgcatgagattattcagatagatggtcatatataccagtgccttgaatgcaagcaaaacttctgtgaaaacttagctcttattatgtgtgagagaacccatactggggagaaaccttataaatgtgatatgtgtgagaaaacctttgtccaaagctcagatcttacttcacaccagaggatccacaattacgagaaaccttataaatgtagcaaatgtgagaagagcttttggcatcacttagcgctttcaggacatcagagaacacatgcaggtaaaaaattctatacatgtgacatttgtggcaagaattttggtcagagttctgatctgcttgtccaccagcgaagccatactggcgagaaaccatatctatgtagtgagtgtgacaaatgcttcagtagaagtacaaacctcataaggcatcgaagaactcacacaggtgagaaaccatttaagtgtctcgagtgtgaaaaagcttttagtgggaaatcagatcttattagccaccagagaactcacactggggaaaggccctacaaatgtaataagtgtgagaaaagttaccgacaccgttcagccttcattgtacataaaagagttcatactggggagaagccctataagtgtggtgcctgtgaaaaatgctttggccagaaatcagaccttatcgtgcaccagagagtccacacaggtgagaagccgtataaatgcctggaatgtatgagaagttttactcggagtgccaacctaattaggcaccaggcaactcacactcacacttttaaatgccttgaatatgaaaaaagctttaactgtagctcagatcttattgtacatcagagaattcacatggaagagaaaccacatcagtggtctgcgtgtgagagtggcttcctcctaggaatggactttgttgcccaacagaaaatgagaactcaaacagaggagctacactataaatacactgtatgtgataaaagcttccaccagagttcagcccttcttcaacatcagacagtacacattggtgaaaaaccgtttgtctgtaatgtgagtgaaaaaggtcttgagcttagccctccccatgcgtcagaagcctcacagatgtcttgaccaggcgagaagctgtaataccaatattaaaaattatttatgtatcagagaactcattaagatgaggacaaatctcagactttgctcagagctcagaattcagtggggaccagagagcctgcaattggaaatatgagaaattctttgcccagagagctgccctaacagaacacttcatcctcactccaacgagaaatctacagatgcccagaggttttgaaaacttaccgtctgagctcaaatttgatcactcacaagaggattcatacaagtgggaaaccttagaaatgcactgagtgtgagagagctttctactaatgctcagcccttctcgttgtaagagaattcacaccggagaacaactttttaaatgccttcagtgtcagttgtgctgcagacagtatgaacatctcattggacctcagaaaacccaccctggggagaagccccagcaagtgtgaaaaaagcttctaacaaaactctgacttacccatcagagaagccatactggtgaaaaattgtatatttgtcttaagtatggcaaaagcattcgttggagagccttacttgggtttgcacccaaaaaaaaaaacccaatctgaggaaagactgcaagtgtctgaatgaagagtgcttgtcaatgatcaactcttgtggtacatcagggaactcacataggtgaaaaaacccatacttaccttgagtctgagaaaacctttggtagaagctcctgtcttatcaggccccaaaaaacctgttctgcagtgagagatttaattgtgggtgagaatctatgtacatataatatgtatgagaagactgttctcatagttagttgactcatatggtagagaggactttacatgaaatcagtatgaaaatagttttttagatacccagaagcttgttctgggagaagctagggtgggtcagagtagacctgatgggtaactcaggtaaagatgcttttcttttatctgaactacttaatgattgctttacttttactttttaaaaaattcagaaatccaataaaggaaaggacggtaaccttatgatagaaggtgtggcatgtgttactgttgggggaaaggagtatattgactttgccttggttgatatttttatgcttgtctaggatgggactagagtgttgatagtaacatggcagccttttgctggcagtgaaatgaacttaagaagctagggagtagctatcctagatcaaaactctcctaatagtttttcctttgcaggaccaatcttataaagaaacagcatactcagctttttacttagtgtcagttgaggcatactctcaaaagttttttcccctaaaatatctttcaagttattactggtatttgaaatttcaagtttagaaattcatttctttttaactcaaagtgcaaatttcatataatgattatgatggttttagtgtccatatttttgtggcttcacttatcatctctttcagcagtagctacccacagtcagctcctagtaaaatggctacaggaaaactgaaagaaaagtttaagcctgagtaggcatagagtaaaaaatgcataatgatgcattattaatataagagtaaggctttttttattttgagtatcctaactccaaacctagtgttcttttcactccattatcctgctgtttatagcaaatcaagacccataatgatacgtctttcatttatttcagttctgccaaggaaagagaaaataccttttaatcccagggaaaggattgcaatcaccacattataaggtatatggcgtggaatgcagaattctaaatactagaagggaaaagtagttggcagattcatcagaggcttaaggataagtacttgtttccaatttaaaagtataattaggattgtctttaatgttctctagaaatactataattaatctagagatctatcaatggtcacatctcagtttttttcttccctgagattcaaagacgtgtaataccaatacttcagattcctatagtatttgggactttgtagactagtgaatagatactttgttgctagtccaaatcctctgattttggtttgatttgtcctagcagatccctgaacttcagagagtattgccatttggattcatggagttggcgaactgctacactgctaccttgtgtatggctctaagctttgatcctaatgactggttgatgatcatgataatattagggccagtgaatatagctcatagtgataataaggattctagggtatttttttttcttttagaaaaagatcctggaagtttatttgatctgacatgtttttgtaatatttagaaatagctcttgtatcataaaaagttgcccagtataagacacacaagatgtattttttttctctggtgaaaatcatgcctatcactagtatatgtttgacatttgtagtatacttaaaatagtattgggtgtgaggcatggtggtgatgaaaagtagtccttacggctacttgttagtcattagagagaacatggagaaggggtcaaagttggtatcattaacagggcaatgacttgacccttctttcaactgatcttactggtagttgtctctagtttttaagtaaattaatgatggaccatcccccaaacagagaactatgggggtatgaaacaaggctgaaggcttttaaccatgggagaaaaaggtgttggtattattcatatagcataacctgaggttggagaggaccacttgggagcctgtaaccaaaactagaaggtaacttctgggatggacggaggttcccttgaagcagtgccaacctaaatctacctcaggtaagtagttagattaactttttcaagatttcagaccaaacaagacaacttgtattcagttgatgtattcctatgctttaatgtttttgtttgcccttaattattaaataaacatttgttctg

SEQ ID NO: 202136 - DNA, 4737 bp, Homo sapiens
  Payload ID: 19874
  Gene Name: zinc finger protein 322
  Uniprot ID: Q6U7Q0
  ENST ID: ENST00000607204
  CDS Start-End: 577-1785
gggggtggggctgcgccggcctcttcccagccagcttgaaagggtttgcgtagccggccttgtgggcccttgaagcgctctgttaaagcgctctgtgggcggcctggccccaactcctctagtctaggcgcacgaagggagttgctcctaggtcttgtccgtgccgggttcgcttttctttccttcccgaagcctggcccttagatctactatcgcagagtctgcggccgccaggaagcccagattcgagtgtccggagagtaaccggaagtgctgtccccaggcctaggggcggcgccggcggctgccagggagaggcaagaattgagtgttgtgaatagttctgaactagagaccttttgaaaccaaaaggaagatggtcttgagtctttcttgttacgggttggaaataccaagtaaggaattaacatatatgatgctggaaacttgtagaggctcatgattgaaaggcctgaaacagatgtatcttccaagttcttatcaagaaaatgactgtgagggcaacgatgggtcaagaagaccagcggaaaactccctaggagagagccatagaaaatgtacacttcagaagagaaatgtaatcagagaactcaaaaaaggaaaatatataatgtatgccctcggaagggtaaaaagatttttattcatatgcatgagattattcagatagatggtcatatataccagtgccttgaatgcaagcaaaacttctgtgaaaacttagctcttattatgtgtgagagaacccatactggggagaaaccttataaatgtgatatgtgtgagaaaacctttgtccaaagctcagatcttacttcacaccagaggatccacaattacgagaaaccttataaatgtagcaaatgtgagaagagcttttggcatcacttagcgctttcaggacatcagagaacacatgcaggtaaaaaattctatacatgtgacatttgtggcaagaattttggtcagagttctgatctgcttgtccaccagcgaagccatactggcgagaaaccatatctatgtagtgagtgtgacaaatgcttcagtagaagtacaaacctcataaggcatcgaagaactcacacaggtgagaaaccatttaagtgtctcgagtgtgaaaaagcttttagtgggaaatcagatcttattagccaccagagaactcacactggggaaaggccctacaaatgtaataagtgtgagaaaagttaccgacaccgttcagccttcattgtacataaaagagttcatactggggagaagccctataagtgtggtgcctgtgaaaaatgctttggccagaaatcagaccttatcgtgcaccagagagtccacacaggtgagaagccgtataaatgcctggaatgtatgagaagttttactcggagtgccaacctaattaggcaccaggcaactcacactcacacttttaaatgccttgaatatgaaaaaagctttaactgtagctcagatcttattgtacatcagagaattcacatggaagagaaaccacatcagtggtctgcgtgtgagagtggcttcctcctaggaatggactttgttgcccaacagaaaatgagaactcaaacagaggagctacactataaatacactgtatgtgataaaagcttccaccagagttcagcccttcttcaacatcagacagtacacattggtgaaaaaccgtttgtctgtaatgtgagtgaaaaaggtcttgagcttagccctccccatgcgtcagaagcctcacagatgtcttgaccaggcgagaagctgtaataccaatattaaaaattatttatgtatcagagaactcattaagatgaggacaaatctcagactttgctcagagctcagaattcagtggggaccagagagcctgcaattggaaatatgagaaattctttgcccagagagctgccctaacagaacacttcatcctcactccaacgagaaatctacagatgcccagaggttttgaaaacttaccgtctgagctcaaatttgatcactcacaagaggattcatacaagtgggaaaccttagaaatgcactgagtgtgagagagctttctactaatgctcagcccttctcgttgtaagagaattcacaccggagaacaactttttaaatgccttcagtgtcagttgtgctgcagacagtatgaacatctcattggacctcagaaaacccaccctggggagaagccccagcaagtgtgaaaaaagcttctaacaaaactctgacttacccatcagagaagccatactggtgaaaaattgtatatttgtcttaagtatggcaaaagcattcgttggagagccttacttgggtttgcacccaaaaaaaaaaacccaatctgaggaaagactgcaagtgtctgaatgaagagtgcttgtcaatgatcaactcttgtggtacatcagggaactcacataggtgaaaaaacccatacttaccttgagtctgagaaaacctttggtagaagctcctgtcttatcaggccccaaaaaacctgttctgcagtgagagatttaattgtgggtgagaatctatgtacatataatatgtatgagaagactgttctcatagttagttgactcatatggtagagaggactttacatgaaatcagtatgaaaatagttttttagatacccagaagcttgttctgggagaagctagggtgggtcagagtagacctgatgggtaactcaggtaaagatgcttttcttttatctgaactacttaatgattgctttacttttactttttaaaaaattcagaaatccaataaaggaaaggacggtaaccttatgatagaaggtgtggcatgtgttactgttgggggaaaggagtatattgactttgccttggttgatatttttatgcttgtctaggatgggactagagtgttgatagtaacatggcagccttttgctggcagtgaaatgaacttaagaagctagggagtagctatcctagatcaaaactctcctaatagtttttcctttgcaggaccaatcttataaagaaacagcatactcagctttttacttagtgtcagttgaggcatactctcaaaagttttttcccctaaaatatctttcaagttattactggtatttgaaatttcaagtttagaaattcatttctttttaactcaaagtgcaaatttcatataatgattatgatggttttagtgtccatatttttgtggcttcacttatcatctctttcagcagtagctacccacagtcagctcctagtaaaatggctacaggaaaactgaaagaaaagtttaagcctgagtaggcatagagtaaaaaatgcataatgatgcattattaatataagagtaaggctttttttattttgagtatcctaactccaaacctagtgttcttttcactccattatcctgctgtttatagcaaatcaagacccataatgatacgtctttcatttatttcagttctgccaaggaaagagaaaataccttttaatcccagggaaaggattgcaatcaccacattataaggtatatggcgtggaatgcagaattctaaatactagaagggaaaagtagttggcagattcatcagaggcttaaggataagtacttgtttccaatttaaaagtataattaggattgtctttaatgttctctagaaatactataattaatctagagatctatcaatggtcacatctcagtttttttcttccctgagattcaaagacgtgtaataccaatacttcagattcctatagtatttgggactttgtagactagtgaatagatactttgttgctagtccaaatcctctgattttggtttgatttgtcctagcagatccctgaacttcagagagtattgccatttggattcatggagttggcgaactgctacactgctaccttgtgtatggctctaagctttgatcctaatgactggttgatgatcatgataatattagggccagtgaatatagctcatagtgataataaggattctagggtatttttttttcttttagaaaaagatcctggaagtttatttgatctgacatgtttttgtaatatttagaaatagctcttgtatcataaaaagttgcccagtataagacacacaagatgtattttttttctctggtgaaaatcatgcctatcactagtatatgtttgacatttgtagtatacttaaaatagtattgggtgtgaggcatggtggtgatgaaaagtagtccttacggctacttgttagtcattagagagaacatggagaaggggtcaaagttggtatcattaacagggcaatgacttgacccttctttcaactgatcttactggtagttgtctctagtttttaagtaaattaatgatggaccatcccccaaacagagaactatgggggtatgaaacaaggctgaaggcttttaaccatgggagaaaaaggtgttggtattattcatatagcataacctgaggttggagaggaccacttgggagcctgtaaccaaaactagaaggtaacttctgggatggacggaggttcccttgaagcagtgccaacctaaatctacctcaggtaagtagttagattaactttttcaagatttcagaccaaacaagacaacttgtattcagttgatgtattcctatgctttaatgtttttgtttgcccttaattattaaataaacatttgttctg

SEQ ID NO: 202137 - DNA, 3000 bp, Homo sapiens
  Payload ID: 19875
  Gene Name: zinc finger protein 324
  Uniprot ID: O75467
  ENST ID: ENST00000196482
  CDS Start-End: 95-1756
caggccacaccggtggtctgggctggggaccgcgggtcgggtccggtttccagggggttcctggtgctcgaggctggcggcgaggaaggaccagatggcctttgaggatgtggctgtgtacttctcccaggaggagtgggggctcctggacacagcccagagggccctgtaccgccgcgtgatgctagacaacttcgcacttgtggcctcgctgggactctccacctctcgacctcgtgtggtcatccaactggagcgtggcgaggagccctgggttcccagtggaacggacacaaccctgtccaggaccacctacaggaggcgcaaccctggttcctggagtttgacagaggatagagatgtttctggagaatggccacgagctttcccagataccccacctgggatgactactagcgtcttccctgttgccggtgcctgccacagtgtaaaaagcctgcagagacaacggggtgcctccccatctcgggagagaaaacccacgggggtgtcggtgatctactgggagaggctcctgctaggctcaggcagtgggcaagccagcgtcagcctgcgactgacctccccgcttaggcctcccgagggcgtccggcttagagaaaagacactcacagagcatgcgttgctggggaggcagcccaggacgcctgagcggcagaaaccatgtgcacaggaggtccctgggagaacctttgggagcgcccaggacctggaggctgccggcggtcggggacatcaccgaatgggtgcagtttggcaggagcctcatagactcctcggtggccaggagccctcgacctgggacgagctgggcgaggctcttcacgctggggagaagtccttcgaatgcagggcgtgcagcaaagtgttcgtgaagagctccgacctcctcaagcacctacgcacccacaccggggagcggccctacgagtgcgcccagtgcggcaaggccttcagccagacgtcgcacttgacgcagcaccagcgcatccacagcggcgagacgccctacgcgtgccccgtgtgcggcaaggccttccggcatagctcctcgctggtgcggcaccagcgcatccacacggccgagaagtccttccgctgctccgagtgcggcaaggccttcagccacggctccaacctcagccagcaccgcaagatccacgcgggtgggcgtccttatgcttgcgcacagtgtggccgccgcttctgccgcaactcgcacctgatccagcacgagcgtacgcacacaggcgagaagcccttcgtgtgcgcgctctgcggtgctgccttcagccagggctcctcgctctttaagcaccagcgcgtgcacacaggcgagaagcccttcgcctgcccacagtgcggccgcgcctttagccacagctccaacctcacccagcaccagctcctgcacacgggcgagcggcccttccgctgcgtggactgtggcaaggccttcgccaagggcgccgtgctgctcagccaccggcgcattcacacgggcgagaagcccttcgtgtgtacgcagtgtggccgcgccttccgtgagcgcccggccctcttccaccaccagaggatccataccggcgagaagaccgtccggcgatccagggccagcctgcacccccaggccaggtctgttgccggggcatcatcagaaggtgcgccagcgaaggaaaccgagcccactcccgcctcgggcccagccgccgtctcgcagccagcggaggtctgaggtcacaggttgcagccctggccttctgtgaatcccttccacagctaaagggcatatgtcctctgcagatccacagcagagaaaaagtcccgtgcttgctagtcagggacaagggaggccctttggctgtgatttcatttgcacgtggggacaggatttgccagttcacccacagatcacacctccatccccaaagaggtagcactgcagcaacatcagggggaggacgtggtggctgaactctagtggggccgagactattcagagccagtaggaggccgacagtcacagcactgcactgtggtgcggcttcatgtgatatgacagtggatgctaaggtgagagggatgcaggcatgggttgggggtggcccagagaaacttatgacagctgtacacaaactggccgctggagagatgcccgctgagggtattctcccctcaacccactgcctctgttcatccaagacttcctaggggccagcctagcagacaagagaccacaagggactggggatcagggtctgggctctgtcagccgccacctctgggaaagagaaaaggtttgggtccactgaacatcatgtttgtagacgctgacaggtggggtcctaatgagagccaacacatgctcactgccagctcctgtcctgagtactgggaagtttctcctgaagccctgtgagatggctctgtggctggtatcccgacttggaagatgaggaaactgaggcacacggcctggcctggcttcacacacatagccgactcaggagagggatgcccatgggggaacatgtgactctcagcattggaaggacagagctaggatgatggctttccggtggcactcgttcaggtttttgcccaagtctcagcttggccaaggcctgtcactgactggtttaccaaagtcgatgtgaggaggaggctttatacctgaggggatgatgttaacttcagacaagatggagctgctcacttttgccgggtttggtggccacttcacccccaaccctgtctcacccccattatccctcctcaattggaggctggacagagctgaataggaaagacttgctattgcctaaggctatgtgtgacaccctcctgaggacctccccaccccagtgtaatggcccttcatggcagggacagaaaggtggactgggggccatttgcttcctgtggccttcagcagaccaggccctgtccctacctggagcctcacctccaaggaaattc

SEQ ID NO: 202138 - DNA, 1006 bp, Homo sapiens
  Payload ID: 19875
  Gene Name: zinc finger protein 324
  ENST ID: ENST00000535298
  CDS Start-End: 146-1006
aaccgaagggctggacttccggcggtgggactgtcacttcgccgcccgcgtcaggccacaccggtggtctgggctggggaccgcgggtcgggtccggtttccagggggttcctggtgctcgaggctggcggcgaggaaggaccagatggcctttgaggatgtggctgtgtacttctcccaggaggagtgggggctcctggacacagcccagagggccctgtaccgccgcgtgatgctagacaacttcgcacttgtggcctcgctgggactctccacctctcgacctcgtgtggtcatccaactggagcgtggcgaggagccctgggttcccagtggaacggacacaaccctgtccaggaccacctacaggaggcgcaaccctggttcctggagtttgacagaggatagagatgtttctggagaatggccacgagctttcccagataccccacctgggatgactactagcgtcttccctgttgccggtgcctgccacagtgtaaaaagcctgcagagacaacggggtgcctccccatctcgggagagaaaacccacgggggtgtcggtgatctactgggagaggctcctgctaggctcaggcagtgggcaagccagcgtcagcctgcgactgacctccccgcttaggcctcccgagggcgtccggcttagagaaaagacactcacagagcatgcgttgctggggaggcagcccaggacgcctgagcggcagaaaccatgtgcacaggaggtccctgggagaacctttgggagcgcccaggacctggaggctgccggcggtcggggacatcaccgaatgggtgcagtttggcaggagcctcatagactcctcggtggccaggagccctcgacctgggacgagctgggcgaggctcttcacgctggggagaagtccttcgaatgcagggcgtgcagcaaagtgttcgtgaagagctccgacctcctcaagcacctacgcacccgtgtgcggcaaggccttccggcatag

SEQ ID NO: 202139 - DNA, 5653 bp, Homo sapiens
  Payload ID: 19875
  Gene Name: zinc finger protein 324
  Uniprot ID: O75467
  ENST ID: ENST00000536459
  CDS Start-End: 710-2371
tggacttccggcggtgggactgtcacttcgccgcccgcgtcaggccacaccggtggtctgggctggggaccgcgggtcgggtccggtttccagggggttcctggtgctcgaggctggcggcgaggaaggtactggctgagggcccgcgtcgggcccgccctgcgcacgcgtcgtgatcaagggcgccggccgccggccgcgcccccaagcctctgtttctcagagtgcgtcgtgggcgtccaggggactgtcgggccgcggcgggagccatgcgctctcccaccgtgcggcagcccaggaggctgcgcgctgggcgttccacgtccatgatggccggggagactgaggcgcggggcggccccgggacgctgctggcggggaaaggctgggtggtccacgcctttcttccctcccagctgcgggttccgctggcggcggtggcgctgacaagcccgcgtcggggaagcaggggagtccctgctcacacagaccgcgccctcacggagggaggccgcttcctagacctcgcctagtcgtctttcctctccctgccctgggggggttgcgggggtcagtgcaaactcctgcgtccagggcactggtgagctcccgagttcgggcagccagggggctgaggtcccgaaggaggctccgaggggagagtcctgcgtgtgcaaaacctgggaggggagccgaagcccaggaccagatggcctttgaggatgtggctgtgtacttctcccaggaggagtgggggctcctggacacagcccagagggccctgtaccgccgcgtgatgctagacaacttcgcacttgtggcctcgctgggactctccacctctcgacctcgtgtggtcatccaactggagcgtggcgaggagccctgggttcccagtggaacggacacaaccctgtccaggaccacctacaggaggcgcaaccctggttcctggagtttgacagaggatagagatgtttctggagaatggccacgagctttcccagataccccacctgggatgactactagcgtcttccctgttgccggtgcctgccacagtgtaaaaagcctgcagagacaacggggtgcctccccatctcgggagagaaaacccacgggggtgtcggtgatctactgggagaggctcctgctaggctcaggcagtgggcaagccagcgtcagcctgcgactgacctccccgcttaggcctcccgagggcgtccggcttagagaaaagacactcacagagcatgcgttgctggggaggcagcccaggacgcctgagcggcagaaaccatgtgcacaggaggtccctgggagaacctttgggagcgcccaggacctggaggctgccggcggtcggggacatcaccgaatgggtgcagtttggcaggagcctcatagactcctcggtggccaggagccctcgacctgggacgagctgggcgaggctcttcacgctggggagaagtccttcgaatgcagggcgtgcagcaaagtgttcgtgaagagctccgacctcctcaagcacctacgcacccacaccggggagcggccctacgagtgcgcccagtgcggcaaggccttcagccagacgtcgcacttgacgcagcaccagcgcatccacagcggcgagacgccctacgcgtgccccgtgtgcggcaaggccttccggcatagctcctcgctggtgcggcaccagcgcatccacacggccgagaagtccttccgctgctccgagtgcggcaaggccttcagccacggctccaacctcagccagcaccgcaagatccacgcgggtgggcgtccttatgcttgcgcacagtgtggccgccgcttctgccgcaactcgcacctgatccagcacgagcgtacgcacacaggcgagaagcccttcgtgtgcgcgctctgcggtgctgccttcagccagggctcctcgctctttaagcaccagcgcgtgcacacaggcgagaagcccttcgcctgcccacagtgcggccgcgcctttagccacagctccaacctcacccagcaccagctcctgcacacgggcgagcggcccttccgctgcgtggactgtggcaaggccttcgccaagggcgccgtgctgctcagccaccggcgcattcacacgggcgagaagcccttcgtgtgtacgcagtgtggccgcgccttccgtgagcgcccggccctcttccaccaccagaggatccataccggcgagaagaccgtccggcgatccagggccagcctgcacccccaggccaggtctgttgccggggcatcatcagaaggtgcgccagcgaaggaaaccgagcccactcccgcctcgggcccagccgccgtctcgcagccagcggaggtctgaggtcacaggttgcagccctggccttctgtgaatcccttccacagctaaagggcatatgtcctctgcagatccacagcagagaaaaagtcccgtgcttgctagtcagggacaagggaggccctttggctgtgatttcatttgcacgtggggacaggatttgccagttcacccacagatcacacctccatccccaaagaggtagcactgcagcaacatcagggggaggacgtggtggctgaactctagtggggccgagactattcagagccagtaggaggccgacagtcacagcactgcactgtggtgcggcttcatgtgatatgacagtggatgctaaggtgagagggatgcaggcatgggttgggggtggcccagagaaacttatgacagctgtacacaaactggccgctggagagatgcccgctgagggtattctcccctcaacccactgcctctgttcatccaagacttcctaggggccagcctagcagacaagagaccacaagggactggggatcagggtctgggctctgtcagccgccacctctgggaaagagaaaaggtttgggtccactgaacatcatgtttgtagacgctgacaggtggggtcctaatgagagccaacacatgctcactgccagctcctgtcctgagtactgggaagtttctcctgaagccctgtgagatggctctgtggctggtatcccgacttggaagatgaggaaactgaggcacacggcctggcctggcttcacacacatagccgactcaggagagggatgcccatgggggaacatgtgactctcagcattggaaggacagagctaggatgatggctttccggtggcactcgttcaggtttttgcccaagtctcagcttggccaaggcctgtcactgactggtttaccaaagtcgatgtgaggaggaggctttatacctgaggggatgatgttaacttcagacaagatggagctgctcacttttgccgggtttggtggccacttcacccccaaccctgtctcacccccattatccctcctcaattggaggctggacagagctgaataggaaagacttgctattgcctaaggctatgtgtgacaccctcctgaggacctccccaccccagtgtaatggcccttcatggcagggacagaaaggtggactgggggccatttgcttcctgtggccttcagcagaccaggccctgtccctacctggagcctcacctccaaggaaattcatgttctccttaatggaaaaaaaaaaaaaaagactaccatctgcaactcagagtaggtgttgcagtttcctgtacagcagtttggacctccagagcacagcctcttgtccctactccagagcatggttcagtcttaatagcagttcaagagcttctctgataaaggtttctttttaaacatttgtgtgaacggtagcaacctgacacctatttcaccctcatacaatgcagatggtattgaacataccctgacatgccatcagcgtttgtcatcatcacagaagttcctggacttggcttcaacctgggtaccctcaagaggccacagagtagagatacagcctgtctgcagcccagggagggagtgggatacctgtatccttttcagggtcagaggtgggttggggtagccaggagctggatgaactgggatagagtggggctgtctggagcagcagccctgctagatgagtcctggtggatcctggcaatgggaggatggtaggtggagaaaccaaggcagggctgtgttccttctgctgctgagatagagggtgtggccatgtgtgatgaccctgcaaggttgactccaaccagtgggcactccatcccatggcttccaaaatcctgcagctatcctgccctatacacaaagagcccagatccaggccccacacacttgatattggggccagactcttccacctgtgaaacctcacaggttcctgcagggagtggagacacacagaacctagctcccctggagcctgcaagacttgggccaccagaatcccagtaggtccctgaaccattgtcccccagtaagtctgcagagctgtgaaatgcagacaataacccttccctgcctgaaagagcacttttctggggagcccatgggagtcaggagcaaaagcatctgtcaaacaagtagatacccagagagtcacgtgaaatcatttctatgcctctgacagacgcttcttgagcgaagtttctgccctgagcccgcctgaccccttaggctgggctcagtaccctaccttgtcttcccaccagccgcctccctccatcaagttcctttccacgtctgcttgtgcccctgttgtccctcagtttgtccaccctcctccaatcttcccctccccaaacccatgactgatcagtggcccccaacctaggctcccacctccatgcaggtcttggcccctcggctgacctccctccaacctccccctctgctcttaattttgaataggtagtgactgtaaaagtatccctgggcttctatgtcaaaaggtcagactgaacacatgcatctcactgggctcagaaatccactgaaaccacagaggggagtatttaaaacacataacccacaagtatgaggatggtgacagaggagtcaggagcaatggcattcctaagctagaagtgggtgagagctgtcactaagttagggaaggcaaaatactacgtggcgacttggcgaagaggagagagttcccaccaggctgactccagaaccgcagaaggctgagaaccagcagcccagagacgggagacctatatcaaagctgcctggggaacaactactgaagaagcccttaacgccccagtgctctccccacatggtggagggtgaaagtttttgtttttttttccttctgggactctgcatagtcccagagaaaaggcctaagcacctcatccccaaaaacaacctgaggaggccgttggaaagctccgagttgacaagtctcatccacgcacatgctcggtgcttccaatcggtgatcaagaccactgctcttcatccagagcaggcagcagggattcccaggtatccaaagaaaccaaaacaggcggtgtaatttaggactgactaagtaatggctcggccacttttaagtgtggaagcaaaactgaccccacagatttagaaaactgtaacactgcttattgggagaaactagtgtcaccctggctagttctgctccccaaattcaaaggtaaataaacggttgagcatgtccgatca

SEQ ID NO: 202140 - DNA, 2330 bp, Homo sapiens
  Payload ID: 19875
  Gene Name: zinc finger protein 324
  ENST ID: ENST00000593925
  CDS Start-End: 1-1237
ctactgggagaggctcctgctaggctcaggcagtgggcaagccagcgtcagcctgcgactgacctccccgcttaggcctcccgagggcgtccggcttagagaaaagacactcacagagcatgcgttgctggggaggcagcccaggacgcctgagcggcagaaaccatgtgcacaggaggtccctgggagaacctttgggagcgcccaggacctggaggctgccggcggtcggggacatcaccgaatgggtgcagtttggcaggagcctcatagactcctcggtggccaggagccctcgacctgggacgagctgggcgaggctcttcacgctggggagaagtccttcgaatgcagggcgtgcagcaaagtgttcgtgaagagctccgacctcctcaagcacctacgcacccacaccggggagcggccctacgagtgcgcccagtgcggcaaggccttcagccagacgtcgcacttgacgcagcaccagcgcatccacagcggcgagacgccctacgcgtgccccgtgtgcggcaaggccttccggcatagctcctcgctggtgcggcaccagcgcatccacacggccgagaagtccttccgctgctccgagtgcggcaaggccttcagccacggctccaacctcagccagcaccgcaagatccacgcgggtgggcgtccttatgcttgcgcacagtgtggccgccgcttctgccgcaactcgcacctgatccagcacgagcgtacgcacacaggcgagaagcccttcgtgtgcgcgctctgcggtgctgccttcagccagggctcctcgctctttaagcaccagcgcgtgcacacaggcgagaagcccttcgcctgcccacagtgcggccgcgcctttagccacagctccaacctcacccagcaccagctcctgcacacgggcgagcggcccttccgctgcgtggactgtggcaaggccttcgccaagggcgccgtgctgctcagccaccggcgcattcacacgggcgagaagcccttcgtgtgtacgcagtgtggccgcgccttccgtgagcgcccggccctcttccaccaccagaggatccataccggcgagaagaccgtccggcgatccagggccagcctgcacccccaggccaggtctgttgccggggcatcatcagaaggtgcgccagcgaaggaaaccgagcccactcccgcctcgggcccagccgccgtctcgcagccagcggaggtctgaggtcacagatcacacctccatccccaaagaggtagcactgcagcaacatcagggggaggacgtggtggctgaactctagtggggccgagactattcagagccagtaggaggccgacagtcacagcactgcactgtggtgcggcttcatgtgatatgacagtggatgctaaggtgagagggatgcaggcatgggttgggggtggcccagagaaacttatgacagctgtacacaaactggccgctggagagatgcccgctgagggtattctcccctcaacccactgcctctgttcatccaagacttcctaggggccagcctagcagacaagagaccacaagggactggggatcagggtctgggctctgtcagccgccacctctgggaaagagaaaaggtttgggtccactgaacatcatgtttgtagacgctgacaggtggggtcctaatgagagccaacacatgctcactgccagctcctgtcctgagtactgggaagtttctcctgaagccctgtgagatggctctgtggctggtatcccgacttggaagatgaggaaactgaggcacacggcctggcctggcttcacacacatagccgactcaggagagggatgcccatgggggaacatgtgactctcagcattggaaggacagagctaggatgatggctttccggtggcactcgttcaggtttttgcccaagtctcagcttggccaaggcctgtcactgactggtttaccaaagtcgatgtgaggaggaggctttatacctgaggggatgatgttaacttcagacaagatggagctgctcacttttgccgggtttggtggccacttcacccccaaccctgtctcacccccattatccctcctcaattggaggctggacagagctgaataggaaagacttgctattgcctaaggctatgtgtgacaccctcctgaggacctccccaccccagtgtaatggcccttcatggcagggacagaaaggtggactgggggccatttgcttcctgtggccttcagcagaccaggccctgtccctacctggagcctcacctccaaggaaattcatgttctccttaatgg

SEQ ID NO: 202141 - DNA, 2996 bp, Homo sapiens
  Payload ID: 19876
  Gene Name: zinc finger protein 324B
  Uniprot ID: Q6AW86
  ENST ID: ENST00000336614
  CDS Start-End: 108-1742
acttccggcgttgggactgtcacttggctgctcgcgtcaggccacaccggtggtctgggctgtggcgcgcgggtcggggcccgaggcgggcggccaggaaggacctgatgaccttcgaggatgtggccgtgtacttctcccaggaggagtgggggctcctggacacagcgcagagggccctgtaccgccacgtgatgctggaaaacttcacacttgtgacctcacttggactctctacctcccgacctcgtgtggtcattcaacttgagcgtggcgaggagccctgggttcccagtggaaaggacatgaccctggccaggaacacctacgggaggctcaactctggttcctggagtttgacagaggatagagatgtttctggagaatggccacgagctttcccagataccccacctgggatgactactagcgtcttcccagttgccgatgcctgccacagtgtaaaaagcctgcagcgacaaccgggtgcctccccatctcaggagagaaaacccacgggggtgtcggtgatctactgggagaggctcctgctaggctcgcgcagtgaccaggccagcatcagcctgcgactgacctccccactcaggccccccaagagcagccggcccagggaaaagaccttcacagagtaccgggtgcctgggaggcagcccaggacgcctgagcggcagaagccatgtgcacaggaggtccctgggagagccttcgggaatgcctcggacctgaaggccgccagtggtggcagggatcgcagaatgggcgcagcttggcaggagcctcatagactcctcggtggccaggagccctcgacctgggacgagctgggcgaggctcttcacgctggggagaagtccttcgaatgcagggcgtgcagcaaagtgttcgtgaagagctccgacctcctcaagcacctacgcacccacaccggggagcggccctacgagtgcacccagtgcggcaaggccttcagccagacgtcgcacttgacgcagcaccagcgcatccacagcggcgagacgccctacgcgtgccccgtgtgcggcaaggccttccggcatagctcctcgctggtgcggcaccagcgcatccacacggccgagaagtccttccgctgctccgagtgcggcaaggccttcagccacggctccaacctcagccagcaccgcaagatccacgcgggtgggcgtccttatgcttgcgcacagtgtggccgccgcttctgccgcaactcgcacctgatccagcacgagcgtacgcacacaggcgagaagcccttcgtatgcgcgctctgcggtgctgccttcagccagggctcctcgctctttttgcaccagcgcgtgcacacaggcgagaagcccttcgcctgcgcccagtgcggccgctcctttagccgcagctccaacctcacccagcaccagctcctgcacacgggcgagcggcccttccgctgcgtggactgtggcaagggtttcgccaagggcgccgtgctgctcagccaccggcgcattcacacgggcgagaagcccttcgtgtgcacgcagtgtggccgcgccttccgtgagcgccctgccctcttgcaccaccagaggatccacaccacagagaagaccaatgccgcagcaccagactgcaccccggggccaggtttccttcagggacatcatcggaaggtgcgccggggagggaagccaagcccagtcctgaagccagcgaaggtctgaggtcacaggtcgcagcccaaccctttcttggccttctgtgaatcccttccacagctaaagggtccgagtgctcttcagatccacgatggggaaaagctctgtgcctgagagtcagggacgagggagaccctttggctgtggttccatttgcaggtggggacaggatttgccagtttagtcatagctcacacctccatcctcaaagaggtaacactgcagaaacatcagagggaggacatgtcagctggaactctggtggggctgaggctgtagttggggccataggacgccgacaaaggcagcgctgcatggtggtgctacttcatgtgttatgagagtggatgctgaggtgagggggatgcggacatggggtaggatgacctagagaaacttatgatgtctgcacacaaactggccgctagacggacgctgaggacattttccccctgaggcctctattcaaggcttcctgggggccatctcagcaaacaggagactacaggggactggggatcagggtgtggcctgtgagtgtcagcctcctcctcggaaaaagaaaagctttgggtcaactcagcatcatgtttgcagatgctgacagacgggatcctaatgagagtcaatgtgtgctcactgccagctcctgggctgtgctctggtcagccaggtgtgagggcctggcctggggtcacacagctgactcaggagaggaatgcccatggttctcagcattggaaggacaaacctaggatgatggctttccagtggcactcgttcaggttttcgtccaagtctcagcttggccaaggcctgtcgctcactcatttacaaaagtcgatgtgaggaggagcctttacacctgtggagacagtgatagctttggagcagataaggtggagctgctcatttttgctggatttggtggccgatccccgcccccacccccaccccctccatctcacctttcccttgttatgcctcctcaattggaggctggacagagagctgaataggaaggacttgccattacctaaggccatgtgtgacagcctcctgaggacctccccaacccagtgtgatgggcctgcatggcagagacaaaagggtagactgggggtcatttgcttcctgtggccttaagcctactaggccccatccttacctgagacctcacctccaagaaattaatggtcttttcaatggagaaaaaaaaagactagtatttgcaacttcaaatagatgtagtttccttta

SEQ ID NO: 202142 - DNA, 2368 bp, Homo sapiens
  Payload ID: 19876
  Gene Name: zinc finger protein 324B
  Uniprot ID: Q6AW86
  ENST ID: ENST00000545523
  CDS Start-End: 181-1815
gcgttgggactgtcacttggctgctcgcgtcaggccacaccggtggtctgggctgtggcgcgcgggtcggggcccgaggcgggcggccaggaaggttcttggggctgcacccctatgacgactggtggggatcatccagtccctcaggctggatgagcagcctggaaatgtcaggacctgatgaccttcgaggatgtggccgtgtacttctcccaggaggagtgggggctcctggacacagcgcagagggccctgtaccgccacgtgatgctggaaaacttcacacttgtgacctcacttggactctctacctcccgacctcgtgtggtcattcaacttgagcgtggcgaggagccctgggttcccagtggaaaggacatgaccctggccaggaacacctacgggaggctcaactctggttcctggagtttgacagaggatagagatgtttctggagaatggccacgagctttcccagataccccacctgggatgactactagcgtcttcccagttgccgatgcctgccacagtgtaaaaagcctgcagcgacaaccgggtgcctccccatctcaggagagaaaacccacgggggtgtcggtgatctactgggagaggctcctgctaggctcgcgcagtgaccaggccagcatcagcctgcgactgacctccccactcaggccccccaagagcagccggcccagggaaaagaccttcacagagtaccgggtgcctgggaggcagcccaggacgcctgagcggcagaagccatgtgcacaggaggtccctgggagagccttcgggaatgcctcggacctgaaggccgccagtggtggcagggatcgcagaatgggcgcagcttggcaggagcctcatagactcctcggtggccaggagccctcgacctgggacgagctgggcgaggctcttcacgctggggagaagtccttcgaatgcagggcgtgcagcaaagtgttcgtgaagagctccgacctcctcaagcacctacgcacccacaccggggagcggccctacgagtgcacccagtgcggcaaggccttcagccagacgtcgcacttgacgcagcaccagcgcatccacagcggcgagacgccctacgcgtgccccgtgtgcggcaaggccttccggcatagctcctcgctggtgcggcaccagcgcatccacacggccgagaagtccttccgctgctccgagtgcggcaaggccttcagccacggctccaacctcagccagcaccgcaagatccacgcgggtgggcgtccttatgcttgcgcacagtgtggccgccgcttctgccgcaactcgcacctgatccagcacgagcgtacgcacacaggcgagaagcccttcgtatgcgcgctctgcggtgctgccttcagccagggctcctcgctctttttgcaccagcgcgtgcacacaggcgagaagcccttcgcctgcgcccagtgcggccgctcctttagccgcagctccaacctcacccagcaccagctcctgcacacgggcgagcggcccttccgctgcgtggactgtggcaagggtttcgccaagggcgccgtgctgctcagccaccggcgcattcacacgggcgagaagcccttcgtgtgcacgcagtgtggccgcgccttccgtgagcgccctgccctcttgcaccaccagaggatccacaccacagagaagaccaatgccgcagcaccagactgcaccccggggccaggtttccttcagggacatcatcggaaggtgcgccggggagggaagccaagcccagtcctgaagccagcgaaggtctgaggtcacaggtcgcagcccaaccctttcttggccttctgtgaatcccttccacagctaaagggtccgagtgctcttcagatccacgatggggaaaagctctgtgcctgagagtcagggacgagggagaccctttggctgtggttccatttgcaggtggggacaggatttgccagtttagtcatagctcacacctccatcctcaaagaggtaacactgcagaaacatcagagggaggacatgtcagctggaactctggtggggctgaggctgtagttggggccataggacgccgacaaaggcagcgctgcatggtggtgctacttcatgtgttatgagagtggatgctgaggtgagggggatgcggacatggggtaggatgacctagagaaacttatgatgtctgcacacaaactggccgctagacggacgctgaggacattttccccctgaggcctctattcaaggcttcctgggggccatctcagcaaacaggagactacaggggactggggatcagggtgtggcctgtgagtgtcagcctcctcctcggaaa

SEQ ID NO: 202143 - DNA, 564 bp, Homo sapiens
  Payload ID: 19876
  Gene Name: zinc finger protein 324B
  ENST ID: ENST00000594214
  CDS Start-End: 65-457
acaccggtggtctgggctgtggcgcgcgggtcggggcccgaggcgggcggccaggaaggacctgatgaccttcgaggatgtggccgtgtacttctcccaggaggagtgggggctcctggacacagcgcagagggccctgtaccgccacgtgatgctggaaaacttcacacttgtgacctcacttggactctctacctcccgacctcgtgtggtcattcaacttgagcgtggcgaggagccctgggttcccagtggaaaggacatgaccctggccaggaacacctacgggaggctcaactctggtgagtgggagctcaggtggggtgaactaaggaccaacctgtggccaagcccatgtccctgcttttctgactctggaaacacatcctcctctcctgcctcctacctgactcccttctcttccatcatcagcctctcctggaggctgctgccttagtaggtgcccttgaagggagagctccaagggcacaggagctgggttcacacagaagggcctaccttcagctgggctgtgtggccttgaaccctccacaactagcagcc

SEQ ID NO: 202144 - DNA, 979 bp, Homo sapiens
  Payload ID: 19876
  Gene Name: zinc finger protein 324B
  ENST ID: ENST00000598244
  CDS Start-End: 742-979
acttggctgctcgcgtcaggccacaccggtggtctgggctgtggcgcgcgggtcggggcccgaggcgggcggccaggaagggcactggtgagctcccgacttccggcagccagggggctgaggtcccgaaggaggctccgaggggagagtcctgcgtgtgcaaaacctgggaggggagccgaagcccagatgcttctgggactgagcgctctcgatgtggagctggagtagaggggatgtgtgcggctgcagtagcaggcgagggagtgggctttatctcgagggcgtcgggagacatagaagttttgaacagaatcaggacatcctctgagttgggactttaaaacggttccaccgtttgttgcgtggagaacagacatgcaggggtgtcggcatgaagggaagaaccgactgccacagtctgggcagcagtggaggtgggcgaccaggtgaattctggtggatctgcggatgcatcaggtgtgggctgtttgaagaactaagtaccccatgttgttcagcctgagcgcctggaagaagagagctgctgtagatagaaaggagaattgaaaggaaagcaggtttccttcaggggaaagatcaagagtctgggatgtcccaggttggtcatgtcactggacctgacgttgttggtgtcctgggctgaggacagggcctataaactggactgaagaaggcgatgagcagtcaggcgtgcggagttacagcttgagggacctgatgaccttcgaggatgtggccgtgtacttctcccaggaggagtgggggctcctggacacagcgcagagggccctgtaccgccacgtgatgctggaaaacttcacacttgtgacctcacttggactctctacctcccgacctcgtgtggtcattcaacttgagcgtggcgaggagccctgggttcccagtggaaaggacatgaccctggccaggaacacctacgggaggctcaactctg

SEQ ID NO: 202145 - DNA, 546 bp, Homo sapiens
  Payload ID: 19876
  Gene Name: zinc finger protein 324B
  ENST ID: ENST00000599194
  CDS Start-End: 132-546
actgtcacttggctgctcgcgtcaggccacaccggtggtctgggctgtggcgcgcgggtcggggcccgaggcgggcggccaggaaggtacggaccacgagcagccggccgcgcccccaagcctcggacctgatgaccttcgaggatgtggccgtgtacttctcccaggaggagtgggggctcctggacacagcgcagagggccctgtaccgccacgtgatgctggaaaacttcacacttgtgacctcacttggactctctacctcccgacctcgtgtggtcattcaacttgagcgtggcgaggagccctgggttcccagtggaaaggacatgaccctggccaggaacacctacgggaggctcaactctggttcctggagtttgacagaggatagagatgtttctggagaatggccacgagctttcccagataccccacctgggatgactactagcgtcttcccagttgccgatgcctgccacagtgtaaaaagcctgcagcgacaaccgggtgcctccccatctcaggagagaaaacccacggggg

SEQ ID NO: 202146 - DNA, 578 bp, Homo sapiens
  Payload ID: 19876
  Gene Name: zinc finger protein 324B
  ENST ID: ENST00000599193
  CDS Start-End: 136-578
acttggctgctcgcgtcaggccacaccggtggtctgggctgtggcgcgcgggtcggggcccgaggcgggcggccaggaaggtacggaccacgagcagccggccgcgcccccaagcctcggtatcttcgagacctgatgaccttcgaggatgtggccgtgtacttctcccaggaggagtgggggctcctggacacagcgcagagggccctgtaccgccacgtgatgctggaaaacttcacacttgtgacctcacttggactctctacctcccgacctcgtgtggtcattcaacttgagcgtggcgaggagccctgggttcccagtggaaaggacatgaccctggccaggaacacctacgggaggctcaactctggttcctggagtttgacagaggatagagatgtttctggagaatggccacgagctttcccagataccccacctgggatgactactagcgtcttcccagttgccgatgcctgccacagtgtaaaaagcctgcagcgacaaccgggtgcctccccatctcaggagagaaaacccacgggggtgtcggtgatctactgggagaggctcct

SEQ ID NO: 202147 - DNA, 2729 bp, Homo sapiens
  Payload ID: 19877
  Gene Name: zinc finger protein 326
  Uniprot ID: Q5BKZ1
  ENST ID: ENST00000340281
  CDS Start-End: 144-1892
cgctgtggcctgcggctcccgggctggtagcgcgccgctctcggtcgcgcggagtgatcgtgtggaatcgcgggtcgcggacgctcgccgccggccatagctcagcctagcgccgccaaggccgacggccctcagcctctgccatggacttcgaggacgattacacacactccgcctgcaggaatacttatcagggctttaatggaatggatcgtgattatggccctggatcttatggagggatggatcgtgactatggccatggatcctatgggggtcagagatccatggattcctacctaaaccagtcatatggcatggacaatcacagtggtggtggtgggggtagcaggtttggaccttatgagtcttacgactccaggtcttctctgggtgggcgagatctgtacagatctggctatggttttaatgaacccgaacaaagccgcttcggaggtagttatggtggtcgatttgagagctcctaccggaatagccttgactctttcggaggtagaaaccagggcgggtctagctgggaagcaccttactcccgttcaaaattgaggcctgggtttatggaggacagaggaagagagaattactcttcctacagcagtttttcttcaccccatatgaagcctgcacctgtaggctctcgggggagaggaacgcctgcttatcctgaaagtacgtttggaagcagaaactatgatgcttttggaggaccatcaacaggcagaggccgaggccgaggacatatgggtgattttggaagcattcatagacccggaattgttgttgactatcaaaacaaatccaccaatgtgacagttgctgctgcaagaggaataaagagaaaaatgatgcagccatttaataagcccagtggaacctttatcaagaaacccaaactagcaaaacctatggagaagataagcctcagcaaatcacccacaaaaactgatcctaaaaatgaagaggaagaaaagcggcgaattgaggctcggcgagagaaacaaaggcgcagaagagaaaaaaacagtgagaaatacggagatggatacagaatggcatttacatgttcattttgtaaatttcgaacatttgaagaaaaagatattgaactgcatctggaaagttcttcacatcaggaaacattagatcatatacagaaacaaactaaatttgataaagtagttatggagtttttgcatgagtgtatggtgaataaattcaagaaaacatctattcgtaagcaacagacaaataatcaaacagaagtagttaaaataattgaaaaagatgttatggaaggtgttactgtagatgatcacatgatgaaggtagagacagttcattgcagcgcttgcagtgtttatatccctgctttacatagttcagttcagcagcacttaaaatctcctgatcatatcaaagggaagcaggcttataaggaacaaataaaaagagagagtgtcttgactgctacaagcattttaaataatccaatagtgaaggcgcgatatgaacgttttgttaagggtgagaatccttttgaaattcaagaccattctcaggatcagcaaatagaaggagatgaggaggatgaagagaagattgatgaacctattgaagaagaggaggatgaagatgaggaagaagaagcagaggaagtgggggaagtagaggaagtggaagaagtagaggaagtgagagaaggaggaatagagggcgagggaaatatacagggagtaggggaaggaggggaagtaggggtagtgggagaagtagagggagtgggggaagtagaggaagtagaggaattagaggaagagacagcaaaggaagaacctgctgacttccctgttgagcaacctgaagaaaattaaatataaggtattagatttaaaaggagctttacatttcggttctaatgtaaaaaagggtaagaaatttaatagcttaaaatatgaattaacacccatgttgcatgcattccacatattaaaatttgttttatataatttctaaatgtttaacatttgtttaataaaatgaaggcaaaactattttagtttagtttttatagctaccagacttagatccgataaattgtttgtataatttttaagcttaatttttattactttattggtgttaaggataacaaatgtgtattgttagtatatctattctaatcattttatcttaaatgctgctcttgggagtgaatattcaagtgtgcatcaattttttgaatacttaccctggaagatataaactgggcaagtattttgtgctctgtgtatttttttactgcattagacattgaatagtaatttgcgttaagatacgcttaaaggctctttgtgaccatgtttccctttgtagcaataaaatgttttttacgaaaactttctccctggattagcagtttaaatgaaacagagttcatcaatgaaatgagtatttaaaataaaaatttgccttaatgtatcagttcagctcacaagtattttaagatgattgagaagacttgaattaaagaaaaaaaaattctcaatcatatttttaaaatataagactaaaattgtttttaaaacacatttcaaatagaagtgagtttgaactgaccttatttatactctttttaagtttgttccttttccctgtgcctgtgtcaaatcttcaagtcttgctgaaaatacatttgatacaaagttttc

SEQ ID NO: 202148 - DNA, 1538 bp, Homo sapiens
  Payload ID: 19877
  Gene Name: zinc finger protein 326
  Uniprot ID: Q5BKZ1
  ENST ID: ENST00000361911
  CDS Start-End: 125-337
cgggctggtagcgcgccgctctcggtcgcgcggagtgatcgtgtggaatcgcgggtcgcggacgctcgccgccggccatagctcagcctagcgccgccaaggccgacggccctcagcctctgccatggacttcgaggacgattacacacactccgcctgcaggaatacttatcagggctttaatggaatggatcgtgattatggccctggatcttatggagggatggatcgtgactatggccatggatcctatgggggtcagagatccatggattcctacctaaaccagtcatatggcatggacaatcacagtggtggtggtgggggtagcaggtaaattgcttaatcatttggccaaataattagacaactataagattttggatatattattttaagtactctttaggcatgttatgatacttgaacttcactgtttgctattgaatcatcaccttaaatatttaaaggtgttaattaatgggtataaaatttaaatcagtattactggcagacgttattttaggaaaacaccagataactatatcatgtcaatataatagagtaagatacactttttagcagtgaacttttaaaaaattcttttacttttaacttcttgtcaatcaaagtatcctgaaaaatgatataaaaatgttattgaaaatattatttatgaagctttttcttaataattaaaaaaaatcttttctaatgtggggtgctatgtaaattagcaaagcagtctaactagaatggattttactgaaccagtctaacatttactttccaagaaacattcaggacatattcctttaattctaattttaaaggaagagcatattgcaataataaaaatatttttaaaattatgttcaggttatttattgacaggtactacttacaccaaagcacttgtgctctaggctagaagcattgtattaaagccatgaatactatacctttgactagtcgagattgtatttatattttcctgttactactgtataaagcttaaacctacttaaacaactacaagctttaaggttgaccatatttcaggagaaggggtgtctactttttgaggcacaaaggttcctgctgaatataagtaaaactagttagtagacatgtgaaacagtcatccttctgcataaattgaaggatccggattccttaatgatggactgaatgatgcttactttccttctttctgcttccagtgtaccactatggtttatagtaaagaaaaattaagaaagtgaacagttgcaactattttgcttatgtgatagatgttttgaaaaatgtagttggaaataggaataatttttatatggttactaggattcagaagtaaatctatttagtgatctgtaaataattgaagtaatgtaacacttaatgttttaatatgtcagttattgcccttttatattgtgaatgtaatgtgcataagctatatccgtagatgttattgttttatctcatgtgtaattgtgggcctttataaaattgtgttgtaagatatcaagcaa

SEQ ID NO: 202149 - DNA, 9433 bp, Homo sapiens
  Payload ID: 19877
  Gene Name: zinc finger protein 326
  ENST ID: ENST00000370447
  CDS Start-End: 122-1603
gctggtagcgcgccgctctcggtcgcgcggagtgatcgtgtggaatcgcgggtcgcggacgctcgccgccggccatagctcagcctagcgccgccaaggccgacggccctcagcctctgccatggacttcgaggacgattacacacactccgcctgcaggaatacttatcagggctttaatggaatggatcgtgattatggccctggatcttatggagggatggatcgtgactatggccatggatcctatgggggtcagagatccatggattcctacctaaaccagtcatatggcatggacaatcacagtggtggtggtgggggtagcagtttttcttcaccccatatgaagcctgcacctgtaggctctcgggggagaggaacgcctgcttatcctgaaagtacgtttggaagcagaaactatgatgcttttggaggaccatcaacaggcagaggccgaggccgaggacatatgggtgattttggaagcattcatagacccggaattgttgttgactatcaaaacaaatccaccaatgtgacagttgctgctgcaagaggaataaagagaaaaatgatgcagccatttaataagcccagtggaacctttatcaagaaacccaaactagcaaaacctatggagaagataagcctcagcaaatcacccacaaaaactgatcctaaaaatgaagaggaagaaaagcggcgaattgaggctcggcgagagaaacaaaggcgcagaagagaaaaaaacagtgagaaatacggagatggatacagaatggcatttacatgttcattttgtaaatttcgaacatttgaagaaaaagatattgaactgcatctggaaagttcttcacatcaggaaacattagatcatatacagaaacaaactaaatttgataaagtagttatggagtttttgcatgagtgtatggtgaataaattcaagaaaacatctattcgtaagcaacagacaaataatcaaacagaagtagttaaaataattgaaaaagatgttatggaaggtgttactgtagatgatcacatgatgaaggtagagacagttcattgcagcgcttgcagtgtttatatccctgctttacatagttcagttcagcagcacttaaaatctcctgatcatatcaaagggaagcaggcttataaggaacaaataaaaagagagagtgtcttgactgctacaagcattttaaataatccaatagtgaaggcgcgatatgaacgttttgttaagggtgagaatccttttgaaattcaagaccattctcaggatcagcaaatagaaggagatgaggaggatgaagagaagattgatgaacctattgaagaagaggaggatgaagatgaggaagaagaagcagaggaagtgggggaagtagaggaagtggaagaagtagaggaagtgagagaaggaggaatagagggcgagggaaatatacagggagtaggggaaggaggggaagtaggggtagtgggagaagtagagggagtgggggaagtagaggaagtagaggaattagaggaagagacagcaaaggaagaacctgctgacttccctgttgagcaacctgaagaaaattaaatataaggtattagatttaaaaggagctttacatttcggttctaatgtaaaaaagggtaagaaatttaatagcttaaaatatgaattaacacccatgttgcatgcattccacatattaaaatttgttttatataatttctaaatgtttaacatttgtttaataaaatgaaggcaaaactattttagtttagtttttatagctaccagacttagatccgataaattgtttgtataatttttaagcttaatttttattactttattggtgttaaggataacaaatgtgtattgttagtatatctattctaatcattttatcttaaatgctgctcttgggagtgaatattcaagtgtgcatcaattttttgaatacttaccctggaagatataaactgggcaagtattttgtgctctgtgtatttttttactgcattagacattgaatagtaatttgcgttaagatacgcttaaaggctctttgtgaccatgtttccctttgtagcaataaaatgttttttacgaaaactttctccctggattagcagtttaaatgaaacagagttcatcaatgaaatgagtatttaaaataaaaatttgccttaatgtatcagttcagctcacaagtattttaagatgattgagaagacttgaattaaagaaaaaaaaattctcaatcatatttttaaaatataagactaaaattgtttttaaaacacatttcaaatagaagtgagtttgaactgaccttatttatactctttttaagtttgttccttttccctgtgcctgtgtcaaatcttcaagtcttgctgaaaatacatttgatacaaagttttctgtagttgtgttagttcttttgtcatgtctgtttttggctgaagaaccaagaagcagacttttcttttaaaagaattatttctctttcaaatatttctatcctttttaaaaaattcctttttatggcttatatacctacatatttaaaaagagaacatgagcttgatagaggatctattcttaaataatttattttcaaacaaccgtctatgtcactaaaaagtagtgctcttatttttttcaatctttactgtggcctcttttgagagtagggtccgtagttttttttttttttcttttttgggacagggtttcactctgtcacccaggctggagtgcagtgtagcctcaacctcctgggctcaagcgatcctccaacttagcctcccaagtagctgggactgttaagtgtgagccaccatgcccagctaatttttgtagtttttgtagagacagggttttaccatgttgtccaggctggttttgaactcctgggctcaagtgacctgtctgtcttggcctcccacagtgctgggattgcaggtgtgagccaccatgcctggcatagggggctgtatttcagtgaaattagaaaagttttgaggcatcgaatggataaatggatggatatatcaaattgtaaggtattaagtgggtgaatgtatggacatttgtagaatcccacagataatttatctttttgtgtaaaataaggcttttaaaactagactttctgaaccaatacagttttttttttttgaggtgaactaggtttgcctagctttaagctagcaatatctgatagatacttgcatctaattttagggatttggtgccaaataagagaagggtagttgaagactagataaatttggatactatctaggagtctgtatttacttagcaggcttttgaaagccgttttgcttaggagttcaaattttaaggataataggacttgttaccctcttatttctcctttatttttaaaaatatttgtggaagggctaaggtaaaagaataataaattcctctaggttattagtatttggttcttctgatactaagctgagtgattttttttaaaacaatgtctctggtagtctgattgagatatgaaacttttgggaagaaaaccattatgtaacaagaatcctatgtaacaactgggtaaatgttttagaatgagagataggaaagaacatctaaatagtacttttttgtgggacgcatgagcctttatacagcctagctaatttgcaaggtaatgataaataaaagtgtattttgttactgtgcttaattcagaaattcaaattcatgtatttcctattggataatttgtaggcgggcagtttactttatagtcaggttagtttttgtgatccttagtgtttatatttgcattgcttttgtaataaggatgtatataagatcttaaacgcctttcaacttctgttttcaagtatcacttgttttctctattacaaagtgagatacatagttctaaataaccaaagaaatttatttataacctacacagttgtttcagctccatgcctagggactatcctgtattattcgctttttatcactttctacctacagtctaccaaaaagtctgtctgttctacttccaaaatttatctgccgactcttctacctccactgcaaccaacccagttcaagtcatgataatttcttgttaactaatcttgattccacccttaccatgatagattcagttttctacacaagtataagcttttaaaaatgtaattcagatgatgttaatctcatgctttttttttttttgtacctatacagttagaactccttatcatgttgatcagactggcctagctttacaactttatatcatataccattcttaccagccataatggccttttgttacttttttgatgagttctttcctacaaagacctttgcattttcttattctatagcctatacccatcagctttccttggctgattcttcatccttcaggtcaccttaaatgttagaaaaggggagtagttctaaaatgtttgtagaaacgaggatttgggggtaccaacctagattttactagagcatattctttggaggtgttctttttttctactttttttttttttttctttaggttctgtctttgtcatgcaggctggaattcagtggcacgatcatggcttactgcagctttgacctcctgggctcaagcggtcgtcccgccttagcctcccaagtagctgggaccacagacgtgcaccatcacactcagctaatattttttttgtagagatggggtcttgctttgttgcccaggctagtcttgaactcctggacacaagcagtcctcccacctcagcttcccaaagtgctagaattacaggcatgagccaccacgcctatcctggaggtgatatatttttaacaaatatctcacatgattttgaaggtagtggtcagtgattgcactttgaggacattcatagggccctcatacaaatttctggtgcctgtaactcttcccctatcaaggcaggagtttccgcccttttgaatataaacataggtttgggggattcttcataatactttctgaaagcactggaatctataacagacctgtgggagtcagaaaatggggacttttcccccctcatttaatacttacaactatattggtaagttagtaggagtagtaattttcccatataataagcccactcttgtacatgtagaaacagagaaaagaactacaaaggtaaatgttagtgcatgttgaaatgtatttaagaactctgtttttgttggcaagattgttcttattgtagaagtggatattatcagattattttagatgttattcaacatttgatttatttaccaaattgtccttactttgaatataagcaaacttttttattgtggtaaagtatacatagcataaaattaccattctaatcattttttaatgtaccatttagtggcattaattacaagcaaccttttttttttttttttgagacatagcctcactctgtcacccaggctggagttcagtggcactatctcagctcactgcaatctctgcttcctgggttcaagcgattcttgtgcctcagccctcccgagtaactgggattacaggcacacaccaccatgcccagctaatttttttgtatttttaatagagatggggtttcattatattggttaggttggtcttgaactcctgacctcaagtgatctgcctgccttggcctcccaaagtgctgggattataggcatgagccaccgcgtctggcatacaaacttttgattacagtttgacacctgttgatggacagaaaatggagtaaccgtccaggcaggaatgttctagtctgtgtgacagttacagttcattttataaataaacaattgactttttttggtagttatggtccctaccctcagtgctgtatctctatttggtattcaaacaaatccagggaatctgcaaggctgaagggcagattcttggcaatggtaaattcagtaggtcctgccaccatttgaggcctcctcggagacagccatactagtctaatctcttcttgactttcccttcttctttcccagtcctctaattcccagaggtctgttgtgaattctaatgctttcagaaaatattacggagaatcccacaatgataaaatttcccagtttttgttttaaaacaaagttgaaaaatattatattaggggtcagggtgaggtgctgttgatggtgacagatggcccccttggcgacagggaagtatgaaatagcatggagtgtggaagggtactatgggtagcttatttattagatcagtataaagtatagatttaagagagttagattaaaatggcatgcttgattcaagtcattaaattctaaagttctattaaaattgtagaggagatacaataatacaaatttcagcaataaggatagatttataatcacactaggaagacaagaagggtgctgtgaaatatttctagaagatacaaaacaaggaattagatcttggtgaaaccaagagagccaaggaactgacagccacatgccgatgataattaaagaattacctccagttgtagagacagctctgagatggggtgtctgtagtgtgctaagccagatttttgaaggactagatagttattctggtctctgactcagagctgctggtccacagaattcctctaagctaaagctgtaacacaatttgatgtttgccaaataaggtgagactcacagagtatatgtgcagagcatataatgcagagcatacaaataggggccatcgaagtgtggcaatgccctaggtatattgtgattaccacaaggagctttattcctcatacttagaaaacaagcacacaaagaaaaatctgccagctgtctatttcccaattttccttctgactgttcctttctccttcctcacacaattaaaatgctaggtttcctgtaatcgcaatcttcagggaatttttcactcaagcccagaaaataaactccagataatgatactgagaaatttattggttggaaaactgctatctacaggccttccactacctatttcttagtagattttacatttttaaagggttgtagaacaccaaaacaatatatgacagatactgtgtttgggccttaaagcctaccctttatataaaaagtttgttgactcctaggctctcatttgcaagtagacaaatgagaaacagcaaatatttaaggaaaagagcaacatgaaaaatacacagcaaacttaacaagcagaaagaattcctggggaaacaattcagggggaaaaaatgaccaagtataattagtattatatggaataataattactactacttataatagtttcatatgtaatcctcatcatattatatgtcataatcttcaaatattttagaggttattgtactaattttaaaaatgcaagttgctataaagaagtatcttggaaataaacagttgtgaaaataaactctgttttaggctgattagttgaataaacatggctgagaatcaaattactgagctagaattttgagctgaagatacttccagagcttacaagaaaagataaaaaagatggaagttacagtaaaagacatagatgtatctcttaaagacatagaaaacccagaacaccatctgtttaaaaattaaacttcatgagattaagagccatatgtatagagaattcaccattgaataccctgcatatatcacagtgccaggtaaatactatgcaataaatatttttgaatgtatgtatgtatgttacagtataaatatatagaggagttccagaaagtgaaaaaagaagtgaagaataggaaaaaaaaaaaaatcttctgatgaaagattcatattagaagtctccagtgctgagcaaaaacaatgaaaaagtcatgcaggatgaatactgacaaaatatgtgtaatcccaagcttagaaaaatctcaaaatgtctaaagagaaacagtgtacctataaggggaaaagaatcacattggtctcagacttgtcatctgttcgttggagtgctacaacatactgctatttttgaagttctgagggagaactgttttgaatttagacttctatcttgagtgaaactgtcaagagtaagggcacagcaaggacattctaccaattttagaacatgcaaggatttcagaaattaactcataaaacacaacctgcacggcatggtatcaaattatgtaaagaaaaacttggtaaacaagaaattgtcaaatttataatcatagctacgtatttgaacacagcgcttagaaattgtcagataaagagttcaaaatagaggaaacattttgaattatatagtgcacaaattttaatagctatagaatatttgttttcaaatgccatgaaaaaatgaccatgaagcaaaaaccacaatatttttttgtttgttgataggtaggaattcagggtccatcctgtcatcacaatgcaatgaaacaaaaaattagcaagtggatagcaataaatcaatttttaaaaatcagacaaaagaaaacactgtccttgtaatgcttgcatttaaaaggaaataaaaacttatgaaagagaatctttattttatttaagcagttctagattatacaaaatgttgaaacatctcaatttggtctctgaggctagcataatccttattccagaaaattgttcatcaaagatagctatagaccagtctcacttacgaacaaatgtaatttgttgaaactggtcatgttgaaaaaacatgaccaattaaatatcccaaaataatgtgtcatggtagagtagggtttatctgaaaactgcaacatgacgattatgtaactcaatcctttaggaaatttattactttaacttaaaaaaaaataccataagcttgatagatgctcgaaaaacatttcctaagattgaacacattccagatttaaatttttcaggctgagaatagaataaagcctttgtaacttggctaaggactaggaaggtcttccagaaagcttcatcaaacatctgcattcaagtcaggattaagacaataatgactgttgcctatgcaacaatcatttaaccctaagaaatagaagtattaggaagagaaaacatagtccttattttgagcagtgtgattgtagagacaaacatccaagagaaacagttgaaaaactattagaaatgacaaaaggtagttttgtttaatagttcaccatgaaaatctgtactatatagaaaatctgtatatagaatatagcattggccaattggaaatgtaatttgaaaatcccatttgcagcaaaacttggaactgtatactgtctaagaataaacaatgggaaaaatgcaaaatccttatgaggaaaatgatacattttaatggaggaaataaaatgcctgaataaa

SEQ ID NO: 202150 - DNA, 1956 bp, Homo sapiens
  Payload ID: 19877
  Gene Name: zinc finger protein 326
  ENST ID: ENST00000394583
  CDS Start-End: 147-308
cctcgctgtggcctgcggctcccgggctggtagcgcgccgctctcggtcgcgcggagtgatcgtgtggaatcgcgggtcgcggacgctcgccgccggccatagctcagcctagcgccgccaaggccgacggccctcagcctctgccatggacttcgaggacgattacacacactccgcctgcaggaatacttatcagggctttaatggaatggatcgtgattatggccctggatcttatggaggtctgacattcaaggatatttatctaaaaattcttcttttgagtgccagtaaagcatatgggtgattttggaagcattcatagacccggaattgttgttgactatcaaaacaaatccaccaatgtgacagttgctgctgcaagaggaataaagagaaaaatgatgcagccatttaataagcccagtggaacctttatcaagaaacccaaactagcaaaacctatggagaagataagcctcagcaaatcacccacaaaaactgatcctaaaaatgaagaggaagaaaagcggcgaattgaggctcggcgagagaaacaaaggcgcagaagagaaaaaaacagtgagaaatacggagatggatacagaatggcatttacatgttcattttgtaaatttcgaacatttgaagaaaaagatattgaactgcatctggaaagttcttcacatcaggaaacattagatcatatacagaaacaaactaaatttgataaagtagttatggagtttttgcatgagtgtatggtgaataaattcaagaaaacatctattcgtaagcaacagacaaataatcaaacagaagtagttaaaataattgaaaaagatgttatggaaggtgttactgtagatgatcacatgatgaaggtagagacagttcattgcagcgcttgcagtgtttatatccctgctttacatagttcagttcagcagcacttaaaatctcctgatcatatcaaagggaagcaggcttataaggaacaaataaaaagagagagtgtcttgactgctacaagcattttaaataatccaatagtgaaggcgcgatatgaacgttttgttaagggtgagaatccttttgaaattcaagaccattctcaggatcagcaaatagaaggagatgaggaggatgaagagaagattgatgaacctattgaagaagaggaggatgaagatgaggaagaagaagcagaggaagtgggggaagtagaggaagtggaagaagtagaggaagtgagagaaggaggaatagagggcgagggaaatatacagggagtaggggaaggaggggaagtaggggtagtgggagaagtagagggagtgggggaagtagaggaagtagaggaattagaggaagagacagcaaaggaagaacctgctgacttccctgttgagcaacctgaagaaaattaaatataaggtattagatttaaaaggagctttacatttcggttctaatgtaaaaaagggtaagaaatttaatagcttaaaatatgaattaacacccatgttgcatgcattccacatattaaaatttgttttatataatttctaaatgtttaacatttgtttaataaaatgaaggcaaaactattttagtttagtttttatagctaccagacttagatccgataaattgtttgtataatttttaagcttaatttttattactttattggtgttaaggataacaaatgtgtattgttagtatatctattctaatcattttatcttaaatgctgctcttgggagtgaatattcaagtgtgcatcaattttttgaatacttaccctggaagatataaactgggcaagtattttgtgctctgtgtatttttttactgcattagacattgaatagtaatttgcgttaagatacgcttaaaggctctttgtgaccatgtttccctttgtagcaataaaatgttttttacgaaaa

SEQ ID NO: 202151 - DNA, 3290 bp, Homo sapiens
  Payload ID: 19878
  Gene Name: zinc finger protein 329
  Uniprot ID: Q86UD4
  ENST ID: ENST00000358067
  CDS Start-End: 117-1742
cagagatggctggagccgtgtggatgggcataaatggctaatgtccagcaaccatcgatgtcaagtatccacacacctggcctgaatggatccctctgcctttcagagtttgggatatgagattgaaaatgacgactcggaattttcctgagagagaagtaccctgtgatgtagaagtggaaagattcacaagggaagttccctgcttgtccagtttaggtgatggttgggactgtgagaaccaggagggacacttgaggcaatcagctttaactctggagaaaccagggactcaggaagcaatttgtgaatatcctggttttggggagcatttgattgcaagctcagaccttccaccgtctcagagagttctggcaacaaatggtttccatgcacctgactcaaatgttagtggtctggattgtgaccccgccttacccagctatcctaaaagttatgcagataagagaactggtgacagtgatgcctgtggaaaaggcttcaaccattccatggaagttattcatggaagaaatccagtgagagagaagccctacaaataccctgaaagtgttaagtcttttaatcattttacctctcttggtcatcagaaaataatgaaaagaggcaagaaatcgtatgaaggtaagaattttgagaacatctttactctgagctcatcgcttaatgaaaaccagagaaatctccctggagagaaacaatatagatgtactgaatgtggcaaatgcttcaaacggaactcttctcttgttttgcatcaccgaactcacaccggagagaagccttatacttgtaatgagtgtggaaagtccttctccaagaactacaacctgattgtgcatcaaagaatccacacaggagagaagccctatgaatgcagtaaatgtgggaaagctttcagtgatggctcagctctgacacagcaccagagaattcacacaggcgagaaaccttatgaatgcctagagtgtggaaaaaccttcaaccgaaattcatccttaattttgcaccaaagaactcatacaggggaaaaaccatatagatgtaacgaatgtgggaaacccttcactgacatctcccaccttacagtgcatctcagaatccacaccggtgagaagccctatgagtgtagcaaatgtggaaaggctttccgggacggctcgtacctcacccagcatgagaggactcacactggagaaaagccctttgagtgtgcagagtgcgggaaatccttcaacagaaactctcacctcattgtgcatcaaaagatccattctggggagaaaccctatgaatgtaaagaatgtggcaagactttcatcgagagtgcgtacctcatcaggcatcagaggattcatactggcgagaagccctatggctgcaaccagtgtcagaaacttttcaggaatatcgctggcctcattaggcaccagaggactcatactggtgagaagccctatgagtgtaatcagtgtggcaaagccttcagggacagctcctgtctgaccaagcaccagagaattcacactaaggagaccccatatcagtgtccagaatgtgggaagtccttcaagcagaactctcacctggcagtacatcagagactccatagcagggagggtcccagccggtgtcctcagtgtggaaaaatgttccaaaagagctcatcccttgttcgacatcaaagagcacacctgggagagcaacccatggaaacataatggttgggggccacatgagtcttccagttcactctcactcctgtgtttaggaggcgtgtcttagatctgactcctctctggtcagtagaaaagaatcctttaagctatccagtgaattgatgaatgtgagacattgctgagccacactgttaagtctgctcattggggaactccagagacaacttaggatgagggcagaaaagtctttggggatgattcagtctgtaccagacatgacaacacacacactggaatgaaatgtgcaaacatgggggtgacaccacagagagaacctgtgaatgcattcagaacatgattggaatgaagagccctgtagtagggagtttccaccttgtacgtaagcaaacactgaatcaacttttttttttttttcggacagagtctcactgtgcagtggcatgatctccactcacagcaacctctgcctcccaggttcaagcagttctcctgcctcagcctccaaagtagctaggattacaggtgcctgccaccatgcctggctaattttttctatttttagtagagacagggtttcactgtgttggccaggctggtcttgaactcctgacctcatgatccgcccacctcagcctcccaaagtgttgggattacaggcatgagacactgcctggcctgaatcaaccttttttaagtgtaatcagaaagagaggctttggcaggggctcttactgtgttttctgtaacaacaaaggtgtacaatgagagagtccacacagtgctgtactgcacacaccacagaatgtgtgagattttcctgtttgaatgtatgtctgcattatactcctgcaataatgctgaggactcgttgcaggagggcaaactaggtgaataaattacctgtgaatgaacaatgaagtcgttcctcttaagactgaaacaagcaggccagatgtggtggctcacgcctgtaatcctagcactttgggaggccgaggcggccagatcacaaggttaggagttcaagaccagcctggccagcatggtgaaaccccatctctaccaaaaatacaggaaattatctgggcatagtagtgtgtgcctgtaatcccagctacttgggaagctgaggcaggagaattgcttgaacctgggaggtggaggttgcagtgagctaagatcgcaccactgcactccagcctgggtgacagagcgagactccatttcaaaaaaaaagactgaaacaagcttgtgctaagatggaaagggctgcttctaacagatgtggtttgttgctttagttgttgaagcaaaaatactgagttgttatgtttatgttatcaccccaccactacctccatggttgttcatttaggatgcttctaattcagccactgtgaaccattataaaggttttattgccatgttgaaaatgtttataatatggcaaaaaggggcatcaaatagaagatttactattattccagccatgtaaaaatatgtgcacatatggatgtatgttgaaagtggatgatggagaaataaaatgtggttttctttggggactgg

SEQ ID NO: 202152 - DNA, 3091 bp, Homo sapiens
  Payload ID: 19878
  Gene Name: zinc finger protein 329
  Uniprot ID: Q86UD4
  ENST ID: ENST00000500161
  CDS Start-End: 584-2209
atgcgcaatggagggtccggcgtccgccttggcgggtgggagtgatgacctgcactccccaaaccactgcgggatagaacggggccgagtgctctcaggggtggccgctaccggggcggcccgagacacggctgcgggttccagccaacaggcccggagtcgcggcctcggctccgccgtgggtgcacgggctagggctgcggggactcctgtgggctccgcgtctgcggctgggaggaatggggatcgtccccagatcccgccttccgggcagggcctccgctgcctgcgatcctgcccacagtccaaggatcctcctcgcctctcgcggactgcggtgtcagccgcccgagccgttccccggacacctggccagggtcttgctgtctcacccaggctggagtgcagtggcacgatcacagctcactgcagccttgagctcctgggctaccaagtagctgggacttcagagatggctggagccgtgtggatgggcataaatggctaatgtccagcaaccatcgatgtcaagtatccacacacctggcctgaatggatccctctgcctttcagagtttgggatatgagattgaaaatgacgactcggaattttcctgagagagaagtaccctgtgatgtagaagtggaaagattcacaagggaagttccctgcttgtccagtttaggtgatggttgggactgtgagaaccaggagggacacttgaggcaatcagctttaactctggagaaaccagggactcaggaagcaatttgtgaatatcctggttttggggagcatttgattgcaagctcagaccttccaccgtctcagagagttctggcaacaaatggtttccatgcacctgactcaaatgttagtggtctggattgtgaccccgccttacccagctatcctaaaagttatgcagataagagaactggtgacagtgatgcctgtggaaaaggcttcaaccattccatggaagttattcatggaagaaatccagtgagagagaagccctacaaataccctgaaagtgttaagtcttttaatcattttacctctcttggtcatcagaaaataatgaaaagaggcaagaaatcgtatgaaggtaagaattttgagaacatctttactctgagctcatcgcttaatgaaaaccagagaaatctccctggagagaaacaatatagatgtactgaatgtggcaaatgcttcaaacggaactcttctcttgttttgcatcaccgaactcacaccggagagaagccttatacttgtaatgagtgtggaaagtccttctccaagaactacaacctgattgtgcatcaaagaatccacacaggagagaagccctatgaatgcagtaaatgtgggaaagctttcagtgatggctcagctctgacacagcaccagagaattcacacaggcgagaaaccttatgaatgcctagagtgtggaaaaaccttcaaccgaaattcatccttaattttgcaccaaagaactcatacaggggaaaaaccatatagatgtaacgaatgtgggaaacccttcactgacatctcccaccttacagtgcatctcagaatccacaccggtgagaagccctatgagtgtagcaaatgtggaaaggctttccgggacggctcgtacctcacccagcatgagaggactcacactggagaaaagccctttgagtgtgcagagtgcgggaaatccttcaacagaaactctcacctcattgtgcatcaaaagatccattctggggagaaaccctatgaatgtaaagaatgtggcaagactttcatcgagagtgcgtacctcatcaggcatcagaggattcatactggcgagaagccctatggctgcaaccagtgtcagaaacttttcaggaatatcgctggcctcattaggcaccagaggactcatactggtgagaagccctatgagtgtaatcagtgtggcaaagccttcagggacagctcctgtctgaccaagcaccagagaattcacactaaggagaccccatatcagtgtccagaatgtgggaagtccttcaagcagaactctcacctggcagtacatcagagactccatagcagggagggtcccagccggtgtcctcagtgtggaaaaatgttccaaaagagctcatcccttgttcgacatcaaagagcacacctgggagagcaacccatggaaacataatggttgggggccacatgagtcttccagttcactctcactcctgtgtttaggaggcgtgtcttagatctgactcctctctggtcagtagaaaagaatcctttaagctatccagtgaattgatgaatgtgagacattgctgagccacactgttaagtctgctcattggggaactccagagacaacttaggatgagggcagaaaagtctttggggatgattcagtctgtaccagacatgacaacacacacactggaatgaaatgtgcaaacatgggggtgacaccacagagagaacctgtgaatgcattcagaacatgattggaatgaagagccctgtagtagggagtttccaccttgtacgtaagcaaacactgaatcaacttttttttttttttcggacagagtctcactgtgcagtggcatgatctccactcacagcaacctctgcctcccaggagaattgcttgaacctgggaggtggaggttgcagtgagctaagatcgcaccactgcactccagcctgggtgacagagcgagactccatttcaaaaaaaaagactgaaacaagcttgtgctaagatggaaagggctgcttctaacagatgtggtttgttgctttagttgttgaagcaaaaatactgagttgttatgtttatgttatcaccccaccactacctccatggttgttcatttaggatgcttctaattcagccactgtgaaccattataaaggttttattgccatgttgaaaatgtttataatatggcaaaaaggggcatcaaatagaagatttactattattccagccatgtaaaaatatgtgcacatatggatgtatgttgaaagtggatgatggagaaataaaatgtggttttctttgggg

SEQ ID NO: 202153 - DNA, 3410 bp, Homo sapiens
  Payload ID: 19878
  Gene Name: zinc finger protein 329
  Uniprot ID: Q86UD4
  ENST ID: ENST00000598312
  CDS Start-End: 235-1860
gaacatggctgccgccggccgccaaccggtcttgctgtctcacccaggctggagtgcagtggcacgatcacagctcactgcagccttgagctcctgggctaccaagtagctgggacttcagagatggctggagccgtgtggatgggcataaatggctaatgtccagcaaccatcgatgtcaagtatccacacacctggcctgaatggatccctctgcctttcagagtttgggatatgagattgaaaatgacgactcggaattttcctgagagagaagtaccctgtgatgtagaagtggaaagattcacaagggaagttccctgcttgtccagtttaggtgatggttgggactgtgagaaccaggagggacacttgaggcaatcagctttaactctggagaaaccagggactcaggaagcaatttgtgaatatcctggttttggggagcatttgattgcaagctcagaccttccaccgtctcagagagttctggcaacaaatggtttccatgcacctgactcaaatgttagtggtctggattgtgaccccgccttacccagctatcctaaaagttatgcagataagagaactggtgacagtgatgcctgtggaaaaggcttcaaccattccatggaagttattcatggaagaaatccagtgagagagaagccctacaaataccctgaaagtgttaagtcttttaatcattttacctctcttggtcatcagaaaataatgaaaagaggcaagaaatcgtatgaaggtaagaattttgagaacatctttactctgagctcatcgcttaatgaaaaccagagaaatctccctggagagaaacaatatagatgtactgaatgtggcaaatgcttcaaacggaactcttctcttgttttgcatcaccgaactcacaccggagagaagccttatacttgtaatgagtgtggaaagtccttctccaagaactacaacctgattgtgcatcaaagaatccacacaggagagaagccctatgaatgcagtaaatgtgggaaagctttcagtgatggctcagctctgacacagcaccagagaattcacacaggcgagaaaccttatgaatgcctagagtgtggaaaaaccttcaaccgaaattcatccttaattttgcaccaaagaactcatacaggggaaaaaccatatagatgtaacgaatgtgggaaacccttcactgacatctcccaccttacagtgcatctcagaatccacaccggtgagaagccctatgagtgtagcaaatgtggaaaggctttccgggacggctcgtacctcacccagcatgagaggactcacactggagaaaagccctttgagtgtgcagagtgcgggaaatccttcaacagaaactctcacctcattgtgcatcaaaagatccattctggggagaaaccctatgaatgtaaagaatgtggcaagactttcatcgagagtgcgtacctcatcaggcatcagaggattcatactggcgagaagccctatggctgcaaccagtgtcagaaacttttcaggaatatcgctggcctcattaggcaccagaggactcatactggtgagaagccctatgagtgtaatcagtgtggcaaagccttcagggacagctcctgtctgaccaagcaccagagaattcacactaaggagaccccatatcagtgtccagaatgtgggaagtccttcaagcagaactctcacctggcagtacatcagagactccatagcagggagggtcccagccggtgtcctcagtgtggaaaaatgttccaaaagagctcatcccttgttcgacatcaaagagcacacctgggagagcaacccatggaaacataatggttgggggccacatgagtcttccagttcactctcactcctgtgtttaggaggcgtgtcttagatctgactcctctctggtcagtagaaaagaatcctttaagctatccagtgaattgatgaatgtgagacattgctgagccacactgttaagtctgctcattggggaactccagagacaacttaggatgagggcagaaaagtctttggggatgattcagtctgtaccagacatgacaacacacacactggaatgaaatgtgcaaacatgggggtgacaccacagagagaacctgtgaatgcattcagaacatgattggaatgaagagccctgtagtagggagtttccaccttgtacgtaagcaaacactgaatcaacttttttttttttttcggacagagtctcactgtgcagtggcatgatctccactcacagcaacctctgcctcccaggttcaagcagttctcctgcctcagcctccaaagtagctaggattacaggtgcctgccaccatgcctggctaattttttctatttttagtagagacagggtttcactgtgttggccaggctggtcttgaactcctgacctcatgatccgcccacctcagcctcccaaagtgttgggattacaggcatgagacactgcctggcctgaatcaaccttttttaagtgtaatcagaaagagaggctttggcaggggctcttactgtgttttctgtaacaacaaaggtgtacaatgagagagtccacacagtgctgtactgcacacaccacagaatgtgtgagattttcctgtttgaatgtatgtctgcattatactcctgcaataatgctgaggactcgttgcaggagggcaaactaggtgaataaattacctgtgaatgaacaatgaagtcgttcctcttaagactgaaacaagcaggccagatgtggtggctcacgcctgtaatcctagcactttgggaggccgaggcggccagatcacaaggttaggagttcaagaccagcctggccagcatggtgaaaccccatctctaccaaaaatacaggaaattatctgggcatagtagtgtgtgcctgtaatcccagctacttgggaagctgaggcaggagaattgcttgaacctgggaggtggaggttgcagtgagctaagatcgcaccactgcactccagcctgggtgacagagcgagactccatttcaaaaaaaaagactgaaacaagcttgtgctaagatggaaagggctgcttctaacagatgtggtttgttgctttagttgttgaagcaaaaatactgagttgttatgtttatgttatcaccccaccactacctccatggttgttcatttaggatgcttctaattcagccactgtgaaccattataaaggttttattgccatgttgaaaatgtttataatatggcaaaaaggggcatcaaatagaagatttactattattccagccatgtaaaaatatgtgcacatatggatgtatgttgaaagtggatgatggagaaataaaatgtggttttctttggggactggaa

SEQ ID NO: 202154 - DNA, 3930 bp, Homo sapiens
  Payload ID: 19878
  Gene Name: zinc finger protein 329
  Uniprot ID: Q86UD4
  ENST ID: ENST00000597186
  CDS Start-End: 679-2304
aatcgcccggaacatggctgccgccggccgccaaccggtcttgctgtctcacccaggctggagtgcagtggcacgatcacagctcactgcagccttgagctcctgggctaccaagtagctgggacttcagagatggctggagccgtgtggatgggcataaatggctaatgtccagcaaccatcgatgtcaagtatccacacacctggcctgaatggatccctctgcctttcagagacggagtctcgctctgtcccccaggctggagtgcaatggtataatcttgtctcactgcaacctctgcctcctaggctcaagcgattctcctacctcagcctcccgagtagctgggattacatgcatgcgccaccgcgtccagctaatttttgtatttttagtagagacatagttgcccaggctggtcttgaactcctgaccttaggtgatccacctgcctcagcctcccaaagtgctgggattacaggcgtgagccactgtgcctggcttaatttttgtatttttagtggaggtggggtttcaccatgttagtcaggctggtctcgaactcctgagctcaggtgatccacccacctcagcctcccaaactgctggaattataggcgtgagccaccgcgcctgcccccagtttatgttttcacagctgccactaagtttgggatatgagattgaaaatgacgactcggaattttcctgagagagaagtaccctgtgatgtagaagtggaaagattcacaagggaagttccctgcttgtccagtttaggtgatggttgggactgtgagaaccaggagggacacttgaggcaatcagctttaactctggagaaaccagggactcaggaagcaatttgtgaatatcctggttttggggagcatttgattgcaagctcagaccttccaccgtctcagagagttctggcaacaaatggtttccatgcacctgactcaaatgttagtggtctggattgtgaccccgccttacccagctatcctaaaagttatgcagataagagaactggtgacagtgatgcctgtggaaaaggcttcaaccattccatggaagttattcatggaagaaatccagtgagagagaagccctacaaataccctgaaagtgttaagtcttttaatcattttacctctcttggtcatcagaaaataatgaaaagaggcaagaaatcgtatgaaggtaagaattttgagaacatctttactctgagctcatcgcttaatgaaaaccagagaaatctccctggagagaaacaatatagatgtactgaatgtggcaaatgcttcaaacggaactcttctcttgttttgcatcaccgaactcacaccggagagaagccttatacttgtaatgagtgtggaaagtccttctccaagaactacaacctgattgtgcatcaaagaatccacacaggagagaagccctatgaatgcagtaaatgtgggaaagctttcagtgatggctcagctctgacacagcaccagagaattcacacaggcgagaaaccttatgaatgcctagagtgtggaaaaaccttcaaccgaaattcatccttaattttgcaccaaagaactcatacaggggaaaaaccatatagatgtaacgaatgtgggaaacccttcactgacatctcccaccttacagtgcatctcagaatccacaccggtgagaagccctatgagtgtagcaaatgtggaaaggctttccgggacggctcgtacctcacccagcatgagaggactcacactggagaaaagccctttgagtgtgcagagtgcgggaaatccttcaacagaaactctcacctcattgtgcatcaaaagatccattctggggagaaaccctatgaatgtaaagaatgtggcaagactttcatcgagagtgcgtacctcatcaggcatcagaggattcatactggcgagaagccctatggctgcaaccagtgtcagaaacttttcaggaatatcgctggcctcattaggcaccagaggactcatactggtgagaagccctatgagtgtaatcagtgtggcaaagccttcagggacagctcctgtctgaccaagcaccagagaattcacactaaggagaccccatatcagtgtccagaatgtgggaagtccttcaagcagaactctcacctggcagtacatcagagactccatagcagggagggtcccagccggtgtcctcagtgtggaaaaatgttccaaaagagctcatcccttgttcgacatcaaagagcacacctgggagagcaacccatggaaacataatggttgggggccacatgagtcttccagttcactctcactcctgtgtttaggaggcgtgtcttagatctgactcctctctggtcagtagaaaagaatcctttaagctatccagtgaattgatgaatgtgagacattgctgagccacactgttaagtctgctcattggggaactccagagacaacttaggatgagggcagaaaagtctttggggatgattcagtctgtaccagacatgacaacacacacactggaatgaaatgtgcaaacatgggggtgacaccacagagagaacctgtgaatgcattcagaacatgattggaatgaagagccctgtagtagggagtttccaccttgtacgtaagcaaacactgaatcaacttttttttttttttcggacagagtctcactgtgcagtggcatgatctccactcacagcaacctctgcctcccaggttcaagcagttctcctgcctcagcctccaaagtagctaggattacaggtgcctgccaccatgcctggctaattttttctatttttagtagagacagggtttcactgtgttggccaggctggtcttgaactcctgacctcatgatccgcccacctcagcctcccaaagtgttgggattacaggcatgagacactgcctggcctgaatcaaccttttttaagtgtaatcagaaagagaggctttggcaggggctcttactgtgttttctgtaacaacaaaggtgtacaatgagagagtccacacagtgctgtactgcacacaccacagaatgtgtgagattttcctgtttgaatgtatgtctgcattatactcctgcaataatgctgaggactcgttgcaggagggcaaactaggtgaataaattacctgtgaatgaacaatgaagtcgttcctcttaagactgaaacaagcaggccagatgtggtggctcacgcctgtaatcctagcactttgggaggccgaggcggccagatcacaaggttaggagttcaagaccagcctggccagcatggtgaaaccccatctctaccaaaaatacaggaaattatctgggcatagtagtgtgtgcctgtaatcccagctacttgggaagctgaggcaggagaattgcttgaacctgggaggtggaggttgcagtgagctaagatcgcaccactgcactccagcctgggtgacagagcgagactccatttcaaaaaaaaagactgaaacaagcttgtgctaagatggaaagggctgcttctaacagatgtggtttgttgctttagttgttgaagcaaaaatactgagttgttatgtttatgttatcaccccaccactacctccatggttgttcatttaggatgcttctaattcagccactgtgaaccattataaaggttttattgccatgttgaaaatgtttataatatggcaaaaaggggcatcaaatagaagatttactattattccagccatgtaaaaatatgtgcacatatggatgtatgttgaaagtggatgatggagaaataaaatgtggttttctttggggactggaattttgtatcatatttttttctctgttacagatacttgttggcataataatttggtaataaattaaaaagtgaagcc

SEQ ID NO: 202155 - DNA, 469 bp, Homo sapiens
  Payload ID: 19878
  Gene Name: zinc finger protein 329
  ENST ID: ENST00000601887
  CDS Start-End: 342-469
gatgacctgcactccccaaaccactgcgggatagaacggggccgagtgctctcaggggtggccgctaccggggcggcccgagacacggctgcgggttccagccaacaggcccggagtcgcggcctcggctccgccgtgggtgcacgggctagggctgcggggactcctgtgggctccgcgtctgcggctgggaggaatggggatcgtccccagatcccgccttccgggcagggcctccgctgcctgcgatcctgcccacagtccaaggatcctcctcgcctctcgcggactgcggtgtcagccgcccgagccgttccccggacacctggccagtttgggatatgagattgaaaatgacgactcggaattttcctgagagagaagtaccctgtgatgtagaagtggaaagattcacaagggaagttccctgcttgtccagtttaggtgatggttgggactgtgagaacca

SEQ ID NO: 202156 - DNA, 1899 bp, Homo sapiens
  Payload ID: 19879
  Gene Name: zinc finger protein 330
  Uniprot ID: Q9Y3S2
  ENST ID: ENST00000262990
  CDS Start-End: 229-1191
aaggcgctgctgtcgtaaaaggacgtccggtccgtctcctagtgtccggaatcggctgtcagcctccctggctgttagtaccttctttcccggagtcctggtccacgagttggatttactgctgtcgcgggtgggcctcacgccattccctgtccctcggccccctgagtgagtccggtctcccggcgaaagtgagcgaggtttgcccggagcgcgcacgaggggaaaatgcctaaaaaaaagactggtgcgaggaagaaggctgagaaccgccgagaacgtgaaaaacaactaagagcatcaagaagcactatagatttagctaaacatccatgtaatgcctcaatggaatgtgacaagtgtcagaggcggcagaagaatagagcattttgctacttttgtaattctgtacagaagttaccaatttgtgcacagtgtgggaaaacaaagtgcatgatgaagtcttcagactgtgtcataaagcatgctggtgtatacagtactggccttgcaatggtgggtgcaatatgtgacttctgtgaagcttgggtttgccatggtaggaaatgtctcagtacacatgcttgtgcctgccctcttaccgatgctgagtgtgttgaatgtgaacgaggcgtgtgggaccatggaggcagaatattcagttgttctttttgccataactttctctgtgaagatgatcaatttgagcatcaagccagctgccaggttttagaggcagaaacatttaaatgtgtttcatgcaatcggcttggtcagcactcatgtctccgttgtaaggcttgtttctgtgatgatcatacaaggagcaaagtgtttaagcaagaaaaaggaaaacagcctccttgtcctaaatgtgggcatgaaactcaggagactaaggaccttagcatgtcaacacgctccctgaaatttggcaggcagactggaggtgaagagggagatggagcttctgggtatgatgcttattggaagaacctttcatctgataagtatggtgataccagctaccacgatgaggaggaggatgagtatgaagcagaggatgatgaagaggaagaagatgaaggcagaaaggattcagatactgagtcatcagatttgtttactaatttgaatttaggaaggacctatgctagtggctatgctcactatgaggaacaagagaactaggggagctgctctggtggccgtgtgtgagaggagcaggagtgagtgtgtgtgcttgatgaattgtgtgtggttgttcaaaagtaccttagccacttagccttgtgcagaagactagttacacttaatgggccaagcaatagggtgtagcgtttttatagaactgataatcaggcttatggcataagaaaaatgagtttcaaatttaagatgtttattgatcgaagcaattgaagtatcatggattggattgttactgatttcagtaaagtatgttttgccaattagatacatatatacaagataaaggaataggatggtaatatatttgtttgaaattaaattactgtttttattaaaaaatactgcttcattgggctgattttgtaaaatgtaatgagtaaaatgaattactgtatttttccttttatgtccacagaatgagagtcatatgttgttatattctaaattttcattaaatattcatgtcaccttgagttgtcatgataagtatgttttagtatttgacttattcttctctttcttcacaatgtatgtcctcagtggtacctattattgatgccttaaatgtattgataaggtgactagttagccatttttcagagatacagtatcagaaatagtattattacagaagctttacccaggacattttatttctctttgaataaatctattatttcacttaaa

SEQ ID NO: 202157 - DNA, 552 bp, Homo sapiens
  Payload ID: 19879
  Gene Name: zinc finger protein 330
  ENST ID: ENST00000512738
  CDS Start-End: 94-552
gtccggaatcggctgtcagcctccctggctgttagtaccttctttcccggagtcctggtccacgagttggatttactgctgtcgcgggggaaaatgcctaaaaaaaagactggtgcgaggaagaaggctgagaaccgccgagaacgtgaaaaacaactaagagcatcaagaagcactatagatttagctaaacatccatgtaatgcctcaatggaatgtgacaagtgtcagaggcggcagaagaatagagcattttgctacttttgtaattctgtacagaagttaccaatttgtgcacagtgtgggaaaacaaagtgcatgatgaagtcttcagactgtgtcataaagcatgctggtgtatacagtactggccttgcaatggtgggtgcaatatgtgacttctgtgaagcttgggtttgccatggtaggaaatgtctcagtacacatgcttgtgcctgccctcttaccgatgctgagtgtgttgaatgtgaacgaggcgtgtgggaccatggaggcagaatattcagttgttctttttgccataactttctc

SEQ ID NO: 202158 - DNA, 836 bp, Homo sapiens
  Payload ID: 19879
  Gene Name: zinc finger protein 330
  ENST ID: ENST00000507532
  CDS Start-End: 216-323
cgtaaaaggacgtccggtccgtctcctagtgtccggaatcggctgtcagcctccctggctgttagtaccttctttcccggagtcctggtccacgagttggatttactgctgtcgcgggtgggcctcacgccattccctgtccctcggccccctgagtgagtccggtctcccggcgaaagtgagcgaggtttgcccggagcgcgcacgaggggaaaatgcctaaaaaaaagactggtgcgaggaagaaggctgagaaccgccgagaacgtgaaaaacaactaagagcatcaagaagcactatagatttagctaaacatccatgaatgtgacaagtgtcagaggcggcagaagaatagagcattttgctacttttgtaattctgtacagaagttaccaatttgtgcacagtgtgggaaaacaaagtgcatgatgaagtcttcagactgtgtcataaagcatgctggtgtatacagtactggccttgcaatggtgggtgcaatatgtgacttctgtgaagcttgggtttgccatggtaggaaatgtctcagtacacatgcttgtgcctgccctcttaccgatgctgagtgtgttgaatgtgaacgaggcgtgtgggaccatggaggcagaatattcagttgttctttttgccataactttctctgtgaagatgatcaatttgagcatcaagccagctgccaggttttagaggcagaaacatttaaatgtgtttcatgcaatcggcttggtcagcactcatgtctccgttgtaaggcttgtttctgtgatgatcatacaaggagcaaagtgtttaagcaagaaaaaggaaaacagcctcc

SEQ ID NO: 202159 - DNA, 838 bp, Homo sapiens
  Payload ID: 19879
  Gene Name: zinc finger protein 330
  ENST ID: ENST00000512809
  CDS Start-End: 151-838
gtccggtccgtctcctagtgtccggaatcggctgtcagcctccctggctgttagtaccttctttcccggagtcctggtccacgagttggatttactgctgtcgcgggtgggcctcacgccattccctgtccctcggccccctgagggaaaatgcctaaaaaaaagactggtgcgaggaagaaggctgagaaccgccgagaacgtgaaaaacaactaagagcatcaagaagcactatagatttagctaaacatccatgtaatgcctcaatggaatgtgacaagtgtcagaggcggcagaagaatagagcattttgctacttttgtaattctgtacagaagttaccaatttgtgcacagtgtgggaaaacaaagtgcatgatgaagtcttcagactgtgtcataaagcatgctggtgtatacagtactggccttgcaatggtgggtgcaatatgtgacttctgtgaagcttgggtttgccatggtaggaaatgtctcagtacacatgcttgtgcctgccctcttaccgatgctgagtgtgttgaatgtgaacgaggcgtgtgggaccatggaggcagaatattcagttgttctttttgccataactttctctgtgaagatgatcaatttgagcatcaagccagctgccaggttttagaggcagaaacatttaaatgtgtttcatgcaatcggcttggtcagcactcatgtctccgttgtaaggcttgtttctgtgatgatcatacaaggagcaaagtgtttaagcaagaaaaaggaaaacagcctccttgtcctaaatgtgggcatgaaactcaggagactaaggaccttagcatgtcaa

SEQ ID NO: 202160 - DNA, 573 bp, Homo sapiens
  Payload ID: 19879
  Gene Name: zinc finger protein 330
  ENST ID: ENST00000503649
  CDS Start-End: 155-573
gtccggaatcggctgtcagcctccctggctgttagtaccttctttcccggagtcctggtccacgagttggatttactgctgtcgcgggtgggcctcacgccattccctgtccctcggccccctgagtgagtccggtctcccggcgaaagggaaaatgcctaaaaaaaagactggtgcgaggaagaaggctgagaaccgccgagaacgtgaaaaacaactaagagcatcaagaagcactatagatttagctaaacatccatgtaatgcctcaatggaatgtgacaagtgtcagaggcggcagaagaatagagcattttgctacttttgtaattctgtacagaagttaccaatttgtgcacagtgtgggaaaacaaagtgcatgatgaagtcttcagactgtgtcataaagcatgctggtgtatacagtactggccttgcaatggtgggtgcaatatgtgacttctgtgaagcttgggtttgccatggtaggaaatgtctcagtacacatgcttgtgcctgccctcttaccgatgctgagtgtgttgaatgtgaacgaggcgtgtgggaccatgg

SEQ ID NO: 202161 - DNA, 558 bp, Homo sapiens
  Payload ID: 19879
  Gene Name: zinc finger protein 330
  ENST ID: ENST00000515453
  CDS Start-End: 188-313
gtgtccggaatcggctgtcagcctccctggctgttagtaccttctttcccggagtcctggtccacgagttggatttactgctgtcgcgggtgggcctcacgccattccctgtccctcggccccctgagtgagtccggtctcccggcgaaagtgagcgaggtttgcccggagcgcgcacgaggggaaaatgcctaaaaaaaagactggtgcgaggaagaaggctgagaaccgccgagaacgtgaaaaacaactaagagcatcaagaagcactatagatttagctaaacatccatgtaatgcctcaatggactaagaggtgataaagttggctgtgtgtggaaggggtacacttcacagaagaggtgggattttcaccagaactttcaacaggtaggaggcacttttcagggaaaagtgttcgaataagtaaagacatggagaagagagaatataagacatatttggagaatggctgaccattagtgacttgagtctaaaaagaataggccaagaaggtttggaaagtgattaggggccagattgtggagagcttttaaa

SEQ ID NO: 202162 - DNA, 1180 bp, Homo sapiens
  Payload ID: 19879
  Gene Name: zinc finger protein 330
  ENST ID: ENST00000506302
  CDS Start-End: 182-415
ggaatcggctgtcagcctccctggctgttagtaccttctttcccggagtcctggtccacgagttggatttactgctgtcgcgggtgggcctcacgccattccctgtccctcggccccctgagtgagtccggtctcccggcgaaagtgagcgaggtttgcccggagcgcgcacgaggggaaaatgcctaaaaaaaagactggtgcgaggaagaaggctgagaaccgccgagaacgtgaaaaacaactaagagcatcaagaagcactatagatttagctaaacatccatgtaatgcctcaatggaatgtgacaagtgtcagagggaaaacaaagtgcatgatgaagtcttcagactgtgtcataaagcatgctggtgtatacagtactggccttgcaatggtgggtgcaatatgtgacttctgtgaagcttgggtttgccatggtaggaaatgtctcagtacacatgcttgtgcctgccctcttaccgatgctgagtgtgttgaatgtgaacgaggcgtgtgggaccatggaggcagaatattcagttgttctttttgccataactttctctgtgaagatgatcaatttgagcatcaagccagctgccaggttttagaggcagaaacatttaaatgtgtttcatgcaatcggcttggtcagcactcatgtctccgttgtaaggcttgtttctgtgatgatcatacaaggagcaaagtgtttaagcaagaaaaaggaaaacagcctccttgtcctaaatgtgggcatgaaactcaggagactaaggaccttagcatgtcaacacgctccctgaaatttggcaggcagactggaggtgaagagggagatggagcttctgggtatgatgcttattggaagaacctttcatctgataagtatggtgataccagctaccacgatgaggaggaggatgagtatgaagcagaggatgatgaagaggaagaagatgaaggcagaaaggattcagatactgagtcatcagatttgtttactaatttgaatttaggaaggacctatgctagtggctatgctcactatgaggaacaagagaactaggggagctgctctggtggccgtgtgtgagaggagcaggagtgagtgtgtgtgcttgatgaattgtgtgtggttgttcaaaagtaccttagccacttagccttgtgcag

SEQ ID NO: 202163 - DNA, 5042 bp, Homo sapiens
  Payload ID: 19880
  Gene Name: zinc finger protein 331
  Uniprot ID: Q9NQX6
  ENST ID: ENST00000253144
  CDS Start-End: 1334-2725
ggggcacagtccaatgaggagcgagccgggtggccggctgaggggcgtgcttcatgctcgcgggatttttaaaaatggtttctcctggatcttatcccaactgcgcctgagaccttgtttcacctcctgatgtgctgggtgtggttaggcctcgagccgggagctatttgcctcccaggaggaagccagggcagggttccgcggggaatggcggtgagggagccactcgggacgcggaggccctaaaatgaagaagcttcggcctgaggcttcgggagcggcgagcagggaagtgggagtgtgtgtgagtgtgtgtgtgtgtgtgtgtgtgtgtgtgtgaataagccagaggctgcctggtggggccccgccgtggcccagtgactgagataattgtcttcgtctgtggggtaatgcgaacaagccccgttcccctaagccgtgatgcatgcggggttgacgcggccgggctctgtccccataaactgtgacacaggtgtgtgtagacgtctatgagggccatagcgccgggctgtaagggcatctgtaggggtgacgcagccgggctgtgtctctgcacctccgttctgtgcgaggtcaatgctggtggggtctgcagaggtggcacggccaggacgggtctccgtgtctctgaaatgtgcctttgcacttctgtcaggttgacagggacaggcagtgtccctctggtgtgagcgtctgtgggtgtgaaagggccagcgagtgtgcggctgtgactggtcgggatcgggcctgggtgcatggccttttgagtgagcacaggtgtgtgcgaccatgtcacctgtctttctagtgtctccgttgcttcctgtgccttggccttccagccatgtggtacctgctagggagcagtggtcccaaagtgacgtgagaggctctacgctattgtgaaaatgaccaagaagaaggcttcacaagtcacgagatggcagttttggagccagaagtgctctccgtgcacactacctggacgacaagaggaagtaacctcaagaatagaattccttttggggaagaaagagctggccttcaggaaaagcatcccggaggaggaagaagaagtgttatatgtcctaaagtaaggtttcaggccagcatccttcagaaaaagcatccccgaggaggaagacgaatcgttaaacatctgaaagggtcaggccagcatccttcagaaaaagcatccccgaggaggaagacgaatcgttaaacatcttaggtcagctctagcctctcggaatttgtcttcttcagtggaaaccccgagaagactgatcagttcttcagttctaaaacaatggcccagggtttggtgacgttcgccgacgtagccatagacttttctcaggaggagtgggcctgtctgaactctgctcagagggacctgtactgggacgtgatgctggagaactacagtaacttggtctcactggatttggagtcagcatatgaaaataagagtttacctacagaaaaaaacattcatgaaataagggcttccaaaaggaattcagatagaagaagtaaatcccttggccgtaactggatatgtgaaggtacgcttgaaagaccacagcgctccagagggaggtatgtcaatcagatgatcatcaattatgtcaaaagacctgctactagagaaggcacccctcctagaacacatcagagacatcataaggagaattcctttgaatgtaaggactgtgggaaggcctttagtcgtggctatcaacttagtcaacatcagaaaatccatactggtgagaaaccttatgaatgtaaagaatgtaagaaggccttccgttggggcaatcagcttactcaacatcaaaaaattcatactggggagaagccctacgaatgtaaagactgtgggaaggcttttcgatggggctcaagcctcgttattcataagaggattcatactggtgaaaaaccctatgaatgtaaagactgtggaaaggcctttcggcgtggtgatgagctcactcagcaccagagattccacactggggagaaagactacgaatgcaaagactgtgggaagacctttagccgtgtgtataaacttattcagcacaagagaattcatagtggggagaagccttacgagtgtaaagactgtgggaaggcttttatttgtggttcaagcctcattcagcataaaagaattcacacaggtgagaaaccctatgaatgtcaagaatgtgggaaggcctttactcgagtcaattaccttactcagcatcagaagatccacaccggtgagaagcctcacgaatgtaaggagtgtgggaaggcctttcgctggggttcgagcctcgttaagcacgagaggatacatacgggcgagaagccgtacaagtgcacagaatgtgggaaggccttcaattgtggctatcacctcactcagcacgagagaatccacacaggcgaaaccccgtataaatgtaaggagtgtgggaaggctttcatttatggatcgagcctcgtgaaacatgagagaattcataccggggtgaaaccctatgggtgtacagaatgtgggaagagctttagtcacggccatcagcttacacaacatcagaaaacgcacagtggggcgaaatcctacgaatgtaaggagtgcgggaaggcatgtaaccacctaaaccatctccgagaacatcagaggatccacaacagttgaagagccttttgaacgcagtagcccgctcgtatctatggtttcgctttccacagtttgttacctgcagtcaactgcagttcaaaaatattaaatggaaaattccagaaataaagaattttaagtctcaaatggtgtgcccttctgagtagcgtgatgaaatctctcgctgtccggctccagccggccggggatgtgagtcatcccttggtccagcacatccacgctgtatacgccacccaccctgctagtgacttagtagccgtcttggtgatcagatcaactatcccagcatcacagtgcctgtgcccaagcagtcctcactttgcttaacagtggccccagagagcaggagtagtgatgctggtgattcggatatgccaaagagaagccacaaagtgcttccttttaaatgaaaaggtgaaagttctcaacttaaaaaagaaaagaaaaaaatcatatactgaggttgctaagatctacatgacaataagatattttgggagagagatacgttcacataattttattacatatattgttacaattgttctattttgttagttactgttggtaatctcttactgtgcctaatttataaattaaactttagatatgtatgtacaggaaaaaatgtagtatatagtatcgtatatatgtacaggaaaaaaacgtactatctgtggtttcaggtgtccactgcgggtcttcaaacgtacccccctcaggtgagaggggactgctgtacaaagaatataggaaggcctctagactacatccattccttcctcaacaggaggaaaattcctggtacagtttaacgtaaggcttcactgatcactgttgtttttgtttttgtttttgtttttttgagacagagtctcactcttgcccaggctggagtgcagtggcacggtcttggctcactgcaacctccacctcccaggttccagcaattctcctgcctcagcctccccagtagctgggattacagacatgcaccaccacacctggctaatttttgtatttttagtagagacagttttcaccatgttgtccaggctggtctcaactcctgacctcaggtgatccacccaccttgccctcccaaagtgctaggattacaggcgtgagccactgcacctagcccactgatcactcttctgcttacagaatatcagaagtcattctagaggcaaatttgaagagtggaaaaatcactttttctgaatgatcttgtttttggtgtagatgtttttattgtgtgggttagtttaatgaatacataaagactaccagtaccattctgtctttactccgtggcatctgtggaataaccctgctaatgtaacacgtgagaaagcctttggtcatgccacccactctaccagttgtccccaccatcccccgccctcctccctgtgagacactgggccaaaggctcactacccctgtgcgttgtccagcacacagacactatgtgcattatttgtacataaggataatcacatctacctgagactgctatcatggaaattaaatgtttggtacatgtaaagtctttgaaagtgtaactggaatattgtgtaattttaataaataataactattgttgtttttatgatcattactaccatttgtgttgccattagtgaatttttacaagaaaactccctgtgggtgcaatgagtctggaaaagaccattgagtcttctagaagaaaacattaagagattattggcacagccgtgggttacgcaatgatttcttagtacacaaaacacagcaaacataaaaagttgttacacttcatcaaaagtacaaagttctgttcatcaaatgatgctgttaagatagggaaaagacaagaaacaggactggaagaagatgtttgctctaaggtacacctgacaaaggaactctcatagaaaatataaagaatccctcaagttgaaaaaaaaatcaatttaaaggggagaaaacttcagcacgtctcaacagaagaccaccaaatggccaataagtaagtgaaaatgtattcaatgtcattgctcctcaaggaactgtagagtaaaaccacaatgtgctgtcactctagacagtcaccaggatgattaaatttaaatcacaataacaaggctgatttcagatgtctcaccacaaagaaggaggataagggagcgaggtgatggatatgttaattagcttgatttaatccttccacattgtatacatgtatcagaacatcacattgtactccatcaatataatacaattattatttgtcaatcaaatattaataaaatcaaagatgagcagg

SEQ ID NO: 202164 - DNA, 2248 bp, Homo sapiens
  Payload ID: 19880
  Gene Name: zinc finger protein 331
  Uniprot ID: Q9NQX6
  ENST ID: ENST00000411977
  CDS Start-End: 423-1814
gcggccgctgggtgcgcgtgcgcatgcgcgctggcctccagggggtggcgggaccgagtgtgtgacgcacttgcgtgggagtacgaggctgacgcggcggccctgtccccgtaactgtgacacgggtgcacgcgagcgtcattgggggcgatgggggccgtgctgggtgcgcgtttgcaccagtgacgcagccgctgcatctccgccagtccgcgcaggccagcatccttcagaaaaagcatccccgaggaggaagacgaatcgttaaacatctgaaagggtcaggccagcatccttcagaaaaagcatccccgaggaggaagacgaatcgttaaacatcttaggtcagctctagcctctcggaatttgtcttcttcagtggaaaccccgagaagactgatcagttcttcagttctaaaacaatggcccagggtttggtgacgttcgccgacgtagccatagacttttctcaggaggagtgggcctgtctgaactctgctcagagggacctgtactgggacgtgatgctggagaactacagtaacttggtctcactggatttggagtcagcatatgaaaataagagtttacctacagaaaaaaacattcatgaaataagggcttccaaaaggaattcagatagaagaagtaaatcccttggccgtaactggatatgtgaaggtacgcttgaaagaccacagcgctccagagggaggtatgtcaatcagatgatcatcaattatgtcaaaagacctgctactagagaaggcacccctcctagaacacatcagagacatcataaggagaattcctttgaatgtaaggactgtgggaaggcctttagtcgtggctatcaacttagtcaacatcagaaaatccatactggtgagaaaccttatgaatgtaaagaatgtaagaaggccttccgttggggcaatcagcttactcaacatcaaaaaattcatactggggagaagccctacgaatgtaaagactgtgggaaggcttttcgatggggctcaagcctcgttattcataagaggattcatactggtgaaaaaccctatgaatgtaaagactgtggaaaggcctttcggcgtggtgatgagctcactcagcaccagagattccacactggggagaaagactacgaatgcaaagactgtgggaagacctttagccgtgtgtataaacttattcagcacaagagaattcatagtggggagaagccttacgagtgtaaagactgtgggaaggcttttatttgtggttcaagcctcattcagcataaaagaattcacacaggtgagaaaccctatgaatgtcaagaatgtgggaaggcctttactcgagtcaattaccttactcagcatcagaagatccacaccggtgagaagcctcacgaatgtaaggagtgtgggaaggcctttcgctggggttcgagcctcgttaagcacgagaggatacatacgggcgagaagccgtacaagtgcacagaatgtgggaaggccttcaattgtggctatcacctcactcagcacgagagaatccacacaggcgaaaccccgtataaatgtaaggagtgtgggaaggctttcatttatggatcgagcctcgtgaaacatgagagaattcataccggggtgaaaccctatgggtgtacagaatgtgggaagagctttagtcacggccatcagcttacacaacatcagaaaacgcacagtggggcgaaatcctacgaatgtaaggagtgcgggaaggcatgtaaccacctaaaccatctccgagaacatcagaggatccacaacagttgaagagccttttgaacgcagtagcccgctcgtatctatggtttcgctttccacagtttgttacctgcagtcaactgcagttcaaaaatattaaatggaaaattccagaaataaagaattttaagtctcaaatggtgtgcccttctgagtagcgtgatgaaatctctcgctgtccggctccagccggccggggatgtgagtcatcccttggtccagcacatccacgctgtatacgccacccaccctgctagtgacttagtagccgtcttggtgatcagatcaactatcccagcatcacagtgcctgtgcccaagcagtcctcactttgcttaacagtggccccagagagcaggagtagtgatgctggtgattcggatatgccaaagagaagccacaaagtgcttccttttaaatgaaaaggtgaaagttctcaactt

SEQ ID NO: 202165 - DNA, 3817 bp, Homo sapiens
  Payload ID: 19880
  Gene Name: zinc finger protein 331
  Uniprot ID: Q9NQX6
  ENST ID: ENST00000449416
  CDS Start-End: 109-1500
gttttaccagtgaggaaactttaccacactgtgaactctagcctctcggaatttgtcttcttcagtggaaaccccgagaagactgatcagttcttcagttctaaaacaatggcccagggtttggtgacgttcgccgacgtagccatagacttttctcaggaggagtgggcctgtctgaactctgctcagagggacctgtactgggacgtgatgctggagaactacagtaacttggtctcactggatttggagtcagcatatgaaaataagagtttacctacagaaaaaaacattcatgaaataagggcttccaaaaggaattcagatagaagaagtaaatcccttggccgtaactggatatgtgaaggtacgcttgaaagaccacagcgctccagagggaggtatgtcaatcagatgatcatcaattatgtcaaaagacctgctactagagaaggcacccctcctagaacacatcagagacatcataaggagaattcctttgaatgtaaggactgtgggaaggcctttagtcgtggctatcaacttagtcaacatcagaaaatccatactggtgagaaaccttatgaatgtaaagaatgtaagaaggccttccgttggggcaatcagcttactcaacatcaaaaaattcatactggggagaagccctacgaatgtaaagactgtgggaaggcttttcgatggggctcaagcctcgttattcataagaggattcatactggtgaaaaaccctatgaatgtaaagactgtggaaaggcctttcggcgtggtgatgagctcactcagcaccagagattccacactggggagaaagactacgaatgcaaagactgtgggaagacctttagccgtgtgtataaacttattcagcacaagagaattcatagtggggagaagccttacgagtgtaaagactgtgggaaggcttttatttgtggttcaagcctcattcagcataaaagaattcacacaggtgagaaaccctatgaatgtcaagaatgtgggaaggcctttactcgagtcaattaccttactcagcatcagaagatccacaccggtgagaagcctcacgaatgtaaggagtgtgggaaggcctttcgctggggttcgagcctcgttaagcacgagaggatacatacgggcgagaagccgtacaagtgcacagaatgtgggaaggccttcaattgtggctatcacctcactcagcacgagagaatccacacaggcgaaaccccgtataaatgtaaggagtgtgggaaggctttcatttatggatcgagcctcgtgaaacatgagagaattcataccggggtgaaaccctatgggtgtacagaatgtgggaagagctttagtcacggccatcagcttacacaacatcagaaaacgcacagtggggcgaaatcctacgaatgtaaggagtgcgggaaggcatgtaaccacctaaaccatctccgagaacatcagaggatccacaacagttgaagagccttttgaacgcagtagcccgctcgtatctatggtttcgctttccacagtttgttacctgcagtcaactgcagttcaaaaatattaaatggaaaattccagaaataaagaattttaagtctcaaatggtgtgcccttctgagtagcgtgatgaaatctctcgctgtccggctccagccggccggggatgtgagtcatcccttggtccagcacatccacgctgtatacgccacccaccctgctagtgacttagtagccgtcttggtgatcagatcaactatcccagcatcacagtgcctgtgcccaagcagtcctcactttgcttaacagtggccccagagagcaggagtagtgatgctggtgattcggatatgccaaagagaagccacaaagtgcttccttttaaatgaaaaggtgaaagttctcaacttaaaaaagaaaagaaaaaaatcatatactgaggttgctaagatctacatgacaataagatattttgggagagagatacgttcacataattttattacatatattgttacaattgttctattttgttagttactgttggtaatctcttactgtgcctaatttataaattaaactttagatatgtatgtacaggaaaaaatgtagtatatagtatcgtatatatgtacaggaaaaaaacgtactatctgtggtttcaggtgtccactgcgggtcttcaaacgtacccccctcaggtgagaggggactgctgtacaaagaatataggaaggcctctagactacatccattccttcctcaacaggaggaaaattcctggtacagtttaacgtaaggcttcactgatcactgttgtttttgtttttgtttttgtttttttgagacagagtctcactcttgcccaggctggagtgcagtggcacggtcttggctcactgcaacctccacctcccaggttccagcaattctcctgcctcagcctccccagtagctgggattacagacatgcaccaccacacctggctaatttttgtatttttagtagagacagttttcaccatgttgtccaggctggtctcaactcctgacctcaggtgatccacccaccttgccctcccaaagtgctaggattacaggcgtgagccactgcacctagcccactgatcactcttctgcttacagaatatcagaagtcattctagaggcaaatttgaagagtggaaaaatcactttttctgaatgatcttgtttttggtgtagatgtttttattgtgtgggttagtttaatgaatacataaagactaccagtaccattctgtctttactccgtggcatctgtggaataaccctgctaatgtaacacgtgagaaagcctttggtcatgccacccactctaccagttgtccccaccatcccccgccctcctccctgtgagacactgggccaaaggctcactacccctgtgcgttgtccagcacacagacactatgtgcattatttgtacataaggataatcacatctacctgagactgctatcatggaaattaaatgtttggtacatgtaaagtctttgaaagtgtaactggaatattgtgtaattttaataaataataactattgttgtttttatgatcattactaccatttgtgttgccattagtgaatttttacaagaaaactccctgtgggtgcaatgagtctggaaaagaccattgagtcttctagaagaaaacattaagagattattggcacagccgtgggttacgcaatgatttcttagtacacaaaacacagcaaacataaaaagttgttacacttcatcaaaagtacaaagttctgttcatcaaatgatgctgttaagatagggaaaagacaagaaacaggactggaagaagatgtttgctctaaggtacacctgacaaaggaactctcatagaaaatataaagaatccctcaagttgaaaaaaaaatcaatttaaaggggagaaaacttcagcacgtctcaacagaagaccaccaaatggccaataagtaagtgaaaatgtattcaatgtcattgctcctcaaggaactgtagagtaaaaccacaatgtgctgtcactctagacagtcaccaggatgattaaatttaaatcacaataacaaggctgatttcagatgtctcaccacaaagaaggaggataagggagcgaggtgatggatatgttaattagcttgatttaatccttccacattgtatacatgtatcagaacatcacattgtactccatcaatataatacaattattatttgtcaatcaaatattaataaaatcaaagatgagcagg

SEQ ID NO: 202166 - DNA, 2120 bp, Homo sapiens
  Payload ID: 19880
  Gene Name: zinc finger protein 331
  Uniprot ID: Q9NQX6
  ENST ID: ENST00000511154
  CDS Start-End: 295-1686
acgcacttgcgtgggagtacgaggctgacgcggcggccctgtccccgtaactgtgacacgggtgcacgcgagcgtcattgggggcgatgggggccgtgctgggtgcgcgtttgcaccagtgacgcagccgctgcatctccgccagtccgcgcaggccagcatccttcagaaaaagcatccccgaggaggaagacgaatcgttaaacatctgaaagggtcagctctagcctctcggaatttgtcttcttcagtggaaaccccgagaagactgatcagttcttcagttctaaaacaatggcccagggtttggtgacgttcgccgacgtagccatagacttttctcaggaggagtgggcctgtctgaactctgctcagagggacctgtactgggacgtgatgctggagaactacagtaacttggtctcactggatttggagtcagcatatgaaaataagagtttacctacagaaaaaaacattcatgaaataagggcttccaaaaggaattcagatagaagaagtaaatcccttggccgtaactggatatgtgaaggtacgcttgaaagaccacagcgctccagagggaggtatgtcaatcagatgatcatcaattatgtcaaaagacctgctactagagaaggcacccctcctagaacacatcagagacatcataaggagaattcctttgaatgtaaggactgtgggaaggcctttagtcgtggctatcaacttagtcaacatcagaaaatccatactggtgagaaaccttatgaatgtaaagaatgtaagaaggccttccgttggggcaatcagcttactcaacatcaaaaaattcatactggggagaagccctacgaatgtaaagactgtgggaaggcttttcgatggggctcaagcctcgttattcataagaggattcatactggtgaaaaaccctatgaatgtaaagactgtggaaaggcctttcggcgtggtgatgagctcactcagcaccagagattccacactggggagaaagactacgaatgcaaagactgtgggaagacctttagccgtgtgtataaacttattcagcacaagagaattcatagtggggagaagccttacgagtgtaaagactgtgggaaggcttttatttgtggttcaagcctcattcagcataaaagaattcacacaggtgagaaaccctatgaatgtcaagaatgtgggaaggcctttactcgagtcaattaccttactcagcatcagaagatccacaccggtgagaagcctcacgaatgtaaggagtgtgggaaggcctttcgctggggttcgagcctcgttaagcacgagaggatacatacgggcgagaagccgtacaagtgcacagaatgtgggaaggccttcaattgtggctatcacctcactcagcacgagagaatccacacaggcgaaaccccgtataaatgtaaggagtgtgggaaggctttcatttatggatcgagcctcgtgaaacatgagagaattcataccggggtgaaaccctatgggtgtacagaatgtgggaagagctttagtcacggccatcagcttacacaacatcagaaaacgcacagtggggcgaaatcctacgaatgtaaggagtgcgggaaggcatgtaaccacctaaaccatctccgagaacatcagaggatccacaacagttgaagagccttttgaacgcagtagcccgctcgtatctatggtttcgctttccacagtttgttacctgcagtcaactgcagttcaaaaatattaaatggaaaattccagaaataaagaattttaagtctcaaatggtgtgcccttctgagtagcgtgatgaaatctctcgctgtccggctccagccggccggggatgtgagtcatcccttggtccagcacatccacgctgtatacgccacccaccctgctagtgacttagtagccgtcttggtgatcagatcaactatcccagcatcacagtgcctgtgcccaagcagtcctcactttgcttaacagtggccccagagagcaggagtagtgatgctggtgattcggatatgccaaagagaagccacaaagtgcttccttttaaatgaaaaggtgaaagttctcaactt

SEQ ID NO: 202167 - DNA, 2130 bp, Homo sapiens
  Payload ID: 19880
  Gene Name: zinc finger protein 331
  Uniprot ID: Q9NQX6
  ENST ID: ENST00000512387
  CDS Start-End: 302-1693
gactgtgtgacgcacttgcgtgggagtgcgaggctgacgcggcggctctatctcccgtaactgtgacacgggtgcacgcaagcgtcattgggggtgatgggggccgtgctcggtgcgcttctgcaccggtgacgcaaccgctgtgtctccgccagtccgcgcaggccagcatccttcagaaaaagcatccccgaggaggaagacgaatcgttaaacatcttaggtcagctctagcctctcggaatttgtcttcttcagtggaaaccccgagaagactgatcagttcttcagttctaaaacaatggcccagggtttggtgacgttcgccgacgtagccatagacttttctcaggaggagtgggcctgtctgaactctgctcagagggacctgtactgggacgtgatgctggagaactacagtaacttggtctcactggatttggagtcagcatatgaaaataagagtttacctacagaaaaaaacattcatgaaataagggcttccaaaaggaattcagatagaagaagtaaatcccttggccgtaactggatatgtgaaggtacgcttgaaagaccacagcgctccagagggaggtatgtcaatcagatgatcatcaattatgtcaaaagacctgctactagagaaggcacccctcctagaacacatcagagacatcataaggagaattcctttgaatgtaaggactgtgggaaggcctttagtcgtggctatcaacttagtcaacatcagaaaatccatactggtgagaaaccttatgaatgtaaagaatgtaagaaggccttccgttggggcaatcagcttactcaacatcaaaaaattcatactggggagaagccctacgaatgtaaagactgtgggaaggcttttcgatggggctcaagcctcgttattcataagaggattcatactggtgaaaaaccctatgaatgtaaagactgtggaaaggcctttcggcgtggtgatgagctcactcagcaccagagattccacactggggagaaagactacgaatgcaaagactgtgggaagacctttagccgtgtgtataaacttattcagcacaagagaattcatagtggggagaagccttacgagtgtaaagactgtgggaaggcttttatttgtggttcaagcctcattcagcataaaagaattcacacaggtgagaaaccctatgaatgtcaagaatgtgggaaggcctttactcgagtcaattaccttactcagcatcagaagatccacaccggtgagaagcctcacgaatgtaaggagtgtgggaaggcctttcgctggggttcgagcctcgttaagcacgagaggatacatacgggcgagaagccgtacaagtgcacagaatgtgggaaggccttcaattgtggctatcacctcactcagcacgagagaatccacacaggcgaaaccccgtataaatgtaaggagtgtgggaaggctttcatttatggatcgagcctcgtgaaacatgagagaattcataccggggtgaaaccctatgggtgtacagaatgtgggaagagctttagtcacggccatcagcttacacaacatcagaaaacgcacagtggggcgaaatcctacgaatgtaaggagtgcgggaaggcatgtaaccacctaaaccatctccgagaacatcagaggatccacaacagttgaagagccttttgaacgcagtagcccgctcgtatctatggtttcgctttccacagtttgttacctgcagtcaactgcagttcaaaaatattaaatggaaaattccagaaataaagaattttaagtctcaaatggtgtgcccttctgagtagcgtgatgaaatctctcgctgtccggctccagccggccggggatgtgagtcatcccttggtccagcacatccacgctgtatacgccacccaccctgctagtgacttagtagccgtcttggtgatcagatcaactatcccagcatcacagtgcctgtgcccaagcagtcctcactttgcttaacagtggccccagagagcaggagtagtgatgctggtgattcggatatgccaaagagaagccacaaagtgcttccttttaaatgaaaaggtgaaagttctcaacttaaa

SEQ ID NO: 202168 - DNA, 913 bp, Homo sapiens
  Payload ID: 19880
  Gene Name: zinc finger protein 331
  ENST ID: ENST00000514022
  CDS Start-End: 414-913
gtcattgggggtgatgggggccgtgctcggtgcgcttctgcaccggtgacgcaaccgctgtgtctccgccagtccgcgcaggtgagattggcgcccatggctccaaggggagacgggcacggagcttctagcggtgacgcacttgctggagagggtgtggggtgacgcagccgggctctccccataactagggctggggtgctcccgaggctttggggcgacggaacccgcacctgtgaacctcggcagtgcgtccccgggactctgttctgtgaggccagcatccttcagaaaaagcatccccgaggaggaagacgaatcgttaaacatcttaggtcagctctagcctctcggaatttgtcttcttcagtggaaaccccgagaagactgatcagttcttcagttctaaaacaatggcccagggtttggtgacgttcgccgacgtagccatagacttttctcaggaggagtgggcctgtctgaactctgctcagagggacctgtactgggacgtgatgctggagaactacagtaacttggtctcactggatttggagtcagcatatgaaaataagagtttacctacagaaaaaaacattcatgaaataagggcttccaaaaggaattcagatagaagaagtaaatcccttggccgtaactggatatgtgaaggtacgcttgaaagaccacagcgctccagagggaggtatgtcaatcagatgatcatcaattatgtcaaaagacctgctactagagaaggcacccctcctagaacacatcagagacatcataaggagaattcctttgaatgtaaggactgtgggaaggcctttagtcgtggctatcaacttagtcaacatcagaaaatccatactggtgagaaaccttatgaatgtaaagaatgtaagaaggc

SEQ ID NO: 202169 - DNA, 573 bp, Homo sapiens
  Payload ID: 19880
  Gene Name: zinc finger protein 331
  ENST ID: ENST00000502616
  CDS Start-End: 317-573
ggtgatcgggccttctgggtgacgcaggtgtgtgtgacagcacaacctgtagttccagcgtctctgtgctgagatgggtgatcgggccttctgggtgacgcaggtgtgtgtgacaacacaacctgtagctccagcttctctgtgctgggatggatgatcgggccttctgggtgacgcaggccagcatccttcagaaaaagcatccccgaggaggaagacgaatcgttaaacatcttaggtcagctctagcctctcggaatttgtcttcttcagtggaaaccccgagaagactgatcagttcttcagttctaaaacaatggcccagggtttggtgacgttcgccgacgtagccatagacttttctcaggaggagtgggcctgtctgaactctgctcagagggacctgtactgggacgtgatgctggagaactacagtaacttggtctcactggatttggagtcagcatatgaaaataagagtttacctacagaaaaaaacattcatgaaataagggcttccaaaaggaattcagatagaagaagtaaatcccttggccgtaactggatatgtga

SEQ ID NO: 202170 - DNA, 1890 bp, Homo sapiens
  Payload ID: 19880
  Gene Name: zinc finger protein 331
  Uniprot ID: Q9NQX6
  ENST ID: ENST00000513999
  CDS Start-End: 370-1761
aggtgtgtgtgacagtgcaacttgtagctccagcgtctctgctgcttcccctgccttcacctcctaaccaagcggtacctgcctgagaacaagggccgcggagggacgtgagcgcctgagcctcgcctggaaattcaccagcaagaaggcagaaacagccatgaggccagcatccttcagaaaaagcatccccgaggaggaagacgaatcgttaaacatctgaaagggtcaggccagcatccttcagaaaaagcatccccgaggaggaagacgaatcgttaaacatcttaggtcagctctagcctctcggaatttgtcttcttcagtggaaaccccgagaagactgatcagttcttcagttctaaaacaatggcccagggtttggtgacgttcgccgacgtagccatagacttttctcaggaggagtgggcctgtctgaactctgctcagagggacctgtactgggacgtgatgctggagaactacagtaacttggtctcactggatttggagtcagcatatgaaaataagagtttacctacagaaaaaaacattcatgaaataagggcttccaaaaggaattcagatagaagaagtaaatcccttggccgtaactggatatgtgaaggtacgcttgaaagaccacagcgctccagagggaggtatgtcaatcagatgatcatcaattatgtcaaaagacctgctactagagaaggcacccctcctagaacacatcagagacatcataaggagaattcctttgaatgtaaggactgtgggaaggcctttagtcgtggctatcaacttagtcaacatcagaaaatccatactggtgagaaaccttatgaatgtaaagaatgtaagaaggccttccgttggggcaatcagcttactcaacatcaaaaaattcatactggggagaagccctacgaatgtaaagactgtgggaaggcttttcgatggggctcaagcctcgttattcataagaggattcatactggtgaaaaaccctatgaatgtaaagactgtggaaaggcctttcggcgtggtgatgagctcactcagcaccagagattccacactggggagaaagactacgaatgcaaagactgtgggaagacctttagccgtgtgtataaacttattcagcacaagagaattcatagtggggagaagccttacgagtgtaaagactgtgggaaggcttttatttgtggttcaagcctcattcagcataaaagaattcacacaggtgagaaaccctatgaatgtcaagaatgtgggaaggcctttactcgagtcaattaccttactcagcatcagaagatccacaccggtgagaagcctcacgaatgtaaggagtgtgggaaggcctttcgctggggttcgagcctcgttaagcacgagaggatacatacgggcgagaagccgtacaagtgcacagaatgtgggaaggccttcaattgtggctatcacctcactcagcacgagagaatccacacaggcgaaaccccgtataaatgtaaggagtgtgggaaggctttcatttatggatcgagcctcgtgaaacatgagagaattcataccggggtgaaaccctatgggtgtacagaatgtgggaagagctttagtcacggccatcagcttacacaacatcagaaaacgcacagtggggcgaaatcctacgaatgtaaggagtgcgggaaggcatgtaaccacctaaaccatctccgagaacatcagaggatccacaacagttgaagagccttttgaacgcagtagcccgctcgtatctatggtttcgctttccacagtttgttacctgcagtcaactgcagttcaaaaatattaaatggaaaattccagaaataaagaattttaagtctcaaa

SEQ ID NO: 202171 - DNA, 670 bp, Homo sapiens
  Payload ID: 19880
  Gene Name: zinc finger protein 331
  ENST ID: ENST00000509047
  CDS Start-End: 411-670
agtccgcgcaggtgagattggtgcgcgtggctccgaggggagacgggcacggggcttctgacggtgacgcacttgctggagagtgtggggtgacacagccgggctctccccataactggtgaccgggggtgctccagaggctttgggtcaacgcagcccgtgcctgtgaacctcggcggtgcgtccctgggactctgctccgtgaggccagcatccttcagaaaaagcatccccgaggaggaagacgaatcgttaaacatctgaaagggtcaggccagcatccttcagaaaaagcatccccgaggaggaagacgaatcgttaaacatcttaggtcagctctagcctctcggaatttgtcttcttcagtggaaaccccgagaagactgatcagttcttcagttctaaaacaatggcccagggtttggtgacgttcgccgacgtagccatagacttttctcaggaggagtgggcctgtctgaactctgctcagagggacctgtactgggacgtgatgctggagaactacagtaacttggtctcactggatttggagtcagcatatgaaaataagagtttacctacagaaaaaaacattcatgaaataagggcttccaaaaggaattcagatagaagaagtaaatcccttggccgtaactggatatgtgaagg

SEQ ID NO: 202172 - DNA, 670 bp, Homo sapiens
  Payload ID: 19880
  Gene Name: zinc finger protein 331
  ENST ID: ENST00000502248
  CDS Start-End: 481-670
gtcacctgtctttctagtgtctccgttgcttcctgtgccttggccttccagccatgtggtacctgctagggagcagtggtcccaaagtgacgtgagaggctctacgctattgtgaaaatgaccaagaagaaggcttcacaagtcacgagatggcagttttggagccagaagtgctctccgtgcacactacctggacgacaagaggaagtaacctcaagaatagaattccttttggggaagaaagaggccagcatccttcagaaaaagcatccccgaggaggaagacgaatcgttaaacatctgaaagggtcaggccagcatccttcagaaaaagcatccccgaggaggaagacgaatcgttaaacatcttaggtcagctttaccagtgaggaaaccgacactgtgagctctagcctctcggaatttgtcttcttcagtggaaaccccgagaagactgatcagttcttcagttctaaaacaatggcccagggtttggtgacgttcgccgacgtagccatagacttttctcaggaggagtgggcctgtctgaactctgctcagagggacctgtactgggacgtgatgctggagaactacagtaacttggtctcactggatttggagtcagcatatgaaaataagagtttacctacagaaaaaaacattcatg

SEQ ID NO: 202173 - DNA, 574 bp, Homo sapiens
  Payload ID: 19880
  Gene Name: zinc finger protein 331
  ENST ID: ENST00000514374
  CDS Start-End: 276-574
ttcccccgacggccccgcgtcctcttctagcctcaccctctcccgaggccccagcgttgggggactaccgggccagcatccttcagaaaaagcatccccgaggaggaagacgaatcgttaaacatctgaaagggtcaggccagcatccttcagaaaaagcatccccgaggaggaagacgaatcgttaaacatcttaggtcagctctagcctctcggaatttgtcttcttcagtggaaaccccgagaagactgatcagttcttcagttctaaaacaatggcccagggtttggtgacgttcgccgacgtagccatagacttttctcaggaggagtgggcctgtctgaactctgctcagagggacctgtactgggacgtgatgctggagaactacagtaacttggtctcactggatttggagtcagcatatgaaaataagagtttacctacagaaaaaaacattcatgaaataagggcttccaaaaggaattcagatagaagaagtaaatcccttggccgtaactggatatgtgaaggtacgcttgaaagaccacagcgctccagagggaggtatgt

SEQ ID NO: 202174 - DNA, 688 bp, Homo sapiens
  Payload ID: 19880
  Gene Name: zinc finger protein 331
  ENST ID: ENST00000505426
  CDS Start-End: 496-688
agcggtacctgcctgagaacaagggccgcggaaggacgggagtgcctgagccctgccaggaaattcaccaacaagaaggcagaaacagccatgaggtgacgctttcagagctagaagtgctctccactcagggcgcctgagtgacaggagacggtggcctcaggagtagaattcctcctgtagagggacacgtccctgatgtgggagacagggagaggggcagctccacgcttcatcatctcagttaccacagcgtgctcttcaggaatctcccagaaactccatctcggggcctcgtatttctcattggttttattaggtatggcaggtgttacccttctggttctgttttccccaggccagcatccttcagaaaaagcatccccgaggaggaagacgaatcgttaaacatcttaggtcagctctagcctctcggaatttgtcttcttcagtggaaaccccgagaagactgatcagttcttcagttctaaaacaatggcccagggtttggtgacgttcgccgacgtagccatagacttttctcaggaggagtgggcctgtctgaactctgctcagagggacctgtactgggacgtgatgctggagaactacagtaacttggtctcactggatttggagtcagcatatgaaaataagagtttacctacagaaaaaaacattcatgaaa

SEQ ID NO: 202175 - DNA, 641 bp, Homo sapiens
  Payload ID: 19880
  Gene Name: zinc finger protein 331
  ENST ID: ENST00000504493
  CDS Start-End: 443-641
gctgagatgggtgatcgggccttctgggtgacgcaggtgtgtgtgacaacacaacctgtagctccagcttctctgtgctgggatggatgatcgggccttctgggtgacgcaggtgtgtgtgacagcacaacctgtagctccagcgtctctgctgcttcccctgccttcacctcctaaccaagcggtacctgcctgagaacaagggccgcggaaggacgggagtgcctgagccctgccaggaaattcaccaacaagaaggcagaaacagccatgaggccagcatccttcagaaaaagcatccccgaggaggaagacgaatcgttaaacatcttaggtcagctttaccagtgaggaaaccgacactgtgagctctagcctctcggaatttgtcttcttcagtggaaaccccgagaagactgatcagttcttcagttctaaaacaatggcccagggtttggtgacgttcgccgacgtagccatagacttttctcaggaggagtgggcctgtctgaactctgctcagagggacctgtactgggacgtgatgctggagaactacagtaacttggtctcactggatttggagtcagcatatgaaaataagagtttacctacagaaaaaaacattcatgaaataaggg

SEQ ID NO: 202176 - DNA, 540 bp, Homo sapiens
  Payload ID: 19880
  Gene Name: zinc finger protein 331
  ENST ID: ENST00000511567
  CDS Start-End: 226-540
gtgcacgcaagcgtcattgggggtgatgggggccgtgctcggtgcgcttctgcaccggtgacgcaaccgctgtgtctccgccagtccgcgcaggccagcatccttcagaaaaagcatccccgaggaggaagacgaatcgttaaacatcttagctctagcctctcggaatttgtcttcttcagtggaaaccccgagaagactgatcagttcttcagttctaaaacaatggcccagggtttggtgacgttcgccgacgtagccatagacttttctcaggaggagtgggcctgtctgaactctgctcagagggacctgtactgggacgtgatgctggagaactacagtaacttggtctcactggatttggagtcagcatatgaaaataagagtttacctacagaaaaaaacattcatgaaataagggcttccaaaaggaattcagatagaagaagtaaatcccttggccgtaactggatatgtgaaggtacgcttgaaagaccacagcgctccagagggaggtatgtcaatcagatgatcatc

SEQ ID NO: 202177 - DNA, 562 bp, Homo sapiens
  Payload ID: 19880
  Gene Name: zinc finger protein 331
  ENST ID: ENST00000509585
  CDS Start-End: 422-562
ggtgcgcgtggctccgaggggagacgggcacggggcttctgacggtgacgcacttgctggagagtgtggggtgacacagccgggctctccccataactggtgaccgggggtgctccagaggctttgggtcaacgcagcccgtgcctgtgaacctcggcggtgcgtccctgggactctgctccgtgaggccagcatccttcagaaaaagcatccccgaggaggaagacgaatcgttaaacatctgaaagggtcaggccagcatccttcagaaaaagcatccccgaggaggaagacgaatcgttaaacatcttaggtcagctttaccagtgaggaaaccgacactgtgagctctagcctctcggaatttgtcttcttcagtggaaaccccgagaagactgatcagttcttcagttctaaaacaatggcccagggtttggtgacgttcgccgacgtagccatagacttttctcaggaggagtgggcctgtctgaactctgctcagagggacctgtactgggacgtgatgctggagaactacagtaacttggtctcactggatttg

SEQ ID NO: 202178 - DNA, 739 bp, Homo sapiens
  Payload ID: 19880
  Gene Name: zinc finger protein 331
  ENST ID: ENST00000513265
  CDS Start-End: 200-496
ggggcgacggaacccgcacctgtgaacctcggcagtgcgtccccgggactctgttctgtgaggccagcatccttcagaaaaagcatccccgaggaggaagacgaatcgttaaacatcttaggtcagctctagcctctcggaatttgtcttcttcagtggaaaccccgagaagactgatcagttcttcagttctaaaacaatggcccagggtttggtgacgttcgccgacgtagccatagacttttctcaggaggagtgggcctgtctgaactctgctcagagggacctgtactgggacgtgatgctggagaactacagtaacttggtctcactggatttggagtcagcatatgaaaataagagtttacctacagaaaaaaacattcatgaaataagggcttccaaaaggaattcagatagaagaagtaaatcccttggccgtaactggatatgtgaaggtacgcttgaaagaccacagcgctccagagggaggtgagaaaccctatgaatgtcaagaatgtgggaaggcctttactcgagtcaattaccttactcagcatcagaagatccacaccggtgagaagcctcacgaatgtaaggagtgtgggaaggcctttcgctggggttcgagcctcgttaagcacgagaggatacatacgggcgagaagccgtacaagtgcacagaatgtgggaaggccttcaattgtggctatcacctcactcagcacgagagaatcca

SEQ ID NO: 202179 - DNA, 1985 bp, Homo sapiens
  Payload ID: 19880
  Gene Name: zinc finger protein 331
  Uniprot ID: Q9NQX6
  ENST ID: ENST00000511593
  CDS Start-End: 465-1856
tgtctccgttgcttcctgtgccttggccttccagccatgtggtacctgctagggagcagtggtcccaaagtgacgtgagaggctctacgctattgtgaaaatgaccaagaagaaggcttcacaagtcacgagatggcagttttggagccagaagtgctctccgtgcacactacctggacgacaagaggaagtaacctcaagaatagaattccttttggggaagaaagagctggccttcaggaaaagcatcccggaggaggaagaagaagtgttatatgtcctaaagtaaggtttcaggccagcatccttcagaaaaagcatccccgaggaggaagacgaatcgttaaacatcttaggtcagctttaccagtgaggaaaccgacactgtgagctctagcctctcggaatttgtcttcttcagtggaaaccccgagaagactgatcagttcttcagttctaaaacaatggcccagggtttggtgacgttcgccgacgtagccatagacttttctcaggaggagtgggcctgtctgaactctgctcagagggacctgtactgggacgtgatgctggagaactacagtaacttggtctcactggatttggagtcagcatatgaaaataagagtttacctacagaaaaaaacattcatgaaataagggcttccaaaaggaattcagatagaagaagtaaatcccttggccgtaactggatatgtgaaggtacgcttgaaagaccacagcgctccagagggaggtatgtcaatcagatgatcatcaattatgtcaaaagacctgctactagagaaggcacccctcctagaacacatcagagacatcataaggagaattcctttgaatgtaaggactgtgggaaggcctttagtcgtggctatcaacttagtcaacatcagaaaatccatactggtgagaaaccttatgaatgtaaagaatgtaagaaggccttccgttggggcaatcagcttactcaacatcaaaaaattcatactggggagaagccctacgaatgtaaagactgtgggaaggcttttcgatggggctcaagcctcgttattcataagaggattcatactggtgaaaaaccctatgaatgtaaagactgtggaaaggcctttcggcgtggtgatgagctcactcagcaccagagattccacactggggagaaagactacgaatgcaaagactgtgggaagacctttagccgtgtgtataaacttattcagcacaagagaattcatagtggggagaagccttacgagtgtaaagactgtgggaaggcttttatttgtggttcaagcctcattcagcataaaagaattcacacaggtgagaaaccctatgaatgtcaagaatgtgggaaggcctttactcgagtcaattaccttactcagcatcagaagatccacaccggtgagaagcctcacgaatgtaaggagtgtgggaaggcctttcgctggggttcgagcctcgttaagcacgagaggatacatacgggcgagaagccgtacaagtgcacagaatgtgggaaggccttcaattgtggctatcacctcactcagcacgagagaatccacacaggcgaaaccccgtataaatgtaaggagtgtgggaaggctttcatttatggatcgagcctcgtgaaacatgagagaattcataccggggtgaaaccctatgggtgtacagaatgtgggaagagctttagtcacggccatcagcttacacaacatcagaaaacgcacagtggggcgaaatcctacgaatgtaaggagtgcgggaaggcatgtaaccacctaaaccatctccgagaacatcagaggatccacaacagttgaagagccttttgaacgcagtagcccgctcgtatctatggtttcgctttccacagtttgttacctgcagtcaactgcagttcaaaaatattaaatggaaaattccagaaataaagaattttaagtctcaaa

SEQ ID NO: 202180 - DNA, 761 bp, Homo sapiens
  Payload ID: 19880
  Gene Name: zinc finger protein 331
  ENST ID: ENST00000505949
  CDS Start-End: 230-761
ggggcgacggaacccgcacctgtgaacctcggcagtgcgtccccgggactctgttctgtgaggccagcatccttcagaaaaagcatccccgaggaggaagacgaatcgttaaacatcttaggtcagctttaccagtgaggaaaccgacactgtgagctctagcctctcggaatttgtcttcttcagtggaaaccccgagaagactgatcagttcttcagttctaaaacaatggcccagggtttggtgacgttcgccgacgtagccatagacttttctcaggaggagtgggcctgtctgaactctgctcagagggacctgtactgggacgtgatgctggagaactacagtaacttggtctcactggatttggagtcagcatatgaaaataagagtttacctacagaaaaaaacattcatgaaataagggcttccaaaaggaattcagatagaagaagtaaatcccttggccgtaactggatatgtgaaggtacgcttgaaagaccacagcgctccagagggaggtatgtcaatcagatgatcatcaattatgtcaaaagacctgctactagagaaggcacccctcctagaacacatcagagacatcataaggagaattcctttgaatgtaaggactgtgggaaggcctttagtcgtggctatcaacttagtcaacatcagaaaatccatactggtgagaaaccttatgaatgtaaagaatgtaagaaggccttccgttggggcaatcagcttactcaacatc

SEQ ID NO: 202181 - DNA, 4672 bp, Homo sapiens
  Payload ID: 19881
  Gene Name: zinc finger protein 333
  Uniprot ID: Q96JL9
  ENST ID: ENST00000292530
  CDS Start-End: 92-2089
gcggcgcggtgcggcacggcacggtgggagtgtctccggctggcttgcagggagaacaccgactgagacctcaaaccctggctccagtgtcatggaatccgtcacctttgaggatgtggccgtggagttcatccaggagtgggcattgctggacagcgcacggaggagcctgtgcaaatacaggatgcttgaccagtgcaggaccctggcctccaggggaactccaccatgcaaacccagttgtgtctcccagctggggcaaagagcagagccaaaggcaacagaacgagggattctccgtgccacaggtgttgcctgggaatctcaacttaaacccgaagagttgccttctatgcaggatcttttggaagaagcatcctccagggacatgcaaatggggccggggctgttcctgaggatgcagctggtgccctccatagaagagagggagacaccattgactcgagaggaccggccagctctccaggagccgccttggtctctgggatgcacgggactgaaggccgctatgcagattcagagggtggtgataccagtgcctactctgggccaccgcaacccatgggtggccagggattctgctgtgcctgcacgtgaccctgcctggcttcaggaggacaaagtggaggaagaagctatggctcctgggctgccaaccgcctgttcacaggaaccagtcacctttgcagatgtggctgtggtgttcaccccagaagaatgggtgtttctggactctactcagaggagcctgtatagagatgtgatgctggagaactacaggaacctggcctctgtggctgatcaactgtgcaaacccaatgcgttgtcttatttggaagaaagaggagagcagtggaccactgacaggggcgtcctctcagacacctgtgcagaacctcagtgtcaaccccaagaggcaattcctagccaagatacttttacagagatcctgtccattgatgtgaaaggggagcaacctcagcctggagaaaaactctataaatataatgaacttgagaaaccttttaacagcattgaaccacttttccagtaccagagaattcatgctggagaggcatcctgtgaatgtcaagagattagaaattccttcttccagagtgcccacctaattgtgcccgagaaaatccgtagtggggataaatcctatgcatgtaacaaatgtgaaaaatccttcagatacagctctgaccttatcaggcatgagaagactcatactgcagagaagtgctttgactgtcaagaatgtgggcaagccttcaaatattcctcgaatctccggcgacacatgagaacccataccggagagaagccatttgaatgtagtcagtgtgggaaaaccttcacgaggaactttaacctgattttgcaccagagaaaccacacaggagagaagccctacgagtgtaaagattgtgggaaagccttcaatcagccatcatccctcaggagccacgtgagaactcacactggagagaagccctttgaatgcagccagtgtgggaaagccttcagggaacactcttcactgaagacacatctgcgaacccataccagagagaaaccatatgaatgcaaccagtgtggcaagcccttccggacgagcactcatctgaacgtgcacaagaggatacacacaggggagaaactgtatgagtgcgcgacttgcggtcaggtcttgagtcgtctttcaaccctgaagagtcacatgcgaactcacactggagagaagccctatgtgtgccaggaatgtgggcgagccttcagtgagccctcatccctcaggaaacatgcaaggactcacagtggcaagaagccctatgcatgccaggaatgcgggcgagcctttggtcagtcttcacatcttattgtacatgtgagaacacacagtgccgggagaccctatcaatgtaatcagtgtgagaaagccttcaggcacagctcctcactcactgtacacaaaagaacccatgtgggaagagagaccattaggaatggcagcctgcctttatccatgtctcatccatactgtgggccccttgctaattaacttccattttgtaaaaatataaacacatggggctatgactttccctcgtaatactcctttagctgcatcctgtgtttcaatgtataatattttcattttggtttaattgtaagtattgtcttaacctccattatcgtttattctttgacccatctattatttggaattagatttttcaaaactaatatgtggatatattttcatagaggtataatgacttatagtgaaatgcatacatctgaagtgtacagttggatgagtttgacagatgcatacatgcatgtaaccaccaccccattccagatatagaatgtttctatctctctggaaggttcctgcatgttatatggctatttcttagttgcctttttgttgttggtttctaatttaattacatggtgagaagagtatgtggcctctttgttactgagtcataggtatttgctgagatttgctattaggtctggtgtggcttattcttctagctgccaacccaaattaccccttcctccttagaaaagaacctgggttttctgttcagattggcagtgtgcactattaaaaagcttccatctcccggctgggcacggtggctcatgcctctaatcccagcactttgggaggctgaggctgggggatcacctgaggtcaggagttcgagatcagcctggccaacatggtgaaatcccctctctactaaaaatataaaaattagccaagtttggtggcatgcacctgtaatcccagctacttgggaggctgaggcaggagaattctttgaacccaggaggcagaggttgcagtgagccgagattgcgccactgcactccagcctgggcaacagagtgaaactctgtctcaaaaataataataataaaaaaaagcttccatctcccagcccttcttgcaagcaagggcaggccatttcctccggtcctggctagtatgaatatgagaagtcactggatgtgactctggggaagatattgtgttcagggatggtttcatgtagccacatctctccacttcttgccttttggacaagtagacatgatttctagacctagaggagccctcctgtgaccataagggtaaaagccgcaagctaagaagagggtggccggaagtcataaccatcttgcttctgtaatctaaaaaatatttaggatagatttaatagaattggcatatttatgtgattgcagcagccctggactatttatttctggatgtcccatacatgaaaaatatgcacttcttactggtacagttttcttttgtttgtttttgtttttggtgggaggtttatttcacctgaatataattcctaactgatgcacttagtatatgtcagtttttataaatgcttcatggatggttgaaatcaatgtattgtattctacaaatgtctgctagatcaagcaaatgtgtttaaaaaccatctacacatttataaatgttgatctgtgatctagcatttattgagagaggtatgttaaactctcccaccatgattatgtattgctgaaaaatctttgtcattctgtcagtttttaaatttatgtatatacatacatatatatgttttgaagcaatgaaattaaatatagatactgacattttttacatttccaacaaattgttacttttattcttataaagtgatcatccttttccctattactgaacattcaaccattcattgtaatgatagtaaatacttatttagagtttactattaatagatagtagccactgcctgaagctttgcatcttttaatttagtcctcacactgacactttgaggtatgtactgttatccccaattcccagatgaggaagctgaggcccagcaagttaaggtgggctatcaaagtcatctgggtggcatgtgacaggcctgactctctctacagtggcagacccaggggactagtctccatttttacttgttctttttttttttttttttttttttttggttttaaagttctcttaggtataacttacataaacgttaataaatcttagggtacaccttggtgaattttgtatatgtctatacccaccacggtctccatcaaaatattttatcgtcccagaaatttcccttgggccccacctcatcctcaaaggttatcactattctgatgtctatcaccatagatttgtttttcctgttcatgtaaatggaaccataaacagccctcttgtgtctgttttcttcacttaatatagtgtcattgagatttatctatgttgtattatcagtagtttatgctttttaattgctgtgtaatagtccatagtctgaatataccacaatttaaaaattctattctgtttacaaacatttgagttctgtcctccaggttcatccatgttatcacaaatgacagaatttccttcctcatcaaggctgaatagtattccattgtgtagatataccacattttctttatccattcatccaccgatggacagttaggttgattccatatcttggctattgtgaataatcctgcaggttttattgttatgaataaagctgctgtgaatgttcttgttaagtcatactgtgga

SEQ ID NO: 202182 - DNA, 3595 bp, Homo sapiens
  Payload ID: 19881
  Gene Name: zinc finger protein 333
  Uniprot ID: Q96JL9
  ENST ID: ENST00000540689
  CDS Start-End: 124-1035
cggccgacggcggctgagctgtgctgcgcggcgcggcgcggtgcggcacggcacggtgggagtgtctccggctggcttgcagggagaacaccgactgagacctcaaaccctggctccagtgtcatggaatccgtcacctttgaggatgtggccgtggagttcatccaggagtgggcattgctggacagcgcacggaggagcctgtgcaaatacaggatgcttgaccagtgcaggaccctggcctccaggggaactccaccatgcaaacccagttgtgtctcccagctggggcaaagagcagagccaaaggcaacagaacgagggattctccgtgccacaggtgttgcctgggaatctcaacttaaacccgaagagttgccttctatgcaggatcttttggaagaagcatcctccagggacatgcaaatggggccggggctgttcctgaggatgcagctggtgccctccatagaagagagggagacaccattgactcgagaggaccggccagctctccaggagccgccttggtctctgggatgcacgggactgaaggccgctatgcagattcagagggtggtgataccagtgcctactctgggccaccgcaacccatgggtggccagggattctgctgtgcctgcacgtgaccctgcctggcttcaggaggacaaagtggaggaagaagctatggctcctgggctgccaaccgcctgttcacaggaaccagtcacctttgcagatgtggctgtggtgttcaccccagaagaatgggtgtttctggactctactcagaggagcctgtatagagatgtgatgctggagaactacaggaacctggcctctgtggctgatcaactgtgcaaacccaatgcgttgtcttatttggaagaaagaggagagcagtggaccactgacaggggcgtcctctcagacacctgtgcagaacctcagtgtcaaccccaagaggcaattcctagccaagatacttttacagagatcctgtccattgatgtgaaagggccacccaactaatttggaagaatttccacatccagtactctcttgcatgttcagatcgctagaatccaacctctggatatcaaaggatcactactggggcttgaagactccaaatctgcagattctgaagcttgcaggtcagtggccttggactttcaaacttccagttccgtgacatccgggctccttaacttccggcttccgggagcttagtcacatacttctggcttccggattgtaggttccccgcaaggagactaaggcctgtgtgggtctttgtttccccagccgtgcaatgactgttagatgcagaaagggggaaaacagccagggaaactgctcacagtggacccccacggtggagagctggagggagagggttcttcaaacgtgtaccctagctcctttgtctgctgtctttggtgggcgtggtcttgtacttaaaatccagctgagaagccaaactctaccttaaagccgtatttcatgtttcaaactggatgatataattctggagaaatgagatgggaaactctgctgcctacttgccccttaactcttgtttatctttgggtttcttactacataccagagcttaatctttattttcttacttaatattcaaacacaacccatgagcaaattaacattatttccatcataaataaagagaatggacttaataaatttaaaaagtgaagatatgggggcaaatggatgctgccatcagctgaccctagagtttcctctgaccttccttccccaacctcgtctgtgtttcacttctgccatgtccttaaaggggctgtgtgtcccccagaccacagagtccattgcactgcacctttccttcctcctcattttccatcttacaaatcatcaatattcctggatgtaggatcatgtctgtcttatatgttttagtttctctcaatttagcattatgccttgcacgagagtataggaatacctcatttcattgcccttcacagatattgcattttttacaaattgaacgtttatggcagccctgtgtcgagcaagtctgtaggtgccattttcccaacagcatgtgctcactttgtgtccctgcttgagcattttttaggaataaactatttttaaattaaagtatgtacattaaaaaaaagacataatgctattgcacacattacagtatagggtaagcatacttttatgcacactgggaaaccaaaaaatgtgtatgacttgctttattgcaatattcacattattgtggtgatctggagtggagcctgcaatatctctgaggtgtgtctgtatgtgctcatcacatatgtgatgaatggatgaataaattagtgtagagtgaagtgcttccatgaacctgaacatcatggtctggaaactatgggcagtgagtcaaatctgacccaccatctgtttctgtacagctaagaatagtttttacatttttcaaatgggtgaaaacaaataaaaagaagaatgatattttgtgtcacatgactgatatatgaagttcaagctcagtgtccataaagttttattaaaacatagccatgatcattcatttatgattgtctatagctgttttcatatcacaatggaagttcaagttcagtgtctgtaaagttttattaaaacatagccatgatcattcatttatgattgtctatagctgttttcataccacagtggtagaattgagttgctgtaaatacctggctcacaaagcctaacatatacactatcaggctctttaagaaaacatttggcgacccctgctctaggtagactctatggggatatgggctctacactcatagggacccacatgttccaagcctccagctgtgtgttctgcttcctcaagcagcagctgactctgatattccccatctcaccttagcagtctatatcaagcaaagggcacgcagaatcccatgcacccatcatgtatgtaataaaaggcagatattatgtggtctcttgaaccagccttaggcatggaggttgaggatcaggagtgacttgagggtactgactggcagagcaggagccccgttattttggacaaacaccgccactttaagtttcagcttcatttttagccttctggatttaaggaaattacttttttaaaaactataagcagccaaaaaaagcagacagtaaaatgcagataaaacagctcgggcacagaggaaggtggaggaaaagtctcttgggtaactgccaaacttcaccctcatacaatgggccccagtaaaacagtgggccttaataagcacattcctttccctccaggtgcactaaaatagggaagctaaaagcagacttggggggtatgcctacagctgcagaaaaatgtataaaagcaaacacaccactctccctcccatataagcacaacaaaaaaaacacagaagcagtccaagcctctaagaaactctcccaccctaaatccttaaacactcttagtctgtagaaaagactctaacctaattcagccagcagcccctctcaggtgtgttttctctaaaataaacctgtcttaaccatcaagcca

SEQ ID NO: 202183 - DNA, 4151 bp, Homo sapiens
  Payload ID: 19881
  Gene Name: zinc finger protein 333
  ENST ID: ENST00000598161
  CDS Start-End: 42-629
ggagaacaccgactgagacctcaaaccctggctccagtgtcatggaatccgtcacctttgaggatgtggccgtggagttcatccaggagtgggcattgctggacagcgcacggaggagcctgtgcaaatacaggatgcttgaccagtgcaggaccctggcctccaggggaactccaccatgcaaacccagttgtgtctcccagctggggcaaagagcagagccaaaggcaacagaacgagggattctccgtgccacaggtgttgcctgggaatctcaacttaaacccgaagagttgccttctatgcaggatcttttggaagaagcatcctccagggacatgcaaatggggccggggctgttcctgaggatgcagctggtgccctccatagaagagagggagacaccattgactcgagaggaccggccagctctccaggagccgccttggtctctgggatgcacgggactgaaggccgctatgcagattcagagggtggtgataccagtgcctactctgggccaccgcaacccatgggtggccagggattctggccagaaggaggatgcctggtgcagagcgaggagtggtgttgatttgaaggcaggtgggaaggaagtttctttttaaggcagacttgcaggttggttgtggtttatctgcccttgatttgtggtaagtcctggagcaccactagccctgcagtgtagaggggcagagaaaggggccaggcagccggggaggaaaagctgtcccaaagctgagtcgggacagtggtgggggctgcaggagctttggagtctcctggtgaattatggagtctatggctcttgggatatggaatgaaggcgtgcgtgtgtgtgtgtgtgtgtgtgtgcacgtctatatgtctctttgtgtgctggtctgtgtgtatatgttatatatatgaacaggtgcatgtggtatgtaactgtgtatatgtgtgcgtgtttgtgtgtatatgtgtgcatgtctgtgtacgtgtgtgcatgtgattgcatgcatgcgtgtgcaagagcttgcagatatgtgtctgcatgtgtgtgtccctgtgagtgtgtgcatgtgtgtgtgtacacatgtgatcactcacagccagggtgggcagacttggggcctgtgagtgtgcccagtaggccaggcaccaaccctcatgcctcttcccttctcccctagctgtgcctgcacgtgaccctgcctggcttcaggaggacaaagtggaggaagaagctatggctcctgggctgccaaccgcctgttcacaggaaccagtcacctttgcagatgtggctgtggtgttcaccccagaagaatgggtgtttctggactctactcagaggagcctgtatagagatgtgatgctggagaactacaggaacctggcctctgtggctgatcaactgtgcaaacccaatgcgttgtcttatttggaagaaagaggagagcagtggaccactgacaggggcgtcctctcagacacctgtgcagaacctcagtgtcaaccccaagaggcaattcctagccaagatacttttacagagatcctgtccattgatgtgaaaggggagcaacctcagcctggagaaaaactctataaatataatgaacttgagaaaccttttaacagcattgaaccacttttccagtaccagagaattcatgctggagaggcatcctgtgaatgtcaagagattagaaattccttcttccagagtgcccacctaattgtgcccgagaaaatccgtagtggggataaatcctatgcatgtaacaaatgtgaaaaatccttcagatacagctctgaccttatcaggcatgagaagactcatactgcagagaagtgctttgactgtcaagaatgtgggcaagccttcaaatattcctcgaatctccggcgacacatgagaacccataccggagagaagccatttgaatgtagtcagtgtgggaaaaccttcacgaggaactttaacctgattttgcaccagagaaaccacacaggagagaagccctacgagtgtaaagattgtgggaaagccttcaatcagccatcatccctcaggagccacgtgagaactcacactggagagaagccctttgaatgcagccagtgtgggaaagccttcagggaacactcttcactgaagacacatctgcgaacccataccagagagaaaccatatgaatgcaaccagtgtggcaagcccttccggacgagcactcatctgaacgtgcacaagaggatacacacaggggagaaactgtatgagtgcgcgacttgcggtcaggtcttgagtcgtctttcaaccctgaagagtcacatgcgaactcacactggagagaagccctatgtgtgccaggaatgtgggcgagccttcagtgagccctcatccctcaggaaacatgcaaggactcacagtggcaagaagccctatgcatgccaggaatgcgggcgagcctttggtcagtcttcacatcttattgtacatgtgagaacacacagtgccgggagaccctatcaatgtaatcagtgtgagaaagccttcaggcacagctcctcactcactgtacacaaaagaacccatgtgggaagagagaccattaggaatggcagcctgcctttatccatgtctcatccatactgtgggccccttgctaattaacttccattttgtaaaaatataaacacatggggctatgactttccctcgtaatactcctttagctgcatcctgtgtttcaatgtataatattttcattttggtttaattgtaagtattgtcttaacctccattatcgtttattctttgacccatctattatttggaattagatttttcaaaactaatatgtggatatattttcatagaggtataatgacttatagtgaaatgcatacatctgaagtgtacagttggatgagtttgacagatgcatacatgcatgtaaccaccaccccattccagatatagaatgtttctatctctctggaaggttcctgcatgttatatggctatttcttagttgcctttttgttgttggtttctaatttaattacatggtgagaagagtatgtggcctctttgttactgagtcataggtatttgctgagatttgctattaggtctggtgtggcttattcttctagctgccaacccaaattaccccttcctccttagaaaagaacctgggttttctgttcagattggcagtgtgcactattaaaaagcttccatctcccggctgggcacggtggctcatgcctctaatcccagcactttgggaggctgaggctgggggatcacctgaggtcaggagttcgagatcagcctggccaacatggtgaaatcccctctctactaaaaatataaaaattagccaagtttggtggcatgcacctgtaatcccagctacttgggaggctgaggcaggagaattctttgaacccaggaggcagaggttgcagtgagccgagattgcgccactgcactccagcctgggcaacagagtgaaactctgtctcaaaaataataataataaaaaaaagcttccatctcccagcccttcttgcaagcaagggcaggccatttcctccggtcctggctagtatgaatatgagaagtcactggatgtgactctggggaagatattgtgttcagggatggtttcatgtagccacatctctccacttcttgccttttggacaagtagacatgatttctagacctagaggagccctcctgtgaccataagggtaaaagccgcaagctaagaagagggtggccggaagtcataaccatcttgcttctgtaatctaaaaaatatttaggatagatttaatagaattggcatatttatgtgattgcagcagccctggactatttatttctggatgtcccatacatgaaaaatatgcacttcttactggtacagttttcttttgtttgtttttgtttttggtgggaggtttatttcacctgaatataattcctaactgatgcacttagtatatgtcagtttttataaatgcttcatggatggttgaaatcaatgtattgtattctacaaatgtctgctagatcaagcaaatgtgtttaaaaaccatctacacatttataaatgttgatctgt

SEQ ID NO: 202184 - DNA, 1129 bp, Homo sapiens
  Payload ID: 19881
  Gene Name: zinc finger protein 333
  ENST ID: ENST00000597007
  CDS Start-End: 144-464
agcggaagtgcgcgcggcggcggccgacggcggctgagctgtgctgcgcggcgcggcgcggtgcggcacggcacggtgggagtgtctccggctggcttgcagggagaacaccgactgagacctcaaaccctggctccagtgtcatggaatccgtcacctttgaggatgtggccgtggagttcatccaggagtgggcattgctggacagcgcacggaggagcctgtgcaaatacaggatgcttgaccagtgcaggaccctggcctccaggggaactccaccatgcaaacccagttgtgtctcccagctggggcaaagagcagagccaaaggcaacagaacgagggattctccgtgccacaggtgttgcctgggaatctcaacttaaacccgaagagttgccttctatgcaggatcttttggaagaagcatcctccagggacatgcaaatggtggaccccatgtgaagaaaggagagagggagggagaatgagcaacgagggcccggtgccctctttgtttctgtgggctctctcctttcagtacagggctccagtgccctccacagaactccacacccagcccagcaagcccctccataatgggtgctgagagtggcaggcatggggctcttgttacatcagagccccaggaaacaggcggtcacagactattctgagtgggcagaggaggtccacctatggacacacgtttagagaagctgaggagttcatccctgaagacatccagcccgtgagtagtagaggggccggggctgttcctgaggatgcagctggtgccctccatagaagagagggagacaccattgactcgagaggaccggccagctctccaggagccgccttggtctctgggatgcacgggactgaaggccgctatgcagattcagagggtggtgataccagtgcctactctgggccaccgcaacccatgggtggccagggattctgctgtgcctgcacgtgaccctgcctggcttcaggaggacaaagtggaggaagaagctatggctcctgggctgccaaccgcctgttcacaggaaccagtcacctttgcagatgtggctgtggtgttcaccccagaagaatgggtgtttctggactctactcag

SEQ ID NO: 202185 - DNA, 1392 bp, Homo sapiens
  Payload ID: 19881
  Gene Name: zinc finger protein 333
  ENST ID: ENST00000601134
  CDS Start-End: 119-619
gacggcggctgagctgtgctgcgcggcgcggcgcggtgcggcacggcacggtgggagtgtctccggctggcttgcagggagaacaccgactgagacctcaaaccctggctccagtgtcatggaatccgtcacctttgaggatgtggccgtggagttcatccaggagtgggcattgctggacagcgcacggaggagcctgtgcaaatacaggatgcttgaccagtgcaggaccctggcctccaggggggccggggctgttcctgaggatgcagctggtgccctccatagaagagagggagacaccattgactcgagaggaccggccagctctccaggagccgccttggtctctgggatgcacgggactgaaggccgctatgcagattcagagggtggtgataccagtgcctactctgggccaccgcaacccatgggtggccagggattctgggaacaattcttagatctaagtcttgtgttgctcttcagtatatttttgcgggtaacaccactactgtcatccgatggtgagatggggaccaggaaacagtcacaaagaaaacaccgacccctcctccgtggagctcacggtcagctgggtggtcagagttcgaaatgaataacagagtccagtggaagtgtgttatacaaggacttcatctcaggggacgggagagttctgggaaaggatggatatttaagcttaggccagggtttctcaactgcagcactgctgataatgggctactgcagcactgctgataatgggcctgttcactctcagctgtgggccgtcctgtgcattataggatgctgagcagcatccctggcctcaactcactagatgctacgagcacttttcctctatgagtttgctagggctgccatatcaaagttccaccagctgggtggattaaacagcaaaaatatattgtctcaccgttctggaggccagaagctcgagagcaaggtgttggcagtgttggttccttttgaagcctctccttggtgtgtagatggccatcttctctctatatcttcacatcatcttccctctgtccatgtctgtgtccaaatgtcgtcttcttgtgatagggtttggatttgtgtccccacctaaatctcatgtcaaattgtaatctccagtgttggaggaagggcttggtgggaggtgactggatcatgggggtggacttcccccttgctgttctcttgatagtgagtgagttctcacgagatctggttgtttaaaagtgtgtagcacctcccccttcactctcttcctcctgctccagccatgtagcacgtgcctgcttcccctttgccttccgccatgattgtaagtttctcgagtcctccccagccatgcgtcctgtacaacctgtggaacca

SEQ ID NO: 202186 - DNA, 3890 bp, Homo sapiens
  Payload ID: 19882
  Gene Name: zinc finger protein 334
  Uniprot ID: Q9HCZ1
  ENST ID: ENST00000347606
  CDS Start-End: 184-2226
cttccgggtgagggtcctgcagcccgtgaatccctggtcccgccgagacttggacctggtgcgaactggaggcgaagcgggtgcacccacaacctataggaagggctggcggcgagctctgagcactcgggcgtcggagggaacgctctgctttcaacactcttggccctttctcaagagaacatgaaaatgaaaaaatttcagataccagtttcattccaggacctgactgtgaacttcacccaagaggaatggcagcaactggaccctgctcagaggctcctgtacagggatgtgatgctggagaactacagcaacttggtctctgtggggtatcatgttagcaaaccagatgtgattttcaaattggagcaaggagaagagccatggatagtggaggaattctcaaatcagaactacccagacattgatgatgccttagagaagaacaaggaaatccaagataaacatttgacacaaactgtattcttcagcaacaaaacactgattacagaaagagagaatgtatttgggaaaacacttaatctgggcatgaatagtgttccctcaagaaaaatgccctataaatgtaatccaggaggaaacagtttgaaaactaattcagaagtaattgttgcaaagaaaagcaaagaaaacagaaagattcctgatggatacagtggatttgggaagcatgagaaaagtcatttgggaatgaaaaaatacagatacaatccaatgaggaaagccagcaatcaaaacgaaaatcttattctgcaccagaacattcagattttgaaacaaccgtttgactataataaatgtgggaaaaccttcttcaagagggcaattctcattacacaaaaggggagacagactgaaaggaaaccaaatgaatgtaatgaatgtaggaaaaccttttctaagagatctaccctcattgtacatcagagaattcatacaggggagaaaccgtatgtttgtagtgattgtaggaaaacttttcgtgtgaagacaagcctcactcgacaccgaagaattcatactggagagagaccctatgaatgcagtgaatgcaggaaaaccttcattgacaaatctgcccttattgtacaccagaaaattcatggaggggagaaatcctatgagtgtaatgaatgtggaaagaccttttttcggaagtcagccctggctgaacatttcaggtcacacacaggggagaagccttacgaatgcaaggaatgtggaaatgccttcagcaagaaatcgtatcttgttgtacatcaaagaactcacagaggagagaagccaaatgaatgtaaggaatgtgggaaaaccttcttctgtcagtcagcccttactgcgcatcagagaattcacacaggggaaaaaccctatgaatgtagtgaatgtgagaaaaccttcttttgtcaatctgccctcaatgtgcatcgaagaagtcatacaggagagaagccctatgaatgcagtcaatgtggaaaatttttatgtacgaaatcagccctcattgcacatcagataactcatagaggaaagaagtcttatgaatgtaatgaatgtgggaaatttttctgccataagtcaacactcactatacatcagagaacacacacaggagagaaacatggtgtgtttaataaatgtggtagaatctccattgtgaagtcaaactgcagtcagtgtaagagaatgaacacaaaggagaatctttatgagtgtagtgaacatgggcatgccgtcagcaaaaactcacacctcattgtacatcagagaactatatgggagagaccatatgaatgcaatgaatgtgggagaacctactgcaggaagtcagccctgactcaccatcagagaacacacacaggacagagaccctatgagtgtaatgaatgtgggaaaaccttctgtcagaagttctcctttgttgaacatcagcgaactcacactggggagaaaccatatgaatgtaatgaatgtgggaaatccttctgccataagtcagccttcagagtccatagaagaattcacacaggagagaaaccatatgaatgtaatcaatgtgggaaaacctaccgtcgcctgtggactctcactgaacatcagaaaatacacacaggagagaaaccttatgaatgtaacaaatgtgagaaaacatttcgccacaaatcaaactttcttttacatcagaaatcccacaaggaataagttccaacaaagtaataaattccaacaaagcaacaaatcaaataacttacacaatgctaaactgtgagtatgtatagaggagtaaaatcttataaatgtaatgaatatggaaaatttttctgccataagtcaaccctcaatgtaacatcagagaaatcatgtaggaaagaaataatttgtttaataaatgtattattcattgtgaactatgaaaatattcaacagcaattcaaaggttatgccaaatgtgcctcccttttaaaataatgaaacaaacattgtttaagttaaattgttacttggttcctccccacagtgttacttgatagtgtatgttacgaggtgtgaggatctgaccttcatttcaaatcaataccattgtttgatagttgagtaagttacagtttctcaatttatggtgtattttcagatttggcagattttttgttgtctgctaactccatagtcttctagtagtggactgtatacctttatctgcaaaggtgacaactcaggagaactaaccattgtactctatgcacccatggtaattataccccaggtgagcattttgtaaagctgagccagtgaaagcccttcctaagacctttctaatggaagataggcacaggataactagttcatgatcctgaagctttcagctaagtcaagaagacggcaattgcagtaggaaaaacatgggaaaataagcattcttgaacaacaaagagaatttggatgatggttgaatccaaaaagtgtttatttctctggttttagtattctgtaatatccactcaaccccatctaccagtggtttatgtcaattagtatgttttcaaaaatctcttggatttcctaatcaacatgttcattagaggtattgtttagaagtcactgatcaaattctgagaacaaaaggcgcctgggatgctgattaggattacattatatggatatatatgatgaggtaggattgccacttttatggggttattgggaaatgtttacctttcaagttctgatttccatgagtgggattttccctatacccattcctagcttctctgccacattatgcattctgccccaggcatgaggaagtgggcttatctagttggtaagatagtgatgggtaactgggtttgctcagctgaactccctcttcattgtgggctgacctgcaagtataatttcttgtcacagatattgcctgtgattggtaaattggtctaattctgtcattcagctaattggcccattagctgaatggtcacactaagttgcatcctccaactcaatttgatcagtaataaaagtttcatcctgccccctgtctgctacttaattttttatcgtttagatggggggaaattgtgctatttatttggggcccttcagagaacccaatatgaacatgatttatctatttattcagtttttatgtccttcaggacagataaatgtatgtatacacacatatacatgtgttaatatatgtaagtatatacatatgtttaaatgtatgtgtatgtgtatactgatcttgctcttttcctgtgaaatgtattaatagtcacttcaaagatttggttgctattgtgaaagaaattaagttacctttcactttgaaactaatagagtaaagaaaaacaaaaatacct

SEQ ID NO: 202187 - DNA, 3487 bp, Homo sapiens
  Payload ID: 19882
  Gene Name: zinc finger protein 334
  ENST ID: ENST00000457685
  CDS Start-End: 1325-3253
aggctcttccgggtgagggtcctgcagcccgtgaatccctggtcccgccgagacttggacctggtgcgaactggaggcgaagcgggtgcacccacaacctataggaagggctggcggcgagctctgagcactcgggcgtcggagggaacggtggggccgggcggagcgggcctcgggtctgcggagggtggacgcgcgctctccctgtctttggagggagggtttcctgtggtcgggaggcgaggcagccagggcaggattgggctcctgacctgcaggccacgggcgagctctctctagggccctgatttgcccgaagaaggcgcttggtgaaggtgaaaggtttacgcatccaagtagctagaacctctttccagaacttctgctgatgcacttagtcttgcagccattgattattatagctcagcaaagttcagttcaactttcggaagaaggatgtgagctggaatgggcagggtcaagatttgacaggaaaagacacttcactggaggtatctgcgagagtcctgggttggagggaaggagtactggttataaataaggaaatgatgtcttcatcacttcctaaacacatacatgtcattccctaccatctccaccctctgtttattcagagctgcaccaaccatgttcatcacctcacctgggatttactgagtttaccccttacagagctacacgataggggtaaaggaaagactaaaaaccaatttatcttatattaaaattacgacttagtaaatatttttttcagtaatgcagtttgctagtgacagatccaataactgaattctggtcctttgagtaccaggtcagggcttttgtcatctaccacatttacgttacctaccacaagaagtttcttagtaaaaggtcctcttgtgaaactgcagctaagggaaaccaaactgtcaaaaagacaaacaccttaaagcactttcattcattctctctggattctgtcatctcaagtggctaaacacattagtaggaaaacagctctgctttcaacactcttggccctttctcaagagaacatgaaaatgaaaaaatttcagagatggggttttgccgtgttgcccagactgatcttgagcttctgagctccagcgatcagcctacctcaacctctcagagtgctgggattataggtgtgcgccaccacacctggccatgtgtgttttcttacatctcctttcttacataaaagataccagtttcattccaggacctgactgtgaacttcacccaagaggaatggcagcaactggaccctgctcagaggctcctgtacagggatgtgatgctggagaactacagcaacttggtctctgtggggtatcatgttagcaaaccagatgtgattttcaaattggagcaaggagaagagccatggatagtggaggaattctcaaatcagaactacccagacattgatgatgccttagagaagaacaaggaaatccaagataaacatttgacacaaactgtattcttcagcaacaaaacactgattacagaaagagagaatgtatttgggaaaacacttaatctgggcatgaatagtgttccctcaagaaaaatgccctataaatgtaatccaggaggaaacagtttgaaaactaattcagaagtaattgttgcaaagaaaagcaaagaaaacagaaagattcctgatggatacagtggatttgggaagcatgagaaaagtcatttgggaatgaaaaaatacagatacaatccaatgaggaaagccagcaatcaaaacgaaaatcttattctgcaccagaacattcagattttgaaacaaccgtttgactataataaatgtgggaaaaccttcttcaagagggcaattctcattacacaaaaggggagacagactgaaaggaaaccaaatgaatgtaatgaatgtaggaaaaccttttctaagagatctaccctcattgtacatcagagaattcatacaggggagaaaccgtatgtttgtagtgattgtaggaaaacttttcgtgtgaagacaagcctcactcgacaccgaagaattcatactggagagagaccctatgaatgcagtgaatgcaggaaaaccttcattgacaaatctgcccttattgtacaccagaaaattcatggaggggagaaatcctatgagtgtaatgaatgtggaaagaccttttttcggaagtcagccctggctgaacatttcaggtcacacacaggggagaagccttacgaatgcaaggaatgtggaaatgccttcagcaagaaatcgtatcttgttgtacatcaaagaactcacagaggagagaagccaaatgaatgtaaggaatgtgggaaaaccttcttctgtcagtcagcccttactgcgcatcagagaattcacacaggggaaaaaccctatgaatgtagtgaatgtgagaaaaccttcttttgtcaatctgccctcaatgtgcatcgaagaagtcatacaggagagaagccctatgaatgcagtcaatgtggaaaatttttatgtacgaaatcagccctcattgcacatcagataactcatagaggaaagaagtcttatgaatgtaatgaatgtgggaaatttttctgccataagtcaacactcactatacatcagagaacacacacaggagagaaacatggtgtgtttaataaatgtggtagaatctccattgtgaagtcaaactgcagtcagtgtaagagaatgaacacaaaggagaatctttatgagtgtagtgaacatgggcatgccgtcagcaaaaactcacacctcattgtacatcagagaactatatgggagagaccatatgaatgcaatgaatgtgggagaacctactgcaggaagtcagccctgactcaccatcagagaacacacacaggacagagaccctatgagtgtaatgaatgtgggaaaaccttctgtcagaagttctcctttgttgaacatcagcgaactcacactggggagaaaccatatgaatgtaatgaatgtgggaaatccttctgccataagtcagccttcagagtccatagaagaattcacacaggagagaaaccatatgaatgtaatcaatgtgggaaaacctaccgtcgcctgtggactctcactgaacatcagaaaatacacacaggagagaaaccttatgaatgtaacaaatgtgagaaaacatttcgccacaaatcaaactttcttttacatcagaaatcccacaaggaataagttccaacaaagtaataaattccaacaaagcaacaaatcaaataacttacacaatgctaaactgtgagtatgtatagaggagtaaaatcttataaatgtaatgaatatggaaaatttttctgccataagtcaaccctcaatgtaacatcagagaaatcatgtaggaaagaaataatttgtttaataaatgtattattcattgtgaactatgaaaatattcaacagcaattcaaa

SEQ ID NO: 202188 - DNA, 2243 bp, Homo sapiens
  Payload ID: 19882
  Gene Name: zinc finger protein 334
  ENST ID: ENST00000596323
  CDS Start-End: 1724-2243
tataggtgtgcgccaccacacctggccatgtgtgttttcttacatctcctttcttacataaaaggtaatatattatagatattctttaatactttgcttttttcacttcatatcagttcatggagaccttcctcattatttatgctttcaaatattgcttctgatcactgtggtatctctcctgtgagctccagaaccatatatcaaactgccagctagatatctgtacttctttactcaacagacacttcaagcacagcatggtaaagatcagtgccttcatttcctatgctcgattctcttttttgttttgttttcctaatctccacatatactactagcgtcagcccagctgatcatgtgaaataatatgcacattacatctactgcacatcaagtagtggtcaactctccttgcctcccgttatgtaggactgattctctccttcccatttcccaggaactacctgtgctcatgtcctgtagtagtgtcttagttttcttcccttctaatttgacctttaagccagtttccatttttctagagtaggggacagcaaatgttttctttagaggacaaggtcaaaatttttggctttgctggccctgtggtctctgttggatttccttggcacagctgttgtgacatgaaagcagtcatagactgtgtgtaacaaatgagcgtgaccacgtttggctcccagtggcctagattttgcccacggactgaagtttgccaactcttatgctctagagcattgtttcaaaatacacatttggtcacaaatctccagtccttgcttacaaataactctttatggatttccattatttataacagtgatctccaaagtggaggatagggagcaccccagcaattcactggacttctattcttgtatttcagccaaaagaatgaaaaaataattaagctttattgatattagtgtatagctggaactcacttggaaatatactacaattcctaagtaaatgtacgttagcgtatatgcaagaatgttttactgatgtgccgtactatctaaatttcaagactactaattagagaaaagagttcctctattctctgacctctgtcccgctcctcactaacctttcctgtggagagattgtagttctcgaactccccatatgtgttttgtgtctgtgtatattcttaatggctacagtcctataaaacatactgtttatatttcaggactaaaattattatgctctcaaggaaggggtaacaaaaatggagcaagctttcttcttttgtgatcacccttcatcttgtgtatatgtccagcattgctctttaaagatgtacatttctatttttgtcaccctgtcagaatgtatgctcctaaagagtaagattagtattttatgtgattagtaatccaggcaattggaatagctccaggacatggtataagctcagcacatttttaaaattcattttaaaaaatgaacacagtgacagatttttaattttctgccctcccacaattacatctctctatagctttccattagccatggcagtggtcttcttatagtttatgttaccatacatttgatatcactcaattttggtcacccaagattaaacattttctttcagataccagtttcattccaggacctgactgtgaacttcacccaagaggaatggcagcaactggaccctgctcagaggctcctgtacagggatgtgatgctggagaactacagcaacttggtctctgtggggtatcatgttagcaaaccagatgtgattttcaaattggagcaaggagaagagccatggatagtggaggaattctcaaatcagaactacccagacattgatgatgccttagagaagaacaaggaaatccaagataaacatttgacacaaactgtattcttcagcaacaaaacactgattacagaaagagagaatgtatttgggaaaacacttaatctgggcatgaatagtgttccctcaagaaaaatgccctataaatgtaatccaggaggaaacagtttgaaaactaattcagaagtaattgttgcaaagaaaagcaaagaaaacagaaagattcctgatggatacagtggatttgggaagcatgagaaaagtcatttgggaatgaaaaaatacagatacaatccaatgaggaaagccagcaatcaaaacgaaaatcttattctgcaccagaacattcagattttgaaacaaccgtttgactata

SEQ ID NO: 202189 - DNA, 2635 bp, Homo sapiens
  Payload ID: 19882
  Gene Name: zinc finger protein 334
  ENST ID: ENST00000593880
  CDS Start-End: 296-2407
gtgggtttttttgtttttttgagatgaggtcttgcactgtcacccaggctgctggagtacagtggcacaatctgagctcactgcaacctctgactcccagactcaagtgatcctcttgcctcagccacccgagtagcacatgccaccatgcctggctaatttttttttatttttttgtagagatggggttttgccgtgttgcccagactgatcttgagcttctgagctccagcgatcagcctacctcaacctctcagagtgctgggattataggtgtgcgccaccacacctggccatgtgtgttttcttacatctcctttcttacataaaagataccagtttcattccaggacctgactgtgaacttcacccaagaggaatggcagcaactggaccctgctcagaggctcctgtacagggatgtgatgctggagaactacagcaacttggtctctgtggagtctctgatgtccaaagatcttggtccaagttctgtaatttcccattaacagggtatcatgttagcaaaccagatgtgattttcaaattggagcaaggagaagagccatggatagtggaggaattctcaaatcagaactacccagacattgatgatgccttagagaagaacaaggaaatccaagataaacatttgacacaaactgtattcttcagcaacaaaacactgattacagaaagagagaatgtatttgggaaaacacttaatctgggcatgaatagtgttccctcaagaaaaatgccctataaatgtaatccaggaggaaacagtttgaaaactaattcagaagtaattgttgcaaagaaaagcaaagaaaacagaaagattcctgatggatacagtggatttgggaagcatgagaaaagtcatttgggaatgaaaaaatacagatacaatccaatgaggaaagccagcaatcaaaacgaaaatcttattctgcaccagaacattcagattttgaaacaaccgtttgactataataaatgtgggaaaaccttcttcaagagggcaattctcattacacaaaaggggagacagactgaaaggaaaccaaatgaatgtaatgaatgtaggaaaaccttttctaagagatctaccctcattgtacatcagagaattcatacaggggagaaaccgtatgtttgtagtgattgtaggaaaacttttcgtgtgaagacaagcctcactcgacaccgaagaattcatactggagagagaccctatgaatgcagtgaatgcaggaaaaccttcattgacaaatctgcccttattgtacaccagaaaattcatggaggggagaaatcctatgagtgtaatgaatgtggaaagaccttttttcggaagtcagccctggctgaacatttcaggtcacacacaggggagaagccttacgaatgcaaggaatgtggaaatgccttcagcaagaaatcgtatcttgttgtacatcaaagaactcacagaggagagaagccaaatgaatgtaaggaatgtgggaaaaccttcttctgtcagtcagcccttactgcgcatcagagaattcacacaggggaaaaaccctatgaatgtagtgaatgtgagaaaaccttcttttgtcaatctgccctcaatgtgcatcgaagaagtcatacaggagagaagccctatgaatgcagtcaatgtggaaaatttttatgtacgaaatcagccctcattgcacatcagataactcatagaggaaagaagtcttatgaatgtaatgaatgtgggaaatttttctgccataagtcaacactcactatacatcagagaacacacacaggagagaaacatggtgtgtttaataaatgtggtagaatctccattgtgaagtcaaactgcagtcagtgtaagagaatgaacacaaaggagaatctttatgagtgtagtgaacatgggcatgccgtcagcaaaaactcacacctcattgtacatcagagaactatatgggagagaccatatgaatgcaatgaatgtgggagaacctactgcaggaagtcagccctgactcaccatcagagaacacacacaggacagagaccctatgagtgtaatgaatgtgggaaaaccttctgtcagaagttctcctttgttgaacatcagcgaactcacactggggagaaaccatatgaatgtaatgaatgtgggaaatccttctgccataagtcagccttcagagtccatagaagaattcacacaggagagaaaccatatgaatgtaatcaatgtgggaaaacctaccgtcgcctgtggactctcactgaacatcagaaaatacacacaggagagaaaccttatgaatgtaacaaatgtgagaaaacatttcgccacaaatcaaactttcttttacatcagaaatcccacaaggaataagttccaacaaagtaataaattccaacaaagcaacaaatcaaataacttacacaatgctaaactgtgagtatgtatagaggagtaaaatcttataaatgtaatgaatatggaaaatttttctgccataagtcaaccctcaatgtaacatcagagaaatcatgtaggaaagaaataatttgtttaataaatgtattattcattgtgaactatgaaaatattcaacagcaa

SEQ ID NO: 202190 - DNA, 3706 bp, Homo sapiens
  Payload ID: 19882
  Gene Name: zinc finger protein 334
  ENST ID: ENST00000615481
  CDS Start-End: 1-2040
atggaaaatgagaaggagataccagtttcattccaggacctgactgtgaacttcacccaagaggaatggcagcaactggaccctgctcagaggctcctgtacagggatgtgatgctggagaactacagcaacttggtctctgtggggtatcatgttagcaaaccagatgtgattttcaaattggagcaaggagaagagccatggatagtggaggaattctcaaatcagaactacccagacattgatgatgccttagagaagaacaaggaaatccaagataaacatttgacacaaactgtattcttcagcaacaaaacactgattacagaaagagagaatgtatttgggaaaacacttaatctgggcatgaatagtgttccctcaagaaaaatgccctataaatgtaatccaggaggaaacagtttgaaaactaattcagaagtaattgttgcaaagaaaagcaaagaaaacagaaagattcctgatggatacagtggatttgggaagcatgagaaaagtcatttgggaatgaaaaaatacagatacaatccaatgaggaaagccagcaatcaaaacgaaaatcttattctgcaccagaacattcagattttgaaacaaccgtttgactataataaatgtgggaaaaccttcttcaagagggcaattctcattacacaaaaggggagacagactgaaaggaaaccaaatgaatgtaatgaatgtaggaaaaccttttctaagagatctaccctcattgtacatcagagaattcatacaggggagaaaccgtatgtttgtagtgattgtaggaaaacttttcgtgtgaagacaagcctcactcgacaccgaagaattcatactggagagagaccctatgaatgcagtgaatgcaggaaaaccttcattgacaaatctgcccttattgtacaccagaaaattcatggaggggagaaatcctatgagtgtaatgaatgtggaaagaccttttttcggaagtcagccctggctgaacatttcaggtcacacacaggggagaagccttacgaatgcaaggaatgtggaaatgccttcagcaagaaatcgtatcttgttgtacatcaaagaactcacagaggagagaagccaaatgaatgtaaggaatgtgggaaaaccttcttctgtcagtcagcccttactgcgcatcagagaattcacacaggggaaaaaccctatgaatgtagtgaatgtgagaaaaccttcttttgtcaatctgccctcaatgtgcatcgaagaagtcatacaggagagaagccctatgaatgcagtcaatgtggaaaatttttatgtacgaaatcagccctcattgcacatcagataactcatagaggaaagaagtcttatgaatgtaatgaatgtgggaaatttttctgccataagtcaacactcactatacatcagagaacacacacaggagagaaacatggtgtgtttaataaatgtggtagaatctccattgtgaagtcaaactgcagtcagtgtaagagaatgaacacaaaggagaatctttatgagtgtagtgaacatgggcatgccgtcagcaaaaactcacacctcattgtacatcagagaactatatgggagagaccatatgaatgcaatgaatgtgggagaacctactgcaggaagtcagccctgactcaccatcagagaacacacacaggacagagaccctatgagtgtaatgaatgtgggaaaaccttctgtcagaagttctcctttgttgaacatcagcgaactcacactggggagaaaccatatgaatgtaatgaatgtgggaaatccttctgccataagtcagccttcagagtccatagaagaattcacacaggagagaaaccatatgaatgtaatcaatgtgggaaaacctaccgtcgcctgtggactctcactgaacatcagaaaatacacacaggagagaaaccttatgaatgtaacaaatgtgagaaaacatttcgccacaaatcaaactttcttttacatcagaaatcccacaaggaataagttccaacaaagtaataaattccaacaaagcaacaaatcaaataacttacacaatgctaaactgtgagtatgtatagaggagtaaaatcttataaatgtaatgaatatggaaaatttttctgccataagtcaaccctcaatgtaacatcagagaaatcatgtaggaaagaaataatttgtttaataaatgtattattcattgtgaactatgaaaatattcaacagcaattcaaaggttatgccaaatgtgcctcccttttaaaataatgaaacaaacattgtttaagttaaattgttacttggttcctccccacagtgttacttgatagtgtatgttacgaggtgtgaggatctgaccttcatttcaaatcaataccattgtttgatagttgagtaagttacagtttctcaatttatggtgtattttcagatttggcagattttttgttgtctgctaactccatagtcttctagtagtggactgtatacctttatctgcaaaggtgacaactcaggagaactaaccattgtactctatgcacccatggtaattataccccaggtgagcattttgtaaagctgagccagtgaaagcccttcctaagacctttctaatggaagataggcacaggataactagttcatgatcctgaagctttcagctaagtcaagaagacggcaattgcagtaggaaaaacatgggaaaataagcattcttgaacaacaaagagaatttggatgatggttgaatccaaaaagtgtttatttctctggttttagtattctgtaatatccactcaaccccatctaccagtggtttatgtcaattagtatgttttcaaaaatctcttggatttcctaatcaacatgttcattagaggtattgtttagaagtcactgatcaaattctgagaacaaaaggcgcctgggatgctgattaggattacattatatggatatatatgatgaggtaggattgccacttttatggggttattgggaaatgtttacctttcaagttctgatttccatgagtgggattttccctatacccattcctagcttctctgccacattatgcattctgccccaggcatgaggaagtgggcttatctagttggtaagatagtgatgggtaactgggtttgctcagctgaactccctcttcattgtgggctgacctgcaagtataatttcttgtcacagatattgcctgtgattggtaaattggtctaattctgtcattcagctaattggcccattagctgaatggtcacactaagttgcatcctccaactcaatttgatcagtaataaaagtttcatcctgccccctgtctgctacttaattttttatcgtttagatggggggaaattgtgctatttatttggggcccttcagagaacccaatatgaacatgatttatctatttattcagtttttatgtccttcaggacagataaatgtatgtatacacacatatacatgtgttaatatatgtaagtatatacatatgtttaaatgtatgtgtatgtgtatactgatcttgctcttttcctgtgaaatgtattaatagtcacttcaaagatttggttgctattgtgaaagaaattaagttacctttcactttgaaactaatagagtaaagaaaaacaaaaatacctaa

SEQ ID NO: 202191 - DNA, 2495 bp, Homo sapiens
  Payload ID: 19882
  Gene Name: zinc finger protein 334
  ENST ID: ENST00000625284
  CDS Start-End: 248-2287
tcttccgggtgagggtcctgcagcccgtgaatccctggtcccgccgagacttggacctgctctgctttcaacactcttggccctttctcaagagaacatgaaaatgaaaaaatttcagacttggatgaaaccacacaccatgaggtgtggtaccagcttcctgaggggccagatggtggagccagatgatgcaacctggaagtgtgcgcaagttaactcaccgtgggtgaaccttgaatgaagggaaatggaaaatgagaaggagataccagtttcattccaggacctgactgtgaacttcacccaagaggaatggcagcaactggaccctgctcagaggctcctgtacagggatgtgatgctggagaactacagcaacttggtctctgtggggtatcatgttagcaaaccagatgtgattttcaaattggagcaaggagaagagccatggatagtggaggaattctcaaatcagaactacccagacattgatgatgccttagagaagaacaaggaaatccaagataaacatttgacacaaactgtattcttcagcaacaaaacactgattacagaaagagagaatgtatttgggaaaacacttaatctgggcatgaatagtgttccctcaagaaaaatgccctataaatgtaatccaggaggaaacagtttgaaaactaattcagaagtaattgttgcaaagaaaagcaaagaaaacagaaagattcctgatggatacagtggatttgggaagcatgagaaaagtcatttgggaatgaaaaaatacagatacaatccaatgaggaaagccagcaatcaaaacgaaaatcttattctgcaccagaacattcagattttgaaacaaccgtttgactataataaatgtgggaaaaccttcttcaagagggcaattctcattacacaaaaggggagacagactgaaaggaaaccaaatgaatgtaatgaatgtaggaaaaccttttctaagagatctaccctcattgtacatcagagaattcatacaggggagaaaccgtatgtttgtagtgattgtaggaaaacttttcgtgtgaagacaagcctcactcgacaccgaagaattcatactggagagagaccctatgaatgcagtgaatgcaggaaaaccttcattgacaaatctgcccttattgtacaccagaaaattcatggaggggagaaatcctatgagtgtaatgaatgtggaaagaccttttttcggaagtcagccctggctgaacatttcaggtcacacacaggggagaagccttacgaatgcaaggaatgtggaaatgccttcagcaagaaatcgtatcttgttgtacatcaaagaactcacagaggagagaagccaaatgaatgtaaggaatgtgggaaaaccttcttctgtcagtcagcccttactgcgcatcagagaattcacacaggggaaaaaccctatgaatgtagtgaatgtgagaaaaccttcttttgtcaatctgccctcaatgtgcatcgaagaagtcatacaggagagaagccctatgaatgcagtcaatgtggaaaatttttatgtacgaaatcagccctcattgcacatcagataactcatagaggaaagaagtcttatgaatgtaatgaatgtgggaaatttttctgccataagtcaacactcactatacatcagagaacacacacaggagagaaacatggtgtgtttaataaatgtggtagaatctccattgtgaagtcaaactgcagtcagtgtaagagaatgaacacaaaggagaatctttatgagtgtagtgaacatgggcatgccgtcagcaaaaactcacacctcattgtacatcagagaactatatgggagagaccatatgaatgcaatgaatgtgggagaacctactgcaggaagtcagccctgactcaccatcagagaacacacacaggacagagaccctatgagtgtaatgaatgtgggaaaaccttctgtcagaagttctcctttgttgaacatcagcgaactcacactggggagaaaccatatgaatgtaatgaatgtgggaaatccttctgccataagtcagccttcagagtccatagaagaattcacacaggagagaaaccatatgaatgtaatcaatgtgggaaaacctaccgtcgcctgtggactctcactgaacatcagaaaatacacacaggagagaaaccttatgaatgtaacaaatgtgagaaaacatttcgccacaaatcaaactttcttttacatcagaaatcccacaaggaataagttccaacaaagtaataaattccaacaaagcaacaaatcaaataacttacacaatgctaaactgtgagtatgtatagaggagtaaaatcttataaatgtaatgaatatggaaaatttttctgccataagtcaaccctcaatgtaacatcagagaaatcatgtaggaaagaaataatttgtttaataaatgtattattcattgtgaact

SEQ ID NO: 202192 - DNA, 4430 bp, Homo sapiens
  Payload ID: 19883
  Gene Name: zinc finger protein 335
  Uniprot ID: Q9H4Z2
  ENST ID: ENST00000322927
  CDS Start-End: 102-4130
cgacctcgtcgatgccggagtcagagaggaacgtggctacgaaagcctcggagtgaagttcccagaccctacgccccgctgtcaggcagcccgccgatcagatggaggagaacgaggtggagagcagcagcgacgcggcccctgggcctggccggcccgaggagccctctgagagcggcctgggtgtgggcacctcagaagccgtgtccgccgacagcagcgacgccgcggccgccccggggcaggcagaggccgatgactctggcgtggggcaaagctcggaccgcggcagccgttctcaggaggaggtatctgagagcagctcgagcgcagaccccctgcctaatagctacctccctgattcatcgtctgtgtctcatgggccagtggcaggggtgacaggcggtcccccagcacttgtgcactctagtgcactcccagaccccaacatgctggtgtccgactgcacagcttcctcctcggacctgggctcggccatcgacaagatcatcgagtccaccatcgggcccgacctcatccagaactgcatcactgtgaccagtgctgaggatggcggggccgagaccacacggtacctgatcctacagggcccagatgatggagcccccatgacatcaccaatgtccagttccaccttggcccacagcctagcagccattgaggccctggcagatggccccacatccacatccacatgcctggaggcacagggtgggcccagctccccggtgcagctgcccccagcctccggtgccgaagagccggacctgcagagcctggaggccatgatggaggtggtggtggtgcagcagttcaaatgcaagatgtgccagtaccggagcagcaccaaggccacactgctgcgccacatgcgggaacgccacttccgtccagtagcagcagccgcagcagcagctggtaaaaaaggacgtctacggaagtggagcacctccaccaagagccaagaggaagagggaccagaggaggaggacgatgatgacattgtagacgctggagccattgatgacctggaggaggatagcgactataatccagctgaggatgagccccgaggccggcagcttcggctccagcgccccacccccagtaccccaaggccccgaaggagacctggccggccccggaagctgccccgcctggagatctcagacctcccagatggtgtggaaggagagcctctagtgagttcccagagtggacagagccctccagagccacaggatcccgaggctcccagctcctcaggcccaggacacctggtggccatgggcaaggtgagcaggacccctgtggaagctggtgtgagccagtcagatgcagagaacgcagccccctcctgcccggatgagcatgacactctgccccggcgccgaggtcgaccttccaggcgcttcctaggcaagaaataccgcaagtactattacaagtcgcccaaaccacttttgaggcccttcctgtgccgcatctgtggttctcgctttctgtcccacgaggacctgcgcttccacgtcaactcccatgaggctggcgatccccagctcttcaagtgcctgcagtgcagctatcgttcccgccgctggtcctcgctcaaggagcacatgttcaaccacgtgggcagcaagccctacaagtgtgacgagtgcagctacaccagtgtctaccggaaggacgtcattcggcacgccgctgtgcacagccgggaccggaagaagaggccagatccgactccaaagctgagctctttcccctgccctgtgtgtggccgtgtgtaccccatgcagaaaagactcacgcagcacatgaagacgcacagcactgagaagccccacatgtgtgacaagtgtggaaagtcctttaagaagcgctacaccttcaaaatgcacctgctcacgcacatccaggctgttgccaaccgcaggttcaagtgtgagttctgtgagtttgtttgtgaagacaagaaggcactgctgaaccaccagttgtcccacgtcagtgacaagcccttcaaatgcagcttttgtccctaccgcaccttccgagaggacttcttgctgtcccatgtggctgtcaagcacacaggggccaagcccttcgcctgtgagtactgccacttcagcacacggcacaagaagaacctgcgcctgcacgtacggtgccgacacgcaagcagcttcgaggaatgggggaggcgccaccctgaggagcccccctcccgccgtcgccccttcttctctctgcagcagattgaggagctgaagcagcagcacagtgcggcccctggaccacctcccagttccccaggacctcctgagatacccccagaggcgacaactttccagtcatctgaggctccctcattgctctgttctgacaccctgggcggcgccaccatcatctaccagcaaggagctgaggagtcgacagcgatggccacgcagacagccttggatcttctgctgaacatgagtgctcagcgggaactggggggcacagccctgcaggtggctgtggtgaagtcggaagatgtggaagcagggttagcatcccctggtgggcagccctcccctgaaggtgccactccacaggtggtcaccctccacgtggcagagccagggggcggtgcagcagccgagagccagctaggccctcctgacctaccgcagatcaccctggcacctggtccatttggtgggactggctacagtgtcatcacagcaccccctatggaggagggaacatcagctcctggcacaccttacagcgaggagcccgcaggagaggcagcccaggctgtggttgtgagtgacaccctaaaagaagctggcacccactacatcatggctactgatggtacccagttgcaccacattgagctcaccgcagatggctccatctccttcccaagtccagatgctctggcctctggtgccaaatggcccctgctgcagtgtgggggactgcccagagacggccctgagcccccatctccagccaagacccactgcgtaggggactcccagagctctgcctcctcacctcctgcaaccagcaaagccctgggcctggcagtgcccccgtcaccgccatctgcagccactgctgcatcaaagaagttttcctgcaagatctgtgccgaggccttccctggccgagctgagatggagagtcacaagcgggcccacgctgggcctggtgccttcaagtgccccgactgccccttcagtgcccgccagtggcccgaggtccgggcgcacatggcacagcactcaagcctacggccccaccagtgtagccagtgcagctttgcctccaagaacaagaaggacctgcgtcggcacatgctgactcacacaaaggagaagccttttgcatgccacctctgcgggcagcgtttcaaccgtaacgggcacctcaagttccacatccagcggctgcacagtcctgatgggaggaagtcaggaacccctacagcccgggcccctacccagaccccaacccagaccatcatcctgaacagtgatgacgaaacactggccaccctgcacactgcactccagtccagtcacggggtcctgggcccagagcggctacagcaggcactgagccaggaacacatcatcgttgcccaggaacagacagtgaccaatcaggaggaagccgcctacatccaagagatcaccacggcagatggccagaccgtacagcacctggtgacctccgacaaccaggtgcagtatatcatctcccaggatggtgtccagcacctgctcccccaggaatatgttgtggtccctgaaggccatcacatccaggtacaggagggccagatcacacacatccagtatgaacaaggagccccgttccttcaggagtcccagatccagtatgtgcctgtgtccccaggccagcagcttgtcacacaggctcaacttgaggctgcagcacactcagctgtcacagcagtggctgatgctgccatggcccaagcccagggcctgtttggtacagacgagacagtgcccgaacacattcaacagctgcagcaccagggcatcgagtacgacgtcatcaccctggccgatgactgagccccgagggcccaacacagatcatggatttgcggccagctctcctgggggtagggggccaccaggactcacctccctcttcatttaggatctccagatactggatagccagcatcctctcattcccagggagccagacctgtgctgttggggttaggggcagccatgggccccagccaggacatgctgggtgccccagcctgcaggcaggctttgggagagaaatttatttttgtttgggtggacccactggcctgtcagtctcaataaagggaccggagtccagtcctgaacagctta

SEQ ID NO: 202193 - DNA, 3205 bp, Homo sapiens
  Payload ID: 19884
  Gene Name: zinc finger protein 337
  Uniprot ID: Q9Y3M9
  ENST ID: ENST00000252979
  CDS Start-End: 133-2388
agatccctgggcgtcagcgagccgtgagatgcgtggtccaccatcggtgacctcaccgcctcggttcgccctcagccgccccgattggccatctgcaagcttcccttctccgtggagagcaggaagacagtcatgggacctcagggagccaggagacaggctttcttggcatttggggatgtcactgtggatttcacccagaaggaatggaggctgctgagccctgctcagagggccctgtacagggaggtgacactggagaactacagccacctggtctcactaggaattctccattctaaaccagaactcatcaggcggctagagcaaggggaagtgccctggggagaagagagaagacgccggccaggcccctgtgcaggaatatatgcagaacatgtcctgcggcccaagaatcttggacttgcacatcagaggcaacagcaactacaattttctgatcaaagcttccagagtgacacagctgaaggtcaagagaaagaaaaaagcactaagcccatggcattttccagcccacccctaagacatgcagtaagctcaaggaggaggaacagtgtagtggaaatagagtctagtcaaggccagagggaaaatcctacagaaatagacaaagtattgaaaggaatagaaaattcaagatggggagcattcaagtgtgcagagcgtgggcaagacttcagccggaagatgatggtaatcatacacaaaaaagcacattccaggcagaaactttttacatgcagggagtgtcaccagggctttagagatgagtcagcattgctcttgcaccagaacacacacacaggagagaagtcctatgtgtgcagtgtgtgtgggcgaggcttcagcctcaaggccaacctcctcagacaccagaggacacactcaggagagaagccttttctgtgcaaggtgtgtggacgaggctataccagtaagtcatacctcactgtgcatgagagaacacacacaggagagaagccttatgaatgccaggagtgtgggcgaaggtttaacgataagtcctcatacaacaagcacttgaaggcgcattcaggggagaagccttttgtgtgcaaggagtgtgggcgaggctatactaataagtcatacttcgttgtgcacaagagaatacactcaggagagaagccttacagatgccaggagtgtggccgaggctttagcaataagtcacaccttatcacacaccagaggacacactcaggggagaagccctttgcgtgcaggcagtgtaagcaaagttttagcgtgaaaggaagtctcctcagacaccagagaacacactcaggggagaagccttttgtgtgcaaggattgtgagcgaagctttagccaaaagtcaactcttgtctaccaccagagaacacactcaggggagaaaccttttgtttgtagagaatgtgggcaaggatttattcagaagtcaacccttgtgaaacatcagatcacacactcagaggagaagccttttgtgtgcaaggactgtggacgaggctttatccaaaagtcaaccttcactttacaccagaggacacactcagaggagaagccttatggatgtcgggagtgtgggcgaaggtttcgggataagtcctcctataacaagcacctgagggcacacttgggtgagaaacgttttttctgcagggattgtgggcgaggctttaccttgaagccaaatctcaccatacatcagaggacacactcaggagagaagcccttcatgtgcaagcagtgtgagaaaagttttagtttgaaggcaaatcttcttagacatcagtggacacactcgggggaaaggccatttaattgcaaggattgcgggcgaggcttcatcctaaaatcaactctcctcttccaccagaagacacactcaggggagaagcctttcatctgtagtgaatgtgggcaaggatttatctggaagtcaaatcttgtgaaacaccagcttgcacattctggcaagcagccttttgtatgcaaggagtgtgggcgaggcttcaactggaagggaaatctcctcacacaccagaggacacactcaggggagaagcccttcgtgtgtaatgtgtgtgggcaaggcttcagctggaagagaagtctcaccagacaccactggcggatacactcaaaggagaagccttttgtttgccaggagtgtaagcgaggctataccagtaagtcagacctcactgtgcatgaaagaatacacacaggagagaggccttatgaatgccaagagtgtggacgaaagtttagcaataagtcatactacagtaagcacttaaagagacacttacgtgagaagcgtttttgtacagggagtgtgggtgaggcttcatcttgaagttatatctcaccatccatcagaggacacactcaggagagtaactttgctttgttacaagctttagttgaggctgcataacttgttcgtgaagatataacagaggcagacagaatccagagggctacagagaacctgaattcaacccatgtgtccccaagagattcagagaaaagaggtcaatgtttagggaacagagatgccagttgaggggagggcattacctgggctattggggaaatgtggtctctttcctactgagcacatattcttgttgtatttgtgccaggctgtgctttctaaggactgctcttagccagtgactgcagagcagggataccaaggcaggcctgttacactctccccaacctccttggactgcaaacaatctaggacacctccaccaaacctcctcttgcactttccctctggcttccctcccagccttccttggtttggatgttttgtcccctccttaatttatgttgaaactctacataaactgtttactgttgaaacagtgtaagtattaggaggtgggacctttgggaagtgattaagtcaagtcacgaagatagagctttgcgaatgggatcaggtgcccttatgaaaaggcttgatagagggagtttgtcctgtggcccttctattttctgctctgtgaggacacaatgctcctcccttccaaaagatgcagcatgaaggcatcatcttggaaacagacatgagccctcaacagacaactgcacctactgatgttttgatgttgaacttcccagcctccagaactctgggaaaataaagtcctctttataca

SEQ ID NO: 202194 - DNA, 3613 bp, Homo sapiens
  Payload ID: 19884
  Gene Name: zinc finger protein 337
  Uniprot ID: Q9Y3M9
  ENST ID: ENST00000376436
  CDS Start-End: 541-2796
cacactccccatgctattaatttgttaaaggctttggtgttgtacagtactgaataactgccaatgccatctgcctgtggccttctcaagtttgtctgcacctgtggttatcctgacttcaaacccggggagacagaggctagaagaggcagacagctcttgtgtattctgtccagtgcaaagaacacctggaactctgagccctaaccttaaatgcaagacctcatctgcaggtgttcctcatccttttagcccctcagtgatgtaagcaacaaacgtcacccagctcctggggcacacttcactcccagatgagcttgtcctggatttgcagggagcctggctccctagaccttttggccagatccccacaggggaattgtgcaggtgcgccctccccagatccccagttggtattggaatcacaccaactgtcacacatggggagggcagctgcacccagccaccctctgacttctctcctcccacagattggccatctgcaagcttcccttctccgtggagagcaggaagacagtcatgggacctcagggagccaggagacaggctttcttggcatttggggatgtcactgtggatttcacccagaaggaatggaggctgctgagccctgctcagagggccctgtacagggaggtgacactggagaactacagccacctggtctcactaggaattctccattctaaaccagaactcatcaggcggctagagcaaggggaagtgccctggggagaagagagaagacgccggccaggcccctgtgcaggaatatatgcagaacatgtcctgcggcccaagaatcttggacttgcacatcagaggcaacagcaactacaattttctgatcaaagcttccagagtgacacagctgaaggtcaagagaaagaaaaaagcactaagcccatggcattttccagcccacccctaagacatgcagtaagctcaaggaggaggaacagtgtagtggaaatagagtctagtcaaggccagagggaaaatcctacagaaatagacaaagtattgaaaggaatagaaaattcaagatggggagcattcaagtgtgcagagcgtgggcaagacttcagccggaagatgatggtaatcatacacaaaaaagcacattccaggcagaaactttttacatgcagggagtgtcaccagggctttagagatgagtcagcattgctcttgcaccagaacacacacacaggagagaagtcctatgtgtgcagtgtgtgtgggcgaggcttcagcctcaaggccaacctcctcagacaccagaggacacactcaggagagaagccttttctgtgcaaggtgtgtggacgaggctataccagtaagtcatacctcactgtgcatgagagaacacacacaggagagaagccttatgaatgccaggagtgtgggcgaaggtttaacgataagtcctcatacaacaagcacttgaaggcgcattcaggggagaagccttttgtgtgcaaggagtgtgggcgaggctatactaataagtcatacttcgttgtgcacaagagaatacactcaggagagaagccttacagatgccaggagtgtggccgaggctttagcaataagtcacaccttatcacacaccagaggacacactcaggggagaagccctttgcgtgcaggcagtgtaagcaaagttttagcgtgaaaggaagtctcctcagacaccagagaacacactcaggggagaagccttttgtgtgcaaggattgtgagcgaagctttagccaaaagtcaactcttgtctaccaccagagaacacactcaggggagaaaccttttgtttgtagagaatgtgggcaaggatttattcagaagtcaacccttgtgaaacatcagatcacacactcagaggagaagccttttgtgtgcaaggactgtggacgaggctttatccaaaagtcaaccttcactttacaccagaggacacactcagaggagaagccttatggatgtcgggagtgtgggcgaaggtttcgggataagtcctcctataacaagcacctgagggcacacttgggtgagaaacgttttttctgcagggattgtgggcgaggctttaccttgaagccaaatctcaccatacatcagaggacacactcaggagagaagcccttcatgtgcaagcagtgtgagaaaagttttagtttgaaggcaaatcttcttagacatcagtggacacactcgggggaaaggccatttaattgcaaggattgcgggcgaggcttcatcctaaaatcaactctcctcttccaccagaagacacactcaggggagaagcctttcatctgtagtgaatgtgggcaaggatttatctggaagtcaaatcttgtgaaacaccagcttgcacattctggcaagcagccttttgtatgcaaggagtgtgggcgaggcttcaactggaagggaaatctcctcacacaccagaggacacactcaggggagaagcccttcgtgtgtaatgtgtgtgggcaaggcttcagctggaagagaagtctcaccagacaccactggcggatacactcaaaggagaagccttttgtttgccaggagtgtaagcgaggctataccagtaagtcagacctcactgtgcatgaaagaatacacacaggagagaggccttatgaatgccaagagtgtggacgaaagtttagcaataagtcatactacagtaagcacttaaagagacacttacgtgagaagcgtttttgtacagggagtgtgggtgaggcttcatcttgaagttatatctcaccatccatcagaggacacactcaggagagtaactttgctttgttacaagctttagttgaggctgcataacttgttcgtgaagatataacagaggcagacagaatccagagggctacagagaacctgaattcaacccatgtgtccccaagagattcagagaaaagaggtcaatgtttagggaacagagatgccagttgaggggagggcattacctgggctattggggaaatgtggtctctttcctactgagcacatattcttgttgtatttgtgccaggctgtgctttctaaggactgctcttagccagtgactgcagagcagggataccaaggcaggcctgttacactctccccaacctccttggactgcaaacaatctaggacacctccaccaaacctcctcttgcactttccctctggcttccctcccagccttccttggtttggatgttttgtcccctccttaatttatgttgaaactctacataaactgtttactgttgaaacagtgtaagtattaggaggtgggacctttgggaagtgattaagtcaagtcacgaagatagagctttgcgaatgggatcaggtgcccttatgaaaaggcttgatagagggagtttgtcctgtggcccttctattttctgctctgtgaggacacaatgctcctcccttccaaaagatgcagcatgaaggcatcatcttggaaacagacatgagccctcaacagacaactgcacctactgatgttttgatgttgaacttcccagcctccagaactctgggaaaataaagtcctctttataca

SEQ ID NO: 202195 - DNA, 6196 bp, Homo sapiens
  Payload ID: 19885
  Gene Name: zinc finger protein 33A
  ENST ID: ENST00000307441
  CDS Start-End: 204-2693
tgcctcgtccgccggctacgtctgcgtttccgcctttccttttgtttttctcaggttttgcgtgggaggcggtcccgggatttcaagggtctacgcgcttttctatggcgaatgcaacccgacgagggagtgggctgtatcttcagagttgtctccgtctttccaagaacagaacaaaatgaacaagcagtgatccctaaaagatgtgccctagaggatatccagaacaatccaattggatgtcttctccgctgtactccacagaggtagaacagaagtcccaggagtcagtatcatttaaagatgtgactgtgggcttcacccaggaggagtggcagcacctggaccctagtcagagggctctgtatagagatgtgatgctggagaactacagcaaccttgtctcagtggggtattgtgttcacaaaccagaggtgatcttcaggctgcaacaaggagaagagccatggaaacaggaggaagaattcccaagccaaagctttccagaagtctggacagctgatcacctgaaagagaggagccaagaaaaccaatctaaacatttgtgggaagttgtattcatcaataatgaaatgctgactaaggaacaaggtgatgtaataggaataccatttaatgtggatgtaagttcttttccttccagaaaaatgttctgtcagtgtgattcatgtggaatgagtttcaacactgtttcagaattggttatcagtaagataaactatttaggaaaaaagtctgatgaatttaatgcctgtgggaaattgttactcaatattaagcatgatgaaactcatactcaagagaaaaatgaagttttgaaaaataggaacacactgagtcatcatgaggagactttgcagcatgagaagattcaaactttagagcacaattttgaatacagtatatgtcaggaaaccctccttgaaaaggcagtattcaatacacagaagagagagaacgcagaagagaataactgtgattataatgaatttgggagaactttgtgtgatagttcatccctcttgttccatcagatatctccgtcaagggacaatcactatgaatttagtgattgtgagaagttcttatgtgtgaagtccaccctttctaaacctcatggggtatctatgaaacactatgattgtggtgaaagtgggaataatttcaggaggaaattgtgtctgtcacaccttcagaaaggtgataaaggagagaaacactttgaatgtaatgaatgtgggaaagctttctgggagaagtcacatctcactcgacatcagagggtgcacacaggacagaaaccctttcaatgtaatgaatgtgaaaaagctttctgggataagtcaaacctcactaaacatcaaagatcacacacaggggagaaaccttttgaatgcaatgaatgtgggaaagcctttagccataagtcagccctcacattacaccagagaacacatacaggggagaaaccctatcaatgtaatgcgtgtgggaaaactttttgccagaaatctgacctcactaaacatcagagaacacacacagggctgaaaccctatgaatgttatgaatgtggaaaatccttccgtgtgacttcgcaccttaaagtacaccagagaactcacacaggtgagaaaccttttgaatgtcttgagtgtgggaaatcctttagtgaaaagtcaaatcttacacagcatcagagaattcacataggagataaatcttatgaatgtaatgcatgtgggaaaactttctaccacaagtcattactcaccaggcatcagataattcatacagggtggaaaccttatgaatgttatgaatgtgggaaaaccttctgcttgaagtcagacctcacagtacatcagagaacacacacagggcagaaaccctttgcatgtcccgaatgtgggaaattctttagccataagtcaaccctctctcaacattatagaacacacacaggggagaaaccctacgaatgtcatgaatgtggaaaaatcttttacaataaatcatacctaactaaacataatagaacacatacaggggagaaaccctatgaatgtaatgaatgtggaaaagccttctaccagaagtcacaactcactcagcatcagagaattcacataggggagaaaccctataaatgtaatgagtgtggaaaagctttctgccataagtcagctctaattgtacatcagagaacccatacacaagaaaagccctataaatgtaatgaatgtggaaaatctttctgtgtaaaatcaggacttattttccatgagagaaagcacacgggggagaaaccctatgaatgcaatgaatgtgggaaattcttcaggcacaaatcatcactcacagtacatcacagggctcacacaggagagaaatcttgtcaatgtaatgaatgtggaaaaatcttttaccgtaaatcggaacttgctcaacatcagagatcacatacaggggaaaagccctatgaatgtaacacatgcaggaaaactttctctcaaaagtcaaatctcattgtacatcagagaagacatataggagaaaaccttatgaatgaaatggatattagaaatttccagccacaagtcagcctccataatgcctcagagtattcacactgtggagaaagccctgatgacatcctgaatgttcagtaactatccacaaactcaccttatgttactccaaagtaatagtaggggataaacccatagactacaacaattataggacagcttttgttaggaagtgatattctatgtaatatcagatggttaatacgggcataacaccttacagattttttttgaatttgtgaaagtttttggcaaaaatgcaaataaggttatgttagaatttacactgaggagaaaattgtcaatttaagaaatctaaagtgaaaattttgcttagaaataaaatacgacaagttatgttttgagtttgatgccataatagtttttagggcacctaacaataatttatagatgtatattgtggaatgtaaagctttaagaacttaaacaaaggtaataattaaaataacctcacaagaagtttaatgagtagagagaattcccatgtacacttcaccaaacttcctctaaggataatgtataatcatagtatatggtcaagtccaagaaatcgatgttaccttgctggtagatagagacttagtcagattttactatggtttgcatgcactctgtgtgtgtgtgtacgtgtatgtgtgtgtgtgtggttatatcaaacttttacgacttttacatttgagtaaccatcaacacgattagtttacagaactgaaaaggaatctgagatctgtactgtatcaggattacaaaggatttagcctcaagtagttccctttttgtattaataaccacacgctttctgcaaccctatcccttgcatccacttgactatgaagtttttttaaagcacagataaattgaataatcagggcaatagcattaagcacatctgcgaattatccctgaagttcaaaagacttatatatgtataagtggtatgtgatataaatcgtgtgtttcatatgcataatggaatttaacgtaattgtgaataggaagtaggtatcctagtttagtagtggttacattatcaggcccatcccagatgtttgtgatgtcctgaaacaatttaaaaggagacccacagagctaatgtttatccatttaaaaggtataaatcaaaataacaaattatctaaaaaaaatctatcctgtacatgtgaagatctaggctcgcctccatgttactccctttctcttcctacctgtggctcatgccatgccatgaagtgcctagggtacatatgtgaacattccagccttcagcataagtggtagtccaaattttctttaagcagctgctctccaagacagggccctggaaaggcccacacatacagcccagggctgcccagggctgttggactgtcatttcaaggctcattgtccccagacagggatctgggccctcagacttttgagaatatgaagaggagggttgaggctggagcagaaccagaatcaagctggtgtggggcttttattgatagtgtgaagattgtacactatattacatgatcagatcatacaaataatctaagattatacagtctagtgatcctagattacacaagtaatctaagcttccactttaggaaactagaaaaagaagagcaaattaaatccaaagtaacctgaaaaaacattagagtaaaaatcattgaaattgaaaagagaaaatcgataaaacccaaaactggttccttgaaaaggtcagtaaaattgataaacctctagctagcttaagaacaaacagaagacaaatattgctaataccaaaaatgaaagaggccatcacagctaatcctatggtcaccaaaaggattagaaagaaacatggacaactctgtccataaatttgataacttagctaaaatggaccaattccttgcaagacgcattctctcaaagctcacacaagatagacctcaataggcatatgtatctattaaataaaccaaagcagtaattaataaccttccaaggccaggtacagtggttcatgcctgtaatcccagcacttcactttgggaggctgaggcgggtggatcacaaggtcaggagttcgagaccagcctggtcaacatggtgaaaccccctatctactaaaaatacaaaaaattagctgggcatggtggcatgcgtgtgtagtcgaagctactcaggaggctgaggcagaagaatcacttgaacctgggaggtggatgttgcagtgagctgagattgtgccactgtactgcagcctgggtgacagaatgagactgcatctcaaaaaataataatgaaactttccaaaacaaagtgccaggaccagctgggttcactgatgtgtttttgagatacttaaggtagaaatgataccaagtctctaccatctctttcagaaaataaaagcagagataacacttcccaactcattttgtgaggccagtattaccctaatagcaaaaccaggcaaagatattacaagaaaggaaaactacagatcaatatttccattgaacacagatgcagaaatcctcaaaatattagcaaatcaggaatgcaaggcttgttcaacatttgatattcagtgtaatccattgcatgcattagcagctcaaagatgaaatacgatcatatcaataggtacagaaaaagcatttgacaaaatccaatatccattcatgttaaaacctctcaacacagaaggaatacaggagaacttactcaagttggtaaagaacatactacaaaaaaccctacagctaacattatccttgatgtttccaactagacactttcctactaagatcaggaacatggcaaggaacaccacaccactgcttttcagcattgtactggaagtgctatataatgcagtgttaaaaaaaaaagaaataaaatgcacatagatttgaaaggatgaaatacaactttgttcacaagtaacatgattgtctttgtagagaattctaaataacaaaaaccctgctgacattaataagcaattacagcaggattgcaggatacagtcctcaggtagatgataaaaaggaattggacatcaagtcattaaaagacacggagaaaccctaaatgcttattgttaagtgaaaaccaatctgaaaaggctttctattttgtatgattgcaattatatgacattttgggagaggcaaaactattgagccagtgaaaggaccagtggttgctgagagttgaggggaaaggagggatggcaggtagagaggtgatttttaaggcagtgaaagtactctctagggtactgtaatttgtcaaaacgcagagaatggaaaacagtgaacggaaaacacagagtaaaccctaatgtcaactctggacttcagttaataataatgtatcactgttggctcattaattgtaacaaatgaaccataatgatgcaagatgttaatgattggggagcctgtggaagatgggaggggaaagggttatatgagaattctctatactttttgctcaactttctgtaaccctaaagctactctaaaaaatgaagtgtatcaagtaaataaataaccaaccaaccaaccctgagg

SEQ ID NO: 202196 - DNA, 6122 bp, Homo sapiens
  Payload ID: 19885
  Gene Name: zinc finger protein 33A
  ENST ID: ENST00000374618
  CDS Start-End: 520-2619
tgcctcgtccgccggctacgtctgcgtttccgcctttccttttgtttttctcaggttttgcgtgggaggcggtcccgggatttcaagggtctacgcgcttttctatggcgaatgcaacccgacgagggagtgggctgtatcttcagagttgtctccgtctttccaagaacagaacaaaatgaacaaggtagaacagaagtcccaggagtcagtatcatttaaagatgtgactgtgggcttcacccaggaggagtggcagcacctggaccctagtcagagggctctgtatagagatgtgatgctggagaactacagcaaccttgtctcagtgggtaagggtattgtgttcacaaaccagaggtgatcttcaggctgcaacaaggagaagagccatggaaacaggaggaagaattcccaagccaaagctttccagaagtctggacagctgatcacctgaaagagaggagccaagaaaaccaatctaaacatttgtgggaagttgtattcatcaataatgaaatgctgactaaggaacaaggtgatgtaataggaataccatttaatgtggatgtaagttcttttccttccagaaaaatgttctgtcagtgtgattcatgtggaatgagtttcaacactgtttcagaattggttatcagtaagataaactatttaggaaaaaagtctgatgaatttaatgcctgtgggaaattgttactcaatattaagcatgatgaaactcatactcaagagaaaaatgaagttttgaaaaataggaacacactgagtcatcatgaggagactttgcagcatgagaagattcaaactttagagcacaattttgaatacagtatatgtcaggaaaccctccttgaaaaggcagtattcaatacacagaagagagagaacgcagaagagaataactgtgattataatgaatttgggagaactttgtgtgatagttcatccctcttgttccatcagatatctccgtcaagggacaatcactatgaatttagtgattgtgagaagttcttatgtgtgaagtccaccctttctaaacctcatggggtatctatgaaacactatgattgtggtgaaagtgggaataatttcaggaggaaattgtgtctgtcacaccttcagaaaggtgataaaggagagaaacactttgaatgtaatgaatgtgggaaagctttctgggagaagtcacatctcactcgacatcagagggtgcacacaggacagaaaccctttcaatgtaatgaatgtgaaaaagctttctgggataagtcaaacctcactaaacatcaaagatcacacacaggggagaaaccttttgaatgcaatgaatgtgggaaagcctttagccataagtcagccctcacattacaccagagaacacatacaggggagaaaccctatcaatgtaatgcgtgtgggaaaactttttgccagaaatctgacctcactaaacatcagagaacacacacagggctgaaaccctatgaatgttatgaatgtggaaaatccttccgtgtgacttcgcaccttaaagtacaccagagaactcacacaggtgagaaaccttttgaatgtcttgagtgtgggaaatcctttagtgaaaagtcaaatcttacacagcatcagagaattcacataggagataaatcttatgaatgtaatgcatgtgggaaaactttctaccacaagtcattactcaccaggcatcagataattcatacagggtggaaaccttatgaatgttatgaatgtgggaaaaccttctgcttgaagtcagacctcacagtacatcagagaacacacacagggcagaaaccctttgcatgtcccgaatgtgggaaattctttagccataagtcaaccctctctcaacattatagaacacacacaggggagaaaccctacgaatgtcatgaatgtggaaaaatcttttacaataaatcatacctaactaaacataatagaacacatacaggggagaaaccctatgaatgtaatgaatgtggaaaagccttctaccagaagtcacaactcactcagcatcagagaattcacataggggagaaaccctataaatgtaatgagtgtggaaaagctttctgccataagtcagctctaattgtacatcagagaacccatacacaagaaaagccctataaatgtaatgaatgtggaaaatctttctgtgtaaaatcaggacttattttccatgagagaaagcacacgggggagaaaccctatgaatgcaatgaatgtgggaaattcttcaggcacaaatcatcactcacagtacatcacagggctcacacaggagagaaatcttgtcaatgtaatgaatgtggaaaaatcttttaccgtaaatcggaacttgctcaacatcagagatcacatacaggggaaaagccctatgaatgtaacacatgcaggaaaactttctctcaaaagtcaaatctcattgtacatcagagaagacatataggagaaaaccttatgaatgaaatggatattagaaatttccagccacaagtcagcctccataatgcctcagagtattcacactgtggagaaagccctgatgacatcctgaatgttcagtaactatccacaaactcaccttatgttactccaaagtaatagtaggggataaacccatagactacaacaattataggacagcttttgttaggaagtgatattctatgtaatatcagatggttaatacgggcataacaccttacagattttttttgaatttgtgaaagtttttggcaaaaatgcaaataaggttatgttagaatttacactgaggagaaaattgtcaatttaagaaatctaaagtgaaaattttgcttagaaataaaatacgacaagttatgttttgagtttgatgccataatagtttttagggcacctaacaataatttatagatgtatattgtggaatgtaaagctttaagaacttaaacaaaggtaataattaaaataacctcacaagaagtttaatgagtagagagaattcccatgtacacttcaccaaacttcctctaaggataatgtataatcatagtatatggtcaagtccaagaaatcgatgttaccttgctggtagatagagacttagtcagattttactatggtttgcatgcactctgtgtgtgtgtgtacgtgtatgtgtgtgtgtgtggttatatcaaacttttacgacttttacatttgagtaaccatcaacacgattagtttacagaactgaaaaggaatctgagatctgtactgtatcaggattacaaaggatttagcctcaagtagttccctttttgtattaataaccacacgctttctgcaaccctatcccttgcatccacttgactatgaagtttttttaaagcacagataaattgaataatcagggcaatagcattaagcacatctgcgaattatccctgaagttcaaaagacttatatatgtataagtggtatgtgatataaatcgtgtgtttcatatgcataatggaatttaacgtaattgtgaataggaagtaggtatcctagtttagtagtggttacattatcaggcccatcccagatgtttgtgatgtcctgaaacaatttaaaaggagacccacagagctaatgtttatccatttaaaaggtataaatcaaaataacaaattatctaaaaaaaatctatcctgtacatgtgaagatctaggctcgcctccatgttactccctttctcttcctacctgtggctcatgccatgccatgaagtgcctagggtacatatgtgaacattccagccttcagcataagtggtagtccaaattttctttaagcagctgctctccaagacagggccctggaaaggcccacacatacagcccagggctgcccagggctgttggactgtcatttcaaggctcattgtccccagacagggatctgggccctcagacttttgagaatatgaagaggagggttgaggctggagcagaaccagaatcaagctggtgtggggcttttattgatagtgtgaagattgtacactatattacatgatcagatcatacaaataatctaagattatacagtctagtgatcctagattacacaagtaatctaagcttccactttaggaaactagaaaaagaagagcaaattaaatccaaagtaacctgaaaaaacattagagtaaaaatcattgaaattgaaaagagaaaatcgataaaacccaaaactggttccttgaaaaggtcagtaaaattgataaacctctagctagcttaagaacaaacagaagacaaatattgctaataccaaaaatgaaagaggccatcacagctaatcctatggtcaccaaaaggattagaaagaaacatggacaactctgtccataaatttgataacttagctaaaatggaccaattccttgcaagacgcattctctcaaagctcacacaagatagacctcaataggcatatgtatctattaaataaaccaaagcagtaattaataaccttccaaggccaggtacagtggttcatgcctgtaatcccagcacttcactttgggaggctgaggcgggtggatcacaaggtcaggagttcgagaccagcctggtcaacatggtgaaaccccctatctactaaaaatacaaaaaattagctgggcatggtggcatgcgtgtgtagtcgaagctactcaggaggctgaggcagaagaatcacttgaacctgggaggtggatgttgcagtgagctgagattgtgccactgtactgcagcctgggtgacagaatgagactgcatctcaaaaaataataatgaaactttccaaaacaaagtgccaggaccagctgggttcactgatgtgtttttgagatacttaaggtagaaatgataccaagtctctaccatctctttcagaaaataaaagcagagataacacttcccaactcattttgtgaggccagtattaccctaatagcaaaaccaggcaaagatattacaagaaaggaaaactacagatcaatatttccattgaacacagatgcagaaatcctcaaaatattagcaaatcaggaatgcaaggcttgttcaacatttgatattcagtgtaatccattgcatgcattagcagctcaaagatgaaatacgatcatatcaataggtacagaaaaagcatttgacaaaatccaatatccattcatgttaaaacctctcaacacagaaggaatacaggagaacttactcaagttggtaaagaacatactacaaaaaaccctacagctaacattatccttgatgtttccaactagacactttcctactaagatcaggaacatggcaaggaacaccacaccactgcttttcagcattgtactggaagtgctatataatgcagtgttaaaaaaaaaagaaataaaatgcacatagatttgaaaggatgaaatacaactttgttcacaagtaacatgattgtctttgtagagaattctaaataacaaaaaccctgctgacattaataagcaattacagcaggattgcaggatacagtcctcaggtagatgataaaaaggaattggacatcaagtcattaaaagacacggagaaaccctaaatgcttattgttaagtgaaaaccaatctgaaaaggctttctattttgtatgattgcaattatatgacattttgggagaggcaaaactattgagccagtgaaaggaccagtggttgctgagagttgaggggaaaggagggatggcaggtagagaggtgatttttaaggcagtgaaagtactctctagggtactgtaatttgtcaaaacgcagagaatggaaaacagtgaacggaaaacacagagtaaaccctaatgtcaactctggacttcagttaataataatgtatcactgttggctcattaattgtaacaaatgaaccataatgatgcaagatgttaatgattggggagcctgtggaagatgggaggggaaagggttatatgagaattctctatactttttgctcaactttctgtaaccctaaagctactctaaaaaatgaagtgtatcaagtaaataaataaccaaccaaccaaccctgagg

SEQ ID NO: 202197 - DNA, 6084 bp, Homo sapiens
  Payload ID: 19885
  Gene Name: zinc finger protein 33A
  Uniprot ID: Q06730
  ENST ID: ENST00000458705
  CDS Start-End: 159-2591
tctgcgtttccgcctttccttttgtttttctcaggttttgcgtgggaggcggtcccgggatttcaagggtctacgcgcttttctatggcgaatgcaacccgacgagggagtgggctgtatcttcagagttgtctccgtctttccaagaacagaacaaaatgaacaaggtagaacagaagtcccaggagtcagtatcatttaaagatgtgactgtgggcttcacccaggaggagtggcagcacctggaccctagtcagagggctctgtatagagatgtgatgctggagaactacagcaaccttgtctcagtggggtattgtgttcacaaaccagaggtgatcttcaggctgcaacaaggagaagagccatggaaacaggaggaagaattcccaagccaaagctttccagtctggacagctgatcacctgaaagagaggagccaagaaaaccaatctaaacatttgtgggaagttgtattcatcaataatgaaatgctgactaaggaacaaggtgatgtaataggaataccatttaatgtggatgtaagttcttttccttccagaaaaatgttctgtcagtgtgattcatgtggaatgagtttcaacactgtttcagaattggttatcagtaagataaactatttaggaaaaaagtctgatgaatttaatgcctgtgggaaattgttactcaatattaagcatgatgaaactcatactcaagagaaaaatgaagttttgaaaaataggaacacactgagtcatcatgaggagactttgcagcatgagaagattcaaactttagagcacaattttgaatacagtatatgtcaggaaaccctccttgaaaaggcagtattcaatacacagaagagagagaacgcagaagagaataactgtgattataatgaatttgggagaactttgtgtgatagttcatccctcttgttccatcagatatctccgtcaagggacaatcactatgaatttagtgattgtgagaagttcttatgtgtgaagtccaccctttctaaacctcatggggtatctatgaaacactatgattgtggtgaaagtgggaataatttcaggaggaaattgtgtctgtcacaccttcagaaaggtgataaaggagagaaacactttgaatgtaatgaatgtgggaaagctttctgggagaagtcacatctcactcgacatcagagggtgcacacaggacagaaaccctttcaatgtaatgaatgtgaaaaagctttctgggataagtcaaacctcactaaacatcaaagatcacacacaggggagaaaccttttgaatgcaatgaatgtgggaaagcctttagccataagtcagccctcacattacaccagagaacacatacaggggagaaaccctatcaatgtaatgcgtgtgggaaaactttttgccagaaatctgacctcactaaacatcagagaacacacacagggctgaaaccctatgaatgttatgaatgtggaaaatccttccgtgtgacttcgcaccttaaagtacaccagagaactcacacaggtgagaaaccttttgaatgtcttgagtgtgggaaatcctttagtgaaaagtcaaatcttacacagcatcagagaattcacataggagataaatcttatgaatgtaatgcatgtgggaaaactttctaccacaagtcattactcaccaggcatcagataattcatacagggtggaaaccttatgaatgttatgaatgtgggaaaaccttctgcttgaagtcagacctcacagtacatcagagaacacacacagggcagaaaccctttgcatgtcccgaatgtgggaaattctttagccataagtcaaccctctctcaacattatagaacacacacaggggagaaaccctacgaatgtcatgaatgtggaaaaatcttttacaataaatcatacctaactaaacataatagaacacatacaggggagaaaccctatgaatgtaatgaatgtggaaaagccttctaccagaagtcacaactcactcagcatcagagaattcacataggggagaaaccctataaatgtaatgagtgtggaaaagctttctgccataagtcagctctaattgtacatcagagaacccatacacaagaaaagccctataaatgtaatgaatgtggaaaatctttctgtgtaaaatcaggacttattttccatgagagaaagcacacgggggagaaaccctatgaatgcaatgaatgtgggaaattcttcaggcacaaatcatcactcacagtacatcacagggctcacacaggagagaaatcttgtcaatgtaatgaatgtggaaaaatcttttaccgtaaatcggaacttgctcaacatcagagatcacatacaggggaaaagccctatgaatgtaacacatgcaggaaaactttctctcaaaagtcaaatctcattgtacatcagagaagacatataggagaaaaccttatgaatgaaatggatattagaaatttccagccacaagtcagcctccataatgcctcagagtattcacactgtggagaaagccctgatgacatcctgaatgttcagtaactatccacaaactcaccttatgttactccaaagtaatagtaggggataaacccatagactacaacaattataggacagcttttgttaggaagtgatattctatgtaatatcagatggttaatacgggcataacaccttacagattttttttgaatttgtgaaagtttttggcaaaaatgcaaataaggttatgttagaatttacactgaggagaaaattgtcaatttaagaaatctaaagtgaaaattttgcttagaaataaaatacgacaagttatgttttgagtttgatgccataatagtttttagggcacctaacaataatttatagatgtatattgtggaatgtaaagctttaagaacttaaacaaaggtaataattaaaataacctcacaagaagtttaatgagtagagagaattcccatgtacacttcaccaaacttcctctaaggataatgtataatcatagtatatggtcaagtccaagaaatcgatgttaccttgctggtagatagagacttagtcagattttactatggtttgcatgcactctgtgtgtgtgtgtacgtgtatgtgtgtgtgtgtggttatatcaaacttttacgacttttacatttgagtaaccatcaacacgattagtttacagaactgaaaaggaatctgagatctgtactgtatcaggattacaaaggatttagcctcaagtagttccctttttgtattaataaccacacgctttctgcaaccctatcccttgcatccacttgactatgaagtttttttaaagcacagataaattgaataatcagggcaatagcattaagcacatctgcgaattatccctgaagttcaaaagacttatatatgtataagtggtatgtgatataaatcgtgtgtttcatatgcataatggaatttaacgtaattgtgaataggaagtaggtatcctagtttagtagtggttacattatcaggcccatcccagatgtttgtgatgtcctgaaacaatttaaaaggagacccacagagctaatgtttatccatttaaaaggtataaatcaaaataacaaattatctaaaaaaaatctatcctgtacatgtgaagatctaggctcgcctccatgttactccctttctcttcctacctgtggctcatgccatgccatgaagtgcctagggtacatatgtgaacattccagccttcagcataagtggtagtccaaattttctttaagcagctgctctccaagacagggccctggaaaggcccacacatacagcccagggctgcccagggctgttggactgtcatttcaaggctcattgtccccagacagggatctgggccctcagacttttgagaatatgaagaggagggttgaggctggagcagaaccagaatcaagctggtgtggggcttttattgatagtgtgaagattgtacactatattacatgatcagatcatacaaataatctaagattatacagtctagtgatcctagattacacaagtaatctaagcttccactttaggaaactagaaaaagaagagcaaattaaatccaaagtaacctgaaaaaacattagagtaaaaatcattgaaattgaaaagagaaaatcgataaaacccaaaactggttccttgaaaaggtcagtaaaattgataaacctctagctagcttaagaacaaacagaagacaaatattgctaataccaaaaatgaaagaggccatcacagctaatcctatggtcaccaaaaggattagaaagaaacatggacaactctgtccataaatttgataacttagctaaaatggaccaattccttgcaagacgcattctctcaaagctcacacaagatagacctcaataggcatatgtatctattaaataaaccaaagcagtaattaataaccttccaaggccaggtacagtggttcatgcctgtaatcccagcacttcactttgggaggctgaggcgggtggatcacaaggtcaggagttcgagaccagcctggtcaacatggtgaaaccccctatctactaaaaatacaaaaaattagctgggcatggtggcatgcgtgtgtagtcgaagctactcaggaggctgaggcagaagaatcacttgaacctgggaggtggatgttgcagtgagctgagattgtgccactgtactgcagcctgggtgacagaatgagactgcatctcaaaaaataataatgaaactttccaaaacaaagtgccaggaccagctgggttcactgatgtgtttttgagatacttaaggtagaaatgataccaagtctctaccatctctttcagaaaataaaagcagagataacacttcccaactcattttgtgaggccagtattaccctaatagcaaaaccaggcaaagatattacaagaaaggaaaactacagatcaatatttccattgaacacagatgcagaaatcctcaaaatattagcaaatcaggaatgcaaggcttgttcaacatttgatattcagtgtaatccattgcatgcattagcagctcaaagatgaaatacgatcatatcaataggtacagaaaaagcatttgacaaaatccaatatccattcatgttaaaacctctcaacacagaaggaatacaggagaacttactcaagttggtaaagaacatactacaaaaaaccctacagctaacattatccttgatgtttccaactagacactttcctactaagatcaggaacatggcaaggaacaccacaccactgcttttcagcattgtactggaagtgctatataatgcagtgttaaaaaaaaaagaaataaaatgcacatagatttgaaaggatgaaatacaactttgttcacaagtaacatgattgtctttgtagagaattctaaataacaaaaaccctgctgacattaataagcaattacagcaggattgcaggatacagtcctcaggtagatgataaaaaggaattggacatcaagtcattaaaagacacggagaaaccctaaatgcttattgttaagtgaaaaccaatctgaaaaggctttctattttgtatgattgcaattatatgacattttgggagaggcaaaactattgagccagtgaaaggaccagtggttgctgagagttgaggggaaaggagggatggcaggtagagaggtgatttttaaggcagtgaaagtactctctagggtactgtaatttgtcaaaacgcagagaatggaaaacagtgaacggaaaacacagagtaaaccctaatgtcaactctggacttcagttaataataatgtatcactgttggctcattaattgtaacaaatgaaccataatgatgcaagatgttaatgattggggagcctgtggaagatgggaggggaaagggttatatgagaattctctatactttttgctcaactttctgtaaccctaaagctactctaaaaaatgaagtgtatcaagtaaataaataaccaaccaacc

SEQ ID NO: 202198 - DNA, 3994 bp, Homo sapiens
  Payload ID: 19885
  Gene Name: zinc finger protein 33A
  Uniprot ID: Q06730
  ENST ID: ENST00000432900
  CDS Start-End: 160-2595
gtctgcgtttccgcctttccttttgtttttctcaggttttgcgtgggaggcggtcccgggatttcaagggtctacgcgcttttctatggcgaatgcaacccgacgagggagtgggctgtatcttcagagttgtctccgtctttccaagaacagaacaaaatgaacaaggtagaacagaagtcccaggagtcagtatcatttaaagatgtgactgtgggcttcacccaggaggagtggcagcacctggaccctagtcagagggctctgtatagagatgtgatgctggagaactacagcaaccttgtctcagtggggtattgtgttcacaaaccagaggtgatcttcaggctgcaacaaggagaagagccatggaaacaggaggaagaattcccaagccaaagctttccagaagtctggacagctgatcacctgaaagagaggagccaagaaaaccaatctaaacatttgtgggaagttgtattcatcaataatgaaatgctgactaaggaacaaggtgatgtaataggaataccatttaatgtggatgtaagttcttttccttccagaaaaatgttctgtcagtgtgattcatgtggaatgagtttcaacactgtttcagaattggttatcagtaagataaactatttaggaaaaaagtctgatgaatttaatgcctgtgggaaattgttactcaatattaagcatgatgaaactcatactcaagagaaaaatgaagttttgaaaaataggaacacactgagtcatcatgaggagactttgcagcatgagaagattcaaactttagagcacaattttgaatacagtatatgtcaggaaaccctccttgaaaaggcagtattcaatacacagaagagagagaacgcagaagagaataactgtgattataatgaatttgggagaactttgtgtgatagttcatccctcttgttccatcagatatctccgtcaagggacaatcactatgaatttagtgattgtgagaagttcttatgtgtgaagtccaccctttctaaacctcatggggtatctatgaaacactatgattgtggtgaaagtgggaataatttcaggaggaaattgtgtctgtcacaccttcagaaaggtgataaaggagagaaacactttgaatgtaatgaatgtgggaaagctttctgggagaagtcacatctcactcgacatcagagggtgcacacaggacagaaaccctttcaatgtaatgaatgtgaaaaagctttctgggataagtcaaacctcactaaacatcaaagatcacacacaggggagaaaccttttgaatgcaatgaatgtgggaaagcctttagccataagtcagccctcacattacaccagagaacacatacaggggagaaaccctatcaatgtaatgcgtgtgggaaaactttttgccagaaatctgacctcactaaacatcagagaacacacacagggctgaaaccctatgaatgttatgaatgtggaaaatccttccgtgtgacttcgcaccttaaagtacaccagagaactcacacaggtgagaaaccttttgaatgtcttgagtgtgggaaatcctttagtgaaaagtcaaatcttacacagcatcagagaattcacataggagataaatcttatgaatgtaatgcatgtgggaaaactttctaccacaagtcattactcaccaggcatcagataattcatacagggtggaaaccttatgaatgttatgaatgtgggaaaaccttctgcttgaagtcagacctcacagtacatcagagaacacacacagggcagaaaccctttgcatgtcccgaatgtgggaaattctttagccataagtcaaccctctctcaacattatagaacacacacaggggagaaaccctacgaatgtcatgaatgtggaaaaatcttttacaataaatcatacctaactaaacataatagaacacatacaggggagaaaccctatgaatgtaatgaatgtggaaaagccttctaccagaagtcacaactcactcagcatcagagaattcacataggggagaaaccctataaatgtaatgagtgtggaaaagctttctgccataagtcagctctaattgtacatcagagaacccatacacaagaaaagccctataaatgtaatgaatgtggaaaatctttctgtgtaaaatcaggacttattttccatgagagaaagcacacgggggagaaaccctatgaatgcaatgaatgtgggaaattcttcaggcacaaatcatcactcacagtacatcacagggctcacacaggagagaaatcttgtcaatgtaatgaatgtggaaaaatcttttaccgtaaatcggaacttgctcaacatcagagatcacatacaggggaaaagccctatgaatgtaacacatgcaggaaaactttctctcaaaagtcaaatctcattgtacatcagagaagacatataggagaaaaccttatgaatgaaatggatattagaaatttccagccacaagtcagcctccataatgcctcagagtattcacactgtggagaaagccctgatgacatcctgaatgttcagtaactatccacaaactcaccttatgttactccaaagtaatagtaggggataaacccatagactacaacaattataggacagcttttgttaggaagtgatattctatgtaatatcagatggttaatacgggcataacaccttacagattttttttgaatttgtgaaagtttttggcaaaaatgcaaataaggttatgttagaatttacactgaggagaaaattgtcaatttaagaaatctaaagtgaaaattttgcttagaaataaaatacgacaagttatgttttgagtttgatgccataatagtttttagggcacctaacaataatttatagatgtatattgtggaatgtaaagctttaagaacttaaacaaaggtaataattaaaataacctcacaagaagtttaatgagtagagagaattcccatgtacacttcaccaaacttcctctaaggataatgtataatcatagtatatggtcaagtccaagaaatcgatgttaccttgctggtagatagagacttagtcagattttactatggtttgcatgcactctgtgtgtgtgtgtacgtgtatgtgtgtgtgtgtggttatatcaaacttttacgacttttacatttgagtaaccatcaacacgattagtttacagaactgaaaaggaatctgagatctgtactgtatcaggattacaaaggatttagcctcaagtagttccctttttgtattaataaccacacgctttctgcaaccctatcccttgcatccacttgactatgaagtttttttaaagcacagataaattgaataatcagggcaatagcattaagcacatctgcgaattatccctgaagttcaaaagacttatatatgtataagtggtatgtgatataaatcgtgtgtttcatatgcataatggaatttaacgtaattgtgaataggaagtaggtatcctagtttagtagtggttacattatcaggcccatcccagatgtttgtgatgtcctgaaacaatttaaaaggagacccacagagctaatgtttatccatttaaaaggtataaatcaaaataacaaattatctaaaaaaaatctatcctgtacatgtgaagatctaggctcgcctccatgttactccctttctcttcctacctgtggctcatgccatgccatgaagtgcctagggtacatatgtgaacattccagccttcagcataagtggtagtccaaattttctttaagcagctgctctccaagacagggccctggaaaggcccacacatacagcccagggctgcccagggctgttggactgtcatttcaaggctcattgtccccagacagggatctgggccctcagacttttgagaatatgaagaggagggttgaggctggagcagaaccag

SEQ ID NO: 202199 - DNA, 1530 bp, Homo sapiens
  Payload ID: 19885
  Gene Name: zinc finger protein 33A
  ENST ID: ENST00000469037
  CDS Start-End: 143-559
tccttttgtttttctcaggttttgcgtgggaggcggtcccgggatttcaagggtctacgcgcttttctatggcgaatgcaacccgacgagggagtgggctgtatcttcagagttgtctccgtctttccaagaacagaacaaaatgaacaaggtagaacagaagtcccaggagtcagtatcatttaaagatgtgactgtgggcttcacccaggaggagtggcagcacctggaccctagtcagagggctctgtatagagatgtgatgctggagaactacagcaaccttgtctcagtggggtattgtgttcacaaaccagaggtgatcttcaggctgcaacaaggagaagagccatggaaacaggaggaagaattcccaagccaaagctttccagaagtctggacagctgatcacctgaaagagaggagccaagaaaaccaatctaaacatttgtgggaagttgtattcatcaataatgaaatgctgactaaggaacaaggtgatgtaataggaataccatttaatgtggatgcccctgagatgctcatgcccttggattaaacccctgcagtgctggaagaagaggactctgcactgcctgccacaccaggactggaagatccatggccttcccttcttccaaactaccttcccacaagatggggatggtggtcacatctccaacactagcatgctgtggaagagacatcagcattcttgcaacaaatctggaaacagcctaaagagacatttctacttcaaagagttgcactgaggaagtgcactggcactgctggggactcacctggggcccagggctgaggcttctcgtgtccttggagctgctgtcctcccgaggagtgtccacactgcagccagctcagcctcaggtgtcttctctggttttgaaaccaaatctaagtgggaaaagaagattcaagttttatccgatttagtctacataattttaagtatctatttgagctcaataccaagaatcacttccttctctctcccatctgtgatctccagaggaaaggtccccgggctaggagacactggctggcatcctaaagccagagctggccaaagggtgtgtgtccactcttccttcacctcttccccaccccacacttgtttttgtctcacgctcacttgctctttctgcctccctctcactctttaggtctcacaaaggctttggccaaagactgactgactttccttggctctctgtcatctccccatagtcaaaagcatttcataacacacaatccatgtgaagggacctctgatgaaaatccatttaaagaggagctcactaattatcaatacttactgctgagcctggaatcattcatatatacctcagagttcattcattccagatgcaatactagataaggagactcctatgaaccaaatatctaactctgaatagatagtgactgtcataatcaaaccctgtggctgcctcctccttactggagggtgtagaggaatgcagttttttgtttgtttatttgtttgtt

SEQ ID NO: 202200 - DNA, 2854 bp, Homo sapiens
  Payload ID: 19885
  Gene Name: zinc finger protein 33A
  Uniprot ID: Q06730
  ENST ID: ENST00000628825
  CDS Start-End: 100-2553
cgtccgccggctacgtctgcgtttccgcctttccttttgtttttctcaggttttgcgtgggaggcggtcccgggatttcaagggtctacgcgcttttctatggcgaatgcaacccgacgagggagtggggtagaacagaagtcccaggagtcagtatcatttaaagatgtgactgtgggcttcacccaggaggagtggcagcacctggaccctagtcagagggctctgtatagagatgtgatgctggagaactacagcaaccttgtctcagtggggtattgtgttcacaaaccagaggtgatcttcaggctgcaacaaggagaagagccatggaaacaggaggaagaattcccaagccaaagctttccagtctggacagctgatcacctgaaagagaggagccaagaaaaccaatctaaacatttgtgggaagttgtattcatcaataatgaaatgctgactaaggaacaaggtgatgtaataggaataccatttaatgtggatgtaagttcttttccttccagaaaaatgttctgtcagtgtgattcatgtggaatgagtttcaacactgtttcagaattggttatcagtaagataaactatttaggaaaaaagtctgatgaatttaatgcctgtgggaaattgttactcaatattaagcatgatgaaactcatactcaagagaaaaatgaagttttgaaaaataggaacacactgagtcatcatgaggagactttgcagcatgagaagattcaaactttagagcacaattttgaatacagtatatgtcaggaaaccctccttgaaaaggcagtattcaatacacagaagagagagaacgcagaagagaataactgtgattataatgaatttgggagaactttgtgtgatagttcatccctcttgttccatcagatatctccgtcaagggacaatcactatgaatttagtgattgtgagaagttcttatgtgtgaagtccaccctttctaaacctcatggggtatctatgaaacactatgattgtggtgaaagtgggaataatttcaggaggaaattgtgtctgtcacaccttcagaaaggtgataaaggagagaaacactttgaatgtaatgaatgtgggaaagctttctgggagaagtcacatctcactcgacatcagagggtgcacacaggacagaaaccctttcaatgtaatgaatgtgaaaaagctttctgggataagtcaaacctcactaaacatcaaagatcacacacaggggagaaaccttttgaatgcaatgaatgtgggaaagcctttagccataagtcagccctcacattacaccagagaacacatacaggggagaaaccctatcaatgtaatgcgtgtgggaaaactttttgccagaaatctgacctcactaaacatcagagaacacacacagggctgaaaccctatgaatgttatgaatgtggaaaatccttccgtgtgacttcgcaccttaaagtacaccagagaactcacacaggtgagaaaccttttgaatgtcttgagtgtgggaaatcctttagtgaaaagtcaaatcttacacagcatcagagaattcacataggagataaatcttatgaatgtaatgcatgtgggaaaactttctaccacaagtcattactcaccaggcatcagataattcatacagggtggaaaccttatgaatgttatgaatgtgggaaaaccttctgcttgaagtcagacctcacagtacatcagagaacacacacagggcagaaaccctttgcatgtcccgaatgtgggaaattctttagccataagtcaaccctctctcaacattatagaacacacacaggggagaaaccctacgaatgtcatgaatgtggaaaaatcttttacaataaatcatacctaactaaacataatagaacacatacaggggagaaaccctatgaatgtaatgaatgtggaaaagccttctaccagaagtcacaactcactcagcatcagagaattcacataggggagaaaccctataaatgtaatgagtgtggaaaagctttctgccataagtcagctctaattgtacatcagagaacccatacacaagaaaagccctataaatgtaatgaatgtggaaaatctttctgtgtaaaatcaggacttattttccatgagagaaagcacacgggggagaaaccctatgaatgcaatgaatgtgggaaattcttcaggcacaaatcatcactcacagtacatcacagggctcacacaggagagaaatcttgtcaatgtaatgaatgtggaaaaatcttttaccgtaaatcggaacttgctcaacatcagagatcacatacaggggaaaagccctatgaatgtaacacatgcaggaaaactttctctcaaaagtcaaatctcattgtacatcagagaagacatataggagaaaaccttatgaatgaaatggatattagaaatttccagccacaagtcagcctccataatgcctcagagtattcacactgtggagaaagccctgatgacatcctgaatgttcagtaactatccacaaactcaccttatgttactccaaagtaatagtaggggataaacccatagactacaacaattataggacagcttttgttaggaagtgatattctatgtaatatcagatggttaatacgggcataacaccttacagattttttttgaatttgtgaaagtttttggcaaaaatgcaaataaggttatgttagaatttacactgaggagaaaattgtcaatttaagaaatctaaagtgaaaattttgcttagaaataaaatacgacaagttatgttttgagtttgatgccataatag

SEQ ID NO: 202201 - DNA, 5958 bp, Homo sapiens
  Payload ID: 19886
  Gene Name: zinc finger protein 33B
  Uniprot ID: Q06732
  ENST ID: ENST00000359467
  CDS Start-End: 116-2452
gggaggcggtcccgggatttcaggggtctaccggctctcttatggcgaatgcaacccgaagagagagtgagctgtatcttcagagttgtctccgtctttccaagaacagaacaaaatgaacaaggtagatcagaagttccaggggtcagtatcatttaaagatgtgactgtgggcttcacccaggaggagtggcagcacctggaccctagtcagagggctctgtatagagatgtgatgctggagaactacagcaaccttgtctcagtggggtattgtgctcacaaaccagaggtgatcttcaggctggaacaaggagaagaaccatggagactggaggaagaattcccaagccagagctttccagaagtctggacagctgatcacctgaaagagaggagccaagaaaatcaatctaaacatttgtgggaagttgtattcatcaataatgaaatgctgactaaggaacaaggtaatgtaataggaataccatttaacatggacgtaagttcttttccttccagaaaaatgttctgtcagtatgactcacgtggaatgagtttcaacactgtttcagaattggttatcagtaagataaactatttaggaaaaaagtctgacgaatttaatgcatgtgggaaattgttactcaatattaagcatgatgaaactcatactcgagagaaaaatgaagttttgaaaaataggaacactctgagtcatcgtgagaacactttgcagcatgagaagattcaaactttagaccacaattttgaatacagtatatgtcaggaaaccctccttgaaaaggcagtattcaatacacggaagagagagaatgcagaagagaataactgtgactataatgaatttgggagaactttctgtgatagttcatccctcttgttccatcagatacctccatcaaaggacagtcactatgaatttagtgattgtgagaagttcttatgtgtgaagtccaccctttctaaacatgatggggtacctgtgaaacactatgattgtggtgaaagtgggaataatttcaggaggaaattgtgtctgtcacagcttcagaaaggtgataaaggagagaaacactttgaatgtaatgaatgtgggaaagctttctgggagaagtcacatctcactcgacatcagagggtgcacacaggagagaaacactttcaatgtaatcaatgtggaaaaactttctgggagaagtcaaacctcactaaacatcagagatcacacacaggggagaaaccttttgaatgcaatgaatgtgggaaagcctttagccataagtcagccctcacattacaccagagaacacatacaggggagaaaccctatcagtgtaatgcatgtgggaaaactttttaccagaaatctgacctcactaaacatcagagaacacacacagggcagaaaccctatgaatgttatgaatgtggaaaatccttctgtatgaattcacaccttacagtacaccagagaactcacacaggtgagaaaccttttgaatgtcttgagtgtgggaaatccttttgtcaaaagtcacatcttacacagcatcagagaactcacataggagataaaccttatgaatgtaatgcatgtgggaaaactttctaccacaagtcagtactcaccaggcatcagataattcatacagggttgaaaccttatgaatgttatgaatgtgggaaaaccttctgcttgaagtcagacctcacaatacatcagagaacgcacacaggggagaaaccctttgcatgtcctgaatgtgggaaattctttagccataagtcaaccctctctcaacattatagaacacacacgggggagaaaccctatgaatgtcatgaatgtggaaaaatcttttacaataaatcatacctaacaaaacataatagaacacatacaggggagaaaccctatgaatgtaatgaatgtggaaaaaccttctgccagaagtcacaactcactcagcatcagagaattcacataggggagaaaccctatgaatgtaatgagtgtggaaaagctttctgccataagtcagctctaattgtacatcagagaacccatacacaagaaaagccttataaatgtaacgaatgtggaaaatctttctgtgtgaagtcaggacttattttacatgagagaaagcacacgggggagaaaccctatgaatgcaatgaatgtgggaaatccttcagtcacaaatcatcactcacagtacatcacagggctcacacaggagagaaatcttgtcagtgtaatgaatgtggaaaaatcttttaccgtaaatcagaccttgctaaacatcagagatcacatacaggggaaaagccctatgaatgtaacacatgcaggaaaaccttctctcaaaagtcaaatctcattgtacatcagagaacacacataggagaaaaaccttatgaatgaattggatattagaaatttccagccacaagtcagcctccataatgcctcagagtcttcacactgtggagaagggcctgttgacatcctgaatgttcaataactatccacaaactcgccttatgttactccaaagtaacagtaggggataaacccatagactacaacaactataggatggcttttgttaggaagtgatattctgttgaatatcagatggttaatactggcataaaacctcacagatttttttgaatttgtgaaagtttttggcaaaactacaaataggattatgttagcatttacactgaggagaaaattgtcaatttaagaaatctaaagtgaaaattttgcttagaaataaaatatgacaagttctgttttgagtttgatgccataatagtttttaaggtatctaacaataatttatagatgtacattgtggaatgtaaagctttaagaattttttaagaagtaataattaaaataacctcacaagaagttgtaatgagtacagagaattcccgtgtacccttcaccaagcttcctctaaggataatatataatcatagtatatggtcaagtccaagaaatcgatgttaccttgctagtagatgcagacttactcagattttgctatggtttgcgtgcactctgtgtgtgtacgtgtatgtgtgtgtgtgtggttataacaaactggtacttttacatttgagtaaccatcaacacaattagtttacagaatggaaaaggagtctgagatctgtactgtttcaggattacaaaggaatcaggatttagcctcaagtagttcccttgttgtattaataaccacaccctttctgcatccctgtccctggcatccacttgactatgaagctttttgtaaagcatagataaattgaataatcagggcaacagcattaagcacatctgtgaattatccctgaagttcataggacttacatatgtacaagtggtatgtgatataaatcgtgtgtttcatatgcataatggtatttaacgtaattgtgaataggaagtaggtatcctaatttagtagtggttacttcatcaggcccatcccaggtgtttgtcgtgtcctgaaacaatttaaatagagacccacagagctaatgtttatccatttaaaagttataaatcaaaataacagattatctgaaaaaaaatctatcctgtacgtgtgaagatctaggcctgcctccatgttactccctttctcttactacctgtggctcatcccatgccatgaactgcctggggtacatatgtgaacactccagccttcagcgtaagtgatagtccaaattttctttaagcagctgctctccaagacagggccctggaaagaggcccacacatacagcccagttgctgcccagggctgttggactgtcatttcattgctcattgtacccagacagggatctgggccttcagagacttttgagaatatgaagaggagggttgaggctggagaagagccagaatcaagctggcatggggcttttattgacagtgtgaagattgtacactacattacatgatcagatcatacaaataatctaagattttacagtctggtgaccctagattacacaagtaatctaagcttccactttggaaaactagaaaaagaagagcaaattaaatccaaagtaacctggaaaaaaattagagtaaaaatcagtgaaattgaaaagagaaaatcaataaaacccaaaactgttctttgaaaaggtgggtaaaattgataaacctctagctagattaagaaaaaacagaagacaaatactgctaataccaaaagtgaaagaggccatcatagctgatcctatggtcaccaaaaggattagaaagaaatatggacaactctgtccataaatttgataacttagctaaaatggatcaattccttgcaagatgcattctctcaaagctcataaaaggtagatctcagtaggcatatatatctattaaataaattgaagcagtaattaataaccttccaagaccaggcgcggtggctaaaaatacaaaaagttagccgggcgtggtggcatgcgtgtatagtccaagctactcaggaggctgaggcagaagaatcacttgaacctgggaggtggaggttgcagtgagccaagattgtgccactgtactccagcctgggtgacagagtgagactccatctcaataaaattaataataataaaaccttccaaaaaaagtgccgggaccaaatggattcactgatgtgcatttttcgagatacttaaggtagaaatgataccaagtctgtactgtctctttcagaaaataaaagcagggataacacttcccaaatcattttgtgaggccaggattaccctaataccaaagccaggcaaaaacattacaagaaaggaaaactacagatcaatatttccagtgaacacagatgcagaaatccttaaaatgttagcaaatcaggaatgcaagccttgttcaacatttgatattcagtgcaatccattgcatgcattagcagttcaaagattaaatatgatcatatcaataggtacagaaaaagcatttgacaaaatccaatatccattcatgataaaacctctcaacacagaaggaatacaggagaacttactcaatttgataaagaactactacaaaaaaccctacatctagcatcatccttgatgtttccaactaaatgctttcctactaagatcaggaacatggcaaggaacaccactgcttttcagcattgtactggaagtgctatctaatgcagtgataccaaaaaaaaaggaaataaaatgcacataaatttggaaggaggaaatacaactgtctttgttctcaaataacatgattgtctttgtagaaaattctaaataacaaaaacctgctgacattaataagcaattatagcagggttgtagaatgtagtcctcaggtatatgataaaaaagaattagacatcaagtcattaaaagacatataggaaccctaaatgcttattgttaagtgaaaaccaatctgaaaaggctttctatgttgtatgattgcaattatatgacattctgggagaggcaaaactatcgagcgagtcaaaggaccagtggttgctgagagttgaggggaaaggagggatggcaggtaggtgatttttaggacagtgaaagtactctgtagggtactgtaatttgtcaaaatgcagagaatggaaaacagtgaacggaaaacacagagtaaaccctagtgtcaactctggacttcagttaataacagtgtaccactattggctcatcaattgtaacaaatgaaccataatgatgcaagatgttaataattggggagcctgtggaggatgggagggttaaaggtttatatgagaattctctgtactttttgctcaatttttctgtaaccctaaagctgctctaaaaaatgaagtgtattaagtaaataaataagtaaataaccaaccaacc

SEQ ID NO: 202202 - DNA, 319 bp, Homo sapiens
  Payload ID: 19886
  Gene Name: zinc finger protein 33B
  ENST ID: ENST00000493285
  CDS Start-End: 49-319
tttgcgtgggaggcggtcccgggatttcaggggtctaccggctctcttatggcgaatgcaacccgaagagagagtgaggtagatcagaagttccaggggtcagtatcatttaaagatgtgactgtgggcttcacccaggaggagtggcagcacctggaccctagtcagagggctctgtatagagatgtgatgctggagaactacagcaaccttgtctcagtggggtattgtgctcacaaaccagaggtgatcttcaggctggaacaaggagaagaaccatggagactggaggaagaattcccaagccagagctttccag

SEQ ID NO: 202203 - DNA, 707 bp, Homo sapiens
  Payload ID: 19886
  Gene Name: zinc finger protein 33B
  ENST ID: ENST00000465206
  CDS Start-End: 1-282
cacctggaccctagtcagagggctctgtatagagatgtgatgctggagaactacagcaaccttgtctcagtggggtattgtgctcacaaaccagaggtgatcttcaggctggaacaaggagaagaaccatggagactggaggaagaattcccaagccagagctttccagaagtctggacagctgatcacctgaaagagaggagccaagaaaatcaatctaaacatttgtgggaagttgtattcatcaataatgaaatgctgactaaggaacaaggcccctgaggtgttcatgcactgatcctggaccttggattaaacccttgcagtgctggaagaagaggactctgcactgcctgccacaccaggactggaagatcaatggccttcccttcttccaaactaccttcccatgaggtggggatggtggtcacatctccaacactggcgtgctgtggaagagacatcagcattctctgcaacaaatttggaaacagcctaaagagacgtttctacttcaaagagatgcactgaggaagtgcactggcactgctggggactcacctggggcccagggctgaggcttctcgtgtccttggagctgctgtcctcccgaggagcgtccacactgcagccagctcagcctcaggtgtcctatctggttttgaaaccaaatctaagtgggaaaagaagattcaagttttatccga

SEQ ID NO: 202204 - DNA, 5843 bp, Homo sapiens
  Payload ID: 19886
  Gene Name: zinc finger protein 33B
  ENST ID: ENST00000613419
  CDS Start-End: 1-2337
atgtctgcagtagatcagaagttccaggggtcagtatcatttaaagatgtgactgtgggcttcacccaggaggagtggcagcacctggaccctagtcagagggctctgtatagagatgtgatgctggagaactacagcaaccttgtctcagtggggtattgtgctcacaaaccagaggtgatcttcaggctggaacaaggagaagaaccatggagactggaggaagaattcccaagccagagctttccagaagtctggacagctgatcacctgaaagagaggagccaagaaaatcaatctaaacatttgtgggaagttgtattcatcaataatgaaatgctgactaaggaacaaggtaatgtaataggaataccatttaacatggacgtaagttcttttccttccagaaaaatgttctgtcagtatgactcacgtggaatgagtttcaacactgtttcagaattggttatcagtaagataaactatttaggaaaaaagtctgacgaatttaatgcatgtgggaaattgttactcaatattaagcatgatgaaactcatactcgagagaaaaatgaagttttgaaaaataggaacactctgagtcatcgtgagaacactttgcagcatgagaagattcaaactttagaccacaattttgaatacagtatatgtcaggaaaccctccttgaaaaggcagtattcaatacacggaagagagagaatgcagaagagaataactgtgactataatgaatttgggagaactttctgtgatagttcatccctcttgttccatcagatacctccatcaaaggacagtcactatgaatttagtgattgtgagaagttcttatgtgtgaagtccaccctttctaaacatgatggggtacctgtgaaacactatgattgtggtgaaagtgggaataatttcaggaggaaattgtgtctgtcacagcttcagaaaggtgataaaggagagaaacactttgaatgtaatgaatgtgggaaagctttctgggagaagtcacatctcactcgacatcagagggtgcacacaggagagaaacactttcaatgtaatcaatgtggaaaaactttctgggagaagtcaaacctcactaaacatcagagatcacacacaggggagaaaccttttgaatgcaatgaatgtgggaaagcctttagccataagtcagccctcacattacaccagagaacacatacaggggagaaaccctatcagtgtaatgcatgtgggaaaactttttaccagaaatctgacctcactaaacatcagagaacacacacagggcagaaaccctatgaatgttatgaatgtggaaaatccttctgtatgaattcacaccttacagtacaccagagaactcacacaggtgagaaaccttttgaatgtcttgagtgtgggaaatccttttgtcaaaagtcacatcttacacagcatcagagaactcacataggagataaaccttatgaatgtaatgcatgtgggaaaactttctaccacaagtcagtactcaccaggcatcagataattcatacagggttgaaaccttatgaatgttatgaatgtgggaaaaccttctgcttgaagtcagacctcacaatacatcagagaacgcacacaggggagaaaccctttgcatgtcctgaatgtgggaaattctttagccataagtcaaccctctctcaacattatagaacacacacgggggagaaaccctatgaatgtcatgaatgtggaaaaatcttttacaataaatcatacctaacaaaacataatagaacacatacaggggagaaaccctatgaatgtaatgaatgtggaaaaaccttctgccagaagtcacaactcactcagcatcagagaattcacataggggagaaaccctatgaatgtaatgagtgtggaaaagctttctgccataagtcagctctaattgtacatcagagaacccatacacaagaaaagccttataaatgtaacgaatgtggaaaatctttctgtgtgaagtcaggacttattttacatgagagaaagcacacgggggagaaaccctatgaatgcaatgaatgtgggaaatccttcagtcacaaatcatcactcacagtacatcacagggctcacacaggagagaaatcttgtcagtgtaatgaatgtggaaaaatcttttaccgtaaatcagaccttgctaaacatcagagatcacatacaggggaaaagccctatgaatgtaacacatgcaggaaaaccttctctcaaaagtcaaatctcattgtacatcagagaacacacataggagaaaaaccttatgaatgaattggatattagaaatttccagccacaagtcagcctccataatgcctcagagtcttcacactgtggagaagggcctgttgacatcctgaatgttcaataactatccacaaactcgccttatgttactccaaagtaacagtaggggataaacccatagactacaacaactataggatggcttttgttaggaagtgatattctgttgaatatcagatggttaatactggcataaaacctcacagatttttttgaatttgtgaaagtttttggcaaaactacaaataggattatgttagcatttacactgaggagaaaattgtcaatttaagaaatctaaagtgaaaattttgcttagaaataaaatatgacaagttctgttttgagtttgatgccataatagtttttaaggtatctaacaataatttatagatgtacattgtggaatgtaaagctttaagaattttttaagaagtaataattaaaataacctcacaagaagttgtaatgagtacagagaattcccgtgtacccttcaccaagcttcctctaaggataatatataatcatagtatatggtcaagtccaagaaatcgatgttaccttgctagtagatgcagacttactcagattttgctatggtttgcgtgcactctgtgtgtgtacgtgtatgtgtgtgtgtgtggttataacaaactggtacttttacatttgagtaaccatcaacacaattagtttacagaatggaaaaggagtctgagatctgtactgtttcaggattacaaaggaatcaggatttagcctcaagtagttcccttgttgtattaataaccacaccctttctgcatccctgtccctggcatccacttgactatgaagctttttgtaaagcatagataaattgaataatcagggcaacagcattaagcacatctgtgaattatccctgaagttcataggacttacatatgtacaagtggtatgtgatataaatcgtgtgtttcatatgcataatggtatttaacgtaattgtgaataggaagtaggtatcctaatttagtagtggttacttcatcaggcccatcccaggtgtttgtcgtgtcctgaaacaatttaaatagagacccacagagctaatgtttatccatttaaaagttataaatcaaaataacagattatctgaaaaaaaatctatcctgtacgtgtgaagatctaggcctgcctccatgttactccctttctcttactacctgtggctcatcccatgccatgaactgcctggggtacatatgtgaacactccagccttcagcgtaagtgatagtccaaattttctttaagcagctgctctccaagacagggccctggaaagaggcccacacatacagcccagttgctgcccagggctgttggactgtcatttcattgctcattgtacccagacagggatctgggccttcagagacttttgagaatatgaagaggagggttgaggctggagaagagccagaatcaagctggcatggggcttttattgacagtgtgaagattgtacactacattacatgatcagatcatacaaataatctaagattttacagtctggtgaccctagattacacaagtaatctaagcttccactttggaaaactagaaaaagaagagcaaattaaatccaaagtaacctggaaaaaaattagagtaaaaatcagtgaaattgaaaagagaaaatcaataaaacccaaaactgttctttgaaaaggtgggtaaaattgataaacctctagctagattaagaaaaaacagaagacaaatactgctaataccaaaagtgaaagaggccatcatagctgatcctatggtcaccaaaaggattagaaagaaatatggacaactctgtccataaatttgataacttagctaaaatggatcaattccttgcaagatgcattctctcaaagctcataaaaggtagatctcagtaggcatatatatctattaaataaattgaagcagtaattaataaccttccaagaccaggcgcggtggctaaaaatacaaaaagttagccgggcgtggtggcatgcgtgtatagtccaagctactcaggaggctgaggcagaagaatcacttgaacctgggaggtggaggttgcagtgagccaagattgtgccactgtactccagcctgggtgacagagtgagactccatctcaataaaattaataataataaaaccttccaaaaaaagtgccgggaccaaatggattcactgatgtgcatttttcgagatacttaaggtagaaatgataccaagtctgtactgtctctttcagaaaataaaagcagggataacacttcccaaatcattttgtgaggccaggattaccctaataccaaagccaggcaaaaacattacaagaaaggaaaactacagatcaatatttccagtgaacacagatgcagaaatccttaaaatgttagcaaatcaggaatgcaagccttgttcaacatttgatattcagtgcaatccattgcatgcattagcagttcaaagattaaatatgatcatatcaataggtacagaaaaagcatttgacaaaatccaatatccattcatgataaaacctctcaacacagaaggaatacaggagaacttactcaatttgataaagaactactacaaaaaaccctacatctagcatcatccttgatgtttccaactaaatgctttcctactaagatcaggaacatggcaaggaacaccactgcttttcagcattgtactggaagtgctatctaatgcagtgataccaaaaaaaaaggaaataaaatgcacataaatttggaaggaggaaatacaactgtctttgttctcaaataacatgattgtctttgtagaaaattctaaataacaaaaacctgctgacattaataagcaattatagcagggttgtagaatgtagtcctcaggtatatgataaaaaagaattagacatcaagtcattaaaagacatataggaaccctaaatgcttattgttaagtgaaaaccaatctgaaaaggctttctatgttgtatgattgcaattatatgacattctgggagaggcaaaactatcgagcgagtcaaaggaccagtggttgctgagagttgaggggaaaggagggatggcaggtaggtgatttttaggacagtgaaagtactctgtagggtactgtaatttgtcaaaatgcagagaatggaaaacagtgaacggaaaacacagagtaaaccctagtgtcaactctggacttcagttaataacagtgtaccactattggctcatcaattgtaacaaatgaaccataatgatgcaagatgttaataattggggagcctgtggaggatgggagggttaaaggtttatatgagaattctctgtactttttgctcaatttttctgtaaccctaaagctgctctaaaaaatgaagtgtattaagtaaataaataagtaaataaccaaccaacc

SEQ ID NO: 202205 - DNA, 567 bp, Homo sapiens
  Payload ID: 19886
  Gene Name: zinc finger protein 33B
  ENST ID: ENST00000462075
  CDS Start-End: 1-111
agccaagaaaatcaatctaaacatttgtgggaagttgtattcatcaataatgaaatgctgactaaggaacaagatgtcatcagcctcaggagagagtggtatgtaccttgaaataactcaccgagacacaaacttgctgacttcttgtcctccatctcagagaagatatggaagatatgaaggatggagaaaaagaggaagaggaaatgtgatggtggagtgggtaacataaaaaagggaaggcaaataagtgtatgtgttttcagcggcttctcactttcttttggcccatcaaggaaaccaacacatccgaggagagtgctgataggctgctcttagccgggaccacacttgtgctttgaaaacaacccccaaaatccctgcaggcaattgaaggatgtcccgagaacatcctcccagggagcagatacccattctgtagaagctctaagcctgctgggctaagccctccataggccactttaatgaggaggagaggctgtaggtggtggtaggaccaccatgttgcatgacttttctgtgtgccccgtcttttgactctgtctc

SEQ ID NO: 202206 - DNA, 1901 bp, Homo sapiens
  Payload ID: 19887
  Gene Name: zinc finger protein 34
  Uniprot ID: Q8IZ26
  ENST ID: ENST00000343459
  CDS Start-End: 67-1749
ctgccgtgctgctcggcggcgctgaggccaaatagttgcatcacatgtatctaatccgagagtctcatgcttctgctcctcagtgaccagctcctgctcactgccctcagaaagcccaaccctcaggcaatggcggccttgttcctgtctgccccaccccaggccgaggtgaccttcgaggacgtggctgtgtacctctcccgggaggaatggggccgcctgggccctgctcagaggggcctctacagggacgtgatgctggagacctacgggaacctagtctcactgggagtaggacctgcaggccccaagcctggagtgatctcgcagttggagcgaggggatgagccctgggtcctggatgttcagggcacctctgggaaagagcacctgagagtcaacagcccagctcttgggaccagaactgagtacaaggagttgacttcacaggagacatttggtgaggaagatccccagggatctgagccagtagaagcctgtgaccacatcagtaagtcagaggggagcctggaaaagctagtggagcagagaggccccagggcagtcacactgaccaacggggagagcagcagggagtctgggggaaacctcaggttgctgtcaagacctgttcctgatcagagacctcacaaatgtgatatatgtgagcaaagttttgaacagagatcatatctcaacaaccataagcgtgtacacaggtcaaaaaaaacaaatacagttcgtaactctggggaaatcttcagtgcaaacttagttgttaaagaagatcagaaaattcctactgggaaaaaattgcattattgcagttactgtgggaaaacattcaggtacagtgccaaccttgtcaagcatcagcggcttcacactgaagagaagccctacaaatgtgatgagtgtgggaaagccttcagccagagctgcgagttcatcaatcaccgaaggatgcactcaggagagattccctaccggtgtgacgagtgtgggaagacattcacccggaggcccaacctcatgaagcaccagaggattcacactggggagaaaccctacaagtgtggggagtgtgggaagcactttagcgcctactcttccctgatttatcaccagagaatccacaccggagagaaaccctataaatgtaatgactgcgggaaagccttcagtgatggctcaatccttatccgacatcgtcggactcacaccggagagaagccatttgagtgcaaggaatgtggcaaaggctttacacaaagttctaaccttatccaacatcagagaattcacactggagagaaaccctataaatgtaatgaatgtgagaaagctttcattcaaaaaaccaaactcgtggaacatcagagaagccacactggagagaagccctatgaatgcaatgactgtggcaaagttttcagccaaagcacacacctcatccagcaccagagaatccacacaggagagaagccctacaagtgcagcgagtgtgggaaggccttccacaacagttccagactcatccaccaccagaggctgcaccacggagagaaaccctacagatgcagcgattgcaagaaagccttcagccagagcacgtacttgattcagcaccggaggatccacaccggggagaagccctacaagtgcagcgagtgtgggaaggccttccggcacagttccaacatgtgtcagcatcagcggattcacctccgggaggacttctccatgtaacagtggcgcggtgtccgagggcagagtccagctgagcacttcctgcatgcgcccccggcacctgactctgccctttatgtattatccacacgatgttttcacagagtgaaaggacgtttctcattaaacaaacctcttttcttaaatcaaaa

SEQ ID NO: 202207 - DNA, 1926 bp, Homo sapiens
  Payload ID: 19887
  Gene Name: zinc finger protein 34
  ENST ID: ENST00000429371
  CDS Start-End: 155-1774
ggccgaacgggcgaggttgggctgccgtgctgctcggcggcgctgaggccaaatagttgcatcacatgtatctaatccgagagtctcatgcttctggtagctcctcagtgaccagctcctgctcactgccctcagaaagcccaaccctcaggcaatggcggccttgttcctgtctgccccaccccaggccgaggtgaccttcgaggacgtggctgtgtacctctcccgggaggaatggggccgcctgggccctgctcagaggggcctctacagggacgtgatgctggagacctacgggaacctagtctcactgggagtaggacctgcaggccccaagcctggagtgatctcgcagttggagcgaggggatgagccctgggtcctggatgttcagggcacctctgggaaagagcacctgagagtcaacagcccagctcttgggaccagaactgagtacaaggagttgacttcacaggagacatttggtgaggaagatccccagggatctgagccagtagaagcctgtgaccacatcagtaagtcagaggggagcctggaaaagctagtggagcagagaggccccagggcagtcacactgaccaacggggagagcagcagggagtctgggggaaacctcaggttgctgtcaagacctgttcctgatcagagacctcacaaatgtgatatatgtgagcaaagttttgaacagagatcatatctcaacaaccataagcgtgtacacaggtcaaaaaaaacaaatacagttcgtaactctggggaaatcttcagtgcaaacttagttgttaaagaagatcagaaaattcctactgggaaaaaattgcattattgcagttactgtgggaaaacattcaggtacagtgccaaccttgtcaagcatcagcggcttcacactgaagagaagccctacaaatgtgatgagtgtgggaaagccttcagccagagctgcgagttcatcaatcaccgaaggatgcactcaggagagattccctaccggtgtgacgagtgtgggaagacattcacccggaggcccaacctcatgaagcaccagaggattcacactggggagaaaccctacaagtgtggggagtgtgggaagcactttagcgcctactcttccctgatttatcaccagagaatccacaccggagagaaaccctataaatgtaatgactgcgggaaagccttcagtgatggctcaatccttatccgacatcgtcggactcacaccggagagaagccatttgagtgcaaggaatgtggcaaaggctttacacaaagttctaaccttatccaacatcagagaattcacactggagagaaaccctataaatgtaatgaatgtgagaaagctttcattcaaaaaaccaaactcgtggaacatcagagaagccacactggagagaagccctatgaatgcaatgactgtggcaaagttttcagccaaagcacacacctcatccagcaccagagaatccacacaggagagaagccctacaagtgcagcgagtgtgggaaggccttccacaacagttccagactcatccaccaccagaggctgcaccacggagagaaaccctacagatgcagcgattgcaagaaagccttcagccagagcacgtacttgattcagcaccggaggatccacaccggggagaagccctacaagtgcagcgagtgtgggaaggccttccggcacagttccaacatgtgtcagcatcagcggattcacctccgggaggacttctccatgtaacagtggcgcggtgtccgagggcagagtccagctgagcacttcctgcatgcgcccccggcacctgactctgccctttatgtattatccacacgatgttttcacagagtgaaaggacgtttctcattaaacaaacctcttttcttaaatcaaaa

SEQ ID NO: 202208 - DNA, 903 bp, Homo sapiens
  Payload ID: 19887
  Gene Name: zinc finger protein 34
  ENST ID: ENST00000534337
  CDS Start-End: 110-903
aggccaaatagttgcatcacatgtatctaatccgagagtctcatgcttctggtagctcctcagtgaccagctcctgctcactgccctcagaaagcccaaccctcaggcaatggcggccttgttcctgtctgccccaccccaggccgaggtgaccttcgaggacgtggctgtgtacctctcccgggaggaatggggccgcctgggccctgctcagaggggcctctacagggacgtgatgctggagacctacgggaacctagtctcactggctcttgggaccagaactgagtacaaggagttgacttcacaggagacatttggtgaggaagatccccagggatctgagccagtagaagcctgtgaccacatcagtaagtcagaggggagcctggaaaagctagtggagcagagaggccccagggcagtcacactgaccaacggggagagcagcagggagtctgggggaaacctcaggttgctgtcaagacctgttcctgatcagagacctcacaaatgtgatatatgtgagcaaagttttgaacagagatcatatctcaacaaccataagcgtgtacacaggtcaaaaaaaacaaatacagttcgtaactctggggaaatcttcagtgcaaacttagttgttaaagaagatcagaaaattcctactgggaaaaaattgcattattgcagttactgtgggaaaacattcaggtacagtgccaaccttgtcaagcatcagcggcttcacactgaagagaagccctacaaatgtgatgagtgtgggaaagccttcagccagagctgcgagttcatcaatcaccgaaggatgcactcaggagagattccctaccggtgtgacgagtgtgggaagacattcacccggaggcccaacctcatgaagcacca

SEQ ID NO: 202209 - DNA, 582 bp, Homo sapiens
  Payload ID: 19887
  Gene Name: zinc finger protein 34
  ENST ID: ENST00000534445
  CDS Start-End: 108-582
tccgattggcggggagggagggccgaacgggcgaggttgggctgccgtgctgctcggcggcgctgaggccaaatagttgcatcacatgtatctaatccgagagtctcatgcttctgctcctcagtgaccagctcctgctcactgccctcagaaagcccaaccctcaggcaatggcggccttgttcctgtctgccccaccccaggccgaggtgaccttcgaggacgtggctgtgtacctctcccgggaggaatggggccgcctgggccctgctcagaggggcctctacagggacgtgatgctggagacctacgggaacctagtctcactggctcttgggaccagaactgagtacaaggagttgacttcacaggagacatttggtgaggaagatccccagggatctgagccagtagaagcctgtgaccacatcagtaagtcagaggggagcctggaaaagctagtggagcagagaggccccagggcagtcacactgaccaacggggagagcagcagggagtctgggggaaacctcaggttgctgtcaagacctgttcctgatcagagacctcacaaatgtgata

SEQ ID NO: 202210 - DNA, 3661 bp, Homo sapiens
  Payload ID: 19888
  Gene Name: zinc finger protein 341
  Uniprot ID: Q9BYN7
  ENST ID: ENST00000342427
  CDS Start-End: 366-2909
acgtgctgtgggaatgggggattctgtgtcagagctggggggtcgggtccggtgagatggggatgcggatttagataatagggatgggaagttccgcgtgtgcggcggatataaggtcggtgtagacttggtcgttcaagtgaggcggggtccacactcggtggcccggtgactgggttatcgagtggagccagggcagcccagagatgctggggtcccgcgagcctaggttgggtttccagggctgggggctcggcggcggctcctgggcgccccctggcggccccgactcaaccgccacggctcccacaatgctcgcgtagccgggcttcggttcctgtggcggcgacggcggcggctccaagatggcgcaggcgatctttgaggccctggagggaatggacaatcagaccgttctggctgtccagtcattattggatggccaaggagcagtccctgatccgacaggccagagtgtcaatgcgccccctgctatccagccattggatgacgaggatgtatttctctgcgggaagtgtaagaagcaattcaactcgctgccagcgtttatgacccacaagcgggaacagtgccaggggaatgcccccgccctggccacagtctcactggccaccaacagcatctacccaccttcggcagcacccacagcggtccagcaggccccaactcctgccaatcgccagatctccacatacatcacagtgcccccgtccccactgatccagaccctggtgcaggggaacatcttggtgagcgatgatgtgctcatgtctgccatgtcagccttcacatccctggaccagcccatgccccagggccccccacctgtgcagagcagcctgaacatgcattccgtgcccagctacctcacccagcctccacctcctcctccacctcctccaccactgcccccaccgccaccacctcagcctccaccacctccaccccagagcctgggcccccctgggcgtcccaaccctggtgggaacggtgtggtggaggtgtacagtgctgctgcgcccctggctgggagtggaacggtggagatccaggcactggggatgcagccctacccacccctagaggtgccaaaccagtgtgtggagcctccagtatatcccacccccacagtgtacagccctggcaaacagggattcaaacccaaaggaccaaaccccgccgcccccatgaccagcgccaccgggggcacggtggccacctttgactctccagcaacgctgaagacccgacgagctaaagctgcagggaagccaaaggctcagaaactcaagtgctcatactgtgacaagtcattcaccaaaaactttgacctgcagcagcacatccgaagccacaccggtgagaagcccttccagtgcattgcatgtggccgtgcctttgcccagaagtctaatgttaagaaacacatgcagacccacaaggtgtggcctccaggacacagtggtggcaccgtgtctcgaaactctgtgaccgtacaggtcatggccctgaaccccagcaggcaggaggacgaggaaagcacagggttgggccagcccctgccgggtgcgccacagccccaggccttgtccacagctggtgaggaagagggggacaagccggagtccaagcaggtggtcctcatcgacagctcctacctgtgccaattctgccccagcaaattcagcacctacttccagctcaagtctcacatgacccagcataagaatgagcaggtgtacaagtgtgtggtcaaaagctgtgcccagacgttcccaaagctcgacacatttctggagcacatcaagagccaccaggaggagctgagctaccgctgccacctctgcggcaaggacttcccctcgctgtacgacctgggcgtgcaccagtactcccacagcctcctgccacagcacagccccaagaaggacaatgccgtctacaagtgtgtcaaatgtgtcaacaaatactccacccctgaggccctggagcaccacctgcagaccgccactcacaacttcccctgcccacactgccagaaggtgtttccttgtgaacgctacctgcggcgtcatctgcccacccacggcagcgggggcaggttcaagtgccaagtgtgcaagaagttcttccggcgggagcattatctcaaactgcatgctcacatccactcgggtgagaagccctacaaatgctcagtgtgcgagtctgcgttcaaccgcaaggacaaactgaagagacacatgttgatccacgagcccttcaagaaatacaaatgccctttctcgacgcacacaggctgcagtaaggagttcaaccggccggacaagctgaaggcccacatcctctcccactctggcatgaagctccacaaatgcgccctgtgcagcaagtccttcagccgccgtgcccacctcgccgagcatcagcgcgcccacacgggcaactacaagttccgctgtgctggctgcgccaagggcttttcccgccacaaatacctcaaagatcaccgctgtcgtctcggcccccaaaaggacaaggacctgcaaacccggcggcccccccagaggagggcagccccccgcagttgcggcagtggtgggcgcaaggtgctgacccccttgcctgacccgctggggctggaggagctgaaggacacaggggctgggctggtgcccgaggctgtccccggcaagccgcccttcgcagagccggacgcggtgctgtccatcgttgtgggtggtgcggtgggcgcggaaactgagctggtggtacctggacacgctgaggggctgggctccaacctggctctggcggagctgcaggctggggccgagggcccatgtgccatgctcgctgtgcccgtctacatccaggcctccgagtgacggacctgaggtgtctgtttcctgggcaggcctgatgctcctgtttgggtccagggcccctgggggcagaccggtgatccttaccagtggaagcgagccatcgagccattggcagaaatcctgctgaatgtcattcagaaacctcagcccatggtcgccctcctgtgcccctctcctgccggaaagccctgcaacattctagggttgggggcagggccatccacggtttctgggcagagccatggtggcaggagagagatggctgaagcctgagcagcccagagtcccgctggtctaggctggtggtcggggcccctgggagaggagacagggcattcctccccactctgtctccaggctgcctctgggtagcctctagtctgctgttcttcaggaggcctgccataaactcttcggagtttacgtgttgcaccttttcacagacggttccccacagcatcctcagacagctctgtgatgtagcttttaggaggcactcaggtgtcacggctagactgcagctatgagacagatctggcttcaaatccaagagttgccatgcacttgctgtgtgaccttgggcaagtcacttcacttctctgagccccgtgttcctcatctgtacaatggggcttacgatactactacctcatagggttgtcctggggatccagtatgatgaagtgcgccaggggcttggcatggtgcccggcacgcagaaagtgctcaataaatgtttttgtcataacgtg

SEQ ID NO: 202211 - DNA, 3579 bp, Homo sapiens
  Payload ID: 19888
  Gene Name: zinc finger protein 341
  Uniprot ID: Q9BYN7
  ENST ID: ENST00000375200
  CDS Start-End: 263-2827
ggcggatataaggtcggtgtagacttggtcgttcaagtgaggcggggtccacactcggtggcccggtgactgggttatcgagtggagccagggcagcccagagatgctggggtcccgcgagcctaggttgggtttccagggctgggggctcggcggcggctcctgggcgccccctggcggccccgactcaaccgccacggctcccacaatgctcgcgtagccgggcttcggttcctgtggcggcgacggcggcggctccaagatggcgcaggcgatctttgaggccctggagggaatggacaatcagaccgttctggctgtccagtcattattggatggccaaggagcagtccctgatccgacaggccagagtgtcaatgcgccccctgctatccagccattggatgacgaggatgtatttctctgcgggaagtgtaagaagcaattcaactcgctgccagcgtttatgacccacaagcgggaacagtgccaggggaatgcccccgccctggccacagtctcactggccaccaacagcatctacccaccttcggcagcacccacagcggtccagcaggccccaactcctgccaatcgccagatctccacatacatcacagtgcccccgtccccactgatccagaccctggtgcaggggaacatcttggtgagcgatgatgtgctcatgtctgccatgtcagccttcacatccctggaccagcccatgccccagggccccccacctgtgcagagcagcctgaacatgcattccgtgcccagctacctcacccagcctccacctcctcctccacctcctccaccactgcccccaccgccaccacctcagcctccaccacctccaccccagagcctgggcccccctgggcgtcccaaccctggtgggaacggtgtggtggaggtgtacagtgctgctgcgcccctggctgggagtggaacggtggagatccaggcactggggatgcagccctacccacccctagaggtgccaaaccagtgtgtggagcctccagtatatcccacccccacagtgtacagccctggcaaacagggattcaaacccaaaggaccaaaccccgccgcccccatgaccagcgccaccgggggcacggtggccacctttgactctccagcaacgctgaagacccgacgagctaaaggtgccaggggactcccggaagctgcagggaagccaaaggctcagaaactcaagtgctcatactgtgacaagtcattcaccaaaaactttgacctgcagcagcacatccgaagccacaccggtgagaagcccttccagtgcattgcatgtggccgtgcctttgcccagaagtctaatgttaagaaacacatgcagacccacaaggtgtggcctccaggacacagtggtggcaccgtgtctcgaaactctgtgaccgtacaggtcatggccctgaaccccagcaggcaggaggacgaggaaagcacagggttgggccagcccctgccgggtgcgccacagccccaggccttgtccacagctggtgaggaagagggggacaagccggagtccaagcaggtggtcctcatcgacagctcctacctgtgccaattctgccccagcaaattcagcacctacttccagctcaagtctcacatgacccagcataagaatgagcaggtgtacaagtgtgtggtcaaaagctgtgcccagacgttcccaaagctcgacacatttctggagcacatcaagagccaccaggaggagctgagctaccgctgccacctctgcggcaaggacttcccctcgctgtacgacctgggcgtgcaccagtactcccacagcctcctgccacagcacagccccaagaaggacaatgccgtctacaagtgtgtcaaatgtgtcaacaaatactccacccctgaggccctggagcaccacctgcagaccgccactcacaacttcccctgcccacactgccagaaggtgtttccttgtgaacgctacctgcggcgtcatctgcccacccacggcagcgggggcaggttcaagtgccaagtgtgcaagaagttcttccggcgggagcattatctcaaactgcatgctcacatccactcgggtgagaagccctacaaatgctcagtgtgcgagtctgcgttcaaccgcaaggacaaactgaagagacacatgttgatccacgagcccttcaagaaatacaaatgccctttctcgacgcacacaggctgcagtaaggagttcaaccggccggacaagctgaaggcccacatcctctcccactctggcatgaagctccacaaatgcgccctgtgcagcaagtccttcagccgccgtgcccacctcgccgagcatcagcgcgcccacacgggcaactacaagttccgctgtgctggctgcgccaagggcttttcccgccacaaatacctcaaagatcaccgctgtcgtctcggcccccaaaaggacaaggacctgcaaacccggcggcccccccagaggagggcagccccccgcagttgcggcagtggtgggcgcaaggtgctgacccccttgcctgacccgctggggctggaggagctgaaggacacaggggctgggctggtgcccgaggctgtccccggcaagccgcccttcgcagagccggacgcggtgctgtccatcgttgtgggtggtgcggtgggcgcggaaactgagctggtggtacctggacacgctgaggggctgggctccaacctggctctggcggagctgcaggctggggccgagggcccatgtgccatgctcgctgtgcccgtctacatccaggcctccgagtgacggacctgaggtgtctgtttcctgggcaggcctgatgctcctgtttgggtccagggcccctgggggcagaccggtgatccttaccagtggaagcgagccatcgagccattggcagaaatcctgctgaatgtcattcagaaacctcagcccatggtcgccctcctgtgcccctctcctgccggaaagccctgcaacattctagggttgggggcagggccatccacggtttctgggcagagccatggtggcaggagagagatggctgaagcctgagcagcccagagtcccgctggtctaggctggtggtcggggcccctgggagaggagacagggcattcctccccactctgtctccaggctgcctctgggtagcctctagtctgctgttcttcaggaggcctgccataaactcttcggagtttacgtgttgcaccttttcacagacggttccccacagcatcctcagacagctctgtgatgtagcttttaggaggcactcaggtgtcacggctagactgcagctatgagacagatctggcttcaaatccaagagttgccatgcacttgctgtgtgaccttgggcaagtcacttcacttctctgagccccgtgttcctcatctgtacaatggggcttacgatactactacctcatagggttgtcctggggatccagtatgatgaagtgcgccaggggcttggcatggtgcccggcacgcagaaagtgctcaataaatgtttttgtcataacgtg

SEQ ID NO: 202212 - DNA, 3232 bp, Homo sapiens
  Payload ID: 19888
  Gene Name: zinc finger protein 341
  ENST ID: ENST00000483118
  CDS Start-End: 13-1827
ggcggctccaagatggcgcaggcgatctttgaggccctggagggaatggacaatcagaccgttctggctgtccagtcattattggatggccaaggagcagtccctgatccgacaggccagagtgtcaatgcgccccctgctatccagccattggatgacgaggatgtatttctctgcgggaagtgtaagaagcaattcaactcgctgccagcgtttatgacccacaagcgggaacagtgccaggggaatgcccccgccctggccacagtctcactggccaccaacagcatctacccaccttcggcagcacccacagcggtccagcaggccccaactcctgccaatcgccagatctccacatacatcacagtgcccccgtccccactgatccagaccctggtgcaggggaacatcttggtgagcgatgatgtgctcatgtctgccatgtcagccttcacatccctggaccagcccatgccccagggccccccacctgtgcagagcagcctgaacatgcattccgtgcccagctacctcacccagcctccacctcctcctccacctcctccaccactgcccccaccgccaccacctcagcctccaccacctccaccccagagcctgggcccccctgggcgtcccaaccctggtgggaacggtgtggtggaggtgtacagtgctgctgcgcccctggctgggagtggaacggtggagatccaggcactggggatgcagccctacccacccctagaggtgccaaaccagtgtgtggagcctccagtatatcccacccccacagtgtacagccctggcaaacagggattcaaacccaaaggaccaaaccccgccgcccccatgaccagcgccaccgggggcacggtggccacctttgactctccagcaacgctgaagacccgacgagctaaaggtgccaggggactcccggaagctgcagggaagccaaaggctcagaaactcaagtgctcatactgtgacaagtcattcaccaaaaactttgacctgcagcagcacatccgaagccacaccggtgagaagcccttccagtgcattgcatgtggccgtgcctttgcccagaagtctaatgttaagaaacacatgcagacccacaaggtgtggcctccaggacacagtggtggcaccgtgtctcgaaactctgtgaccgtacaggtcatggccctgaaccccagcaggcaggaggacgaggaaagcacagggttgggccagcccctgccgggtgcgccacagccccaggccttgtccacagctggtgaggaagagggggacaagccggagtccaagcaggtggtcctcatcgacagctcctacctgtgccaattctgccccagcaaattcagcacctacttccagctcaagtctcacatgacccagcataagaatgagcaggtgtacaagtgtgtggtcaaaagctgtgcccagacgttcccaaagctcgacacatttctggagcacatcaagagccaccaggaggagctgagctaccgctgccacctctgcggcaaggacttcccctcgctgtacgacctgggcgtgcaccagtactcccacagcctcctgccacagcacagccccaagaaggacaatgccgtctacaagtgtttccttgtgaacgctacctgcggcgtcatctgcccacccacggcagcgggggcaggttcaagtgccaagtgtgcaagaagttcttccggcgggagcattatctcaaactgcatgctcacatccactcgggtgagaagccctacaaatgctcagtgtgcgagtctgcgttcaaccgcaaggacaaactgaagagacacatgttgatccacgagcccttcaagaaatacaaatgccctttctcgacgcacacaggctgcagtaaggagttcaaccggccggacaagctgaaggcccacatcctctcccactctggcatgaagctccacaaatgcgccctgtgcagcaagtccttcagccgccgtgcccacctcgccgagcatcagcgcgcccacacgggcaactacaagttccgctgtgctggctgcgccaagggcttttcccgccacaaatacctcaaagatcaccgctgtcgtctcggcccccaaaaggacaaggacctgcaaacccggcggcccccccagaggagggcagccccccgcagttgcggcagtggtgggcgcaaggtgctgacccccttgcctgacccgctggggctggaggagctgaaggacacaggggctgggctggtgcccgaggctgtccccggcaagccgcccttcgcagagccggacgcggtgctgtccatcgttgtgggtggtgcggtgggcgcggaaactgagctggtggtacctggacacgctgaggggctgggctccaacctggctctggcggagctgcaggctggggccgagggcccatgtgccatgctcgctgtgcccgtctacatccaggcctccgagtgacggacctgaggtgtctgtttcctgggcaggcctgatgctcctgtttgggtccagggcccctgggggcagaccggtgatccttaccagtggaagcgagccatcgagccattggcagaaatcctgctgaatgtcattcagaaacctcagcccatggtcgccctcctgtgcccctctcctgccggaaagccctgcaacattctagggttgggggcagggccatccacggtttctgggcagagccatggtggcaggagagagatggctgaagcctgagcagcccagagtcccgctggtctaggctggtggtcggggcccctgggagaggagacagggcattcctccccactctgtctccaggctgcctctgggtagcctctagtctgctgttcttcaggaggcctgccataaactcttcggagtttacgtgttgcaccttttcacagacggttccccacagcatcctcagacagctctgtgatgtagcttttaggaggcactcaggtgtcacggctagactgcagctatgagacagatctggcttcaaatccaagagttgccatgcacttgctgtgtgaccttgggcaagtcacttcacttctctgagccccgtgttcctcatctgtacaatggggcttacgatactactacctcatagggttgtcctggggatccagtatgatgaagtgcgccaggggcttggcatggtgcccggcacgcagaaagtgctcaataaatgtttttgtcataacgtg

SEQ ID NO: 202213 - DNA, 3140 bp, Homo sapiens
  Payload ID: 19888
  Gene Name: zinc finger protein 341
  ENST ID: ENST00000497876
  CDS Start-End: 21-239
gcgacggcggcggctccaagatggcgcaggcgatctttgaggccctggagggaatggacaatcagaccgttctggctgtccagtcattattggatggccaaggagcagtccctgatccgacaggccagagtgtcaatgcgccccctgctatccagccattggatctccacatacatcacagtgcccccgtccccactgatccagaccctggtgcaggggaacatcttggtgagcgatgatgtgctcatgtctgccatgtcagccttcacatccctggaccagcccatgccccagggccccccacctgtgcagagcagcctgaacatgcattccgtgcccagctacctcacccagcctccacctcctcctccacctcctccaccactgcccccaccgccaccacctcagcctccaccacctccaccccagagcctgggcccccctgggcgtcccaaccctggtgggaacggtgtggtggaggtgtacagtgctgctgcgcccctggctgggagtggaacggtggagatccaggcactggggatgcagccctacccacccctagaggtgccaaaccagtgtgtggagcctccagtatatcccacccccacagtgtacagccctggcaaacagggattcaaacccaaaggaccaaaccccgccgcccccatgaccagcgccaccgggggcacggtggccacctttgactctccagcaacgctgaagacccgacgagctaaaggtgccaggggactcccggaagctgcagggaagccaaaggctcagaaactcaagtgctcatactgtgacaagtcattcaccaaaaactttgacctgcagcagcacatccgaagccacaccggtgagaagcccttccagtgcattgcatgtggccgtgcctttgcccagaagtctaatgttaagaaacacatgcagacccacaaggtgtggcctccaggacacagtggtggcaccgtgtctcgaaactctgtgaccgtacaggtcatggccctgaaccccagcaggcaggaggacgaggaaagcacagggttgggccagcccctgccgggtgcgccacagccccaggccttgtccacagctggtgaggaagagggggacaagccggagtccaagcaggtggtcctcatcgacagctcctacctgtgccaattctgccccagcaaattcagcacctacttccagctcaagtctcacatgacccagcataagaatgagcaggtgtacaagtgtgtggtcaaaagctgtgcccagacgttcccaaagctcgacacatttctggagcacatcaagagccaccaggaggagctgagctaccgctgccacctctgcggcaaggacttcccctcgctgtacgacctgggcgtgcaccagtactcccacagcctcctgccacagcacagccccaagaaggacaatgccgtctacaagtgtgtcaaatgtgtcaacaaatactccacccctgaggccctggagcaccacctgcagaccgccactcacaacttcccctgcccacactgccagaaggtgtttccttgtgaacgctacctgcggcgtcatctgcccacccacggcagcgggggcaggttcaagtgccaagtgtgcaagaagttcttccggcgggagcattatctcaaactgcatgctcacatccactcgggtgagaagccctacaaatgctcagtgtgcgagtctgcgttcaaccgcaaggacaaactgaagagacacatgttgatccacgagcccttcaagaaatacaaatgccctttctcgacgcacacaggctgcagtaaggagttcaaccggccggacaagctgaaggcccacatcctctcccactctggcatgaagctccacaaatgcgccctgtgcagcaagtccttcagccgccgtgcccacctcgccgagcatcagcgcgcccacacgggcaactacaagttccgctgtgctggctgcgccaagggcttttcccgccacaaatacctcaaagatcaccgctgtcgtctcggcccccaaaaggacaaggacctgcaaacccggcggcccccccagaggagggcagccccccgcagttgcggcagtggtgggcgcaaggtgctgacccccttgcctgacccgctggggctggaggagctgaaggacacaggggctgggctggtgcccgaggctgtccccggcaagccgcccttcgcagagccggacgcggtgctgtccatcgttgtgggtggtgcggtgggcgcggaaactgagctggtggtacctggacacgctgaggggctgggctccaacctggctctggcggagctgcaggctggggccgagggcccatgtgccatgctcgctgtgcccgtctacatccaggcctccgagtgacggacctgaggtgtctgtttcctgggcaggcctgatgctcctgtttgggtccagggcccctgggggcagaccggtgatccttaccagtggaagcgagccatcgagccattggcagaaatcctgctgaatgtcattcagaaacctcagcccatggtcgccctcctgtgcccctctcctgccggaaagccctgcaacattctagggttgggggcagggccatccacggtttctgggcagagccatggtggcaggagagagatggctgaagcctgagcagcccagagtcccgctggtctaggctggtggtcggggcccctgggagaggagacagggcattcctccccactctgtctccaggctgcctctgggtagcctctagtctgctgttcttcaggaggcctgccataaactcttcggagtttacgtgttgcaccttttcacagacggttccccacagcatcctcagacagctctgtgatgtagcttttaggaggcactcaggtgtcacggctagactgcagctatgagacagatctggcttcaaatccaagagttgccatgcacttgctgtgtgaccttgggcaagtcacttcacttctctgagccccgtgttcctcatctgtacaatggggcttacgatactactacctcatagggttgtcctggggatccagtatgatgaagtgcgccaggggcttggcatggtgcccggcacgcagaaagtgctcaataaatgtttttgtcataacgtg

SEQ ID NO: 202214 - DNA, 3632 bp, Homo sapiens
  Payload ID: 19889
  Gene Name: zinc finger protein 343
  Uniprot ID: Q6P1L6
  ENST ID: ENST00000278772
  CDS Start-End: 489-2288
gtagtcttttttttgcagaatgggccaaggggacagagacttcactcgggagccagaacctgttttcaacatgggtattttaagaagagacggagaggctgtcactgcagtggtcactgtcctggaaaagtaaccgttgcacggcccagaagtggctctgtggcggccaatgggagccgaagcctgcgaggatgttgggaattgtagttctggcgtcggtcggtggccgagatcccgggcacgctggctctggtccaccttctccaatccctgcctgctgggagaggacgatctcttgagaaaggaaagacttctgtgctcccgagaacttcctatcaggtcctggctgcagggaaacaagctgggctttttataattaaggttggaagaagtcaccacaggcagcagaactccatcttgagatgaaataacatctacctggacctctggcagaatttcaaggcacacactgggctgactctggcgccatgatgttgccttatccttcagcactgggagatcaatactgggaagagattttgcttccaaagaatggggaaaatgtagagactatgaagaaattgacccaaaatcataaagcgaaaggcttgccttctaatgatactgactgcccccagaaaaaggagggaaaggcccaaatagtggtaccagttacattcagggatgtgactgtgatcttcacagaagcagaatggaagagactgagtccagagcagaggaatctatacaaagaagtgatgctggagaattacaggaatcttctctcattggcagaaccaaagccagaaatctacacttgttcctcctgccttctggccttctcctgtcagcagttcctcagtcaacatgtacttcagatcttcctgggcttatgtgcagaaaatcacttccatccagggaattctagcccagggcattggaaacagcaggggcagcagtattcccatgtaagctgttggtttgaaaatgcagaaggtcaggagagaggaggtggctccaaaccctggtctgcaaggacagaggagagagaaacctcaagggcattccccagcccactccaaagacagtcagcaagtcctagaaaaggcaacatggtggtagaaacagagcccagctcagcccaaagaccaaaccctgtgcagctagacaaaggcttgaaggaattagaaaccttgagatttggagcaatcaactgtagagagtatgaaccggaccataacctggaatcaaactttattacaaacccgaggaccctcttagggaagaagccctacatttgcagtgattgtgggcgaagctttaaagatagatcaaccctcatcagacaccatcgtatacactcgatggagaagccttatgtgtgcagtgagtgcgggcgaggttttagccagaagtccaacctcagcagacaccagagaacacattcagaagagaagccttatttgtgcagggagtgtgggcaaagctttagaagtaagtccatcctcaatagacatcagtggactcactcagaggagaagccctatgtttgcagcgagtgtgggcgaggctttagcgagaagtcatccttcatcagacaccagaggacacactccggtgagaaaccctatgtgtgcctggagtgtggacgaagcttttgtgataagtcaaccctcagaaaacaccagaggatacactcaggggagaagccttatgtttgcagggagtgtgggcgaggctttagccagaactcagatctcatcaaacaccagaggacacacttggatgagaagccttatgtttgcagggagtgtgggcgaggcttttgtgacaagtcaaccctcatcatacacgagcggacgcactctggagagaagccttatgtgtgtggtgagtgtggccgaggctttagtcggaaatcactcctccttgtccaccagaggacacactcaggggagaagcattatgtctgcagggagtgtaggcgaggttttagccagaagtcaaatctcatcagacaccagaggacgcactcaaatgagaagccttatatttgcagggaatgtgggcgaggcttttgtgacaagtcaaccctcattgtacatgagaggacacactcaggagagaagccttacgtgtgcagtgagtgtggccgaggctttagccggaaatcactcctccttgtccaccagaggacacactcaggggagaagcattatgtttgtagggagtgtgggcgaggctttagtcataagtcaaatctcatcagacaccagaggacacactgacgggagaaacctgtgtatgcaggggtcatgaacaagacctgagtgaccagtcaagcctcatgttaccccagagagacacatggggagtagaccctgtgtacacagattgtgagtgaagttccagagatgtgtcagcccttatcaggcatgggagggacacgttcaggagaggagccttatgagtatagagtacgggcaactgtagccatcagtcagccttgagcatgcacaaaaggacacacttaggagagaagtttatgtgtagggactgtgggaaggctttagcaataatcaacatttaccagacatccaatgacagcctcaggggaaagcacccttgtctggggagtgttggggagcatcagtaaaagaatggacactcaggcacagagtggccctcaggaaggaggtctttgtttgtaggatgtatgggcaaagcttttgtgatcacacaccacagggagaatctgcatgtggggacactgtggagctctgcccagatgaccttttcaggggtaacaccccagctgcttgagagaacagtgttgctgctggcagagatgcattccagagatgcactccgctctggaactcactctcagccacagggagctgcatgcaccacaggggcaatgcacctttgcaggggtaccttctggccccaacccttgactcaacggggacaactccagaaggtcattccagatccagagatccccatcgaactgaaggatcactgggttgcagacacattgcaggtcagcttcttcctctgcccagtcctgccctcactccccagtgaatcctcaattttctgtctcgttgtctgtccagataattgattctaagacatgttaggtatataaggagtgtagataaggcttcagccatgagtcaccccgcagtaagccccagagtatattgaatagaaattctgcatgtgtggggagaatggacaaggacttaggaaaaagtcctcatcaaagaacagcttttttgggacaagctttacatgggtggggagggaaaatgtgaaacacattagcaataagttaaacctcatcttgtactaaaggaggacacactcagggagaagacctctgtgggcagggcttgtgggtggagcttcatcccgatgtcactcctcaactgacttaggaggacagtcttgctaccccaagtcactacctcactcacctctgagggattttcaggaaatgtcttgactcccccatgtactctgtatgtgagcgaagatggcagtaactgttaaataagcattcttttctacttcttggaatcagatgaaataaaaaagcaggctttatttaagtaatcaaaaaa

SEQ ID NO: 202215 - DNA, 771 bp, Homo sapiens
  Payload ID: 19889
  Gene Name: zinc finger protein 343
  Uniprot ID: Q6P1L6
  ENST ID: ENST00000358413
  CDS Start-End: 415-771
tgcgattcggggcaggggcaggcagtggggggacagcctggaaccagaacgcgaaacccagcctcacggtccaccttctccaatccctgcctgctgggagaggacgatctcttgagaaaggaaagacttctgtgctcccgagaacttcctatcagtagaaccacagtccctcttcggacatgctgttctcagaacaaaagaaatggtggaattatgcaatgcttagaaatggcatcgtcgctttcactcacattcattttccaaggtcctggctgcagggaaacaagctgggctttttataattaaggttggaagaagtcaccacaggcagcagaactccatcttgagatgaaataacatctacctggacctctggcagaatttcaaggcacacactgggctgactctggcgccatgatgttgccttatccttcagcactgggagatcaatactgggaagagattttgcttccaaagaatggggaaaatgtagagactatgaagaaattgacccaaaatcataaagcgaaaggcttgccttctaatgatactgactgcccccagaaaaaggagggaaaggcccaaatagtggtaccagttacattcagggatgtgactgtgatcttcacagaagcagaatggaagagactgagtccagagcagaggaatctatacaaagaagtgatgctggagaattacaggaatcttctctcattgggtcaggagatcgagaccatcctggccaacatagtgaaatcccatctctactaa

SEQ ID NO: 202216 - DNA, 819 bp, Homo sapiens
  Payload ID: 19889
  Gene Name: zinc finger protein 343
  Uniprot ID: Q6P1L6
  ENST ID: ENST00000381253
  CDS Start-End: 272-628
ggtcggtggccgagatcccgggcacgctggctctggtccaccttctccaatccctgcctgctgggagaggacgatctcttgagaaaggaaagacttctgtgctcccgagaacttcctatcaggtcctggctgcagggaaacaagctgggctttttataattaaggttggaagaagtcaccacaggcagcagaactccatcttgagatgaaataacatctacctggacctctggcagaatttcaaggcacacactgggctgactctggcgccatgatgttgccttatccttcagcactgggagatcaatactgggaagagattttgcttccaaagaatggggaaaatgtagagactatgaagaaattgacccaaaatcataaagcgaaaggcttgccttctaatgatactgactgcccccagaaaaaggagggaaaggcccaaatagtggtaccagttacattcagggatgtgactgtgatcttcacagaagcagaatggaagagactgagtccagagcagaggaatctatacaaagaagtgatgctggagaattacaggaatcttctctcattgggtcaggagatcgagaccatcctggccaacatagtgaaatcccatctctactaaaaatacaaaaattagctgagcatggtggcatgtgcctgtaatctcagctacttgggagcctgaggcaggagaatcacttgaaccagggagtcagaggttgcagtgagccgagattgtgccgttgcactccagcctggtgacagagtgaaactcagtctgaaaaaataaaaaaaaataaaaaaatatttaaa

SEQ ID NO: 202217 - DNA, 1028 bp, Homo sapiens
  Payload ID: 19889
  Gene Name: zinc finger protein 343
  ENST ID: ENST00000445484
  CDS Start-End: 595-1028
cctttctgaaaggcctccagatcctctgcgaaggccccctgggctcccccggcggggcccgcagctctcccccgcgctgaatctgaggaactgggcccggaagctcgcgagtctcggtcctggcggttcgggcgggcgccccctgttggccaagttgggacttgccattgcggcaaaacctgcgattcggggcaggggcaggcagtggggggacagcctggaaccagaacgcgaaacccagcctcacggtccaccttctccaatccctgcctgctgggagaggacgatctcttgagaaaggaaagacttctgtgctcccgagaacttcctatcagtagaaccacagtccctcttcggacatgctgttctcagaacaaaagaaatggtggaattatgcaatgcttagaaatggcatcgtcgctttcactcacattcattttccaaggtcctggctgcagggaaacaagctgggctttttataattaaggttggaagaagtcaccacaggcagcagaactccatcttgagatgaaataacatctacctggacctctggcagaatttcaaggcacacactgggctgactctggcgccatgatgttgccttatccttcagcactgggagatcaatactgggaagagattttgcttccaaagaatggggaaaatgtagagactatgaagaaattgacccaaaatcataaagcgaaaggcttgccttctaatgatactgactgcccccagaaaaaggagggaaaggcccaaatagtggtaccagttacattcagggatgtgactgtgatcttcacagaagcagaatggaagagactgagtccagagcagaggaatctatacaaagaagtgatgctggagaattacaggaatcttctctcattggcagaaccaaagccagaaatctacacttgttcctcctgccttctggccttctcctgtcagcagttcctcagtcaacatgtacttcagatcttcctgggcttatgtgcagaaaatcacttccatccagggaa

SEQ ID NO: 202218 - DNA, 642 bp, Homo sapiens
  Payload ID: 19889
  Gene Name: zinc finger protein 343
  ENST ID: ENST00000421216
  CDS Start-End: 339-642
atcccgggcacgctggctctggtgagcgcggcctccgcggctccttggccccaggatgccctctctcgtggggaaaggagggtcgggaaaggccgagcgtaggtccaccttctccaatccctgcctgctgggagaggacgatctcttgagaaaggaaagacttctgtgctcccgagaacttcctatcaggtcctggctgcagggaaacaagctgggctttttataattaaggttggaagaagtcaccacaggcagcagaactccatcttgagatgaaataacatctacctggacctctggcagaatttcaaggcacacactgggctgactctggcgccatgatgttgccttatccttcagcactgggagatcaatactgggaagagattttgcttccaaagaatggggaaaatgtagagactatgaagaaattgacccaaaatcataaagcgaaaggcttgccttctaatgatactgactgcccccagaaaaaggagggaaaggcccaaatagtggtaccagttacattcagggatgtgactgtgatcttcacagaagcagaatggaagagactgagtccagagcagaggaatctatacaaagaagtgatgctggagaattacaggaatcttctctcattgg

SEQ ID NO: 202219 - DNA, 3675 bp, Homo sapiens
  Payload ID: 19889
  Gene Name: zinc finger protein 343
  ENST ID: ENST00000612935
  CDS Start-End: 415-2337
tgcgattcggggcaggggcaggcagtggggggacagcctggaaccagaacgcgaaacccagcctcacggtccaccttctccaatccctgcctgctgggagaggacgatctcttgagaaaggaaagacttctgtgctcccgagaacttcctatcagtagaaccacagtccctcttcggacatgctgttctcagaacaaaagaaatggtggaattatgcaatgcttagaaatggcatcgtcgctttcactcacattcattttccaaggtcctggctgcagggaaacaagctgggctttttataattaaggttggaagaagtcaccacaggcagcagaactccatcttgagatgaaataacatctacctggacctctggcagaatttcaaggcacacactgggctgactctggcgccatgatgttgccttatccttcagcactgggagatcaatactgggaagagattttgcttccaaagaatggggaaaatgtagagactatgaagaaattgacccaaaatcataaagcgaaaggcttgccttctaatgatactgactgcccccagaaaaaggagggaaaggcccaaatagtggtaccagttacattcagggatgtgactgtgatcttcacagaagcagaatggaagagactgagtccagagcagaggaatctatacaaagaagtgatgctggagaattacaggaatcttctctcattggatggagtttcgctcttgttgcccaggctagagtgcaatcgtgcaatctcggctcaccacaacctttgcctcccgggttcaagcaattctcctgccacagcctctcgagtagttgggattacagcagaaccaaagccagaaatctacacttgttcctcctgccttctggccttctcctgtcagcagttcctcagtcaacatgtacttcagatcttcctgggcttatgtgcagaaaatcacttccatccagggaattctagcccagggcattggaaacagcaggggcagcagtattcccatgtaagctgttggtttgaaaatgcagaaggtcaggagagaggaggtggctccaaaccctggtctgcaaggacagaggagagagaaacctcaagggcattccccagcccactccaaagacagtcagcaagtcctagaaaaggcaacatggtggtagaaacagagcccagctcagcccaaagaccaaaccctgtgcagctagacaaaggcttgaaggaattagaaaccttgagatttggagcaatcaactgtagagagtatgaaccggaccataacctggaatcaaactttattacaaacccgaggaccctcttagggaagaagccctacatttgcagtgattgtgggcgaagctttaaagatagatcaaccctcatcagacaccatcgtatacactcgatggagaagccttatgtgtgcagtgagtgcgggcgaggttttagccagaagtccaacctcagcagacaccagagaacacattcagaagagaagccttatttgtgcagggagtgtgggcaaagctttagaagtaagtccatcctcaatagacatcagtggactcactcagaggagaagccctatgtttgcagcgagtgtgggcgaggctttagcgagaagtcatccttcatcagacaccagaggacacactccggtgagaaaccctatgtgtgcctggagtgtggacgaagcttttgtgataagtcaaccctcagaaaacaccagaggatacactcaggggagaagccttatgtttgcagggagtgtgggcgaggctttagccagaactcagatctcatcaaacaccagaggacacacttggatgagaagccttatgtttgcagggagtgtgggcgaggcttttgtgacaagtcaaccctcatcatacacgagcggacgcactctggagagaagccttatgtgtgtggtgagtgtggccgaggctttagtcggaaatcactcctccttgtccaccagaggacacactcaggggagaagcattatgtctgcagggagtgtaggcgaggttttagccagaagtcaaatctcatcagacaccagaggacgcactcaaatgagaagccttatatttgcagggaatgtgggcgaggcttttgtgacaagtcaaccctcattgtacatgagaggacacactcaggagagaagccttacgtgtgcagtgagtgtggccgaggctttagccggaaatcactcctccttgtccaccagaggacacactcaggggagaagcattatgtttgtagggagtgtgggcgaggctttagtcataagtcaaatctcatcagacaccagaggacacactgacgggagaaacctgtgtatgcaggggtcatgaacaagacctgagtgaccagtcaagcctcatgttaccccagagagacacatggggagtagaccctgtgtacacagattgtgagtgaagttccagagatgtgtcagcccttatcaggcatgggagggacacgttcaggagaggagccttatgagtatagagtacgggcaactgtagccatcagtcagccttgagcatgcacaaaaggacacacttaggagagaagtttatgtgtagggactgtgggaaggctttagcaataatcaacatttaccagacatccaatgacagcctcaggggaaagcacccttgtctggggagtgttggggagcatcagtaaaagaatggacactcaggcacagagtggccctcaggaaggaggtctttgtttgtaggatgtatgggcaaagcttttgtgatcacacaccacagggagaatctgcatgtggggacactgtggagctctgcccagatgaccttttcaggggtaacaccccagctgcttgagagaacagtgttgctgctggcagagatgcattccagagatgcactccgctctggaactcactctcagccacagggagctgcatgcaccacaggggcaatgcacctttgcaggggtaccttctggccccaacccttgactcaacggggacaactccagaaggtcattccagatccagagatccccatcgaactgaaggatcactgggttgcagacacattgcaggtcagcttcttcctctgcccagtcctgccctcactccccagtgaatcctcaattttctgtctcgttgtctgtccagataattgattctaagacatgttaggtatataaggagtgtagataaggcttcagccatgagtcaccccgcagtaagccccagagtatattgaatagaaattctgcatgtgtggggagaatggacaaggacttaggaaaaagtcctcatcaaagaacagcttttttgggacaagctttacatgggtggggagggaaaatgtgaaacacattagcaataagttaaacctcatcttgtactaaaggaggacacactcagggagaagacctctgtgggcagggcttgtgggtggagcttcatcccgatgtcactcctcaactgacttaggaggacagtcttgctaccccaagtcactacctcactcacctctgagggattttcaggaaatgtcttgactcccccatgtactctgtatgtgagcgaagatggcagtaactgttaaataagcattcttttctacttcttggaatcagatgaaataaaaaagcaggctttatttaagtaatc

SEQ ID NO: 202220 - DNA, 3300 bp, Homo sapiens
  Payload ID: 19889
  Gene Name: zinc finger protein 343
  Uniprot ID: Q6P1L6
  ENST ID: ENST00000617391
  CDS Start-End: 433-1962
gtagtcttttttttgcagaatgggccaaggggacagagacttcactcgggagccagaacctgttttcaacatgggtattttaagaagagacggagaggctgtcactgcagtggtcactgtcctggaaaagtaaccgttgcacggcccagaagtggctctgtggcggccaatgggagccgaagcctgcgaggatgttgggaattgtagttctggcgtcggtcggtggccgagatcccgggcacgctggctctggtccaccttctccaatccctgcctgctgggagaggacgatctcttgagaaaggaaagacttctgtgctcccgagaacttcctatcaggtaccagttacattcagggatgtgactgtgatcttcacagaagcagaatggaagagactgagtccagagcagaggaatctatacaaagaagtgatgctggagaattacaggaatcttctctcattggcagaaccaaagccagaaatctacacttgttcctcctgccttctggccttctcctgtcagcagttcctcagtcaacatgtacttcagatcttcctgggcttatgtgcagaaaatcacttccatccagggaattctagcccagggcattggaaacagcaggggcagcagtattcccatgtaagctgttggtttgaaaatgcagaaggtcaggagagaggaggtggctccaaaccctggtctgcaaggacagaggagagagaaacctcaagggcattccccagcccactccaaagacagtcagcaagtcctagaaaaggcaacatggtggtagaaacagagcccagctcagcccaaagaccaaaccctgtgcagctagacaaaggcttgaaggaattagaaaccttgagatttggagcaatcaactgtagagagtatgaaccggaccataacctggaatcaaactttattacaaacccgaggaccctcttagggaagaagccctacatttgcagtgattgtgggcgaagctttaaagatagatcaaccctcatcagacaccatcgtatacactcgatggagaagccttatgtgtgcagtgagtgcgggcgaggttttagccagaagtccaacctcagcagacaccagagaacacattcagaagagaagccttatttgtgcagggagtgtgggcaaagctttagaagtaagtccatcctcaatagacatcagtggactcactcagaggagaagccctatgtttgcagcgagtgtgggcgaggctttagcgagaagtcatccttcatcagacaccagaggacacactccggtgagaaaccctatgtgtgcctggagtgtggacgaagcttttgtgataagtcaaccctcagaaaacaccagaggatacactcaggggagaagccttatgtttgcagggagtgtgggcgaggctttagccagaactcagatctcatcaaacaccagaggacacacttggatgagaagccttatgtttgcagggagtgtgggcgaggcttttgtgacaagtcaaccctcatcatacacgagcggacgcactctggagagaagccttatgtgtgtggtgagtgtggccgaggctttagtcggaaatcactcctccttgtccaccagaggacacactcaggggagaagcattatgtctgcagggagtgtaggcgaggttttagccagaagtcaaatctcatcagacaccagaggacgcactcaaatgagaagccttatatttgcagggaatgtgggcgaggcttttgtgacaagtcaaccctcattgtacatgagaggacacactcaggagagaagccttacgtgtgcagtgagtgtggccgaggctttagccggaaatcactcctccttgtccaccagaggacacactcaggggagaagcattatgtttgtagggagtgtgggcgaggctttagtcataagtcaaatctcatcagacaccagaggacacactgacgggagaaacctgtgtatgcaggggtcatgaacaagacctgagtgaccagtcaagcctcatgttaccccagagagacacatggggagtagaccctgtgtacacagattgtgagtgaagttccagagatgtgtcagcccttatcaggcatgggagggacacgttcaggagaggagccttatgagtatagagtacgggcaactgtagccatcagtcagccttgagcatgcacaaaaggacacacttaggagagaagtttatgtgtagggactgtgggaaggctttagcaataatcaacatttaccagacatccaatgacagcctcaggggaaagcacccttgtctggggagtgttggggagcatcagtaaaagaatggacactcaggcacagagtggccctcaggaaggaggtctttgtttgtaggatgtatgggcaaagcttttgtgatcacacaccacagggagaatctgcatgtggggacactgtggagctctgcccagatgaccttttcaggggtaacaccccagctgcttgagagaacagtgttgctgctggcagagatgcattccagagatgcactccgctctggaactcactctcagccacagggagctgcatgcaccacaggggcaatgcacctttgcaggggtaccttctggccccaacccttgactcaacggggacaactccagaaggtcattccagatccagagatccccatcgaactgaaggatcactgggttgcagacacattgcaggtcagcttcttcctctgcccagtcctgccctcactccccagtgaatcctcaattttctgtctcgttgtctgtccagataattgattctaagacatgttaggtatataaggagtgtagataaggcttcagccatgagtcaccccgcagtaagccccagagtatattgaatagaaattctgcatgtgtggggagaatggacaaggacttaggaaaaagtcctcatcaaagaacagcttttttgggacaagctttacatgggtggggagggaaaatgtgaaacacattagcaataagttaaacctcatcttgtactaaaggaggacacactcagggagaagacctctgtgggcagggcttgtgggtggagcttcatcccgatgtcactcctcaactgacttaggaggacagtcttgctaccccaagtcactacctcactcacctctgagggattttcaggaaatgtcttgactcccccatgtactctgtatgtgagcgaagatggcagtaactgttaaataagcattcttttctacttcttggaatcagatgaaataaaaaagcaggctttatttaagtaatc

SEQ ID NO: 202221 - DNA, 533 bp, Homo sapiens
  Payload ID: 19890
  Gene Name: zinc finger protein 345
  ENST ID: ENST00000331800
  CDS Start-End: 195-533
acggcattgaccctaccgttgtctgtgatgcccggattaagcaggatgccctagacttctctgaccttcctctccctgccctgcttggatagaggcctccgaacaggagtaaagaatggctgttgaacatccacaaggcacctgcaagactatgaatcaaagttgagaccaagaaattatttctgaaaaaggatatggaaaaccttacaaaacacagcattgagtgttcaagtttcagaggtgattgggaatgtaaaaaccagtttgagagaaaacagggatctcaggaaggacatttcagtgaaatgatatttactcctgaagacatgcccactttcagtatccagcatcagagaattcatactgatgagaaactccttgaatgtaaggaatgtgggaaggattttagttttgtatcagtccttgttcgacatcagcgaattcatactggtgagaaaccttatgaatgcaaagaatgtggcaaggcctttggtagtggtgcaaaccttgcttaccatcaaagaattcatact

SEQ ID NO: 202222 - DNA, 3527 bp, Homo sapiens
  Payload ID: 19890
  Gene Name: zinc finger protein 345
  Uniprot ID: Q14585
  ENST ID: ENST00000529555
  CDS Start-End: 789-2255
tttaattgtgaccgggttgggcactgtgtttgcgagtgtgaggttcctggaccgcggttgtgactgtatgtccccttggggtgtgtgtgtgtgtgtttactaccatttgccgaactgtgtgtagtatgccttaattttgaggtttgtggctgcttccgtgtgtgtgtgtgcgcgcgcgttggtgatattgttgatggagggtgcgtgtgaatttgttgtcattgtgaccccaaggtgtatgtcactgggaatttgagagatgcccacggactctgtggttgtgtccgtgtctacccccgtggtgtgtatgagtgtgtgattgtgtgttgtgtttaggtttggggtgcctgtgacgtttatgtccctgcggtgtgagtgagtttgtgtgactatgtgtccgtatagccaatgtaggtatggggagtctttgtctttgtgacttcagccattggagacccctgtgagctcagggacaggttctgcccagaacggcattgaccctaccgttgtctgtgatgcccggattaagcaggatgccctagacttctctgaccttcctctgtaggtgatgggcagtaggggctgagcaaagataacttctgacatagtcaaaccaactccctctcagaagaacctgatgtttcctgactgctttctccttcctcagccctgccctgcttggatagaggcctccgaacaggagtaaagaatggctgttgaacatccacaaggcacctgcaagactatgaatcaaagttgagaccaagaaattatttctgaaaaaggatatggaaaaccttacaaaacacagcattgagtgttcaagtttcagaggtgattgggaatgtaaaaaccagtttgagagaaaacagggatctcaggaaggacatttcagtgaaatgatatttactcctgaagacatgcccactttcagtatccagcatcagagaattcatactgatgagaaactccttgaatgtaaggaatgtgggaaggattttagttttgtatcagtccttgttcgacatcagcgaattcatactggtgagaaaccttatgaatgcaaagaatgtggcaaggcctttggtagtggtgcaaaccttgcttaccatcaaagaattcatactggtgagaagccttttgaatgtaaagaatgtgggaaggcctttggtagtggctcaaaccttactcaccatcagagaattcatactggtgagaaaccctatgagtgtaaggaatgtgggaaagcctttagttttggatcaggccttattcgacatcagatcattcacagtggtgagaagccttatgagtgtaaggaatgtgggaagtcctttagttttgaatcagcccttattcggcatcacagaattcacacaggtgagaaaccttatgaatgtatagattgtggtaaagcctttggcagtggttcaaaccttactcaacatcggcggattcatactggtgagaaaccttatgaatgcaaagcatgtggaatggcctttagcagtggttcggctcttactcggcatcagagaattcataccggtgagaaaccatatatatgtaatgaatgtggtaaggcctttagttttggatcagcccttactcgacatcaaagaattcatactggtgagaaaccttatgtatgtaaggaatgtgggaaggcttttaatagtggctcagatctcactcagcatcagagaattcacactggtgagaaaccctatgagtgtaaggagtgtgagaaagcctttagaagtggttcaaaacttattcagcatcaaagaatgcatactggagagaaaccttatgaatgtaaggaatgtgggaagacctttagtagtggttcagaccttactcaacatcacagaattcatactggtgagaaaccctatgaatgtaaggaatgtgggaaggcctttggtagtggctcaaaacttatccaacaccagctaatccatactggtgaaagaccctatgaatgtaaagaatgtggaaagtcctttagtagtggttcagctcttaatcggcaccagagaatacacactggtgagaaaccctatgaatgtaaggagtgtgggaaggctttttatagtggctcaagccttactcagcatcagagaattcatacaggtgagaaactttatgaatgtaagaactgtgggaaggcttatgggagggattcagagtttcagcaacataagaaaagtcataatggtaagaaactctgcgaattggaaactataaattgaaattatgtgctgaaggaaggactctaaacatatgacttaagaaaattcatagtggtgaaaatctctacaaatagaactaaggtacaaatgccttacttatgcttcacaggttagtcagtctaagaatatttatacaggaaaaaaatcaccccaaataaaataaatatttgaagatccttatctatattcattccttcattacttttggaaaattcttacttgtgaatgttaaaaatgaaaaaaaaatcatttattatattttgcctcaactttaaacattggaaaactcatttctgggttaatcctactatattttttcaatggtcttttttttttgtattatacagaattactgattcattgaaaaattattttatttattgcaagtctaaatttatcctttttttctttcctgattatcctaacaccatttattcaataaccttgtccattttcatattttttttattgactatttgatggtaagttacatttttattcacataaagcttggatatcaggtcagtgtttttttgtttttgtttttgtttttgtttttttgagatggagtctcactgtcaccaggctggagtgcagtggtgcaatctcggttcactgcaacctccacctcccgagttcaagtgattttcctgcctcagctccccagtagctgggactacaggcgcccgccaccacgcccagctaattttttgtattttcattagagatggggtttcaccacgttggccaggatggtctcgatctcttgacctcgtgatccatctgcctcggcctcccaacgtgctggaattacaggcatgagccaccatgcctggcccagtgtttgttttttaaatttatatatatgtatctatgtctcatcctgtttatggtcaataactgttacttttaagtatcctttaatacctgtaccttttgttttagaagattgtttactttccttttataaaattatactctccattttagcaaaacagctttccctcatcataatgtagataaaaagaaaaaaaggatatggttacctgtaatcttaccaatcatagataatcactgtcaaacttttggagcaaatcctttaatactatctctcattgttttggaaacaaggtgtgattatgctatactataaccagcccttaatattttttgtctgtaaatatgttgttaccattttattggctttatagtattcacctgtctttatcaaaccccaattttgtcaaatattaaaaattttgccattataaa

SEQ ID NO: 202223 - DNA, 1971 bp, Homo sapiens
  Payload ID: 19890
  Gene Name: zinc finger protein 345
  Uniprot ID: Q14585
  ENST ID: ENST00000420450
  CDS Start-End: 201-1667
ggccttggggctttgtgagatagctagggtcgacttgtgtggattctagtagaacggagctgaccctatccgaacaggcccctgccctgcttggatagaggcctccgaacaggagtaaagaatggctgttgaacatccacaaggcacctgcaagactatgaatcaaagttgagaccaagaaattatttctgaaaaaggatatggaaaaccttacaaaacacagcattgagtgttcaagtttcagaggtgattgggaatgtaaaaaccagtttgagagaaaacagggatctcaggaaggacatttcagtgaaatgatatttactcctgaagacatgcccactttcagtatccagcatcagagaattcatactgatgagaaactccttgaatgtaaggaatgtgggaaggattttagttttgtatcagtccttgttcgacatcagcgaattcatactggtgagaaaccttatgaatgcaaagaatgtggcaaggcctttggtagtggtgcaaaccttgcttaccatcaaagaattcatactggtgagaagccttttgaatgtaaagaatgtgggaaggcctttggtagtggctcaaaccttactcaccatcagagaattcatactggtgagaaaccctatgagtgtaaggaatgtgggaaagcctttagttttggatcaggccttattcgacatcagatcattcacagtggtgagaagccttatgagtgtaaggaatgtgggaagtcctttagttttgaatcagcccttattcggcatcacagaattcacacaggtgagaaaccttatgaatgtatagattgtggtaaagcctttggcagtggttcaaaccttactcaacatcggcggattcatactggtgagaaaccttatgaatgcaaagcatgtggaatggcctttagcagtggttcggctcttactcggcatcagagaattcataccggtgagaaaccatatatatgtaatgaatgtggtaaggcctttagttttggatcagcccttactcgacatcaaagaattcatactggtgagaaaccttatgtatgtaaggaatgtgggaaggcttttaatagtggctcagatctcactcagcatcagagaattcacactggtgagaaaccctatgagtgtaaggagtgtgagaaagcctttagaagtggttcaaaacttattcagcatcaaagaatgcatactggagagaaaccttatgaatgtaaggaatgtgggaagacctttagtagtggttcagaccttactcaacatcacagaattcatactggtgagaaaccctatgaatgtaaggaatgtgggaaggcctttggtagtggctcaaaacttatccaacaccagctaatccatactggtgaaagaccctatgaatgtaaagaatgtggaaagtcctttagtagtggttcagctcttaatcggcaccagagaatacacactggtgagaaaccctatgaatgtaaggagtgtgggaaggctttttatagtggctcaagccttactcagcatcagagaattcatacaggtgagaaactttatgaatgtaagaactgtgggaaggcttatgggagggattcagagtttcagcaacataagaaaagtcataatggtaagaaactctgcgaattggaaactataaattgaaattatgtgctgaaggaaggactctaaacatatgacttaagaaaattcatagtggtgaaaatctctacaaatagaactaaggtacaaatgccttacttatgcttcacaggttagtcagtctaagaatatttatacaggaaaaaaatcaccccaaataaaataaatatttgaagatccttatctatattcattccttcattacttttggaaaattcttacttgtgaatgttaaaaatgaaaaaaaaatcatttattatattttgcctcaactttaaacattggaaaactcatttctgggttaatc

SEQ ID NO: 202224 - DNA, 581 bp, Homo sapiens
  Payload ID: 19890
  Gene Name: zinc finger protein 345
  ENST ID: ENST00000532141
  CDS Start-End: 358-581
atttgggcaagcggccttggggctttgtgagatagctagggtcgacttgtgtggattctagtagaacggagctgaccctatccgaacaggcccctgccctgcttggatagaggcctccgaacaggagtaaagaatggctgttgaacatccacaaggcacctgcaagacctctaacttcaccctggagttgagcagaaacatggcttgccttttccctcagatcagtcttggactccagacaaagggttggaactttgagccaataagcaggttactggtaacagtgcctgaggaaagacaaagctatgggtactatgaatcaaagttgagaccaagaaattatttctgaaaaaggatatggaaaaccttacaaaacacagcattgagtgttcaagtttcagaggtgattgggaatgtaaaaaccagtttgagagaaaacagggatctcaggaaggacatttcagtgaaatgatatttactcctgaagacatgcccactttcagtatccagcatcagagaattcatactgatgagaaactccttgaatgtaaggaatgtgggaaggattttagttttgtatc

SEQ ID NO: 202225 - DNA, 3120 bp, Homo sapiens
  Payload ID: 19890
  Gene Name: zinc finger protein 345
  Uniprot ID: Q14585
  ENST ID: ENST00000589046
  CDS Start-End: 379-1845
gggtgaaagaaagcttgccccagaggacttaaacaggcaagaaggacttggttaaagactattgcaatagtcaacttccaatacaacagcagctggagatttatagctaacgggctgggtgaaggagttaaaggatgctaaattactaagaggaagtgatgggcagtaggggctgagcaaagataacttctgacatagtcaaaccaactccctctcagaagaacctgatgtttcctgactgctttctccttcctcagccctgccctgcttggatagaggcctccgaacaggagtaaagaatggctgttgaacatccacaaggcacctgcaagactatgaatcaaagttgagaccaagaaattatttctgaaaaaggatatggaaaaccttacaaaacacagcattgagtgttcaagtttcagaggtgattgggaatgtaaaaaccagtttgagagaaaacagggatctcaggaaggacatttcagtgaaatgatatttactcctgaagacatgcccactttcagtatccagcatcagagaattcatactgatgagaaactccttgaatgtaaggaatgtgggaaggattttagttttgtatcagtccttgttcgacatcagcgaattcatactggtgagaaaccttatgaatgcaaagaatgtggcaaggcctttggtagtggtgcaaaccttgcttaccatcaaagaattcatactggtgagaagccttttgaatgtaaagaatgtgggaaggcctttggtagtggctcaaaccttactcaccatcagagaattcatactggtgagaaaccctatgagtgtaaggaatgtgggaaagcctttagttttggatcaggccttattcgacatcagatcattcacagtggtgagaagccttatgagtgtaaggaatgtgggaagtcctttagttttgaatcagcccttattcggcatcacagaattcacacaggtgagaaaccttatgaatgtatagattgtggtaaagcctttggcagtggttcaaaccttactcaacatcggcggattcatactggtgagaaaccttatgaatgcaaagcatgtggaatggcctttagcagtggttcggctcttactcggcatcagagaattcataccggtgagaaaccatatatatgtaatgaatgtggtaaggcctttagttttggatcagcccttactcgacatcaaagaattcatactggtgagaaaccttatgtatgtaaggaatgtgggaaggcttttaatagtggctcagatctcactcagcatcagagaattcacactggtgagaaaccctatgagtgtaaggagtgtgagaaagcctttagaagtggttcaaaacttattcagcatcaaagaatgcatactggagagaaaccttatgaatgtaaggaatgtgggaagacctttagtagtggttcagaccttactcaacatcacagaattcatactggtgagaaaccctatgaatgtaaggaatgtgggaaggcctttggtagtggctcaaaacttatccaacaccagctaatccatactggtgaaagaccctatgaatgtaaagaatgtggaaagtcctttagtagtggttcagctcttaatcggcaccagagaatacacactggtgagaaaccctatgaatgtaaggagtgtgggaaggctttttatagtggctcaagccttactcagcatcagagaattcatacaggtgagaaactttatgaatgtaagaactgtgggaaggcttatgggagggattcagagtttcagcaacataagaaaagtcataatggtaagaaactctgcgaattggaaactataaattgaaattatgtgctgaaggaaggactctaaacatatgacttaagaaaattcatagtggtgaaaatctctacaaatagaactaaggtacaaatgccttacttatgcttcacaggttagtcagtctaagaatatttatacaggaaaaaaatcaccccaaataaaataaatatttgaagatccttatctatattcattccttcattacttttggaaaattcttacttgtgaatgttaaaaatgaaaaaaaaatcatttattatattttgcctcaactttaaacattggaaaactcatttctgggttaatcctactatattttttcaatggtcttttttttttgtattatacagaattactgattcattgaaaaattattttatttattgcaagtctaaatttatcctttttttctttcctgattatcctaacaccatttattcaataaccttgtccattttcatattttttttattgactatttgatggtaagttacatttttattcacataaagcttggatatcaggtcagtgtttttttgtttttgtttttgtttttgtttttttgagatggagtctcactgtcaccaggctggagtgcagtggtgcaatctcggttcactgcaacctccacctcccgagttcaagtgattttcctgcctcagctccccagtagctgggactacaggcgcccgccaccacgcccagctaattttttgtattttcattagagatggggtttcaccacgttggccaggatggtctcgatctcttgacctcgtgatccatctgcctcggcctcccaacgtgctggaattacaggcatgagccaccatgcctggcccagtgtttgttttttaaatttatatatatgtatctatgtctcatcctgtttatggtcaataactgttacttttaagtatcctttaatacctgtaccttttgttttagaagattgtttactttccttttataaaattatactctccattttagcaaaacagctttccctcatcataatgtagataaaaagaaaaaaaggatatggttacctgtaatcttaccaatcatagataatcactgtcaaacttttggagcaaatcctttaatactatctctcattgttttggaaacaaggtgtgattatgctatactataaccagcccttaatattttttgtctgtaaatatgttgttaccattttattggctttatagtattcacctgtctttatcaaaccccaattttgtcaaatattaaaaattttgccattataaacac

SEQ ID NO: 202226 - DNA, 651 bp, Homo sapiens
  Payload ID: 19890
  Gene Name: zinc finger protein 345
  ENST ID: ENST00000585396
  CDS Start-End: 98-651
agcaacacaagtagactaaggcatcaagttttaccacttaagattaaggtgactatgaatcaaagttgagaccaagaaattatttctgaaaaaggatatggaaaaccttacaaaacacagcattgagtgttcaagtttcagaggtgattgggaatgtaaaaaccagtttgagagaaaacagggatctcaggaaggacatttcagtgaaatgatatttactcctgaagacatgcccactttcagtatccagcatcagagaattcatactgatgagaaactccttgaatgtaaggaatgtgggaaggattttagttttgtatcagtccttgttcgacatcagcgaattcatactggtgagaaaccttatgaatgcaaagaatgtggcaaggcctttggtagtggtgcaaaccttgcttaccatcaaagaattcatactggtgagaagccttttgaatgtaaagaatgtgggaaggcctttggtagtggctcaaaccttactcaccatcagagaattcatactggtgagaaaccctatgagtgtaaggaatgtgggaaagcctttagttttggatcaggccttattcgacatcagatcattcacagtggtgagaagccttatgagtgtaaggaatgtgggaagtcctttagttt

SEQ ID NO: 202227 - DNA, 564 bp, Homo sapiens
  Payload ID: 19890
  Gene Name: zinc finger protein 345
  ENST ID: ENST00000586646
  CDS Start-End: 282-564
gaccctaccgttgtctgtgatgcccggattaagcaggatgccctagacttctctgaccttcctctccctgccctgcttggatagaggcctccgaacaggagtaaagaatggctgttgaacatccacaaggcacctgcaagggaggaaatttggacacacagagagatgccaaggatacacacagaggaaagaccatgtgagtgcatagcaagaaagtgaccatctgcaagccaagactatgaatcaaagttgagaccaagaaattatttctgaaaaaggatatggaaaaccttacaaaacacagcattgagtgttcaagtttcagaggtgattgggaatgtaaaaaccagtttgagagaaaacagggatctcaggaaggacatttcagtgaaatgatatttactcctgaagacatgcccactttcagtatccagcatcagagaattcatactgatgagaaactccttgaatgtaaggaatgtgggaaggattttagttttgtatcagtccttgttcgacatcagcgaattcatactggtgagaaaccttatgaatgcaaagaat

SEQ ID NO: 202228 - DNA, 458 bp, Homo sapiens
  Payload ID: 19890
  Gene Name: zinc finger protein 345
  ENST ID: ENST00000526123
  CDS Start-End: 196-423
tggggctttgtgagatagctagggtcgacttgtgtggattctagtagaacggagctgaccctatccgaacaggcccctgccctgcttggatagaggcctccgaacaggagtaaagaatggctgttgaacatccacaaggcacctgcaagactatgaatcaaagttgagaccaagaaattatttctgaaaaaggatatggaaaaccttacaaaacacagcattgagtgttcaagtttcagagatcccccacaggcgctgcctgagacccagctctgtgtctcctcgtcgtacagcttgtggagctccgactgcaaggccatcagcatgcccaggcaggggttaagctggagggccatggaggaggacaggccagcaggatgccgcttctgctccagggcatgcaccatgcgtgagatattctaattatatacacgttcataaacatatgctcacatgca

SEQ ID NO: 202229 - DNA, 571 bp, Homo sapiens
  Payload ID: 19890
  Gene Name: zinc finger protein 345
  ENST ID: ENST00000586933
  CDS Start-End: 413-571
ggatttgggcaagcggccttggggctttgtgagatagctagggtcgacttgtgtggattctagtagaacggagctgaccctatccgaacaggcccctgccctgcttggatagaggcctccgaacaggagtaaagaatggctgttgaacatccacaaggcacctgcaagctcctcttcaccttctgctagtggaagcagcctgaaaccttcatcagaagaagctgttggtgccatgcatcttgtacagcctgcagaactgtgagccaaataaacctcttttctttataagttacccactcttagatatgtcttcatagcaacacaagtagactaaggcatcaagttttaccacttaagattaaggtgactatgaatcaaagttgagaccaagaaattatttctgaaaaaggatatggaaaaccttacaaaacacagcattgagtgttcaagtttcagagatcccccacaggcgctgcctgagacccagctctgtgtctcctcgtcgtacagcttgtggagctccgactgcaaggccatcagcatgcccaggcaggggttaagctggagggcc

SEQ ID NO: 202230 - DNA, 3103 bp, Homo sapiens
  Payload ID: 19890
  Gene Name: zinc finger protein 345
  Uniprot ID: Q14585
  ENST ID: ENST00000614069
  CDS Start-End: 360-1826
ggatttgggcaagcggccttggggctttgtgagatagctagggtcgacttgtgtggattctagtagaacggagctgaccctatccgaacaggcccctgccctgcttggatagaggcctccgaacaggagtaaagaatggctgttgaacatccacaaggcacctgcaagacctctaacttcaccctggagttgagcagaaacatggcttgccttttccctcagatcagtcttggactccagacaaagggttggaactttgagccaataagcaggttactggtaacagtgcctgaggaaagacaaagctatgggtactatgaatcaaagttgagaccaagaaattatttctgaaaaaggatatggaaaaccttacaaaacacagcattgagtgttcaagtttcagaggtgattgggaatgtaaaaaccagtttgagagaaaacagggatctcaggaaggacatttcagtgaaatgatatttactcctgaagacatgcccactttcagtatccagcatcagagaattcatactgatgagaaactccttgaatgtaaggaatgtgggaaggattttagttttgtatcagtccttgttcgacatcagcgaattcatactggtgagaaaccttatgaatgcaaagaatgtggcaaggcctttggtagtggtgcaaaccttgcttaccatcaaagaattcatactggtgagaagccttttgaatgtaaagaatgtgggaaggcctttggtagtggctcaaaccttactcaccatcagagaattcatactggtgagaaaccctatgagtgtaaggaatgtgggaaagcctttagttttggatcaggccttattcgacatcagatcattcacagtggtgagaagccttatgagtgtaaggaatgtgggaagtcctttagttttgaatcagcccttattcggcatcacagaattcacacaggtgagaaaccttatgaatgtatagattgtggtaaagcctttggcagtggttcaaaccttactcaacatcggcggattcatactggtgagaaaccttatgaatgcaaagcatgtggaatggcctttagcagtggttcggctcttactcggcatcagagaattcataccggtgagaaaccatatatatgtaatgaatgtggtaaggcctttagttttggatcagcccttactcgacatcaaagaattcatactggtgagaaaccttatgtatgtaaggaatgtgggaaggcttttaatagtggctcagatctcactcagcatcagagaattcacactggtgagaaaccctatgagtgtaaggagtgtgagaaagcctttagaagtggttcaaaacttattcagcatcaaagaatgcatactggagagaaaccttatgaatgtaaggaatgtgggaagacctttagtagtggttcagaccttactcaacatcacagaattcatactggtgagaaaccctatgaatgtaaggaatgtgggaaggcctttggtagtggctcaaaacttatccaacaccagctaatccatactggtgaaagaccctatgaatgtaaagaatgtggaaagtcctttagtagtggttcagctcttaatcggcaccagagaatacacactggtgagaaaccctatgaatgtaaggagtgtgggaaggctttttatagtggctcaagccttactcagcatcagagaattcatacaggtgagaaactttatgaatgtaagaactgtgggaaggcttatgggagggattcagagtttcagcaacataagaaaagtcataatggtaagaaactctgcgaattggaaactataaattgaaattatgtgctgaaggaaggactctaaacatatgacttaagaaaattcatagtggtgaaaatctctacaaatagaactaaggtacaaatgccttacttatgcttcacaggttagtcagtctaagaatatttatacaggaaaaaaatcaccccaaataaaataaatatttgaagatccttatctatattcattccttcattacttttggaaaattcttacttgtgaatgttaaaaatgaaaaaaaaatcatttattatattttgcctcaactttaaacattggaaaactcatttctgggttaatcctactatattttttcaatggtcttttttttttgtattatacagaattactgattcattgaaaaattattttatttattgcaagtctaaatttatcctttttttctttcctgattatcctaacaccatttattcaataaccttgtccattttcatattttttttattgactatttgatggtaagttacatttttattcacataaagcttggatatcaggtcagtgtttttttgtttttgtttttgtttttgtttttttgagatggagtctcactgtcaccaggctggagtgcagtggtgcaatctcggttcactgcaacctccacctcccgagttcaagtgattttcctgcctcagctccccagtagctgggactacaggcgcccgccaccacgcccagctaattttttgtattttcattagagatggggtttcaccacgttggccaggatggtctcgatctcttgacctcgtgatccatctgcctcggcctcccaacgtgctggaattacaggcatgagccaccatgcctggcccagtgtttgttttttaaatttatatatatgtatctatgtctcatcctgtttatggtcaataactgttacttttaagtatcctttaatacctgtaccttttgttttagaagattgtttactttccttttataaaattatactctccattttagcaaaacagctttccctcatcataatgtagataaaaagaaaaaaaggatatggttacctgtaatcttaccaatcatagataatcactgtcaaacttttggagcaaatcctttaatactatctctcattgttttggaaacaaggtgtgattatgctatactataaccagcccttaatattttttgtctgtaaatatgttgttaccattttattggctttatagtattcacctgtctttatcaaaccccaattttgtcaaatattaaaaattttgccattataaacactt

SEQ ID NO: 202231 - DNA, 2938 bp, Homo sapiens
  Payload ID: 19890
  Gene Name: zinc finger protein 345
  Uniprot ID: Q14585
  ENST ID: ENST00000612719
  CDS Start-End: 195-1661
acggcattgaccctaccgttgtctgtgatgcccggattaagcaggatgccctagacttctctgaccttcctctccctgccctgcttggatagaggcctccgaacaggagtaaagaatggctgttgaacatccacaaggcacctgcaagactatgaatcaaagttgagaccaagaaattatttctgaaaaaggatatggaaaaccttacaaaacacagcattgagtgttcaagtttcagaggtgattgggaatgtaaaaaccagtttgagagaaaacagggatctcaggaaggacatttcagtgaaatgatatttactcctgaagacatgcccactttcagtatccagcatcagagaattcatactgatgagaaactccttgaatgtaaggaatgtgggaaggattttagttttgtatcagtccttgttcgacatcagcgaattcatactggtgagaaaccttatgaatgcaaagaatgtggcaaggcctttggtagtggtgcaaaccttgcttaccatcaaagaattcatactggtgagaagccttttgaatgtaaagaatgtgggaaggcctttggtagtggctcaaaccttactcaccatcagagaattcatactggtgagaaaccctatgagtgtaaggaatgtgggaaagcctttagttttggatcaggccttattcgacatcagatcattcacagtggtgagaagccttatgagtgtaaggaatgtgggaagtcctttagttttgaatcagcccttattcggcatcacagaattcacacaggtgagaaaccttatgaatgtatagattgtggtaaagcctttggcagtggttcaaaccttactcaacatcggcggattcatactggtgagaaaccttatgaatgcaaagcatgtggaatggcctttagcagtggttcggctcttactcggcatcagagaattcataccggtgagaaaccatatatatgtaatgaatgtggtaaggcctttagttttggatcagcccttactcgacatcaaagaattcatactggtgagaaaccttatgtatgtaaggaatgtgggaaggcttttaatagtggctcagatctcactcagcatcagagaattcacactggtgagaaaccctatgagtgtaaggagtgtgagaaagcctttagaagtggttcaaaacttattcagcatcaaagaatgcatactggagagaaaccttatgaatgtaaggaatgtgggaagacctttagtagtggttcagaccttactcaacatcacagaattcatactggtgagaaaccctatgaatgtaaggaatgtgggaaggcctttggtagtggctcaaaacttatccaacaccagctaatccatactggtgaaagaccctatgaatgtaaagaatgtggaaagtcctttagtagtggttcagctcttaatcggcaccagagaatacacactggtgagaaaccctatgaatgtaaggagtgtgggaaggctttttatagtggctcaagccttactcagcatcagagaattcatacaggtgagaaactttatgaatgtaagaactgtgggaaggcttatgggagggattcagagtttcagcaacataagaaaagtcataatggtaagaaactctgcgaattggaaactataaattgaaattatgtgctgaaggaaggactctaaacatatgacttaagaaaattcatagtggtgaaaatctctacaaatagaactaaggtacaaatgccttacttatgcttcacaggttagtcagtctaagaatatttatacaggaaaaaaatcaccccaaataaaataaatatttgaagatccttatctatattcattccttcattacttttggaaaattcttacttgtgaatgttaaaaatgaaaaaaaaatcatttattatattttgcctcaactttaaacattggaaaactcatttctgggttaatcctactatattttttcaatggtcttttttttttgtattatacagaattactgattcattgaaaaattattttatttattgcaagtctaaatttatcctttttttctttcctgattatcctaacaccatttattcaataaccttgtccattttcatattttttttattgactatttgatggtaagttacatttttattcacataaagcttggatatcaggtcagtgtttttttgtttttgtttttgtttttgtttttttgagatggagtctcactgtcaccaggctggagtgcagtggtgcaatctcggttcactgcaacctccacctcccgagttcaagtgattttcctgcctcagctccccagtagctgggactacaggcgcccgccaccacgcccagctaattttttgtattttcattagagatggggtttcaccacgttggccaggatggtctcgatctcttgacctcgtgatccatctgcctcggcctcccaacgtgctggaattacaggcatgagccaccatgcctggcccagtgtttgttttttaaatttatatatatgtatctatgtctcatcctgtttatggtcaataactgttacttttaagtatcctttaatacctgtaccttttgttttagaagattgtttactttccttttataaaattatactctccattttagcaaaacagctttccctcatcataatgtagataaaaagaaaaaaaggatatggttacctgtaatcttaccaatcatagataatcactgtcaaacttttggagcaaatcctttaatactatctctcattgttttggaaacaaggtgtgattatgctatactataaccagcccttaatattttttgtctgtaaatatgttgttaccattttattggctttatagtattcacctgtctttatcaaaccccaattttgtcaaatattaaaaattttgccattataaacactt

SEQ ID NO: 202232 - DNA, 2314 bp, Homo sapiens
  Payload ID: 19891
  Gene Name: zinc finger protein 346
  Uniprot ID: Q9UL40
  ENST ID: ENST00000358149
  CDS Start-End: 44-928
aggcgcctgagaggctctctaccggtgagggtttgcggggaagatggagtatcccgcgccggccacggtgcaggccgcggacggcggagcggccgggccttacagcagctcggagttgctggagggccaggagccggacggggtgcgctttgaccgcgagagggcgcgccgcctgtgggaagccgtgtccggtgcccagccggtgggtagagaggaagtggagcacatgatccagaagaaccaatgtctcttcaccaacacccagtgtaaggtttgctgcgccttgcttatttctgagtcccagaagctggcacattaccagagcaaaaaacatgccaacaaagtgaagagatacctagcaatccatggaatggagacattaaagggggaaacgaagaagctagactcagatcagaagagcagcagaagcaaagacaagaaccagtgctgccccatctgtaacatgaccttttcctcccctgtcgtggcccagtcgcactacctggggaagacccacgcaaagaacttaaagctgaagcagcagtccactaaggtggaagccttgcaccagaatagagagatgatagacccagacaagttctgcagcctctgccatgcaactttcaacgaccctgtcatggctcaacaacattatgtgggcaagaaacacagaaaacaggagaccaagctcaaactaatggcacgctatgggcggctggcggaccctgctgtcactgactttccagctggaaagggctacccctgcaaaacatgtaagatagtgctgaactccatagaacagtaccaagctcatgtcagcggcttcaaacacaagaaccagtcaccaaaaacagtggcatcatccctgggccagattccaatgcaaaggcaacccattcagaaagactcaaccaccttggaagactagaggtgattctgcccagcatcccatattgggccagccatgagccagcttcccgtgactgctcagcccttggctccctcttgctcgttgttctcaccaggaaagtacacgggcctgaggcaggattgggccacagacagcctctcattggtccgggctaattcactcctgctgctcccctttggcaggggtcctgtaggtcatgacaggggaggcaagggtattgagagactcggggtctcgcggggtggtagtttggagggtggctttccccatttcccaacccctctgggccttaggtgctgaggcccctgccacctgtctttcctctaaaggtcagttttgggccagttcttgcaactaaagagcagagatctctctgggccctagacatttccagcaaaacctggaactttcatgccaaacctggggcagggcaggaaacagaggaaatggctgcaacatgggagcttggagctaatacgacactctgccttcccccagaaggtgcaggctttcctgagtcttagaccagatatggccagttgcgcaggtttctgccaactgtgaagtatcctcctggagcagtgacacaatcttggcggagcattgctacccccgctgccccctccacagttcctgaatggtgctaaggatctgcagcagttggcaacgagctggggctgggggcggcctccatgtccactgagatcataggacactccaatggggatgggacctttcccctcctccatcagaggtgctctgaccctaggttacacgggaaagtgccccacatgcaagtctccctgagggttctgcccctaaaggcagactgcctcatgcccgctagctgtgaggttcattgctaccctcggccctactagccctctcttcccccttgtgcagcggaccacttgcccagtttgctgtggtgctagccttccccatcatccaccgggtgatttctgggtcccagggaaagaaagagagagctgatgcaggtttctacagtgaggaacaggcgtttcccaggccccacacccagatttctctatctttgctgtgttttatggcctgggactgagtccacacggatagatttttccttgtaaccttgagacgagaattccaaggagtgtcaccatcagaggcttctcttcattgtgtcaaagaagcccctagctgctctcgtggcctccttcccccactccctatcccttcacctgtgaaatgcctttgctttgcatattgtgtgtggatgtgtgtgtgtgtgtgtgtgtgtttgtgtgtatgtgtgtgcttctgtgtgtgcctaatgctctgtctcttggtcactgaagcatccaaataaagaatttccctcatgggccagactacaacttaaca

SEQ ID NO: 202233 - DNA, 1575 bp, Homo sapiens
  Payload ID: 19891
  Gene Name: zinc finger protein 346
  ENST ID: ENST00000512315
  CDS Start-End: 44-400
aggcgcctgagaggctctctaccggtgagggtttgcggggaagatggagtatcccgcgccggccacggtgcaggccgcggacggcggagcggccgggccttacagcagctcggagttgctggagggccaggagccggacggggtgcgctttgaccgcgagagggcgcgccgcctgtgggaagccgtgtccggtgcccagccggtgggtagagaggaagctggaaagggctacccctgcaaaacatgtaagatagtgctgaactccatagaacagtaccaagctcatgtcagcggcttcaaacacaagaaccagtcaccaaaaacagtggcatcatccctgggccagattccaatgcaaaggcaacccattcagaaagactcaaccaccttggaagactagagctaggggtggccgtgtcacagtctggccaaggaaatgaaattgggagttgctgtgtggaaactcaactctctggaacttcttccttcctcctgcctctgcacaaatgtgacggcagcagctgaagccaacatcttgcgaccatgagagaaaaacctggagaacggacgagtcctcaaccctgacttcagaccaacctacacccacctctggacgtggggctaagtgagagatggatacactgtttcatttaggccctgctcacttaggtttctgttattcacaccccaacgaaaccctccatggtccagggcaccgggcaaagtacagaagggcacgagtttacttcccgcttccctggagaccaccaaccctctcacccttccagcccagcctctgccacttcccagctgtcggtcctcctccaaacagacgtgcatgccaacacccggtgggtgtgaggcttgtaggcccaagtctagagaggctgagtctggcaaagcctgaaagcccctgtcctagcaagccaggccacaggtctagagtatccgagaccagtgaataaggggacggggggtgctactgaggctgtgagaagccccaggaccagcccagggtagttagaactgagtgaggttagccgggactaacctcactcagatccctcctccccagttcccctccatccactttggtttggaagcctccccagagctctcccaggctgtcatcagctctaaactctctgcctccacaaaaatgccctgggcaacctgtaactcacagccctgctgtcttcagagtataaactggagacagatgtacccagaattgaggacgggtgggaaatgaggagaaatgaaggctgaggaggggtcattctcacagtccctccctttcggtcacaggagggtgttgcccatgcttttgggtgggtcccaggcccatagctgcaaatattcatattggctactcttcagtgagcaaggggtatatgccaggcactggcattgtgcttgacatacatcatcatactgagtcctcacggaagatgtattattcccatttcacagaagatgaaactgaggcttgaggttaagtgatttgtccgtgaccacaaagagttttcgggactcaaacccagatctgtcactgggcaaggtggctcacaccta

SEQ ID NO: 202234 - DNA, 1191 bp, Homo sapiens
  Payload ID: 19891
  Gene Name: zinc finger protein 346
  Uniprot ID: Q9UL40
  ENST ID: ENST00000503425
  CDS Start-End: 36-824
gagaggctctctaccggtgagggtttgcggggaagatggagtatcccgcgccggccacggtgcaggccgcggacggcggagcggccgggccttacagcagctcggagttgctggagggccaggagccggacggggtgcgctttgaccgcgagagggcgcgccgcctgtgggaagccgtgtccggtgcccagccggtgggtagagaggaagtggagcacatgatccagaagaaccaatgtctcttcaccaacacccagtgtaaggtttgctgcgccttgcttatttctgagtcccagaagctggcacattaccagagcagcagaagcaaagacaagaaccagtgctgccccatctgtaacatgaccttttcctcccctgtcgtggcccagtcgcactacctggggaagacccacgcaaagaacttaaagctgaagcagcagtccactaaggtggaagccttgcaccagaatagagagatgatagacccagacaagttctgcagcctctgccatgcaactttcaacgaccctgtcatggctcaacaacattatgtgggcaagaaacacagaaaacaggagaccaagctcaaactaatggcacgctatgggcggctggcggaccctgctgtcactgactttccagctggaaagggctacccctgcaaaacatgtaagatagtgctgaactccatagaacagtaccaagctcatgtcagcggcttcaaacacaagaaccagtcaccaaaaacagtggcatcatccctgggccagattccaatgcaaaggcaacccattcagaaagactcaaccaccttggaagactagaggtgattctgcccagcatcccatattgggccagccatgagccagcttcccgtgactgctcagcccttggctccctcttgctcgttgttctcaccaggaaagtacacgggcctgaggcaggattgggccacagacagcctctcattggtccgggctaattcactcctgctgctcccctttggcaggggtcctgtaggtcatgacaggggaggcaagggtattgagagactcggggtctcgcggggtggtagtttggagggtggctttccccatttcccaacccctctgggccttaggtgctgaggcccctgccacctgtctttcctctaaaggtcagttttgggccagttcttgcaactaaagagca

SEQ ID NO: 202235 - DNA, 1622 bp, Homo sapiens
  Payload ID: 19891
  Gene Name: zinc finger protein 346
  ENST ID: ENST00000508155
  CDS Start-End: 24-419
accggtgagggtttgcggggaagatggagtatcccgcgccggccacggtgcaggccgcggacggcggagcggccgggccttacagcagctcggagttgctggagggccaggagccggacggggtgcgctttgaccgcgagagggcgcgccgcctgtgggaagccgtgtccggtgcccagccggtgggtagagaggaagtggagcacatgatccagaagaaccaatgtctcttcaccaacacccagtgtaaggtttgctgcgccttgcttatttctgagtcccagaagctggcacattaccagagcaaaaaacatgccaacaaagtgaagagatacctagcaatccatggaatggagacattaaagggggaaacgaagaagctagactcagatcagccttgcaccagaatagagagatgatagacccagacaagttctgcagcctctgccatgcaactttcaacgaccctgtcatggctcaacaacattatgtgggcaagaaacacagaaaacaggagaccaagctcaaactaatggcacgctatgggcggctggcggaccctgctgtcactgactttccagctggaaagggctacccctgcaaaacatgtaagatagtgctgaactccatagaacagtaccaagctcatgtcagcggcttcaaacacaagaaccagtcaccaaaaacagtggcatcatccctgggccagattccaatgcaaaggcaacccattcagaaagactcaaccaccttggaagactagaggtgattctgcccagcatcccatattgggccagccatgagccagcttcccgtgactgctcagcccttggctccctcttgctcgttgttctcaccaggaaagtacacgggcctgaggcaggattgggccacagacagcctctcattggtccgggctaattcactcctgctgctcccctttggcaggggtcctgtaggtcatgacaggggaggcaagggtattgagagactcggggtctcgcggggtggtagtttggagggtggctttccccatttcccaacccctctgggccttaggtgctgaggcccctgccacctgtctttcctctaaaggtcagttttgggccagttcttgcaactaaagagcagagatctctctgggccctagacatttccagcaaaacctggaactttcatgccaaacctggggcagggcaggaaacagaggaaatggctgcaacatgggagcttggagctaatacgacactctgccttcccccagaaggtgcaggctttcctgagtcttagaccagatatggccagttgcgcaggtttctgccaactgtgaagtatcctcctggagcagtgacacaatcttggcggagcattgctacccccgctgccccctccacagttcctgaatggtgctaaggatctgcagcagttggcaacgagctggggctgggggcggcctccatgtccactgagatcataggacactccaatggggatgggacctttcccctcctccatcagaggtgctctgaccctaggttacacgggaaagtgccccacatgcaagtctccctgagggttctgcccctaaaggcagactgcctcatgcccgctagctgtgaggt

SEQ ID NO: 202236 - DNA, 1276 bp, Homo sapiens
  Payload ID: 19891
  Gene Name: zinc finger protein 346
  ENST ID: ENST00000506693
  CDS Start-End: 44-634
aggcgcctgagaggctctctaccggtgagggtttgcggggaagatggagtatcccgcgccggccacggtgcaggccgcggacggcggagcggccgggccttacagcagctcggagttgctggagggccaggagccggacggggtgcgctttgaccgcgagagggcgcgccgcctgtgggaagccgtgtccggtgcccagccggtgggtagagaggaagctctgtcaaaacgccttacaaatcctttccttgtggcctccaccttagccttgcaccagaatagagagatgatagacccagacaagttctgcagcctctgccatgcaactttcaacgaccctgtcatggctcaacaacattatgtgggcaagaaacacagaaaacaggagaccaagctcaaactaatggcacgctatgggcggctggcggaccctgctgtcactgactttccagctggaaagggctacccctgcaaaacatgtaagatagtgctgaactccatagaacagtaccaagctcatgtcagcggcttcaaacacaagaaccagtcaccaaaaacagtggcatcatccctgggccagattccaatgcaaaggcaacccattcagaaagactcaaccaccttggaagactagaggtgattctgcccagcatcccatattgggccagccatgagccagcttcccgtgactgctcagcccttggctccctcttgctcgttgttctcaccaggaaagtacacgggcctgaggcaggattgggccacagacagcctctcattggtccgggctaattcactcctgctgctcccctttggcaggggtcctgtaggtcatgacaggggaggcaagggtattgagagactcggggtctcgcggggtggtagtttggagggtggctttccccatttcccaacccctctgggccttaggtgctgaggcccctgccacctgtctttcctctaaaggtcagttttgggccagttcttgcaactaaagagcagagatctctctgggccctagacatttccagcaaaacctggaactttcatgccaaacctggggcagggcaggaaacagaggaaatggctgcaacatgggagcttggagctaatacgacactctgccttcccccagaaggtgcaggctttcctgagtcttagaccagatatggccagttgcgcaggtttctgccaactgtgaagtatcctcctggagcagtgacacaatcttggcggagcattgctacccccgctgccccctccacagttcctgaat

SEQ ID NO: 202237 - DNA, 977 bp, Homo sapiens
  Payload ID: 19891
  Gene Name: zinc finger protein 346
  ENST ID: ENST00000513587
  CDS Start-End: 5-412
gaagatggagtatcccgcgccggccacggtgcaggccgcggacggcggagcggccgggccttacagcagctcggagttgctggagggccaggagccggacggggtgcgctttgaccgcgagagggcgcgccgcctgtgggaagccgtgtccggtgcccagccggtgggtagagaggaagtggagcacatgatccagaagaaccaatgtctcttcaccaacacccagtgtaaggtttgctgcgccttgcttatttctgagtcccagaagctggcacattaccagagcaaaaaacatgccaacaaagtgaagagatacctagcaatccatggaatggagacattaaagggggaaacgaagaagctagactcagatcagctggaaagggctacccctgcaaaacatgtaagatagtgctgaactccatagaacagtaccaagctcatgtcagcggcttcaaacacaagaaccagtcaccaaaaacagtggcatcatccctgggccagattccaatgcaaaggcaacccattcagaaagactcaaccaccttggaagactagaggtgattctgcccagcatcccatattgggccagccatgagccagcttcccgtgactgctcagcccttggctccctcttgctcgttgttctcaccaggaaagtacacgggcctgaggcaggattgggccacagacagcctctcattggtccgggctaattcactcctgctgctcccctttggcaggggtcctgtaggtcatgacaggggaggcaagggtattgagagactcggggtctcgcggggtggtagtttggagggtggctttccccatttcccaacccctctgggccttaggtgctgaggcccctgccacctgtctttcctctaaaggtcagttttgggccagttcttgcaactaaagagcagagatctctctgggccctagacatttccagcaaaacctggaactttcatgcc

SEQ ID NO: 202238 - DNA, 2774 bp, Homo sapiens
  Payload ID: 19891
  Gene Name: zinc finger protein 346
  Uniprot ID: Q9UL40
  ENST ID: ENST00000503039
  CDS Start-End: 5-964
gaagatggagtatcccgcgccggccacggtgcaggccgcggacggcggagcggccgggccttacagcagctcggagttgctggagggccaggagccggacggggtgcgctttgaccgcgagagggcgcgccgcctgtgggaagccgtgtccggtgcccagccggtgggtagagaggaagcgcagtttttcccacattcgaggactgtcatccctatactcgtcctgtcggagacctacagtctttgccatcccgtggagcacatgatccagaagaaccaatgtctcttcaccaacacccagtgtaaggtttgctgcgccttgcttatttctgagtcccagaagctggcacattaccagagcaaaaaacatgccaacaaagtgaagagatacctagcaatccatggaatggagacattaaagggggaaacgaagaagctagactcagatcagaagagcagcagaagcaaagacaagaaccagtgctgccccatctgtaacatgaccttttcctcccctgtcgtggcccagtcgcactacctggggaagacccacgcaaagaacttaaagctgaagcagcagtccactaaggtggaagccttgcaccagaatagagagatgatagacccagacaagttctgcagcctctgccatgcaactttcaacgaccctgtcatggctcaacaacattatgtgggcaagaaacacagaaaacaggagaccaagctcaaactaatggcacgctatgggcggctggcggaccctgctgtcactgactttccagctggaaagggctacccctgcaaaacatgtaagatagtgctgaactccatagaacagtaccaagctcatgtcagcggcttcaaacacaagaaccagtcaccaaaaacagtggcatcatccctgggccagattccaatgcaaaggcaacccattcagaaagactcaaccaccttggaagactagagctaggggtggccgtgtcacagtctggccaaggaaatgaaattgggagttgctgtgtggaaactcaactctctggaacttcttccttcctcctgcctctgcacaaatgtgacggcagcagctgaagccaacatcttgcgaccatgagagaaaaacctggagaacggacgagtcctcaaccctgacttcagaccaacctacacccacctctggacgtggggctaagtgagagatggatacactgtttcatttaggccctgctcacttaggtttctgttattcacaccccaacgaaaccctccatggtccagggcaccgggcaaagtacagaagggcacgagtttacttcccgcttccctggagaccaccaaccctctcacccttccagcccagcctctgccacttcccagctgtcggtcctcctccaaacagacgtgcatgccaacacccggtgggtgtgaggcttgtaggcccaagtctagagaggctgagtctggcaaagcctgaaagcccctgtcctagcaagccaggccacaggtctagagtatccgagaccagtgaataaggggacggggggtgctactgaggctgtgagaagccccaggaccagcccagggtagttagaactgagtgaggttagccgggactaacctcactcagatccctcctccccagttcccctccatccactttggtttggaagcctccccagagctctcccaggctgtcatcagctctaaactctctgcctccacaaaaatgccctgggcaacctgtaactcacagccctgctgtcttcagagtataaactggagacagatgtacccagaattgaggacgggtgggaaatgaggagaaatgaaggctgaggaggggtcattctcacagtccctccctttcggtcacaggagggtgttgcccatgcttttgggtgggtcccaggcccatagctgcaaatattcatattggctactcttcagtgagcaaggggtatatgccaggcactggcattgtgcttgacatacatcatcatactgagtcctcacggaagatgtattattcccatttcacagaagatgaaactgaggcttgaggttaagtgatttgtccgtgaccacaaagagttttcgggactcaaacccagatctgtcactgggcaaggtggctcacacctataatcccagccctttgggagactgaggccagcagatctcctgtggccaggagttcaagcctggccaacaatggcaaaaccccgtctctaccaaaaatacaaaaattagctgggcgtggtggcacacacccgtaatcccagctactcaggtggctgaggcaggagaatcacttgaacccaggaggtggtggttgcagtgagcctagatcgtgccactgcattccagcctgagcgacagagtaagactctgtctccaaaaaaaacccagatctgtccgactctgacacccaacctttaatcactcactttctgtcaatgtcacctccgttttgaccagccaagctagacctccctggagcctgtggagaagccaaggtagaaaagggttggaaaagaatgataaaataggccaggtgcggtggctcaagcctgtactcccagcacttttggaggccgagacaggcagattgcttgagcccaggagttcaagaccagcctgggcaacataatgagaccctgtttcaacttaaaaaaaagaaatggtaatgaacaattgtcaattctgagcagctgggtatggtatgaccctgtgtactttttctgtattttaaaatgttctcaaaataaaacttgttt

SEQ ID NO: 202239 - DNA, 2306 bp, Homo sapiens
  Payload ID: 19891
  Gene Name: zinc finger protein 346
  ENST ID: ENST00000511834
  CDS Start-End: 8-940
ggggaagatggagtatcccgcgccggccacggtgcaggccgcggacggcggagcggccgggccttacagcagctcggagttgctggagggccaggagccggacggggtgcgctttgaccgcgagagggcgcgccgcctgtgggaagccgtgtccggtgcccagccggtgggtagagaggaagtggagcacatgatccagaagaaccaatgtctcttcaccaacacccagtgtaaggtttgctgcgccttgcttatttctgagtcccagaagctggcacattaccagagcaaaaaacatgccaacaaagtgaagagatacctagcaatccatggaatggagacattaaagggggaaacgaagaagctagactcagatcagaagagcagcagaagcaaagacaagaaccagtgctgccccatctgtaacatgaccttttcctcccctgtcgtggcccagtcgcactacctggggaagacccacgcaaagaacttaaagctgaagcagcagtccactaaggtggaagctctgtcaaaacgccttacaaatcctttccttgtggcctccaccttagccttgcaccagaatagagagatgatagacccagacaagttctgcagcctctgccatgcaactttcaacgaccctgtcatggctcaacaacattatgtgggcaagaaacacagaaaacaggagaccaagctcaaactaatggcacgctatgggcggctggcggaccctgctgtcactgactttccagctggaaagggctacccctgcaaaacatgtaagatagtgctgaactccatagaacagtaccaagctcatgtcagcggcttcaaacacaagaaccagtcaccaaaaacagtggcatcatccctgggccagattccaatgcaaaggcaacccattcagaaagactcaaccaccttggaagactagaggtgattctgcccagcatcccatattgggccagccatgagccagcttcccgtgactgctcagcccttggctccctcttgctcgttgttctcaccaggaaagtacacgggcctgaggcaggattgggccacagacagcctctcattggtccgggctaattcactcctgctgctcccctttggcaggggtcctgtaggtcatgacaggggaggcaagggtattgagagactcggggtctcgcggggtggtagtttggagggtggctttccccatttcccaacccctctgggccttaggtgctgaggcccctgccacctgtctttcctctaaaggtcagttttgggccagttcttgcaactaaagagcagagatctctctgggccctagacatttccagcaaaacctggaactttcatgccaaacctggggcagggcaggaaacagaggaaatggctgcaacatgggagcttggagctaatacgacactctgccttcccccagaaggtgcaggctttcctgagtcttagaccagatatggccagttgcgcaggtttctgccaactgtgaagtatcctcctggagcagtgacacaatcttggcggagcattgctacccccgctgccccctccacagttcctgaatggtgctaaggatctgcagcagttggcaacgagctggggctgggggcggcctccatgtccactgagatcataggacactccaatggggatgggacctttcccctcctccatcagaggtgctctgaccctaggttacacgggaaagtgccccacatgcaagtctccctgagggttctgcccctaaaggcagactgcctcatgcccgctagctgtgaggttcattgctaccctcggccctactagccctctcttcccccttgtgcagcggaccacttgcccagtttgctgtggtgctagccttccccatcatccaccgggtgatttctgggtcccagggaaagaaagagagagctgatgcaggtttctacagtgaggaacaggcgtttcccaggccccacacccagatttctctatctttgctgtgttttatggcctgggactgagtccacacggatagatttttccttgtaaccttgagacgagaattccaaggagtgtcaccatcagaggcttctcttcattgtgtcaaagaagcccctagctgctctcgtggcctccttcccccactccctatcccttcacctgtgaaatgcctttgctttgcatattgtgtgtggatgtgtgtgtgtgtgtgtgtgtgtttgtgtgtatgtgtgtgcttctgtgtgtgcctaatgctctgtctcttggtcactgaagcatccaaataaagaatttccctcatg

SEQ ID NO: 202240 - DNA, 7960 bp, Homo sapiens
  Payload ID: 19892
  Gene Name: zinc finger protein 347
  Uniprot ID: Q96SE7
  ENST ID: ENST00000334197
  CDS Start-End: 70-2589
gggtgcgggtgacgccgccgagcgaagaacccttgaagaagaggaagaggaaagaaagacaagtcaggcatggctctcacccagggacaggtgacattcagggatgtggctatagaattctctcaggaggagtggacatgcctggaccccgctcagaggactttgtacagggacgtgatgttggagaattataggaacctggcctccctgggaatctcttgttttgacctcagtattatctctatgttggagcaagggaaggagcctttcactttggagagccaagtacaaatagcaggaaacccagatggatgggaatggatcaaagctgtgatcacagctctctcttccgaatttgtaatgaaagatttactacacaaagggaagagtaatacaggagaagtattccaaacagtgatgttggaaagacaggaaagccaagacattgaaggatgttccttcagggaagtccagaaaaatacacatggccttgagtatcaatgcagagatgctgaaggaaattacaaaggagtgcttttgacccaagaaggcaatctcactcatggaagagatgaacatgataaaagagatgcaagaaacaagcttattaaaaatcagcttggattaagccttcagtcacatctgcctgaactgcagctttttcaatatgaagggaaaatttatgaatgtaatcaggttgagaagtctttcaacaataattcctcagtttcaccacctcaacaaatgccttataatgtcaaaacccacatttctaagaaatatctcaaagattttatctcttctttattactcacacaggggcaaaaagcaaataattggggaagcccttacaaatctaatggatgtggcatggtctttcctcaaaattcacaccttgcaagtcatcagagaagtcatactaaagagaaaccttacaaatgttatgagtgtggcaaagcctttagaacacgttcaaacctaactacccatcaggtgatccatactggcgaaaaacgttacaaatgtaatgagtgtggtaaggtctttagtcgaaattcacaactctcacaacatcagaaaattcacactggagagaaaccttataaatgtaacgaatgtggcaaggtcttcactcagaattcacaccttgtaagacatcgaggaattcatactggagagaaaccttacaagtgtaatgagtgtgggaaagcctttagagctcgttcaagcttagctatccatcaggcaacccacagtggagaaaaaccttacaaatgtaatgaatgtggcaaggtcttcactcaaaattcacaccttacaaatcactggagaattcacactggagagaaaccttacaagtgtaatgagtgcggcaaagcctttggtgttcgttcaagcctagctattcatctggtaattcacaccggagaaaagccttacaaatgtcatgaatgcggcaaggtctttaggcgtaattcacaccttgcaaggcatcagctaattcatactggagagaaaccttataagtgtaatgagtgtggcaaagcctttagagcacattcaaacctaactacccatcaggtcatccatactggagaaaagccttacaaatgtaatgaatgtggcaaggtcttcactcaaaattcacaccttgcaaatcatcaaagaattcatactggagtgaagccttatatgtgtaatgagtgcggcaaagccttcagtgtgtattcaagcctaactacccatcaggtcatccatactggagaaaaaccttacaaatgtaatgagtgtggcaaggtcttcactcagaattcacaccttgcaagacatcggggaattcatactggagagaaaccttataaatgtaatgaatgtggcaaggtctttaggcataattcatacctttcaaggcatcagcgaattcatactggagagaaaccttacaagtataatgagtatggcaaagcctttagtgaacattcaaacctaactacccatcaggtcatccatactggtgaaaaaccttacaaatgtaatgagtgtggcaaggtcttcactcagaattcacaccttgcaagacatcggagagttcatactggaggtaaaccttaccagtgtaatgaatgtggcaaagcctttagtcaaacatcaaagcttgcaaggcatcagagagttcatactggagagaaaccatatgagtgtaatcagtgtgggaaagcctttagtgtccgttcaagcctaactacccatcaggcaatccatactggaaaaaaaccttacaaatgcaatgagtgtgggaaggtcttcactcagaattcacaccttgcaagacatcggggaattcatactggagagaaaccttacaagtgtaatgagtgtggcaaagcctttagtcaaacttcaaaacttgcaaggcatcagagaattcataccggagagaaaccatatgagtgtgggaaaccctttagtatctgttcaagcctaactacccatcagacaatccatactggtgggaaaccttacaaatgtaacgtgtggaaagttctaaagtcagagttcaaaccttgcaagccatcacagaattcatagtggagagaaaccttacaaatgaaggtggtaacttttgcagttagaattcattcctttgacaacgtcagagaatttatgcctgagagattccttgaaaatgcaatgactggctgggtgcagtggctcatgcctgtaatcccaacactttgggagtccgaggcaggtggatcacctgaggtcaggagttcaagaccagcctgaccaacatggcgaaaccccatttctactaaaagtacacaattagctaggcctggtggcgtgcgcctgtaatcccagctatataggaggctgaggcaggagaatcacttgaacccaggaggcggaggttgcagtgagccaagatcgtgccaatgcactccatcctgggcaaaaagagcaaaactccatcttaaaggaaaaaaaaaaaatgcaatgactgtggcaaactcctcatgagttcaagtattaatagacatccaagagtccataataatgagaaatcacataaatgtactgtgtgtgacagaggctttattcaggcctcacagctttgcaggcattaaaatctacgtatttgatggaaccacacaaatgtaatgtgtaagagcatcctgaagctcttactctaagactgtaactgtaggtgaggattcatacaaagagtgactcagtctctagttctttgattcacttttaaaatgataaactgcacaataattacacgttccaatatggtaaaacttaagacattatatatttcaaaggtcaaaggacatttggaaatggctacttaccttcaggttataaaatcttttattccattgtttgaggtttctcaaaaaggctactgtttgtgactttcaacctgaactatggatctgtggctattttgcatccttaagcacctttcgtggtgcctatctgggaaagaaccacagtatggaaaggcttacttcattacatgaggatcatttttatccatgtttattgaagaaggaggactctgccttgtaaaattaaatattctctcaattgagagaccatggttttggggcagaaaataatgtaaaactatgatatcaatcatcatactgattgtgttcagggtgcttttctgagagaaagacaccatgggttttagggaagtaaggctctacctgcattgagcaggccaagacctcaggacactggaatttttatgagaggagagtaataagttattagtgactgattatgtgatgggaatagtgcaggggaaatggttgccactttctctactgaatggcaatagctgttttatagcagagattgatgaaaaataggcttatttttgaaattgaagaggtaacagttattagagtggagagcttggtcagaaaaaccagaataccatggttttttttgttttgttttgtttttagtagaattcacactaattgctggaattacattttgctacagttttattaagaatgtgtcacagacataatgttttgctaaaaaaaattcaacgttttcttataactataaacaaatcacattctttgtaccaacatcattttatcctacctcagtaggatacttcatagcagataataacaatacactcagtcttttaggttggaggatgtagaacaattttttttttctttgtggaatcaacatacaattttgggaaaatgtaatcatactctgcacttgaattattctctctacactctgccttagaatatttatatggatataatgaaaatcccatagaaagtgcagttttcatactcttacactctgaaagctgccacagtgttggtgaatatataccatattatatttttacatgcttgtgtgctaaataactatggcatgcatctttatttacatgaagtgaaaatacaaatatagaaagtgtatgggctgggtgtggtggttcatgcctgtaatcctagcactttgagagcccaaggcaggggggtcacttgagtccaggagtttgaaccagccaggacaacatggcaaaaccctgtctctacaaaaaaaatagaaatattacccaggcagggtggctcatgcctgtagtcccagctcctcagggagactgaggcaggtggatcacttgagcctggaggcagaggttgcagtgagccaagatcgcgccattgcactccagcctgggtgacagagcgagaccctgtctcaaaaaaaacaattgtatgaaaaatattggctgggtgtggtggctcacacctgtaatcccagcacttagggaggccaaggcgggtggatcatggggtcagaaaatcgagaccaccctggccaacacagtgaaaccccatctctactaaaaaataccaaatatatatatattggttggatgtggtggcatgcgcctgtaatcccagctactcgggaggctgaggcaggagaatcacttgaacccaggaggtggaggttgcagtgagccgagattgccactgcactccagcctgggcgagaaagtgagactccgtctcaaaaaaaaaaattatgaaattataaatagtgcagaataacaaaaataacactaagaatgctatgctcacataatttgacaagactaatattcatgagtttcctcttaaaaatgaacatatataatggaaattttgtttttgtaggtaaactagaagtttcataaatttagccttatcatgtttttggtaatgttaatttgtcacctctccacaggaagtgtattgaactccatttacagtttggtttagatatggaaaatgaggatgctgaacaatgaagttttagggaaatgtgtattgcataatgaggctttctgtgagaagcaggattgacttcccaaactggtccaaaatggcttgagagagcagggataaataacttgcttggggtgttatggtaataacctttaataaaagggtgggttggggtgaggatcccacacgtgatttgaacttccatctagtgccaaaggagggaacacggacattatcagcttggccagatgggcagaataagaagagggagtgcagaggtataaatggtggtataagacaaaaatcacaaaatggaaactgactgtagtacaacactgaatatttactcttgcaacttctgatttctggccaggcatggccagaaattacaggctcatgcctgtaatcccagcactttgggagcccgaggcaggtggatcaccttaggtcaggagctcaagacgagcctggccaacatggtgaaaccccatctctactaaaaatacaaaaattagccaggtgtggtggcgcactcctgtagtcctagctaccagggaggctgaggcaggagaatcacttgaacccgggagacggaggttgcagtgagctgagatctcaccactgcactccagcctgggcaatagagtgagactctcaaaaaaacaaaagaaatttctaacttctttgttagggaagacctccgctttcttcataatagtagataatactcttcctttctgctgaacccatagggcccattacacaacgtcattcttgaaaatatttgtgaaatgctgtttaaattgcctaaaatatttttacagtagttcaatgcaaatgaatttgtggaaaagtttattacataatatgatcaagcaattttagccaaagggcatttttccaaaggctgtgttatattcatgtcttgttcagtttatggtattgtgtaacatattctccatagcttcttttctttttttttttctttttctttttagacgtggggtctcgctatgttggccaggttggtcttgaactcttggcctcaagcattcctcctgcctcagcttcccaaagtgctaggattacagccatgagccaatagtagtaaaatgactttttgtttttgtatatgatttttactttaaggattttttccttccatacattttaatccaaattatatgtttactgcatttcttctctgtgttactccagtgaacacttagaaaatacataaatgagggtgttgtttagaaataaaattttgtgacatgaaaatgtatgtaaaacaatggcaggtacagactaggttctctgtaaataggaaaatggagtgtccttgtaaatctttagttcaattaaagtacagggatactagatggtgaaatgaagtctcttaatatggaagttatcaaagatcagatgcttgaaaatcaagcgtgtggaggttaaccagcatctggagaagtaaatgaaaatacagttaataagagagtccccaagatattaattatcatttatgcaaaggagataatttctctcattgaatccctggaggcaattcaacttcctactgtggctggtatttcttttctgagccagaggatcttacagcaaaacatgatatttgtgcaacttttgcaatgacagctgccatttaatatactccccttagatttgtttccattttaaaaaactgatatatattctttaataagtgatttatctttgcatatatattttatatcaatcacatttagagtaagaatcacagttattaatgctttatgtgtaacaactgaatcatcagctcctgaaataagtattaatgatattctcatttcagaggtgaggaaacttaggacagataagcaaaataatcaaattaggctgggcacagtggctcatgcctgtaatcccagcactttgggaggccgaggcggggggatcacctgaggtcaggaattcgagaccagcctgatcaacatggtgaaaccccgtctctactaaaaatacaaaaattagctgggtgtgatggcgggcgcctgtaatcccagctattcgggaggctgaggcaggagaattgcttgagcctgggaggcggatgttgcagttagccgagttcccaccattgcactccagtctcagtgacagagcgggactccatctctctctctctctctctctctctttctctctctctctctctctctctctctctatatatatatatatatatatatatatatatatatatatatttagaaaatgggtagaactatgaagagacatttcactgaagcagttatactgagataaataggcacataaaaagatttccaacatcaccatccatcaaatctcagatctcagcatattctgctttaaaagactcatcttgtcacatttcagtaagaggcagaatcgagatttgaatccatgttgtctggttgcaaagacaaagcttttaatgatgatgctacagtaacaatgctagttatttttgtcctttactcaccatctatacctattttgttagtatctcttgtaatttttaaatggtttatcttcatatatcattgtgattgtggtaactttgtattaaatctatatttttatagatc

SEQ ID NO: 202241 - DNA, 4553 bp, Homo sapiens
  Payload ID: 19892
  Gene Name: zinc finger protein 347
  Uniprot ID: Q96SE7
  ENST ID: ENST00000452676
  CDS Start-End: 428-2950
tttctgcagttccggaagcggatcgtgttgggtgcgggtgacgccgccgagcgtgagtgtccctcagtatggattaaacttgcgaaccgccgtgccccgtttccgcagccagttcccgggctcgctacagacctttttttttttctttttttttttttttggtgagacggagatttactcttgttgtccaggctggagtgcaatggcgcgatttcggctcaccgcatcctccgcctcccaggttcaagcgattctcctgcctcagcctcccgagtagctgggattacaggcatgtgccaccacgcccggctaattttgtatttttagtagagacggggtttcaccgtgttgcccaggctgatctcgaactcctgacctcaggaagaacccttgaagaagaggaagaggaaagaaagacaagtcaggcatggctctcacccagggacaggtgacattcagggatgtggctatagaattctctcaggaggagtggacatgcctggaccccgctcagaggactttgtacagggacgtgatgttggagaattataggaacctggcctccctggcaggaatctcttgttttgacctcagtattatctctatgttggagcaagggaaggagcctttcactttggagagccaagtacaaatagcaggaaacccagatggatgggaatggatcaaagctgtgatcacagctctctcttccgaatttgtaatgaaagatttactacacaaagggaagagtaatacaggagaagtattccaaacagtgatgttggaaagacaggaaagccaagacattgaaggatgttccttcagggaagtccagaaaaatacacatggccttgagtatcaatgcagagatgctgaaggaaattacaaaggagtgcttttgacccaagaaggcaatctcactcatggaagagatgaacatgataaaagagatgcaagaaacaagcttattaaaaatcagcttggattaagccttcagtcacatctgcctgaactgcagctttttcaatatgaagggaaaatttatgaatgtaatcaggttgagaagtctttcaacaataattcctcagtttcaccacctcaacaaatgccttataatgtcaaaacccacatttctaagaaatatctcaaagattttatctcttctttattactcacacaggggcaaaaagcaaataattggggaagcccttacaaatctaatggatgtggcatggtctttcctcaaaattcacaccttgcaagtcatcagagaagtcatactaaagagaaaccttacaaatgttatgagtgtggcaaagcctttagaacacgttcaaacctaactacccatcaggtgatccatactggcgaaaaacgttacaaatgtaatgagtgtggtaaggtctttagtcgaaattcacaactctcacaacatcagaaaattcacactggagagaaaccttataaatgtaacgaatgtggcaaggtcttcactcagaattcacaccttgtaagacatcgaggaattcatactggagagaaaccttacaagtgtaatgagtgtgggaaagcctttagagctcgttcaagcttagctatccatcaggcaacccacagtggagaaaaaccttacaaatgtaatgaatgtggcaaggtcttcactcaaaattcacaccttacaaatcactggagaattcacactggagagaaaccttacaagtgtaatgagtgcggcaaagcctttggtgttcgttcaagcctagctattcatctggtaattcacaccggagaaaagccttacaaatgtcatgaatgcggcaaggtctttaggcgtaattcacaccttgcaaggcatcagctaattcatactggagagaaaccttataagtgtaatgagtgtggcaaagcctttagagcacattcaaacctaactacccatcaggtcatccatactggagaaaagccttacaaatgtaatgaatgtggcaaggtcttcactcaaaattcacaccttgcaaatcatcaaagaattcatactggagtgaagccttatatgtgtaatgagtgcggcaaagccttcagtgtgtattcaagcctaactacccatcaggtcatccatactggagaaaaaccttacaaatgtaatgagtgtggcaaggtcttcactcagaattcacaccttgcaagacatcggggaattcatactggagagaaaccttataaatgtaatgaatgtggcaaggtctttaggcataattcatacctttcaaggcatcagcgaattcatactggagagaaaccttacaagtataatgagtatggcaaagcctttagtgaacattcaaacctaactacccatcaggtcatccatactggtgaaaaaccttacaaatgtaatgagtgtggcaaggtcttcactcagaattcacaccttgcaagacatcggagagttcatactggaggtaaaccttaccagtgtaatgaatgtggcaaagcctttagtcaaacatcaaagcttgcaaggcatcagagagttcatactggagagaaaccatatgagtgtaatcagtgtgggaaagcctttagtgtccgttcaagcctaactacccatcaggcaatccatactggaaaaaaaccttacaaatgcaatgagtgtgggaaggtcttcactcagaattcacaccttgcaagacatcggggaattcatactggagagaaaccttacaagtgtaatgagtgtggcaaagcctttagtcaaacttcaaaacttgcaaggcatcagagaattcataccggagagaaaccatatgagtgtgggaaaccctttagtatctgttcaagcctaactacccatcagacaatccatactggtgggaaaccttacaaatgtaacgtgtggaaagttctaaagtcagagttcaaaccttgcaagccatcacagaattcatagtggagagaaaccttacaaatgaaggtggtaacttttgcagttagaattcattcctttgacaacgtcagagaatttatgcctgagagattccttgaaaatgcaatgactggctgggtgcagtggctcatgcctgtaatcccaacactttgggagtccgaggcaggtggatcacctgaggtcaggagttcaagaccagcctgaccaacatggcgaaaccccatttctactaaaagtacacaattagctaggcctggtggcgtgcgcctgtaatcccagctatataggaggctgaggcaggagaatcacttgaacccaggaggcggaggttgcagtgagccaagatcgtgccaatgcactccatcctgggcaaaaagagcaaaactccatcttaaaggaaaaaaaaaaaatgcaatgactgtggcaaactcctcatgagttcaagtattaatagacatccaagagtccataataatgagaaatcacataaatgtactgtgtgtgacagaggctttattcaggcctcacagctttgcaggcattaaaatctacgtatttgatggaaccacacaaatgtaatgtgtaagagcatcctgaagctcttactctaagactgtaactgtaggtgaggattcatacaaagagtgactcagtctctagttctttgattcacttttaaaatgataaactgcacaataattacacgttccaatatggtaaaacttaagacattatatatttcaaaggtcaaaggacatttggaaatggctacttaccttcaggttataaaatcttttattccattgtttgaggtttctcaaaaaggctactgtttgtgactttcaacctgaactatggatctgtggctattttgcatccttaagcacctttcgtggtgcctatctgggaaagaaccacagtatggaaaggcttacttcattacatgaggatcatttttatccatgtttattgaagaaggaggactctgccttgtaaaattaaatattctctcaattgagagaccatggttttggggcagaaaataatgtaaaactatgatatcaatcatcatactgattgtgttcagggtgcttttctgagagaaagacaccatgggttttagggaagtaaggctctacctgcattgagcaggccaagacctcaggacactggaatttttatgagaggagagtaataagttattagtgactgattatgtgatgggaatagtgcaggggaaatggttgccactttctctactgaatggcaatagctgttttatagcagagattgatgaaaaataggcttatttttgaaattgaagaggtaacagttattagagtggagagcttggtcagaaaaaccagaataccatggttttttttgttttgttttgtttttagtagaattcacactaattgctggaattacattttgctacagttttattaagaatgtgtcacagacataatgttttgctaaaaaaaattcaacgttttcttataactataaacaaatcacattctttgtaccaacatcattttatcctacctcagtaggatacttcatagcagataataacaatacactcagtcttttaggttgg

SEQ ID NO: 202242 - DNA, 511 bp, Homo sapiens
  Payload ID: 19892
  Gene Name: zinc finger protein 347
  ENST ID: ENST00000597183
  CDS Start-End: 136-511
ggaagcggatcgtgttgggtgcgggtgacgccgccgagcgaagaacccttgaagaagaggaagaggaaagaaagacaagtcaggcatggctctcacccagcaggaatctcttgttttgacctcagtattatctctatgttggagcaagggaaggagcctttcactttggagagccaagtacaaatagcaggaaacccagatggatgggaatggatcaaagctgtgatcacagctctctcttccgaatttgtaatgaaagatttactacacaaagggaagagtaatacaggagaagtattccaaacagtgatgttggaaagacaggaaagccaagacattgaaggatgttccttcagggaagtccagaaaaatacacatggccttgagtatcaatgcagagatgctgaaggaaattacaaaggagtgcttttgacccaagaaggcaatctcactcatggaagagatgaacatgataaaagagatgcaagaaacaagcttattaaaaatcagc

SEQ ID NO: 202243 - DNA, 567 bp, Homo sapiens
  Payload ID: 19892
  Gene Name: zinc finger protein 347
  ENST ID: ENST00000595967
  CDS Start-End: 262-567
gtgagatgtatgtcaggaaagggggatgaagaccatatgtatattttattatatcacaacttggatatcggcccacttactccagtttaatctattctgtcttctcattttatgtgaagattggagcttttccttatatccccctggtggatgtgtttttcattttagggacaggtgacattcagggatgtggctatagaattctctcaggaggagtggacatgcctggaccccgctcagaggactttgtacagggacgtgatgttggagaattataggaacctggcctccctgggaatctcttgttttgacctcagtattatctctatgttggagcaagggaaggagcctttcactttggagagccaagtacaaatagcaggaaacccagatggatgggaatggatcaaagctgtgatcacagctctctcttccgaatttgtaatgaaagatttactacacaaagggaagagtaatacaggagaagtattccaaacagtgatgttggaaagacaggaaagccaagacattgaaggatgttccttcagggaagtccagaaaaataca

SEQ ID NO: 202244 - DNA, 496 bp, Homo sapiens
  Payload ID: 19892
  Gene Name: zinc finger protein 347
  ENST ID: ENST00000601804
  CDS Start-End: 142-246
agttccggaagcggatcgtgttgggtgcgggtgacgccgccgagcgaagaacccttgaagaagaggaagaggaaagaaagacaagtcaggcatggctctcacccagcaggaatctcttgttttgacctcagtattatctctatgttggagcaagggaaggagcctttcactttggagagccaagtacaaatagcaggaaacccagatggatgggaatggatcaaagctgtgatcacagcttcctgaggccctcatcagaggcagatgctggcactgtgttttgtacagcctgcagaaccatgagccaaataaacctcttttttttttttgagacggagtttttctcttgttgcccaggctgtagcagtggcgcgatctcggctcaccgcaacctctgccctctgggttcaagcgattctcctgcctcagcctaccaagtggctgggattaccagtgcctaccaccatgcccggctaatttttttgtatttttagta

SEQ ID NO: 202245 - DNA, 2812 bp, Homo sapiens
  Payload ID: 19892
  Gene Name: zinc finger protein 347
  Uniprot ID: Q96SE7
  ENST ID: ENST00000601469
  CDS Start-End: 92-2614
agttccggaagcggatcgtgttgggtgcgggtgacgccgccgagcgaagaacccttgaagaagaggaagaggaaagaaagacaagtcaggcatggctctcacccagggacaggtgacattcagggatgtggctatagaattctctcaggaggagtggacatgcctggaccccgctcagaggactttgtacagggacgtgatgttggagaattataggaacctggcctccctggcaggaatctcttgttttgacctcagtattatctctatgttggagcaagggaaggagcctttcactttggagagccaagtacaaatagcaggaaacccagatggatgggaatggatcaaagctgtgatcacagctctctcttccgaatttgtaatgaaagatttactacacaaagggaagagtaatacaggagaagtattccaaacagtgatgttggaaagacaggaaagccaagacattgaaggatgttccttcagggaagtccagaaaaatacacatggccttgagtatcaatgcagagatgctgaaggaaattacaaaggagtgcttttgacccaagaaggcaatctcactcatggaagagatgaacatgataaaagagatgcaagaaacaagcttattaaaaatcagcttggattaagccttcagtcacatctgcctgaactgcagctttttcaatatgaagggaaaatttatgaatgtaatcaggttgagaagtctttcaacaataattcctcagtttcaccacctcaacaaatgccttataatgtcaaaacccacatttctaagaaatatctcaaagattttatctcttctttattactcacacaggggcaaaaagcaaataattggggaagcccttacaaatctaatggatgtggcatggtctttcctcaaaattcacaccttgcaagtcatcagagaagtcatactaaagagaaaccttacaaatgttatgagtgtggcaaagcctttagaacacgttcaaacctaactacccatcaggtgatccatactggcgaaaaacgttacaaatgtaatgagtgtggtaaggtctttagtcgaaattcacaactctcacaacatcagaaaattcacactggagagaaaccttataaatgtaacgaatgtggcaaggtcttcactcagaattcacaccttgtaagacatcgaggaattcatactggagagaaaccttacaagtgtaatgagtgtgggaaagcctttagagctcgttcaagcttagctatccatcaggcaacccacagtggagaaaaaccttacaaatgtaatgaatgtggcaaggtcttcactcaaaattcacaccttacaaatcactggagaattcacactggagagaaaccttacaagtgtaatgagtgcggcaaagcctttggtgttcgttcaagcctagctattcatctggtaattcacaccggagaaaagccttacaaatgtcatgaatgcggcaaggtctttaggcgtaattcacaccttgcaaggcatcagctaattcatactggagagaaaccttataagtgtaatgagtgtggcaaagcctttagagcacattcaaacctaactacccatcaggtcatccatactggagaaaagccttacaaatgtaatgaatgtggcaaggtcttcactcaaaattcacaccttgcaaatcatcaaagaattcatactggagtgaagccttatatgtgtaatgagtgcggcaaagccttcagtgtgtattcaagcctaactacccatcaggtcatccatactggagaaaaaccttacaaatgtaatgagtgtggcaaggtcttcactcagaattcacaccttgcaagacatcggggaattcatactggagagaaaccttataaatgtaatgaatgtggcaaggtctttaggcataattcatacctttcaaggcatcagcgaattcatactggagagaaaccttacaagtataatgagtatggcaaagcctttagtgaacattcaaacctaactacccatcaggtcatccatactggtgaaaaaccttacaaatgtaatgagtgtggcaaggtcttcactcagaattcacaccttgcaagacatcggagagttcatactggaggtaaaccttaccagtgtaatgaatgtggcaaagcctttagtcaaacatcaaagcttgcaaggcatcagagagttcatactggagagaaaccatatgagtgtaatcagtgtgggaaagcctttagtgtccgttcaagcctaactacccatcaggcaatccatactggaaaaaaaccttacaaatgcaatgagtgtgggaaggtcttcactcagaattcacaccttgcaagacatcggggaattcatactggagagaaaccttacaagtgtaatgagtgtggcaaagcctttagtcaaacttcaaaacttgcaaggcatcagagaattcataccggagagaaaccatatgagtgtgggaaaccctttagtatctgttcaagcctaactacccatcagacaatccatactggtgggaaaccttacaaatgtaacgtgtggaaagttctaaagtcagagttcaaaccttgcaagccatcacagaattcatagtggagagaaaccttacaaatgaaggtggtaacttttgcagttagaattcattcctttgacaacgtcagagaatttatgcctgagagattccttgaaaatgcaatgactggctgggtgcagtggctcatgcctgtaatcccaacactttgggagtccgaggcaggtggatcacctgaggtcaggagttcaagaccagcc

SEQ ID NO: 202246 - DNA, 495 bp, Homo sapiens
  Payload ID: 19892
  Gene Name: zinc finger protein 347
  ENST ID: ENST00000599096
  CDS Start-End: 392-495
gtgtccctcagtatggattaaacttgcgaaccgccgtgccccgtttccgcagccagttcccgggctcgctacagacctttttttttttctttttttttttttttggtgagacggagatttactcttgttgtccaggctggagtgcaatggcgcgatttcggctcaccgcatcctccgcctcccaggttcaagcgattctcctgcctcagcctcccgagtagctgggattacaggcatgtgccaccacgcccggctaattttgtatttttagtagagacggggtttcaccgtgttgcccaggctgatctcgaactcctgacctcaggcactttcctgttacctaaggaagaacccttgaagaagaggaagaggaaagaaagacaagtcaggcatggctctcacccagggacaggtgacattcagggatgtggctatagaattctctcaggaggagtggacatgcctggaccccgctcagaggactttgtacaggga

SEQ ID NO: 202247 - DNA, 2503 bp, Homo sapiens
  Payload ID: 19893
  Gene Name: zinc finger protein 35
  ENST ID: ENST00000296092
  CDS Start-End: 221-532
attgttctcgtgccggtagaagctgaagtaccggtcagccagcctcctgctgcagagccagtgaactcaggtcgggcttctcagctgcgcacataggcagtactcatcttggccctgggaagaaactcaagaagaagcttttgaaacataaagcttggatggggtttgacctctgcagggcagcgcccagctataggagttcccctgctgagcagagaagatgactgcagaattgagagaagccatggccctagccccatggggcccagtgaaggtgaaaaaggaggaggaagaagaagaaaacttcccaggtcaggcatccagccaacaagtgcactccgagaacatcaaagtctgggccccagtgcagggtcttcagacaggccttgatggatcagaagaggaagaaaaggtgctgaaaccaagaacctacagttactggttccaaaaactgagatatgtgaggaagctgaaaaacccctcatcatatcagaaagaatccagaaagctgatcctcaaggacctgagttaggagaagcttgtgaaaagggaaacatgttaaagaggcagagaataaagagagaaaagaaagatttcagacaagtgatagtgaatgactgtcacttacctgaaagcttcaaagaagaggaaaaccagaaatgtaagaaatctggaggaaaatatagccttaattctggcgctgttaaaaatccaaaaacccagcttggacaaaagccttttacgtgtagcgtgtgtgggaaaggatttagtcagagtgcaaacctcgttgtgcatcagcgaatccacactggagagaaaccctttgaatgtcatgagtgtgggaaggccttcattcagagtgcaaacctcgttgtgcatcagagaatccacactggacagaaaccttatgtttgctcaaaatgtgggaaagccttcactcagagttcaaatctgactgtacatcaaaaaatccactccttagaaaaaacttttaagtgcaatgaatgtgagaaagcctttagttacagctcacaacttgctcggcaccagaaagtccacattacggaaaaatgctatgaatgtaatgaatgtgggaaaacatttactaggagctcaaacctcattgtccaccagaggatccacactggggagaagccctttgcctgtaacgactgtggcaaagcctttacccagagtgcaaatcttattgtacatcagcgaagccatactggtgagaagccatatgagtgtaaagagtgtgggaaagcctttagttgtttttcacaccttattgtgcaccagagaattcacactgcagagaaaccttacgactgcagcgaatgtgggaaagccttcagtcagctctcttgccttattgtccaccagagaattcacagtggagatcttccttacgtgtgtaatgaatgtgggaaggccttcacatgtagctcatacctacttattcatcagagaattcataatggagaaaaaccttacacatgtaatgagtgtgggaaggccttcagacagaggtcgagcctcaccgtgcaccagagaacccacactggggagaagccctatgaatgtgagaagtgtggtgcagctttcatttccaactcacacctcatgcgacaccatagaacccatcttgttgaataacaagtaaggaagaggaagacctccagcattggtcataaccttctgcctccctaatgagacacctctttgctgttttcttcctcctctataaaagtgagggctgtgtccttaaaagttatagttttcaggaatgcagcagaagacacaagaaaagcatttcagaggctaatttaaaacaaaaagtaagcacctaaaggcaaggactttgttttaactgtaccttaagcggtcatgttctctgaagtggaatgtggctttcctaggaatgggtcgtacaaagctaagtggtaatgatgctatttggggaaaggtcttttttgcttaattttgttttttaaaactctgatgattgcttgagcaacaggcaggttatctgcctggttgaattctggttgaaccgtgtattctaatatttctggttaagtggtgactgggtaaggaaaccacttggggtagcagttcaacaattcacttacgaatgtttataagctttccatttcctaggtaattttttaaaagccagtcaaaacaaaaactttactgaaaatggacagaaataggaaatggactttttccttactgtctatacctcctgaaccttggtattgtaaagatctggggacctctgggtctgttctgaccattccctagtctccatggccaagcactcaaggattgatggacaccacacaccagctatattcatttgccaagatcaacagctccttctccaaacaactcaagcccccaattcccatcgcattccatttgggtgagatgcaactaacagccccttcctggatgaaggagtcaaagaataaagcttgcctagaggcatgcccca

SEQ ID NO: 202248 - DNA, 2661 bp, Homo sapiens
  Payload ID: 19893
  Gene Name: zinc finger protein 35
  Uniprot ID: P13682
  ENST ID: ENST00000396056
  CDS Start-End: 236-1819
acttcctgtccggtcattgttctcgtgccggtagaagctgaagtaccggtcagccagcctcctgctgcagagccagtgaactcaggtcgggcttctcagctgcgcacataggcagtactcatcttggccctgggaagaaactcaagaagaagcttttgaaacataaagcttggatggggtttgacctctgcagggcagcgcccagctataggagttcccctgctgagcagagaagatgactgcagaattgagagaagccatggccctagccccatggggcccagtgaaggtgaaaaaggaggaggaagaagaagaaaacttcccaggtcaggcatccagccaacaagtgcactccgagaacatcaaagtctgggccccagtgcagggtcttcagacaggccttgatggatcagaagaggaagaaaagggtcagaacatatcctgggatatggcggtagtcctgaaagcaactcaggaggcacctgctgcttcaacccttggcagctactcattaccagggactctggccaagagtgagatactggagactcatgggaccatgaactttctaggtgctgaaaccaagaacctacagttactggttccaaaaactgagatatgtgaggaagctgaaaaacccctcatcatatcagaaagaatccagaaagctgatcctcaaggacctgagttaggagaagcttgtgaaaagggaaacatgttaaagaggcagagaataaagagagaaaagaaagatttcagacaagtgatagtgaatgactgtcacttacctgaaagcttcaaagaagaggaaaaccagaaatgtaagaaatctggaggaaaatatagccttaattctggcgctgttaaaaatccaaaaacccagcttggacaaaagccttttacgtgtagcgtgtgtgggaaaggatttagtcagagtgcaaacctcgttgtgcatcagcgaatccacactggagagaaaccctttgaatgtcatgagtgtgggaaggccttcattcagagtgcaaacctcgttgtgcatcagagaatccacactggacagaaaccttatgtttgctcaaaatgtgggaaagccttcactcagagttcaaatctgactgtacatcaaaaaatccactccttagaaaaaacttttaagtgcaatgaatgtgagaaagcctttagttacagctcacaacttgctcggcaccagaaagtccacattacggaaaaatgctatgaatgtaatgaatgtgggaaaacatttactaggagctcaaacctcattgtccaccagaggatccacactggggagaagccctttgcctgtaacgactgtggcaaagcctttacccagagtgcaaatcttattgtacatcagcgaagccatactggtgagaagccatatgagtgtaaagagtgtgggaaagcctttagttgtttttcacaccttattgtgcaccagagaattcacactgcagagaaaccttacgactgcagcgaatgtgggaaagccttcagtcagctctcttgccttattgtccaccagagaattcacagtggagatcttccttacgtgtgtaatgaatgtgggaaggccttcacatgtagctcatacctacttattcatcagagaattcataatggagaaaaaccttacacatgtaatgagtgtgggaaggccttcagacagaggtcgagcctcaccgtgcaccagagaacccacactggggagaagccctatgaatgtgagaagtgtggtgcagctttcatttccaactcacacctcatgcgacaccatagaacccatcttgttgaataacaagtaaggaagaggaagacctccagcattggtcataaccttctgcctccctaatgagacacctctttgctgttttcttcctcctctataaaagtgagggctgtgtccttaaaagttatagttttcaggaatgcagcagaagacacaagaaaagcatttcagaggctaatttaaaacaaaaagtaagcacctaaaggcaaggactttgttttaactgtaccttaagcggtcatgttctctgaagtggaatgtggctttcctaggaatgggtcgtacaaagctaagtggtaatgatgctatttggggaaaggtcttttttgcttaattttgttttttaaaactctgatgattgcttgagcaacaggcaggttatctgcctggttgaattctggttgaaccgtgtattctaatatttctggttaagtggtgactgggtaaggaaaccacttggggtagcagttcaacaattcacttacgaatgtttataagctttccatttcctaggtaattttttaaaagccagtcaaaacaaaaactttactgaaaatggacagaaataggaaatggactttttccttactgtctatacctcctgaaccttggtattgtaaagatctggggacctctgggtctgttctgaccattccctagtctccatggccaagcactcaaggattgatggacaccacacaccagctatattcatttgccaagatcaacagctccttctccaaacaactcaagcccccaattcccatcgcattccatttgggtgagatgcaactaacagccccttcctggatgaaggagtcaaagaataaagcttgcctagaggcatgccc

SEQ ID NO: 202249 - DNA, 564 bp, Homo sapiens
  Payload ID: 19893
  Gene Name: zinc finger protein 35
  ENST ID: ENST00000399560
  CDS Start-End: 195-506
attgttctcgtgccggtagaagctgaagtaccggtcagccagcctcctgctgcagagccagtgaactcaggcagtactcatcttggccctgggaagaaactcaagaagaagcttttgaaacataaagcttggatggggtttgacctctgcagggcagcgcccagctataggagttcccctgctgagcagagaagatgactgcagaattgagagaagccatggccctagccccatggggcccagtgaaggtgaaaaaggaggaggaagaagaagaaaacttcccaggtcaggcatccagccaacaagtgcactccgagaacatcaaagtctgggccccagtgcagggtcttcagacaggccttgatggatcagaagaggaagaaaaggtgctgaaaccaagaacctacagttactggttccaaaaactgagatatgtgaggaagctgaaaaacccctcatcatatcagaaagaatccagaaagctgatcctcaaggacctgagttaggagaagcttgtgaaaagggaaacatgttaaagaggcagagaataaagagagaaaagaa

SEQ ID NO: 202250 - DNA, 581 bp, Homo sapiens
  Payload ID: 19893
  Gene Name: zinc finger protein 35
  ENST ID: ENST00000453164
  CDS Start-End: 195-506
gttctcgtgccggtagaagctgaagtaccggtcagccagcctcctgctgcagagccagtgaactcagtaggcagtactcatcttggccctgggaagaaactcaagaagaagcttttgaaacataaagcttggatggggtttgacctctgcagggcagcgcccagctataggagttcccctgctgagcagagaagatgactgcagaattgagagaagccatggccctagccccatggggcccagtgaaggtgaaaaaggaggaggaagaagaagaaaacttcccaggtcaggcatccagccaacaagtgcactccgagaacatcaaagtctgggccccagtgcagggtcttcagacaggccttgatggatcagaagaggaagaaaaggtgctgaaaccaagaacctacagttactggttccaaaaactgagatatgtgaggaagctgaaaaacccctcatcatatcagaaagaatccagaaagctgatcctcaaggacctgagttaggagaagcttgtgaaaagggaaacatgttaaagaggcagagaataaagagagaaaagaaagatttcagacaagtga

SEQ ID NO: 202251 - DNA, 532 bp, Homo sapiens
  Payload ID: 19893
  Gene Name: zinc finger protein 35
  ENST ID: ENST00000432115
  CDS Start-End: 196-532
cattgttctcgtgccggtagaagctgaagtaccggtcagccagcctcctgctgcagagccagtgaactcaggcagtactcatcttggccctgggaagaaactcaagaagaagcttttgaaacataaagcttggatggggtttgacctctgcagggcagcgcccagctataggagttcccctgctgagcagagaagatgactgcagaattgagagaagccatggccctagccccatggggcccagtgaaggtgaaaaaggaggaggaagaagaagaaaacttcccaggtcaggcatccagccaacaagtgcactccgagaacatcaaagtctgggccccagtgcagggtcttcagacaggccttgatggatcagaagaggaagaaaagggtcagaacatatcctgggatatggcggtagtcctgaaagcaactcaggaggcacctgctgcttcaacccttggcagctactcattaccagggactctggccaagagtgagatactggagactcatgggaccatgaactttctag

SEQ ID NO: 202252 - DNA, 620 bp, Homo sapiens
  Payload ID: 19893
  Gene Name: zinc finger protein 35
  ENST ID: ENST00000415571
  CDS Start-End: 219-620
cattgttctcgtgccggtagaagctgaagtaccggtcagccagcctcctgctgcagagccagtgaactcaggtcgggcttctcagctgcgcacagcagtactcatcttggccctgggaagaaactcaagaagaagcttttgaaacataaagcttggatggggtttgacctctgcagggcagcgcccagctataggagttcccctgctgagcagagaagatgactgcagaattgagagaagccatggccctagccccatggggcccagtgaaggtgaaaaaggaggaggaagaagaagaaaacttcccaggtcaggcatccagccaacaagtgcactccgagaacatcaaagtctgggccccagtgcagggtcttcagacaggccttgatggatcagaagaggaagaaaagggtcagaacatatcctgggatatggcggtagtcctgaaagcaactcaggaggcacctgctgcttcaacccttggcagctactcattaccagggactctggccaagagtgagatactggagactcatgggaccatgaactttctaggtgctgaaaccaagaacctacagttactggttccaaaaactgagatatgtgaggaagctgaaaaa

SEQ ID NO: 202253 - DNA, 2503 bp, Homo sapiens; identical to SEQ ID NO: 202247
  Payload ID: 19893
  Gene Name: zinc finger protein 35
  ENST ID: ENST00000629532
  CDS Start-End: 221-532

SEQ ID NO: 202254 - DNA, 2661 bp, Homo sapiens; identical to SEQ ID NO: 202248
  Payload ID: 19893
  Gene Name: zinc finger protein 35
  Uniprot ID: P13682
  ENST ID: ENST00000625394
  CDS Start-End: 236-1819

SEQ ID NO: 202255 - DNA, 564 bp, Homo sapiens; identical to SEQ ID NO: 202249
  Payload ID: 19893
  Gene Name: zinc finger protein 35
  ENST ID: ENST00000629627
  CDS Start-End: 195-506

SEQ ID NO: 202256 - DNA, 620 bp, Homo sapiens; identical to SEQ ID NO: 202252
  Payload ID: 19893
  Gene Name: zinc finger protein 35
  ENST ID: ENST00000627641
  CDS Start-End: 219-620

SEQ ID NO: 202257 - DNA, 532 bp, Homo sapiens; identical to SEQ ID NO: 202251
  Payload ID: 19893
  Gene Name: zinc finger protein 35
  ENST ID: ENST00000631045
  CDS Start-End: 196-532

SEQ ID NO: 202258 - DNA, 581 bp, Homo sapiens; identical to SEQ ID NO: 202250
  Payload ID: 19893
  Gene Name: zinc finger protein 35
  ENST ID: ENST00000630364
  CDS Start-End: 195-506

SEQ ID NO: 202259 - DNA, 2338 bp, Homo sapiens
  Payload ID: 19894
  Gene Name: zinc finger protein 350
  Uniprot ID: Q9GZX5
  ENST ID: ENST00000243644
  CDS Start-End: 229-1827
agcagtttacggaagtgtaacgttgaggcccttcttgtgtatctggagaaaatagaggttctgactcctcaggagcaaaaaacataacctgaagagggaggaagtggatttggggttcaccatttcttggggcacacttgattgaaaactgagacttctgaagagaaggccagaagatacaaagacagaccatcccagttgaatgctgtcttccaagaacagaagaaaatgatccaggcccaggaatccataacactggaggatgtggctgtggacttcacttgggaggagtggcaactcctgggcgctgctcagaaggacctgtaccgggatgtgatgttggagaactacagcaacctggtggcagtggggtatcaagccagcaaaccggatgcactcttcaagttggaacaaggagaacaactgtggacaattgaagatggaatccacagtggagcctgttcagacatatggaaagttgatcatgtgctggagcgcttgcagagtgaaagcctggtgaacagaaggaaaccatgtcatgaacatgatgcatttgaaaatattgttcattgcagcaaaagtcagtttctgttagggcaaaatcatgatatatttgacttacgtggaaaaagtttgaaatccaatttaactttagttaaccagagcaaaggctatgaaataaagaactctgttgagtttactggaaatggggactcctttcttcatgctaaccatgaacgacttcatactgcaattaaattccctgcaagtcaaaaactcatcagcactaagtcccaattcatcagtcccaagcatcagaaaacacgaaaattagagaagcatcatgtgtgcagtgaatgtgggaaagccttcatcaagaagtcttggctaactgatcaccaggtaatgcatacaggagagaaaccccacagatgtagtctatgtgagaaagccttctccagaaagttcatgcttactgaacatcagcgaactcatacaggagaaaaaccttatgaatgccctgaatgtggcaaagcctttctcaagaaatcacggctcaacatacatcagaaaacacataccggagagaaaccctatatatgcagtgaatgtggaaaaggcttcatccagaaaggaaatctcattgtacaccagcgaattcatacaggtgagaaaccttatatatgcaatgaatgtggaaaaggcttcattcagaagacgtgtctcatagcacatcagagatttcacacaggaaagacgccctttgtgtgcagtgaatgtggaaaatcctgttctcagaaatcaggtctcattaaacatcaaagaattcacacaggagagaaaccctttgaatgtagtgaatgtgggaaagcctttagcacaaagcaaaagctcattgtccatcaaaggactcatacaggagagagaccctatggctgtaacgagtgtgggaaagcgtttgcgtatatgtcgtgtctggttaagcataagagaatacacacaagggagaaacaagaggcagccaaggtggaaaatcctcctgcagagaggcacagctcattacacaccagtgatgtcatgcaggagaaaaactctgctaacggggcgactacacaagtgccttctgtggcccctcagacatcattaaacatcagcggcctcctcgcaaacaggaacgtagtccttgtgggacagccagtggtcagatgtgcagcctcaggagataacagaggatttgcacaggacagaaaccttgtgaatgcagtgaatgtggttgtgccttccgtgatcaattatgtcttattttatgttacagaaaacccataggaagaaaactcagatctatgtggaaaagggttgagcaaaaatttgtagttcattatgtggccgaaaagcatacactgagagaacatgtataaggctgagatagcctgataaactcatcctattaaaatgtatgctgtgatacacaggcaaatttgatgttaacctaagcacatacacagcaattgctcgactgtgtcaattaaatgagtaaaggaagcccaagtacttttaagtggaggaaatgaagtactgtgaatttttaaaacagatgagataattggtgtcgggagtgttgcagtgactgaaaagcttcataaggggcagttggtgggaaagggctaatactgtaatggtggaatgtgggacacatatgtgtcaattcagtttccttagaccagtgccagtgtggaggattaattgaaaaccaggaccataaactttcagaactttgtattatgcagagggatctgtgaaactagtcaatttgtttcattaaacaaatattttaaaa

SEQ ID NO: 202260 - DNA, 553 bp, Homo sapiens
  Payload ID: 19894
  Gene Name: zinc finger protein 350
  ENST ID: ENST00000594929
  CDS Start-End: 352-553
gagcagtttacggaagtgtaacgttgaggcccttcttgtgtatctggagaaaatagagagtcttgctctcgtcgcccaggctggagtgtagtggcgtgcttggctcaactgcaacctctgccttctgggctcaagtgattcttgtgccacggcctcccgagtagctggaattaccagcaggttctgactcctcaggagcaaaaaacataacctgaagagggaggaagtggatttggggttcaccatttcttggggcacacttgattgaaaactgagacttctgaagagaaggccagaagatacaaagacagaccatcccagttgaatgctgtcttccaagaacagaagaaaatgatccaggcccaggaatccataacactggaggatgtggctgtggacttcacttgggaggagtggcaactcctgggcgctgctcagaaggacctgtaccgggatgtgatgttggagaactacagcaacctggtggcagtggggtatcaagccagcaaaccggatgcactcttcaagttggaacaaggagaacaactgtgga

SEQ ID NO: 202261 - DNA, 533 bp, Homo sapiens
  Payload ID: 19894
  Gene Name: zinc finger protein 350
  ENST ID: ENST00000597788
  CDS Start-End: 348-533
ctccttgctgattgtctcttttctaaaactaatctgcctaagagttcaccatctcctgaggctggtgctatggtgggtctcatttcctacctgccttcacagtccttccacggaaacgtcacagaggaaaggcatacctccaccacattaagaatcctagacattattggccacaggttctgactcctcaggagcaaaaaacataacctgaagagggaggaagtggatttggggttcaccatttcttggggcacacttgattgaaaactgagacttctgaagagaaggccagaagatacaaagacagaccatcccagttgaatgctgtcttccaagaacagaagaaaatgatccaggcccaggaatccataacactggaggatgtggctgtggacttcacttgggaggagtggcaactcctgggcgctgctcagaaggacctgtaccgggatgtgatgttggagaactacagcaacctggtggcagtggggtatcaagccagcaaaccggatgcactcttcaagttggaacaa

SEQ ID NO: 202262 - DNA, 869 bp, Homo sapiens
  Payload ID: 19894
  Gene Name: zinc finger protein 350
  ENST ID: ENST00000601430
  CDS Start-End: 381-869
ataaacccgtgcgaggactccagaagtaggagcagtttacggaagtgtaacgttgaggcccttcttgtgtatctggagaaaatagaggttctgactcctcaggagcaaaaaacataacctgaagagggaggaagtggatttggggttcaccatttcttggggcacacttgattgaaaactgagacttctgaagagaaggccagaagatacaaagacagaccatcccagttgaatgctgtcttccaagaacagaagaaaatgatccaggcccaggactgttattacaggaatccataacactggaggatgtggctgtggacttcacttgggaggagtggcaactcctgggcgctgctcagaaggacctgtaccgggatgtgatgttggagaactacagcaacctggtggcagtggggtatcaagccagcaaaccggatgcactcttcaagttggaacaaggagaacaactgtggacaattgaagatggaatccacagtggagcctgttcagacatatggaaagttgatcatgtgctggagcgcttgcagagtgaaagcctggtgaacagaaggaaaccatgtcatgaacatgatgcatttgaaaatattgttcattgcagcaaaagtcagtttctgttagggcaaaatcatgatatatttgacttacgtggaaaaagtttgaaatccaatttaactttagttaaccagagcaaaggctatgaaataaagaactctgttgagtttactggaaatggggactcctttcttcatgctaaccatgaacgacttcatactgcaattaaattccctgcaagtcaaaaactcatcagcactaagtcccaattcatcagtcccaagcatcagaaaaca

SEQ ID NO: 202263 - DNA, 489 bp, Homo sapiens
  Payload ID: 19894
  Gene Name: zinc finger protein 350
  ENST ID: ENST00000593596
  CDS Start-End: 333-489
acatagtttttggcaggaagactggggagcgccggggtataggcatttgggaggtacctggtgggagtctgtgatccccctgtctgtggtccgcgtgcctttggtgtgagtacagtgactaagggtctgtagtgatcaacggccgtgtcctaactgtcaaggttctgactcctcaggagcaaaaaacataacctgaagagggaggaagtggatttggggttcaccatttcttggggcacacttgattgaaaactgagacttctgaagagaaggccagaagatacaaagacagaccatcccagttgaatgctgtcttccaagaacagaagaaaatgatccaggcccaggaatccataacactggaggatgtggctgtggacttcacttgggaggagtggcaactcctgggcgctgctcagaaggacctgtaccgggatgtgatgttggagaactacagcaacctggtggcagtggggtatcaagccagca

SEQ ID NO: 202264 - DNA, 2484 bp, Homo sapiens
  Payload ID: 19895
  Gene Name: zinc finger protein 354A
  Uniprot ID: O60765
  ENST ID: ENST00000335815
  CDS Start-End: 199-2016
ccggcgcgccgcggggtgagcggcgccgggcctgaggtcgcccagacgccgtcggggcggagccgggtcgcgaggctgcatcccggccggcggttccggagcctcgcggctggggaggcgcggcccgggacgctcgagcttagggagatctgccttctggagactgcgccgtcctcccgggagagccagaaagaggacatggctgctgggcagcgggaagcgaggccccaggtgtcactgacgtttgaggatgtggctgtgctgtttacccgagatgagtggagaaagctggccccttctcagagaaacttgtaccgggatgtgatgctggagaactataggaacctggtctcactggggctcccatttaccaaaccaaaagtgatctccctgttgcagcaaggagaagatccctgggaggtggagaaagacggttctggcgtctcctctctaggatcgaagagcagtcataaaaccacaaagtcaacgcaaacacaagactcttcatttcagggactgatactgaaaagatccaacaggaatgtaccttgggatttgaaattagaaaagccttacatatatgaaggcagattagagaaaaagcaggataaaaagggaagttttcagatagtttcagccacccacaaaaaaatccccactatagaaagaagccataaaaatactgaattgagccaaaacttcagcccaaagtcagtgcttattaggcaacagatacttcccagagaaaaaacaccaccaaaatgtgaaatacaaggaaacagcctcaaacagaattcacaattacttaatcaaccaaaaattacagcagataaacgctataaatgtagtctgtgtgaaaaaaccttcattaacacttcatcccttcgtaaacatgagaaaaaccatagtggagagaaactatttaagtgtaaagaatgttcaaaagcctttagccaaagttcagctcttattcaacatcaaataacgcatactggagagaaaccctacatatgtaaagaatgtgggaaagcctttactctcagtacatccctttataaacatctaagaacccatactgtggagaaatcctacagatgtaaagaatgtggtaaatccttcagccgaaggtcaggcctttttatacatcaaaaaattcatgctgaagaaaacccttgtaagtataatccgggtaggaaggcatctagttgcagcacatccctttctggatgtcaaagaattcattctagaaagaagtcctacttatgtaatgaatgtggcaacacctttaagtctagctcatcccttcgttatcatcagagaattcacactggagagaagccttttaaatgtagtgaatgtgggagagccttcagccagagtgcctctcttattcaacatgaaagaattcacaccggagaaaagccctatagatgcaatgaatgtgggaaaggctttacttctatttcacgacttaatagacaccgaatcattcatactggagagaagttttataattgtaatgaatgtggtaaagccttaagctcccactcaacacttattattcacgagcgaattcatactggagaaaaaccatgtaaatgtaaagtatgtggaaaagccttcagacagagttcagctctcattcaacatcagagaatgcatactggagaaagaccctataaatgtaacgagtgtgggaaaacattcaggtgtaactcatcacttagtaatcaccagagaattcatactggagagaaaccatatcgatgtgaggaatgtgggatatcttttggccaaagttcagctcttattcagcatcgaaggattcatacaggagaaaaaccctttaaatgtaatacatgtggaaaaacttttagacaaagctcatcacgtattgcacatcagagaattcatactggagagaaaccctatgaatgtaatacatgtgggaaacttttcaaccataggtcatcccttactaatcattataaaattcatatcgaagaggacccctagaaagtagatttgtatgtgtgaaagccttaaaccaaagctcatcgaagaatacatccttgagagagatgtaataaatgtaatggatgtgaaaaaaactgtaataatttagccctcattaggtatttaattccatggataaacctcagctatataatagatatgaggaaagtgtttgtgcctgtcagacacttaaaaaaataacctgagatgaagaatttacaattgaagacattgactttagccatttgtgaaatgggtttgctttttcccttttcctacagacgtatatgctagatgtcacgtgatcatcagaaacagatatccgagtgggtggggaggtgtgctttagatttctcattagaagaccaccaaactggtaatatttttatagcattttaatagcttgatcaaattgtacctttttagagaaaaggaccaaaataaaagaaaaatgaattatgaactacc

SEQ ID NO: 202265 - DNA, 564 bp, Homo sapiens
  Payload ID: 19895
  Gene Name: zinc finger protein 354A
  ENST ID: ENST00000518048
  CDS Start-End: 156-356
agacgccgtcggggcggagccgggtcgcgaggctgcatcccggccggcggttccggagcctcgcggctggggaggcgcggcccgggacgctcgagcttagggagatctgccttctggagactgcgccgtcctcccgggagagccagaaagaggacatggctgctgggcagcgggaagcgaggccccaggtgtcactgacgtttgaggatgtggctgtgctgtttacccgagatgagtggagaaagctggccccttctcagagaaacttgtaccgggatgtgatgctggagaactataggaacctggtctcactggggccatacataaacaggcagtggtctgaatttggcccatgacccgtagtttgctgatcactgccatccttaaaagggagtcacataggccgggcgcggtggctcacacctgtaatcccagcactttgggaggccgaggcgggcagatcacaagggctcccatttaccaaaccaaaagtgatctccctgttgcagcaaggagaagatccctgggaggtggagaaagacggttctggcgtctcctctctag

SEQ ID NO: 202266 - DNA, 766 bp, Homo sapiens
  Payload ID: 19895
  Gene Name: zinc finger protein 354A
  ENST ID: ENST00000520331
  CDS Start-End: 362-766
gtgcagtgggtgctggcagtgccagctggcgccgaggaactcagcggcgtggggcgagccctggccctggtgggctcagcgggtcgctgctgccactgcggctccagcgtcccctccgtaagccccaagcctgtggggcctgggcctggccgggcggcccagcgctgctctggtccgcgggctcctggctcctcccgaatccctgtgagggcgcgcggggtccttctcagcgggagtcggggttttagagctgcggattccagggctggaaagcagaaggggttcttcctggctccctttttcttctcagatctgccttctggagactgcgccgtcctcccgggagagccagaaagaggacatggctgctgggcagcgggaagcgaggccccaggtgtcactgacgtttgaggatgtggctgtgctgtttacccgagatgagtggagaaagctggccccttctcagagaaacttgtaccgggatgtgatgctggagaactataggaacctggtctcactggggctcccatttaccaaaccaaaagtgatctccctgttgcagcaaggagaagatccctgggaggtggagaaagacggttctggcgtctcctctctaggatcgaagagcagtcataaaaccacaaagtcaacgcaaacacaagactcttcatttcagggactgatactgaaaagatccaacaggaatgtaccttgggatttgaaattagaaaagccttacatatatgaaggcagattagagaaaaag

SEQ ID NO: 202267 - DNA, 2802 bp, Homo sapiens
  Payload ID: 19896
  Gene Name: zinc finger protein 354B
  Uniprot ID: Q96LW1
  ENST ID: ENST00000322434
  CDS Start-End: 227-2065
agcggccgccttgctcctctaggtcccaggcgctctgcggagctttcgctgcccggtgagcggcgccgggcttgaggtcgcccagacgtcggaggagccgggtcacgaggctggagcttcctgcttgcagagtgcggcggggaggcgcggcccgggaacgcgggatcctggggagatctgccttctggagactgcgccgtcctcccgggagagccagaaagaggacatggctgctgggcagcgggaagcgaggccccaggtgtcactgacattcgaggacgtggctgtgctctttacctgggatgagtggagaaagctggctccttctcagagaaacttgtaccgggatgtgatgctggagaactataggaacctggtctcactgggactctcatttaccaaaccaaaagtcatctccctgttgcagcaaggagaagatccctgggaggtggagaaagacagttctggtgtctcctctctaggatgtaagagcacacctaaaatgacaaagtcaactcaaactcaggattcatttcaggagcagataaggaaaagattgaaaagggatgaaccctggaacttcatatcagaaagatcctgcatatatgaagagaaattaaagaaacagcaggacaaaaatgaaaatttacaaataatttcagttgcccatacaaaaatccttactgtagatagaagccataaaaatgttgaatttggccaaaacttctacctgaaatcagtcttcattaagcaacagagatttgctaaagaaaaaactccatcaaaatgtgaaatacaaagaaatagtttcaagcagaattcaaatttacttaaccaatcaaaaatcaaaacagcagagaaacgctataaatgcagtacatgtgaaaaagccttcattcacaattcatcccttcgtaaacatcagaaaaaccacactggagaaaaattatttaaatgtaaagaatgtttaaaagctttcagccaaagttctgctcttattcaacatcaaagaactcatacaggagagaaaccctatatatgtaaagaatgtgggaaagccttcagccatagtgcatccctttgtaagcatttaaggacccatactgtggagaaatgctatagatgtaaagaatgtggtaaatccttcagtcgaaggtctgggctttttatacatcaaaaaatccatgctcaagaaaatccccataaatacaatccaggcaggaaggcatccagttacagcacttccctttctggaagtcagaaaattcatctcagaaagaagtcctacttatgtaatgaatgtggcaacacctttaagtctagctcatcccttcgttatcatcagagaattcacactggagagaagccttttaaatgtagtgaatgtgggagagccttcagccagagtgcctctcttattcaacatgaaagaattcacaccggagaaaagccctatagatgcaatgaatgtgggaaaggctttacttctatttcacgacttaatagacaccgaataattcatactggagagaaattgtataattgtaatgaatgtggtaaagccttaagctcccactcaacacttattattcatgagcgaattcatactggagaaaaaccatgtaaatgtaaagtatgtggaaaagccttcagacagagttccgctctcattcaacatcagagaatgcatactggagaaagaccctataagtgtaacgaatgtgacaaaacattcaggtgtaactcatcgcttagtaatcaccagagaattcatactggagagaaaccatatcgatgtttagaatgtgggatgtcttttggccaaagtgcagctcttatacaacatcagaggattcatacaggagaaaaaccctttaaatgtaatacatgtggaaaaacttttagacaaagctcatcacttattgcacatcaaagaattcatactggagagaaaccctatgaatgtaatgcatgtgggaaactctttagccagaggtcatcccttactaatcattataaaattcacattgaagaggactccttaaaagccgatttgcatgtgtgaaagccttaaaccaaaactcatcagagaatacatgcttgagagtgatttattaaatataatgaatatgagaaaactcttagttctcatcagatactaagttttaagaataaactttagctatgtaataacttatgggaaaagcttttatacttgtcactcactttttaaaatatcccgagacagttcactgttgcagacattgaaattggccatttgtaagataaaaggtatgtttataaaatctctttatataatatatgctatctatgacatgcaaaaaagaaaagtctgggtgctgaggtgctgaatttttcattagaaaaacatttgtataaactactattatataaatataagcatatttattacagcaaacattttaatagcaaacaaaacaattgatcttaaaaatatatgcaatatatacttacctggcagggaagattaccatgatcacgaaggtggttttcccagggcaaggcttatccattgcactccagatgtgctgaccccttcaatttcccaaaatgtggaaaactcaactgcataatttatggtagtgggggactacattcgcactttctcctgaaatatatatatatatgcagtattagagcaaaggaccaataagagataaaaactaactgaactacctcttagtgcctggaatttaccttttcctgacttactgtcaaacttcgtgcatggcttttattaaaaaagaaaaaatctgttct

SEQ ID NO: 202268 - DNA, 763 bp, Homo sapiens
  Payload ID: 19896
  Gene Name: zinc finger protein 354B
  ENST ID: ENST00000520377
  CDS Start-End: 362-763
gtgcagtgggtgctggcagtgccagctggcgccgaggaactcagcggcgtggggcgagccctggccctggtgggctcagcgggtcgctgctgccactgcgggtccagcgtcccctccgtaagccccaagcctgtggggcctgggcctggccgggcggcccagcgctgctctggtccgcgggctcctggctcctcccgaatccctgtgagggcgcgcggggtccttctcagcgggagtcggggttttagagctgcggattccagggctggaaagcagaaggggttcttcctggctccctttttcttctcagatctgccttctggagactgcgccgtcctcccgggagagccagaaagaggacatggctgctgggcagcgggaagcgaggccccaggtgtcactgacattcgaggacgtggctgtgctctttacctgggatgagtggagaaagctggctccttctcagagaaacttgtaccgggatgtgatgctggagaactataggaacctggtctcactgggactctcatttaccaaaccaaaagtcatctccctgttgcagcaaggagaagatccctgggaggtggagaaagacagttctggtgtctcctctctaggatgtaagagcacacctaaaatgacaaagtcaactcaaactcaggattcatttcaggagcagataaggaaaagattgaaaagggatgaaccctggaacttcatatcagaaagatcctgcatatatgaagagaaattaaagaaacag

SEQ ID NO: 202269 - DNA, 5411 bp, Homo sapiens
  Payload ID: 19897
  Gene Name: zinc finger protein 354C
  Uniprot ID: Q86Y25
  ENST ID: ENST00000315475
  CDS Start-End: 307-1971
ctttcgggggttctcctggcttgggccatccaggcttggctaggattgccggcctggggttgaggcgctcgcagtggtctcttccgggccggggtggatccgggcctctccagcgagtgggcggcgtgcagcctcgtctgggcttctgggaccagccctacgcggctcgggccccttggccactgggtcccggggcgccgtccgcgagcggcctggactgccggagacccgcgggagggagcgcctcgccagacccaccgtgtccacactctgctctccctgggcaggaagactgaggaggaagggatggctgtggatctgctgtctgctcaggagcctgtgacattcagggatgtggccgtgttcttcagccaggacgagtggttgcacctggactctgcccagagggccttgtaccgggaggtgatgctggagaactacagcagcctggtctcactggggattccattttcaatgccaaagttgattcatcagttgcagcaaggagaagatccctgcatggtggaaagagaagtcccttcagatacccgtctaggtttcaagacttggcttgaaacagaagcattgcctcatagacaggacatttttatagaagaaacatctcagggaatggtaaagaaagaatccattaaggatggtcactgggacattaactttgaagaagctgtggaatttgagagcgagatagaagaagagcaagagaagaaacctcttagacaaatgatagattcgcatgagaaaaccatcagtgaagatggaaaccatacaagtcttgaattggggaaaagcttatttacaaatacagctcttgtcacacaacagagtgttcctatagaaaggatacccaatatgtattatacatttgggaaagattttaaacagaattttgatctcatgaaatgcttccagatttacccaggaggaaaacctcacatctgtaatgaatgtgggaagagcttcaagcagaatctgcatcttattgaacatcagagaattcatacaggtgagaaaccctacaaatgtaatgagtgtgaaaaaaccttcagccacagatcatcccttctttctcatcagagaattcatactggagagaaaccttacaagtgtaatgaatgtgagaaggcatttagcaacagttcaacccttatcaaacatctgagagtgcatactggagagaaaccgtatcgatgtagggaatgtggtaaagcctttagccagtgttcaaccctcactgtacatcagagaattcatactggagagaaactctataaatgcggcgaatgtgagaaggccttcaactgtagagcaaaacttcacaggcatcaaagaatccatacaggtgagaaaccctataaatgtagtgagtgtgggaagggatacagccagtttacatctctagctgaacatcagaggtttcatactggagaacaactgtatacatgcttggaatgtgggagaaccttcacacgtattgtaacccttatcgaacatcagcgaattcacactggacaaaaaccttatcagtgcaacgaatgtgagaaagccttcaaccagtattcatcctttaatgaacatcggaaaattcatactggggaaaaactttatacatgtgaggaatgtgggaaagcctttggttgcaaatctaacctttataggcatcagagaattcatactggagagaaaccgtatcagtgtaatcagtgtggaaaggccttcagccagtattcatttttaaccgaacatgagaggatccacactggagagaaactgtataaatgtatggaatgtgggaaagcctacagttacagatcaaacctttgtagacacaaaaaagttcacacgaaagagaaactctataagtggaaggaatatgggaaacctttcatctgcagctcctcacttacccagtatcagagattttttaaaggagataaagcctatgaggtttagttcatctctcaaataatccaagacttctcactggggaataagggaataataaatagggtacaaactcctaatagatttgtcttttttacttctcctgaaggaaatatgttagttgccactaagtcatgataaaattgatcagtgagactatgaagagcactgacttgttaaattttaaaagaaccataaattctaaggtatctaaaaacctatgagtatttaattcatagaaaaaatgtaaaaggtctttttaaaaatcatgaaaaatagttgaatatacattttgtttctctcataagaccatattccctttaaaagagtaagcttcaatatgtgaattttcttttaaaaacagtcactgagttaataatgtaaataagtgtgtggccttctttaaaatagctggctaacataggaggcacttcttttcataaagagaagctaaacataaaaaggaattttaaatttaactcttcacatggaaataataaagctctttatatgagctgtcccaccagcaacttatatatgtaaacatacatatatacacatatgcatgtgtgtgtgtaaacataaaagtcctttattattaaaaaatgtagttttattgatttagaatttagttcttaaaatcttgcccaaaggtagactctctttcttttactttcttccattatttcttaaattgatgtggttttatataactgaacagagtactattacagtaccgtagaaggcggattaactgaagcagctggaaagactgtcaagcacatactttgttatctgttgcagaagggatgtatttggcagaatctcaggctgcatgtctggtagctcattagagccaggagagattttagtttaattatagcctttcattgtactaacgaaggatttgaacttagtgaacagagtcaagactagaatctaggtctttggttctggtgttttgtgatcattataggctcgtttccaacctgaggtcccaagagtactatttgttttgtagcctggttagacatagttgcagtaatttaaagttactgtgttatctttaagggcttcctctcaccttaatcttaataattgactcacaactatattcttttttcttatgagtccctaattatgcctgcttttgttataattgtacttaaatccttaaagctagctgaggtccagatagtgtaattgcttttggaggcttcacatataaggttgccttcttattacacatattttaggaattaattattttatggaaagttatatatgaagagtttattattaagcattcctttcatcagtttaaatgtttaattcctcccaggcgtttttcctccaattttatatttgatttttcattcaattcacagttggtatcattaaaaaaaattctaatacaattagctagaccttctgagaaaaatgttagaattaaactcaagcagtcagtatagtatatttcttaaccgactggttttagcttatcagaaagtaattattttatgtatttaaatacatttacaaagaaaatgaggcttttaaacagacctcactatttaacattgtacccagtagtggtgagcatgcttagtacccaaattttggtttctaaatgccattccccactaaaaggaaccagggttccttggagaaatggctgattccatgtttggagcaggggaagtgggtggtgtggctaaaatactttttattaagaaaataaaataaaaagcaagatagtatttgaagactaatggggtaatgtcagaagggaacaggcgccaagttgaaggtattctcactggccaaatttaggacaacttagaataatcactcttactggtgataatactaagaaggaaaagaagttcataatgatgaaagtagagaaaaaagaaaactctatacaattatttgaagaatgtcttcttttaaatgtacatggaatgatagatttggaaaaattaccattttacaacccttaatgtaattaaatctggcaaaaatcgatggtaaaacccattaagtggaaaaaattttaaggaactttgtttacaaggtgtcagaacatcacagatatctattgcaaaagaattgcctttacagtgagatttggctatcaaactgcatttcactacttctggaataagccagcattatgtggctcttgatgggatgcggtatgaagcatgtgtgatcatccttgatgtactgccgaaaatgtttacctcaaatttaattaaatcttttgtctagacttatcttcctgtttaaagaaatacaggaatagaggaacaagttgaattacacagtatggaaataaatagacaagtccagagttggtataggacaactggacttttttttatatatttattttaaaatggttttcttaaatttatttttttaaacataacacgaggaagctgttaaaactggtgtaatagctcaaaagaactaagtattccagatttcgggagggatgaagagggagatattcagaaaccttcaccagattcctcccaacttgatcatagtggattaatgacgtgctttgtggatgtggttagtcaatgacaccagcttgacggatctttctttctgcaccaaaccccattgagttatctggtccccttggctgacgaagagccattaggcgaggatcactggcatcatccagggtgatgttcttcaagcgactgaccaaccgatcaggtcgaggagctgcaacagccttggggccctcacagactcgccaaacattccaggcactgcacttgccagtgcgctgatgaagaatcacggagaactccacctcatctcctgcctggagctcaaggccatcctcaacttctttcatatggaaaaagagcttcttgctatcccctacttcatagttaatgaagccaaactgatcttgcacacattccactggccctacgcaggggtgtgatgttgtaagccatagtttgtgcattttggccctggtctggacttttcaaaaagcaaatgtagtaaaacaaaaagtggtctctgctagattaagacaagagacataaccaaatggaaagtgtgatcctttattagcttctgattcataaaaaaacctataagagacatttggggggatatttggggaaataggaagatggaatgggtagtagataatgtggtatatttgatttttctagaagtgataattgagttacgtaggataatgttctaattcttaggagatgcatgcagaagttttttttttaagttttgaaaagtcatgatgttgacagcatattttcaaataaatatgtacaaaatcagtcaattgttttttgtggtggatctatatgtggtggatgttcattggtcatttaaaacatttttctatgtgtgtcaatttttaataaaaatgcaaaaagtgattggataaagaa

SEQ ID NO: 202270 - DNA, 1824 bp, Homo sapiens
  Payload ID: 19898
  Gene Name: zinc finger protein 358
  Uniprot ID: Q9NW07
  ENST ID: ENST00000394341
  CDS Start-End: 42-1748
caggtcttgccccagaagctgcgggcacatccacgcctgaaatgcggcgctcagtcctggtcaggaacccaggccacaaaggcctgagacccgtttatgaagagctcgactctgactccgaggacctagaccccaatcctgaagatctggacccggtttctgaagacccagagcctgatcctgaagacctcaacactgtcccggaagacgtggaccccagctatgaagatctggagcccgtctcggaggatctggaccccgacgccgaagctccgggctcggaaccccaagatcccgaccccatgtcttcgagtttcgacctcgatccagatgtgattggccccgtacccctgattctcgatcctaacagcgacaccctcagccccggcgatccaaaagtggaccccatctcctctggcctcactgccaccccccaggtcttggccaccagccccgcggtgctccccgcccccgccagcccgccccggcccttctcctgcccggattgcgggcgagccttccgccgcagctccgggctgagccagcatcgccgcacgcacagcggcgagaagccgtaccgctgccccgactgcgggaagtccttcagccacggtgccaccctggctcagcaccgtggcatccacactggggcgcggccgtaccagtgcgcggcctgcggcaaggccttcggctggcgctccacgctgctgaaacatcgcagcagccacagcggggagaagccgcaccactgcccggtgtgtggcaaggccttcgggcacggctcgctcctggcacagcacctgcgcacgcacggcggcccgcggccccacaagtgcccggtgtgcgccaagggcttcggccagggctctgcgctgctcaaacacctgcgcacgcacacgggcgagcggccctacccgtgtccgcagtgcggcaaggccttcgggcagagctcggcgctgctgcagcaccagcgcacacacacggccgagcgcccctaccgctgcccccactgcggcaaagccttcgggcagagctccaacttgcaacaccacctgcgcatccacacgggcgagcggccctacgcctgcccgcactgctccaaggccttcggccagagctcagcgctgctccagcacctgcacgtgcattcgggcgagcgtccctatcgctgtcagctctgcgggaaggccttcggccaggcctccagcctcaccaagcacaaacgggtgcatgagggtgcagccgctgctgcagctgccgcggccgctgcagctgcagcagcggccgccggcctgggcctcgggcctggcctaagccctgcatccatgatgaggccggggcaggtctccctcctgggtcctgatgctgtttctgtgctcggctctggcttgggcctcagccctggcaccagctctggccgcaaccctgaccctggctctgggccgggcactctgccggatcccagctccaaacccctccccggctccagatccacccccagccctactcctgtggaatcttctgacccaaaggctgggcacgacgctggtcccgaccttgtgcccagcccagaccttgatcctgtgcccagcccagaccctgatcctgtgcccagccctgatcccaaccctgtgtcctgccctgacccctgttctcccactcgtggcactgtcagcccagccctccctaccggcgagagtccagagtgggtacaggagcaaggggcactgctggggcctgatggctgaaggagacgccggcatcctcgggggcctggggaagttgtgtgttgtgcagtcagtaaaatcctcccactgcctccgg

SEQ ID NO: 202271 - DNA, 1954 bp, Homo sapiens
  Payload ID: 19898
  Gene Name: zinc finger protein 358
  Uniprot ID: Q9NW07
  ENST ID: ENST00000597229
  CDS Start-End: 171-1877
ggagcgcctggcggggccgctgggccgagggggccgccggcggggctggcgggcggggggcttcctgcgggcccggggggagccggcggccggcgcgggcgcggcgggccgggcaggggcgaggggcgccgggtcttgccccagaagctgcgggcacatccacgcctgaaatgcggcgctcagtcctggtcaggaacccaggccacaaaggcctgagacccgtttatgaagagctcgactctgactccgaggacctagaccccaatcctgaagatctggacccggtttctgaagacccagagcctgatcctgaagacctcaacactgtcccggaagacgtggaccccagctatgaagatctggagcccgtctcggaggatctggaccccgacgccgaagctccgggctcggaaccccaagatcccgaccccatgtcttcgagtttcgacctcgatccagatgtgattggccccgtacccctgattctcgatcctaacagcgacaccctcagccccggcgatccaaaagtggaccccatctcctctggcctcactgccaccccccaggtcttggccaccagccccgcggtgctccccgcccccgccagcccgccccggcccttctcctgcccggattgcgggcgagccttccgccgcagctccgggctgagccagcatcgccgcacgcacagcggcgagaagccgtaccgctgccccgactgcgggaagtccttcagccacggtgccaccctggctcagcaccgtggcatccacactggggcgcggccgtaccagtgcgcggcctgcggcaaggccttcggctggcgctccacgctgctgaaacatcgcagcagccacagcggggagaagccgcaccactgcccggtgtgtggcaaggccttcgggcacggctcgctcctggcacagcacctgcgcacgcacggcggcccgcggccccacaagtgcccggtgtgcgccaagggcttcggccagggctctgcgctgctcaaacacctgcgcacgcacacgggcgagcggccctacccgtgtccgcagtgcggcaaggccttcgggcagagctcggcgctgctgcagcaccagcgcacacacacggccgagcgcccctaccgctgcccccactgcggcaaagccttcgggcagagctccaacttgcaacaccacctgcgcatccacacgggcgagcggccctacgcctgcccgcactgctccaaggccttcggccagagctcagcgctgctccagcacctgcacgtgcattcgggcgagcgtccctatcgctgtcagctctgcgggaaggccttcggccaggcctccagcctcaccaagcacaaacgggtgcatgagggtgcagccgctgctgcagctgccgcggccgctgcagctgcagcagcggccgccggcctgggcctcgggcctggcctaagccctgcatccatgatgaggccggggcaggtctccctcctgggtcctgatgctgtttctgtgctcggctctggcttgggcctcagccctggcaccagctctggccgcaaccctgaccctggctctgggccgggcactctgccggatcccagctccaaacccctccccggctccagatccacccccagccctactcctgtggaatcttctgacccaaaggctgggcacgacgctggtcccgaccttgtgcccagcccagaccttgatcctgtgcccagcccagaccctgatcctgtgcccagccctgatcccaaccctgtgtcctgccctgacccctgttctcccactcgtggcactgtcagcccagccctccctaccggcgagagtccagagtgggtacaggagcaaggggcactgctggggcctgatggctgaaggagacgccggcatcctcgggggcctggggaagttgtgtgttgtgcagtcagtaaaatcctcccactgcctccggg

SEQ ID NO: 202272 - DNA, 662 bp, Homo sapiens
  Payload ID: 19898
  Gene Name: zinc finger protein 358
  ENST ID: ENST00000596712
  CDS Start-End: 154-662
tctccaaggaaagtttgccccgagcccttcccggcccggcgtagggttctccggaaaccatcactcacatctagcacttggaggcctccagggacagcggtgacccaccatctgggtcttgccccagaagctgcgggcacatccacgcctgaaatgcggcgctcagtcctggtcaggaacccaggccacaaaggcctgagacccgtttatgaagagctcgactctgactccgaggacctagaccccaatcctgaagatctggacccggtttctgaagacccagagcctgatcctgaagacctcaacactgtcccggaagacgtggaccccagctatgaagatctggagcccgtctcggaggatctggaccccgacgccgaagctccgggctcggaaccccaagatcccgaccccatgtcttcgagtttcgacctcgatccagatgtgattggccccgtacccctgattctcgatcctaacagcgacaccctcagccccggcgatccaaaagtggaccccatctcctctggcctcactgccaccccccaggtcttggccaccagccccgcggtgctccccgcccccgccagcccgccccggcccttctcctgcccggattgcgggcgagccttccgccgcagctccgggctgagccagcatcg

SEQ ID NO: 202273 - DNA, 2936 bp, Homo sapiens
  Payload ID: 19899
  Gene Name: zinc finger protein 362
  Uniprot ID: Q5T0B9
  ENST ID: ENST00000373428
  CDS Start-End: 1-1263
atgagtagaagttcaccaagtgggaaaggacactctaggatggccgagcctcgatttaacaacccctacttctggccccctcctcccaccatgcccagccagctggacaacctggttctgattaacaagatcaaggagcagctgatggccgagaagatcaggccgcctcacctgccgcccacgtcggcctcgtcgcagcagccgttgctagtgccgccggcacccgccgagagcagccaggccgtcatgtcgctgcccaagctgcagcaggtgccggggctgcatccacaggcggtgccgcagcccgacgtggcgctgcacgcacggccggccaccagcaccgtcacaggtctggggctgtccacccggaccccgtctgtgagcacttctgagtcaagcgcgggcgcgggcacgggcacgggtaccagcaccccgtccacacccaccaccaccagccagagccgcctcatcgcctcgtcccccaccctcatctcagggatcaccagcccccctctcctggactccatcaagacaatccagggccacggcctgcttggcccccccaagtccgaacgcggccgcaaaaagatcaaggcggagaacccggggggtccgcctgtccttgtagtcccctatcccatcctggcctcgggcgagactgccaaggagggcaagacgtacaggtgtaaggtatgcccactgacctttttcaccaagtcagagatgcagatccactccaagtcgcacacagaggccaagccccacaagtgcccgcactgctccaagtcctttgccaacgcctcctacctggcccagcacctgcgcatccacctgggcgtcaagccctaccactgctcctactgtgataagtccttccggcagctctcccacctccagcagcacaccagaatccacacaggcgacagaccctacaagtgcccacatcctggctgcgagaaggctttcactcagctctccaacctccagtctcaccagcgccagcacaacaaggacaagccctacaagtgtcccaactgctaccgggcctattcggactccgcttctttgcagatccacctctcggcccacgccatcaagcacgccaaggcctactgctgcagcatgtgtgggcgggcctacacctcggagacctacctgatgaagcacatgtccaaacacacggtggtggagcacctggtgagccatcactcgccccagaggacggagtcccccggcatcccggtgcgaatctctctcatctgagcccactggaggcgccgccccacccggcccactggcagacacagacccaggcagcaccaggccccagctccctccgggggccctccaggaaccaccaagctctctcacgaccttcccaatcttccagaaagcttggtccgcagaagccctgcctggtccagtccgggggcggccaggccaactgcaagattctggactgttttggtggcatccaaagacgatctcagagcactttgaacctctctgttgagttttctttttgttccccacccttcacttgcttcactgtttttttttttttcgttttttttttttaagtttgttttggaaataacagaaaagatatttattggccaggaagttggtgctgctaagaccgagaaatttaaagaatcggacagatggacgcagagaaccagagggcaatgtgggaccttctcttgccatggcctcaggtcttgagggaaggctcgggcctaggtttctggactgcaaaggggacccccaggtgggaggggcaggaagcagccggagtgagcccttcgcccctgagtgcctggctcgcacctctcgagctgtgccctgggcatcactgagcagaggggtgcggcagcttcaggaggcagaaacgagaggggtgggagatccacaggaccaaagggtgcagtgatgggctgggtggcgggcccagggaaatggggtggggatgggctgggtaagacctggccctcccctgctgccctgaagaccaccccagtctacctcggtgctggccaggaaacctttcggctacctctcccaccatcccagactgtgggcagggggatggggagggagtgggcctggatctgggacctccctccagaatttcctccagatgggggcagtgcccagggaggggttatttgtcttccctgccatggagtgggaatccccagccgaggccctaggcccctcagcagggaagggatccccggggaggcaggtcccaggagcagaccctgcccccagcccccacagacacaccccaatctgaaagccatgcgtgtcggtgtatataggaaccatgtacagagcccagagaagccccctacatccccccgggaaaaaaaagaaaactagacagaaactcatctatatattctgtatctggagttccgttttgaatattaactgtgttatttttatacactttttaagccttaactcgccattgatttaccagtttaacgtttcctggggtttctttgcccatggggttctctgcccccacccccggccctttgtttgacttgcgtcgtctgatactcagtattgtagctttttgtccgcatgttactccctgtaaatacgctgttatacatactgttaacacccctttgctttttctatgggacctccaggccaccatatttagaactagttaccttattaaaaaagaaaaaacagtctgttggcttctcagtctgcatcttggaggcagggaggtgagggcaggtgcccctcagacacttcaggaaggtagtttgcattctatttaaaaaagggagtggggagcaaatgaaaatcaaatgtggggggaaaacactaaagggggcaagaaacaaaggaattacaaaccctctgctctttgtatttctctgttgtgaagaataaactgtacctgcacccgg

SEQ ID NO: 202274 - DNA, 712 bp, Homo sapiens
  Payload ID: 19899
  Gene Name: zinc finger protein 362
  ENST ID: ENST00000483388
  CDS Start-End: 112-712
agagccggagcccgagcccggagcctgtgccggagccccagcccggccctgctcgggccgccgggcgcggggctgcggccgcgtcccggaggcgccgccagcacagccaggatggccgagcctcgatttaacaacccctacttctggccccctcctcccaccatgcccagccagctggacaacctggttctgattaacaagatcaaggagcagctgatggccgagaagatcaggccgcctcacctgccgcccacgtcggcctcgtcgcagcagccgttgctagtgccgccggcacccgccgagagcagccaggccgtcatgtcgctgcccaagctgcagcaggtgccggggctgcatccacaggcggtgccgcagcccgacgtggcgctgcacgcacggccggccaccagcaccgtcacaggtctggggctgtccacccggaccccgtctgtgagcacttctgagtcaagcgcgggcgcgggcacgggcacgggtaccagcaccccgtccacacccaccaccaccagccagagccgcctcatcgcctcgtcccccaccctcatctcagggatcaccagcccccctctcctggactccatcaagacaatccagggccacggcctgcttggcccccccaagtccgaacgcggccgcaaaaagatcaaggcggagaacccggggggtccgcctgtccttgtagtcccctatccca

SEQ ID NO: 202275 - DNA, 3106 bp, Homo sapiens
  Payload ID: 19899
  Gene Name: zinc finger protein 362
  Uniprot ID: Q5T0B9
  ENST ID: ENST00000539719
  CDS Start-End: 171-1433
gccggagccccagcccggccctgctcgggccgccgggcgcggggctgcggccgcgtcccggaggcgccgccagcacagccaggtgctgttgggaacacagaggaagtgactggctgggggttcagggaaagctccgtagaagagggaacacttgagctgggtcttgaaggatgagtagaagttcaccaagtgggaaaggacactctaggatggccgagcctcgatttaacaacccctacttctggccccctcctcccaccatgcccagccagctggacaacctggttctgattaacaagatcaaggagcagctgatggccgagaagatcaggccgcctcacctgccgcccacgtcggcctcgtcgcagcagccgttgctagtgccgccggcacccgccgagagcagccaggccgtcatgtcgctgcccaagctgcagcaggtgccggggctgcatccacaggcggtgccgcagcccgacgtggcgctgcacgcacggccggccaccagcaccgtcacaggtctggggctgtccacccggaccccgtctgtgagcacttctgagtcaagcgcgggcgcgggcacgggcacgggtaccagcaccccgtccacacccaccaccaccagccagagccgcctcatcgcctcgtcccccaccctcatctcagggatcaccagcccccctctcctggactccatcaagacaatccagggccacggcctgcttggcccccccaagtccgaacgcggccgcaaaaagatcaaggcggagaacccggggggtccgcctgtccttgtagtcccctatcccatcctggcctcgggcgagactgccaaggagggcaagacgtacaggtgtaaggtatgcccactgacctttttcaccaagtcagagatgcagatccactccaagtcgcacacagaggccaagccccacaagtgcccgcactgctccaagtcctttgccaacgcctcctacctggcccagcacctgcgcatccacctgggcgtcaagccctaccactgctcctactgtgataagtccttccggcagctctcccacctccagcagcacaccagaatccacacaggcgacagaccctacaagtgcccacatcctggctgcgagaaggctttcactcagctctccaacctccagtctcaccagcgccagcacaacaaggacaagccctacaagtgtcccaactgctaccgggcctattcggactccgcttctttgcagatccacctctcggcccacgccatcaagcacgccaaggcctactgctgcagcatgtgtgggcgggcctacacctcggagacctacctgatgaagcacatgtccaaacacacggtggtggagcacctggtgagccatcactcgccccagaggacggagtcccccggcatcccggtgcgaatctctctcatctgagcccactggaggcgccgccccacccggcccactggcagacacagacccaggcagcaccaggccccagctccctccgggggccctccaggaaccaccaagctctctcacgaccttcccaatcttccagaaagcttggtccgcagaagccctgcctggtccagtccgggggcggccaggccaactgcaagattctggactgttttggtggcatccaaagacgatctcagagcactttgaacctctctgttgagttttctttttgttccccacccttcacttgcttcactgtttttttttttttcgttttttttttttaagtttgttttggaaataacagaaaagatatttattggccaggaagttggtgctgctaagaccgagaaatttaaagaatcggacagatggacgcagagaaccagagggcaatgtgggaccttctcttgccatggcctcaggtcttgagggaaggctcgggcctaggtttctggactgcaaaggggacccccaggtgggaggggcaggaagcagccggagtgagcccttcgcccctgagtgcctggctcgcacctctcgagctgtgccctgggcatcactgagcagaggggtgcggcagcttcaggaggcagaaacgagaggggtgggagatccacaggaccaaagggtgcagtgatgggctgggtggcgggcccagggaaatggggtggggatgggctgggtaagacctggccctcccctgctgccctgaagaccaccccagtctacctcggtgctggccaggaaacctttcggctacctctcccaccatcccagactgtgggcagggggatggggagggagtgggcctggatctgggacctccctccagaatttcctccagatgggggcagtgcccagggaggggttatttgtcttccctgccatggagtgggaatccccagccgaggccctaggcccctcagcagggaagggatccccggggaggcaggtcccaggagcagaccctgcccccagcccccacagacacaccccaatctgaaagccatgcgtgtcggtgtatataggaaccatgtacagagcccagagaagccccctacatccccccgggaaaaaaaagaaaactagacagaaactcatctatatattctgtatctggagttccgttttgaatattaactgtgttatttttatacactttttaagccttaactcgccattgatttaccagtttaacgtttcctggggtttctttgcccatggggttctctgcccccacccccggccctttgtttgacttgcgtcgtctgatactcagtattgtagctttttgtccgcatgttactccctgtaaatacgctgttatacatactgttaacacccctttgctttttctatgggacctccaggccaccatatttagaactagttaccttattaaaaaagaaaaaacagtctgttggcttctcagtctgcatcttggaggcagggaggtgagggcaggtgcccctcagacacttcaggaaggtagtttgcattctatttaaaaaagggagtggggagcaaatgaaaatcaaatgtggggggaaaacactaaagggggcaagaaacaaaggaattacaaaccctctgctctttgtatttctctgttgtgaagaataaactgtacctgcacccgg

SEQ ID NO: 202276 - DNA, 538 bp, Homo sapiens
  Payload ID: 19900
  Gene Name: zinc finger protein 365
  ENST ID: ENST00000344640
  CDS Start-End: 154-351
ctgggtcaaagggtgaagtagaaggaagctggaaacacatagtattttagaagtttttcagagaaatcacaaggcaggaacttctgctcagtttggaagaaagagcattccatcatgacccttggactgggtgagagcatcatcctttaattaatgtctgcgctgggtcagataaccatcactgtctccaggtgctggaatacagagaggaaccaaacagataaaaatccttgcctgcacggagcttaccttcagctaagggagacagtcaaaaacaaggatttagccaaatttgggtgctatttcccttttgtggagggacttttcatcacaatgagaaggacgtcttaggactccaggactttgagaggcaaattgacaatcatcgatttgttgactgaacacctgttaggtgtaaggcacggtgtcatatgctttccttggggcttgccttcaagcagctaacagaaataagaagaaaacaggtgaaaaagacagtgtgataaggccatggtggtggattgtggatgccctgccc

SEQ ID NO: 202277 - DNA, 612 bp, Homo sapiens
  Payload ID: 19900
  Gene Name: zinc finger protein 365
  ENST ID: ENST00000373784
  CDS Start-End: 154-351
ctgggtcaaagggtgaagtagaaggaagctggaaacacatagtattttagaagtttttcagagaaatcacaaggcaggaacttctgctcagtttggaagaaagagcattccatcatgacccttggactgggtgagagcatcatcctttaattaatgtctgcgctgggtcagataaccatcactgtctccaggtgctggaatacagagaggaaccaaacagataaaaatccttgcctgcacggagcttaccttcagctaagggagacagtcaaaaacaaggatttagccaaatttgggtgctatttcccttttgtggagggacttttcatcacaatgagaaggacgtcttaggactccaggactttgagagagaaagtgtctctacaagtcaaagcaggaatatcagccttcttacactaggacaactccaaaattgtgtgattggcaaattgacaatcatcgatttgttgactgaacacctgttaggtgtaaggcacggtgtcatatgctttccttggggcttgccttcaagcagctaacagaaataagaagaaaacaggtgaaaaagacagtgtgataaggccatggtggtggattgtggatgccctgccc

SEQ ID NO: 202278 - DNA, 433 bp, Homo sapiens
  Payload ID: 19900
  Gene Name: zinc finger protein 365
  ENST ID: ENST00000395249
  CDS Start-End: 154-360
ctgggtcaaagggtgaagtagaaggaagctggaaacacatagtattttagaagtttttcagagaaatcacaaggcaggaacttctgctcagtttggaagaaagagcattccatcatgacccttggactgggtgagagcatcatcctttaattaatgtctgcgctgggtcagataaccatcactgtctccagagaaagtgtctctacaagtcaaagcaggaatatcagccttcttacactaggacaactccaaaattgtgtgattggcaaattgacaatcatcgatttgttgactgaacacctgttaggtgtaaggcacggtgtcatatgctttccttggggcttgccttcaagcagctaacagaaataagaagaaaacaggtgaaaaagacagtgtgataaggccatggtggtggattgtggatgccctgccc

SEQ ID NO: 202279 - DNA, 2695 bp, Homo sapiens
  Payload ID: 19900
  Gene Name: zinc finger protein 365
  Uniprot ID: Q70YC4
  ENST ID: ENST00000395251
  CDS Start-End: 335-985
gaagaggaagagagacccgagctagcacactcagtccccttgctatgtgatgttctttaccatctcaggactctgcacagagtccccaacagcaagaaggccctcaccagatacagccccttgacctgggacttctcagcctccataaccgaattggcccctacaagtcaagttgcaaaccctgggtcaaagggtgaagtagaaggaagctggaaacacatagtattttagaagtttttcagagaaatcacaaggcaggaacttctgctcagtttggaagaaagagcattccatcatgacccttggactgggtgagagcatcatcctttaattaatgtctgcgctgggtcagataaccatcactgtctccaggtgctggaatacagagaggaaccaaacagataaaaatccttgcctgcacggagcttaccttcagctaagggagacagtcaaaaacaagtcaacacatctaaagaagccactgatgaaacaggctcccccttggaaagaccatctcaccttccaacctctccatcctgcagagaggaaaacccaagtttggcgttggcagtcaggtaattcatcagatctggaaaccacctcatcagcatccccctggccaactggaagcaaccgtgacgttgtgctgaatacacttgcagagtcgtgctgtggtctctccgagctcatcacggcacctccctatgcaggagtttcaattcaaggatttagccaaatttgggtgctatttcccttttgtggagggacttttcatcacaatgagaaggacgtcttaggactccaggactttgagagagaaagtgtctctacaagtcaaagcaggaatatcagccttcttacactaggacaactccaaaattgtgtgattggcaaattgacaatcatcgatttgttgactgaacacctgttaggtgtaaggcacggtgtcatatgctttccttggggcttgccttcaagcagctaacagaaataagaagaaaacaggtgaaaaagacagtgtgataaggccatggtggtggattgtggatgccctgccctgtatccacttgggagagagcctctacaacatgctggcaacttccccctcactgattcaaatgttaatctcctttggcaacaccctcacagacacacccaggatcaatacgttgtatcctttgatccaatcaagttgccactcagtattaaccatgacaccttctaagccatcatctcctcctaatcctcccataacaatgggtataagttatgaaggtgggttagaaactagtgcctatccctcactaagttgccagatggatttaacagcacctcaaagtcaacatgccccaagtcaaagtcttctttacccatggaataagctggcttgctacttccctacatctctgaagggctccaccattcctctagcaaccatgctctcaaagctcagagggaggaaaaggaaatggatctaaatggaattccaggtcccacgctggatattttcacaccttacctcatttaatacaacaagcaaggaggtagacaatattgtctacctttgcaaatgaggaaacagaggcttagagaagttaaataatttgcctgagaataaagctaaaagtagctttaaaatactagagctgggattgcaagtttgatgcaaagtttgtgctctcttcatccttcaccaagatctttcattttccctttaaatatctcttatgtctgcatttcccttccattcccatcactagcactgtcctctaatgccccacccagtggggaagtctccaataggtccccctgcttataacagccaagagggtagctataaactaggtccaataacatgcttcatgtgagggaactgatggacagctgtctaattcataacctctggcctcaacggaatttacagttcagagtccaaaatagcaaggaagtggtgggaagaaggtgagagaaaagggtgggagggtgagagaggggagggaggggaataaggtgtgggcagtagagggaatctgtcagtctcatggtttgccctaggaaaccttctgctcagccccagcctgcttctgggcactcctcctcacccctccttgctgtccatatgggttcaatgtgagtaaccacaattgtagagtgtggccatcttcttctgacatggtcctaaataaacctaactgagtagccagaagaatcacttctaaggtaaacatctgtaaacattggttatatttattttcaatattactggttaacattgtggagctattactgatgggccagactctgtgctaggcacagactttctagggattatttcatttaattctcatggcaaccaccatgcatttgcagataggcaagtcaggctcacaaaaatgtatgcagagcttcagggttgtgatgggtagagccaaacccatctgcccaacccaagggcccgtgcgctccaaccctgcatcgaactgccaacatagtacaccttttagaaaaagattcttgttgcaaaagtaccataggcagtgtgtgtgtaaggtcattgtaaaagtgtagataagcaagaaagtgttataccaccactcagaagtaaccactgttaacatgttggcttatctgctctcaggtgtttctgtgcctgtacatactattcttcttgaataaaaacaggattacacagtgt

SEQ ID NO: 202280 - DNA, 4173 bp, Homo sapiens
  Payload ID: 19900
  Gene Name: zinc finger protein 365
  Uniprot ID: Q70YC5
  ENST ID: ENST00000395254
  CDS Start-End: 281-1504
gttccccgcggaggtggcagccctgggccgcggcgttccggaacccccgcacccacggcgcggtgccccacggtgcccgcgagcgccgcccccgctggctagccgcgcctcgctccgccctggacgccgccggtcccggcgcggaggtgcggcggggagtgggagccggcccggctcagtctgatttacggctctgctgaaaaccgcttcgctcccgcagcatcagcaccggaggcggcggctgcagcagcagcagcaacaagtcgggacttttagagtaatgcaacagaaggcttttgaggaaagcagatatccctggcaggagtcctttgagaatgttgctgtgtgcctgccattacgctgcccgaggtgtggagaccataccagatttagaagcttgtcatccttgagggcccatctggagttcagtcacagctacgaagaaagaaccctcttgacaaaatgcagtctctttccatccctcaaagacacagacctagtcacttcctcagaactcctgaaaccgggaaaattgcagagcagtggcaacgtggtaaagcagaaaccgagctatgttaacttgtacagcatttcacatgaacattccaaggacaggaagccatttgaggtggtggcagagaggcctgtgtcctatgtgcagacctacactgccatggacctccatgcagactcgctggatgggacacggtcgggtcctggactgcccacctcagacaccaaagcttctttcgaggcacatgtcagagaaaaattcaatcgaatggttgaggctgtggataggaccattgagaagagaattgataaactcaccaaagagttggcccagaaaactgcggaactgttggaagttcgggcagcttttgtgcagctgactcagaaaaagcaggaagttcagagacgagagcgggccttaaacagacaggtggacgtggccgtggaaatgatagctgtactgaggcaacgcctgacggaatctgaggaggagcttcttaggaaagaagaagaagttgtcacattcaaccatttcctggaagcggcagctgagaaggaggttcaagggaaagcccggctccaggactttattgagaatctgttacagcgggtagaactggcggagaagcagcttgagtactatcagagccagcaggcctctggctttgtccgtgatctcagcgggcacgtgcttacagacatctcctcaaataggaagcccaaatgcctaagccgagggcacccgcattcggtatgtaaccaccctgatctcaaggcccatttccacccaaagggaaggaaccacctgaaaaaggccaaggatgacagagccagcatgcagcctgccaaggccattcacgaacaggctgagtcctcaagagacctctgcagacctccaaagaaaggggagctcctggggtttggccgcaaaggcaacatcaggcccaaaatggctaaaaaaaagccaacagccattgtgaacatcatctaaaagggtgggtggtgctggaccaatcatcgctgggctttggggaacgttgttccaggagccaacagtaatgtctttctggaaacattccatagtaagacacattggaaaagccaagggcataacacaggcaagcacctcaattaaccagagcttagcaaatgggaatcttagtgaaccagaattttattataacccccttttagaagcttgcaaattacagaaagaataaaaaaattaaatcaatcttaaagctctaacttctaaagtaactggcccagtctccagtaatcttggcatctgggcttctatgcagtggtcactaattttcaggaccaaggccacacaaaatgtcaggcctagggagaaaattcatctgtgcccactgctctccaaagtgcgaggcaaggaatggcagtgtaaagttctgttaatagcagtaaaatgaaaatatttgtgtttgtgtataaccttcccctcagctaatttgaaagcctccaaaataaggattcccattccccgagtattctggttaatcaagatttcaatttctgggttgctcaagggactcgttcagtcagacttcagttctcattccgacagggtgtctttcagttcgtttgtttgattgaggttttttggtggcctagatgcatgtttattcagattttggtacacctctgccgtcttctttggctgagtattctgcacccacagaccatgctgccagcctctatcttaatagctgcttctgtggatatggctggggagcgaagtaaaatcctcttttgattagcacccagcatgggctgggtggctaggtggttggaatgacagtggactgcacgcttggtgcatcgtgcatcgtgaccatcctggaagcactgcgggtgtcgccaagccctttcctaagacctgcttcccggccagtgtcagtggccctctctctctctgctatgggcatgactttctcttcgctggcttaacttttccactgggtggttcactttgcctcctgctgcttctgtgccctgttaagggcttcaggtatctttcaaccaagtatctggagtgttcactctatgttgcattctaaagtaatttctgaaataaacaatgcatgtaggagccagaatctgacactgtcttcccctccttccctccctaaaatggctttagtttccacaaagagctgttaagaatttcctgctgtatgattttcctcaagaatgaatttccatgttattttttccttaaatttagcaatatcatcaggtctcttgcagagtttacaagtgctgacattcttctgaaaacaggaataattttgtccacaaatatatacatatatacatatatataacacatacaaaatatatatgttaagtatattaataatttatttttaaatactcatggagaaagtgtgtgtttgtggtgggtggtttttaaactatatatgtttgttcatgtaaactgaattctcttatttaaaaaatcaaaactgtaacgtaattaacattggcagaattatgattgttactgcaataagcatcaaattagcagcgcattaaaaataggaaataaagcagttgcttaaaatgccagtcaattgaaaagtgtaacttatcattatacaaacattctgaacctaccataatgaaaatgttcttgaatcttcactttgactttcagtttatggggggggtagatcattcatgtgatatataagcagctatcaagtgggcaaaaacattgctgtgaatagcactgtttaggctaacattgtaaaaattgtaatgttataattattatttatttggagaattaacttccccctctaaagttatttattattgatgcttataccatgattgcaccttagccttttacatactaaaaacatgacttgttagttgtattgcatgctctttgtcctgtaatgtgtgtgcaatgacaacttgtttctgttttatttaaagtaactgacattttggattttcatctaacatagagggcatggcaactctctttgacagtggtaccccatgatcttcagaaagtaccataatgtcatcctactctacatttcacaagacgaattattttgagatttgtttattatattaaaatgtttttttacgttcccactaaattttgaccccatataaagaaatgtgttatgtatgttgtgcctccttagagacataaatttagtgtcaaaacatgggagatggcttactcagaagcatactccacttaacataccatggcctgagctaagtaccatgtcctgtttgtgtcttatttttaaatattttctttgtccacatgggccgttgaccttagagttaaggcggttgcttttttgaagaaatcaccaaagtttctgggaaactatgttcaaggttgaaatggagagtagatttaattttatttgtcttgtagggaagaaatcttcctttgaaccgcttttcttgctttttccctttttcccaaactaggttacaggttcttatctgcaaggttcaagttgcttagacattgttttccagtattctgcagggccagtcagttgtacagaagttggaatattctgttccagaattaaagaagtttttagattatgaaatattatgataataaagctatatttctgactaatgtgttga

SEQ ID NO: 202281 - DNA, 1674 bp, Homo sapiens
  Payload ID: 19900
  Gene Name: zinc finger protein 365
  Uniprot ID: Q70YC5
  ENST ID: ENST00000395255
  CDS Start-End: 281-1282
gttccccgcggaggtggcagccctgggccgcggcgttccggaacccccgcacccacggcgcggtgccccacggtgcccgcgagcgccgcccccgctggctagccgcgcctcgctccgccctggacgccgccggtcccggcgcggaggtgcggcggggagtgggagccggcccggctcagtctgatttacggctctgctgaaaaccgcttcgctcccgcagcatcagcaccggaggcggcggctgcagcagcagcagcaacaagtcgggacttttagagtaatgcaacagaaggcttttgaggaaagcagatatccctggcaggagtcctttgagaatgttgctgtgtgcctgccattacgctgcccgaggtgtggagaccataccagatttagaagcttgtcatccttgagggcccatctggagttcagtcacagctacgaagaaagaaccctcttgacaaaatgcagtctctttccatccctcaaagacacagacctagtcacttcctcagaactcctgaaaccgggaaaattgcagagcagtggcaacgtggtaaagcagaaaccgagctatgttaacttgtacagcatttcacatgaacattccaaggacaggaagccatttgaggtggtggcagagaggcctgtgtcctatgtgcagacctacactgccatggacctccatgcagactcgctggatgggacacggtcgggtcctggactgcccacctcagacaccaaagcttctttcgaggcacatgtcagagaaaaattcaatcgaatggttgaggctgtggataggaccattgagaagagaattgataaactcaccaaagagttggcccagaaaactgcggaactgttggaagttcgggcagcttttgtgcagctgactcagaaaaagcaggaagttcagagacgagagcgggccttaaacagacaggtggacgtggccgtggaaatgatagctgtactgaggcaacgcctgacggaatctgaggaggagcttcttaggaaagaagaagaagttgtcacattcaaccatttcctggaagcggcagctgagaaggaggttcaagggaaagcccggctccaggactttattgagaatctgttacagcgggtagaactggcggagaagcagcttgagtactatcagagccagcaggcctctggctttgtccgtgatctcagcgggcacgtgagctggaaaggtgctggcgaagctcgcctggtgtgccaaaatgacctggaattggaggagtctgcgattgtggaataatgaacttcgaatgatgtgattctggatgaggacttggatcaagagaatcgcaaattaattgtgccagagaagctttcattcattcaacaaatatttattaagcatgttttacactccaggaactttacaagaaacttgggctacttggtgactttactcaccaggagtgggttcagactcctgatggatgagctccaggtcctccctaacaagactgcagacttcctgagggcacagcccacccctcatgctttgagtttctcatataacccatcatagcaagtagaagatgcttcagaacatttgtccctatgagatagagtcatattctatttagcttgggacatggcaggtactcagttgttaaataaaaaatagttattgagtaattt

SEQ ID NO: 202282 - DNA, 3379 bp, Homo sapiens
  Payload ID: 19900
  Gene Name: zinc finger protein 365
  Uniprot ID: Q70YC5
  ENST ID: ENST00000410046
  CDS Start-End: 281-1669
gttccccgcggaggtggcagccctgggccgcggcgttccggaacccccgcacccacggcgcggtgccccacggtgcccgcgagcgccgcccccgctggctagccgcgcctcgctccgccctggacgccgccggtcccggcgcggaggtgcggcggggagtgggagccggcccggctcagtctgatttacggctctgctgaaaaccgcttcgctcccgcagcatcagcaccggaggcggcggctgcagcagcagcagcaacaagtcgggacttttagagtaatgcaacagaaggcttttgaggaaagcagatatccctggcaggagtcctttgagaatgttgctgtgtgcctgccattacgctgcccgaggtgtggagaccataccagatttagaagcttgtcatccttgagggcccatctggagttcagtcacagctacgaagaaagaaccctcttgacaaaatgcagtctctttccatccctcaaagacacagacctagtcacttcctcagaactcctgaaaccgggaaaattgcagagcagtggcaacgtggtaaagcagaaaccgagctatgttaacttgtacagcatttcacatgaacattccaaggacaggaagccatttgaggtggtggcagagaggcctgtgtcctatgtgcagacctacactgccatggacctccatgcagactcgctggatgggacacggtcgggtcctggactgcccacctcagacaccaaagcttctttcgaggcacatgtcagagaaaaattcaatcgaatggttgaggctgtggataggaccattgagaagagaattgataaactcaccaaagagttggcccagaaaactgcggaactgttggaagttcgggcagcttttgtgcagctgactcagaaaaagcaggaagttcagagacgagagcgggccttaaacagacaggtggacgtggccgtggaaatgatagctgtactgaggcaacgcctgacggaatctgaggaggagcttcttaggaaagaagaagaagttgtcacattcaaccatttcctggaagcggcagctgagaaggaggttcaagggaaagcccggctccaggactttattgagaatctgttacagcgggtagaactggcggagaagcagcttgagtactatcagagccagcaggcctctggctttgtccgtgatctcagcgggcacgtgagctggaaaggtgctggcgaagctcgcctggtgtgccaaaatgacctggaattggagatttttggccatataaaccaccatctttcggggttgaaagattctcattgtctagtttttctgcaagccccacctgtgccctggatcattttagccagctttctctggattctcggaaatccctggacgtcttccacggctactgcaggatttagccaaatttgggtgctatttcccttttgtggagggacttttcatcacaatgagaaggacgtcttaggactccaggactttgagagagaaagtgtctctacaagtcaaagcaggaatatcagccttcttacactaggacaactccaaaattgtgtgattggcaaattgacaatcatcgatttgttgactgaacacctgttaggtgtaaggcacggtgtcatatgctttccttggggcttgccttcaagcagctaacagaaataagaagaaaacaggtgaaaaagacagtgtgataaggccatggtggtggattgtggatgccctgccctgtatccacttgggagagagcctctacaacatgctggcaacttccccctcactgattcaaatgttaatctcctttggcaacaccctcacagacacacccaggatcaatacgttgtatcctttgatccaatcaagttgccactcagtattaaccatgacaccttctaagccatcatctcctcctaatcctcccataacaatgggtataagttatgaaggtgggttagaaactagtgcctatccctcactaagttgccagatggatttaacagcacctcaaagtcaacatgccccaagtcaaagtcttctttacccatggaataagctggcttgctacttccctacatctctgaagggctccaccattcctctagcaaccatgctctcaaagctcagagggaggaaaaggaaatggatctaaatggaattccaggtcccacgctggatattttcacaccttacctcatttaatacaacaagcaaggaggtagacaatattgtctacctttgcaaatgaggaaacagaggcttagagaagttaaataatttgcctgagaataaagctaaaagtagctttaaaatactagagctgggattgcaagtttgatgcaaagtttgtgctctcttcatccttcaccaagatctttcattttccctttaaatatctcttatgtctgcatttcccttccattcccatcactagcactgtcctctaatgccccacccagtggggaagtctccaataggtccccctgcttataacagccaagagggtagctataaactaggtccaataacatgcttcatgtgagggaactgatggacagctgtctaattcataacctctggcctcaacggaatttacagttcagagtccaaaatagcaaggaagtggtgggaagaaggtgagagaaaagggtgggagggtgagagaggggagggaggggaataaggtgtgggcagtagagggaatctgtcagtctcatggtttgccctaggaaaccttctgctcagccccagcctgcttctgggcactcctcctcacccctccttgctgtccatatgggttcaatgtgagtaaccacaattgtagagtgtggccatcttcttctgacatggtcctaaataaacctaactgagtagccagaagaatcacttctaaggtaaacatctgtaaacattggttatatttattttcaatattactggttaacattgtggagctattactgatgggccagactctgtgctaggcacagactttctagggattatttcatttaattctcatggcaaccaccatgcatttgcagataggcaagtcaggctcacaaaaatgtatgcagagcttcagggttgtgatgggtagagccaaacccatctgcccaacccaagggcccgtgcgctccaaccctgcatcgaactgccaacatagtacaccttttagaaaaagattcttgttgcaaaagtaccataggcagtgtgtgtgtaaggtcattgtaaaagtgtagataagcaagaaagtgttataccaccactcagaagtaaccactgttaacatgttggcttatctgctctcaggtgtttctgtgcctgtacatactattcttcttgaataaaaacaggattacacagtgt

SEQ ID NO: 202283 - DNA, 489 bp, Homo sapiens
  Payload ID: 19900
  Gene Name: zinc finger protein 365
  ENST ID: ENST00000421210
  CDS Start-End: 331-489
ttgcaggcttaatgccactgtgcatagcttgagtaatctttcctgtacttgaggataggtcctgagcttgctgtcttaggacccattttgacaattcatgtgagttttcatatgttcttgtgttcacgcatctcggattgtatccttaaaatggggcacggttttgcatttagtgtgccaaattcaggaggggaggaaacttgaattccacttctggatctaccactttccatctgaccttggattaatggctttacttccttgcttcagtgttctcttctgtggagagggaatgttacccacctttttgattctaggacttttagagtaatgcaacagaaggcttttgaggaaagcagatatccctggcaggagtcctttgagaatgttgctgtgtgcctgccattacgctgcccgaggtgtggagaccataccagatttagaagcttgtcatccttgagggcccatctggagttcagtcacagctac

SEQ ID NO: 202284 - DNA, 877 bp, Homo sapiens
  Payload ID: 19900
  Gene Name: zinc finger protein 365
  Uniprot ID: Q70YC4
  ENST ID: ENST00000614806
  CDS Start-End: 154-804
ctgggtcaaagggtgaagtagaaggaagctggaaacacatagtattttagaagtttttcagagaaatcacaaggcaggaacttctgctcagtttggaagaaagagcattccatcatgacccttggactgggtgagagcatcatcctttaattaatgtctgcgctgggtcagataaccatcactgtctccaggtgctggaatacagagaggaaccaaacagataaaaatccttgcctgcacggagcttaccttcagctaagggagacagtcaaaaacaagtcaacacatctaaagaagccactgatgaaacaggctcccccttggaaagaccatctcaccttccaacctctccatcctgcagagaggaaaacccaagtttggcgttggcagtcaggtaattcatcagatctggaaaccacctcatcagcatccccctggccaactggaagcaaccgtgacgttgtgctgaatacacttgcagagtcgtgctgtggtctctccgagctcatcacggcacctccctatgcaggagtttcaattcaaggatttagccaaatttgggtgctatttcccttttgtggagggacttttcatcacaatgagaaggacgtcttaggactccaggactttgagagagaaagtgtctctacaagtcaaagcaggaatatcagccttcttacactaggacaactccaaaattgtgtgattggcaaattgacaatcatcgatttgttgactgaacacctgttaggtgtaaggcacggtgtcatatgctttccttggggcttgccttcaagcagctaacagaaataagaagaaaacaggtgaaaaagacagtgtgataaggccatggtggtggattgtggatgccctgccc

SEQ ID NO: 202285 - DNA, 3830 bp, Homo sapiens
  Payload ID: 19901
  Gene Name: zinc finger protein 366
  Uniprot ID: Q8N895
  ENST ID: ENST00000318442
  CDS Start-End: 492-2726
ataccagaggctgcaggctcaggagagcctgcctgtctggaacaccgtttgtttggacaggacaggccactaaggcgtttcatctctttaaagctcccagggcagagaacatatttgaggaattccttttttcaaagattttttttttttgccccttccaacattttgtttaagagaaaatgagatgtctatcttctgtttccttattttttttcaggaaagcaaagggttgttgacttcctccctctcccctcccttccttccttcttcccgaaggtactcatctgagaaaaagagaacgaagtattgttcctgttctctttcttaagtcattcgaaacactgtccctgcgagttctttaagttccctgcaatctgtacacaagagaaagagggagagagagagggagagagacagagagagcagggatcaggtaaaggagtggggctgctgcagccattcagacctcaggagctggaaaattgccaaggatgcagaaggaaatgaagatgatcaaagacgaggatgtgcatttcgacttggctgtgaagaagaccccctcctttccccactgcctgcagccagtggcttctcggggaaaggctccccaaagacaccccttcccggaagctctccgagggccattttcccagtttcggtatgaacctcccccaggagacctagatgggttccccggggtcttcgaaggagcagggtctaggaaacggaagagcatgcccacaaagatgccctataaccaccctgcagaagaagtcaccctcgccctccactcagaggagaacaaaaaccacggccttcccaacctccctttgctgttcccgcagcccccgcgccccaagtatgactctcagatgatcgacctgtgcaacgtgggcttccaattctaccgcagcctggaacactttgggggcaagcccgtcaagcaggaacccattaagcccagcgccgtgtggccccagccaacgcccactccattcctgcccacgccctacccctactaccccaaagtccacccgggcctcatgttccccttcttcgtgccctcgtcctcgcccttccccttcagccggcacaccttcctgcccaagcagcccccggaacctctgctgccccggaaagccgagccccaggagagcgaggagaccaagcagaaggtggagagggtggacgtgaacgtgcagatcgatgacagctactacgtggacgtgggcggctcgcagaagcgctggcagtgccccacctgcgagaagtcctacacctccaagtacaacctggtcacccacatcctgggccacagtgggatcaagccgcacgcgtgcacgcactgcgggaagctcttcaagcagctcagccacctgcatacccacatgctgacccaccagggcacgcggccccacaagtgccaggtgtgccacaaggccttcacccagaccagccacctgaagcgccacatgatgcagcacagcgaggtgaagccgcacaactgccgcgtgtgcggccgcggctttgcctaccccagcgagctcaaggcccacgaagccaagcacgccagtgggcgcgagaacatctgtgtggagtgcggcctcgacttccccaccttggcccagctgaagagacacctcaccacgcaccggggccccatccagtacaactgctccgagtgcgacaagaccttccagtacccgagccagctgcagaaccacatgatgaagcacaaggacatccggccctacatctgctcagagtgtggcatggagtttgtgcagccgcaccacctcaagcagcactccctcacccacaagggtgtgaaggagcataagtgtgggatttgtgggcgggagttcaccctgctggccaacatgaagcgacacgtgctgatccacaccaacatccgcgcctaccagtgtcacctctgctacaagagcttcgtgcagaagcagaccctcaaggcacacatgatcgtccactctgacgtgaagcctttcaaatgcaagctttgtgggaaggaattcaaccggatgcacaacctgatgggccacatgcacctgcactcagacagcaaacccttcaagtgcctctattgcccaagcaaattcaccctgaaggggaacctgacacgccacatgaaagtcaagcatggagtcatggagcggggccttcattcccaaggtctgggaagggggagaatcgccctggcacagacagccggtgtcctgaggagtctggagcaggaggagccctttgacctctctcagaagcgccgggccaaggtgccggtgttccagtcagacggggagagtgcccagggcagccactgccacgaggaggaagaggaggataactgctacgaggtggagccctacagccctggcctggccccccagagccagcagctctgcacacccgaggatctgtccaccaagtcggagcacgcccccgaggtgctggaggaagcctgcaaggaggagaaggaggatgcatccaagggagaatgggagaagaggagcaagggtgaccttggggcagagggcggccaggagagagactgtgccggcagagatgagtgtctcagtctcagggcttttcagagtacccggcggggcccctctttttctgattacttatacttcaagcacagagatgagagtttgaaagaattactggagaggaaaatggaaaaacaagcagtgcttttaggtatctaagtggacagttttaaaattacatttggaaaatgagaaggaggcagttcaaatatagctttctgcatgaactgtcattttctggagactggcgaatagtaccaatctctacaaatggcttagactaaatgagcagggatgtaggtaatggaaagccttctcaggtcattcacggggcccttgatacccttcacacatgtgcagggtcttcatcagtggcgttttatgcattgccagtataataaactgtgagtattcttccagatatctaattgtaagctgatgctgaggtgcttttagaaattctactttcctttgattcatatgcaatacatggtaaatttctaattgcaaaaatatggtgcttgaggtgtcaccttattaataactatttaggtgaatttgtgaaggttataatattttccatatagatgaaaatattagtcgtcatatatataaaaatagcctttattctataaccaaaaatgtcagaaatggcacaggaggatgagctattgaagagaatgctctccagtagttgctgcagatataaggtaaaatttcaggagaagaataattttgactaagggaaactggtgacctagaatacttagattctcttgttctgtgtcggctgtcttcatcagattgagcatttggagcattatttttcagatgatatgatgatgtttggggccctggctcctcagacaaaccctcacttctcgagcacggctccctcctggagaccattgctgtcttgctctgaggcctcatgccccataagacagatgcaggggccgggcgcagaggctcacgcctgtaatcccagcactttgggaggccgaggcaggcagatcacttgaggtcaggagtttgagaccaacctggccaacgtggcaaaaccccttctctactaaaaatacaaaaattagccaggcatgatggcaggagcctgtagttccagctactcgggaggctgaagcaggagaatcgtttgaacccaggcagtggagattgcagtgagctgagctgagatcacgctactgcactacagcctgggtgacagagtgagactctgcctcaaaaaaaaaaaaaaaaaaaaaa

SEQ ID NO: 202286 - DNA, 494 bp, Homo sapiens
  Payload ID: 19901
  Gene Name: zinc finger protein 366
  ENST ID: ENST00000414109
  CDS Start-End: 303-494
cgaaacactgtccctgcgagttctttaagttccctgcaatctgtacacaagagaaagagggagagagagagggagagagacagagagagcagggatcaggtaaaggagtggggctgctgcagccattcagacctcaggagctgagatgaggaaactacagctcagacagagtaaaggattcggctgaagtcctatagctccacggatcttcagggaggtccttgatctgagaagtctggaatccgctgaagtagaccaaagctagggctcactaacaagttgcagaaggaaaattgccaaggatgcagaaggaaatgaagatgatcaaagacgaggatgtgcatttcgacttggctgtgaagaagaccccctcctttccccactgcctgcagccagtggcttctcggggaaaggctccccaaagacaccccttcccggaagctctccgagggccattttcccagtttcggtatgaacctcccccaggagaccta

SEQ ID NO: 202287 - DNA, 549 bp, Homo sapiens
  Payload ID: 19901
  Gene Name: zinc finger protein 366
  ENST ID: ENST00000514477
  CDS Start-End: 202-399
agttccctgcaatctgtacacaagagaaagagggagagagagagggagagagacagagagagcagggatcaggtaaaggagtggggctgctgcagccattcagacctcaggagctgagatgaggaaactacagctcagacagagtaaaggattcggctgaagtcctatagctccacggatcttcagggaaaattgccaaggatgcagaaggaaatgaagatgatcaaagacgaggatgtgcatttcgacttggctgtgaagaagaccccctcctttccccactgcctgcagccagtggcttctcggggaaaggctccccaaagacaccccttcccggaagctctccgagggccattttcccagtttcgcccccgcgccccaagtatgactctcagatgatcgacctgtgcaacgtgggcttccaattctaccgcagcctggaacactttgggggcaagcccgtcaagcaggaacccattaagcccagcgccgtgtggccccagccaacgcccactccattcctgcccacgccctacccctactacccca

SEQ ID NO: 202288 - DNA, 3646 bp, Homo sapiens
  Payload ID: 19902
  Gene Name: zinc finger protein 367
  Uniprot ID: Q7RTV3
  ENST ID: ENST00000375256
  CDS Start-End: 298-1350
gcgtcctgctttcctgtcaccgcaagggccgggccgcccgctgcttcccacccctgcagcctgcgctgcggagtacaaagagcggagggcgcgcttgacctggggctggggtccagccctgcccgccggtgccgtctgctcaactagttaggtggctgctgcgcaggattccgggaaacgtcagtctgccatgagccggcaggactgagcctgcgactcggagcagagcgagtgaggggcagagcggtgctcaggagtgcggcccggggccgccggagctgggggtcgggccgggcgatgatccggggcttcgaggcgcccatggcggagaacccgccgccgccgccgccgcccgtcatcttctgccacgactccccgaagcgggtgctggtgtcggtcatcaggacgaccccgatcaagccaacgtgcggcggtggaggggagccggagccgccgccgccgctcatccccaccagccccggcttcagcgacttcatggtgtacccgtggcgctggggcgagaacgcacacaacgtgacgctcagccctggggccgcgggggccgccgcctcggccgccctgcctgcagccgcagccgccgagcactcggggcttcgtggccggggcgcgcccccgcccgccgcctcggcctccgccgccgcctcgggaggtgaggacgaggaggaagcgagcagcccagacagcggccacctcaaggatggaatccgacgtggtaggcccagagcagatactgtccgcgatttaataaatgaaggagagcattcatccagcagaatccgttgtaacatctgtaatagggtgtttccacgggagaaatcgctccaggctcacaaaaggactcatacaggtgagaggccctatctgtgtgactatccagactgtggaaaagcctttgttcaaagtggacagctcaaaacacatcagcgtcttcacaccggagagaaaccttttgtttgttcagaaaatggctgcctgagcagattcacccatgcaaaccgccactgtccgaagcacccctacgccaggctgaagagagaggagcccacggacacactcagcaaacatcaggctgccgacaacaaggccgcggccgagtggctggcgaggtattgggaaatgagagagcagcgcacccccactttgaaaggcaagctggttcagaaggctgatcaggagcagcaggaccctctggaataccttcagtctgatgaagaggacgacgagaagagaggggcccagcgccggctgcaggagcagcgggagcgcctgcatggagccctcgcgctcatagagcttgccaacctgactggggcgccactccgacagtagcttggacactgactcttccactgtacaaaagtactgcccagcatacttaaaaagtagatccttgggcataagctaagcaccttatttgcttatcataggctgctattctgtagaaatttatgaagaatgttattgccccagaatatggggtgagagagaactgcacttttttaatatggaaatgaattcatcgtaaagtttaaaatattttgtaaatatggactgcacagtacagggtagaaaactacatattgtgggaagctagattttgcaagtttaatgcattcattggaagcagttctcacaggaagcactttctgaataagacacttgtttgaaaaacagaatggtacaaatagccaaagaagattaaaacagattatttataagatcatttttaacaatatatattagtatgtttaacaatactgtaaacactgaagcaagcaagaaagtataaaatatgtaagatagataattttaattgcaaaatactgtgcccactaaggctagagaaatgggaggctattttggaagatgttctaagtaatggacttagaagaaaatagatatttgaggctcttggtaagatgcacaatagttcagaatttttgaaattggagcaaaatcagtcttattctatctggggctttacaactcagtataatgtttaagtttgaaaagcacttgtcatccctagcatgttaacttgggaacttttgcacatttcatatttctcatttgctgaaattgagtgattaatcttgcaaagtctaggtaacatagtaattggtaattttaaaaatacatattaagggccctgtaatgagatttggcacttggatttttactaaagggacacctgcagggttgttttgtagtgaaatgttttagatcttttgttagcaaacactacattttaattgtactgcttgtttagaattattagcaaatggaagcctccatatttatattttcagtgcataaagccaccttcttgctttacttcagagtaacatgccaagctattttgtgttcactaaatttagctatcagttaaacactgcagaaaatattagctactcaaataagtaggcttctgaaatagttttaactgcaagtgtgttaacttgtgtggtggtttgaagccatttttccaaataaagttattaaacaccactttatgtactgaagcatgaacagaaaaatcaagagctgagcagaccacctcctttatgtaggcaaaacttccatcattttggcttttgttctaaacagaactaaatgacatgcatagcatggtaacttacagatcgcttaattggagtaaaactcagagtaatagagggaaatatgggctcttcagtgcctttttagcttttttgagttgaagacgttcctacagatgtagtttaaacattacaaagtaggcttctttatccaaaaatcccaatgtgtcatagtacacagatagtttaaaatatgtagccacggggaaggggaggcatgtaaatgtcttgaagaggagaaaaagtatgaaagaagatacgatagttacgaataatgtgtatgatgaggacatactttaaaaatgtaattcctctgtacagtaaattacaaatctttagggatttttttgtaataagagaatttatatttgtaatggtctaagaatttttttgtaatgtggtatatagaattttaatttggagcacttataagctggtaagagagactatagcatctgaattatcttggtttatgtttcagcatttcctctagaatttttgctctcaaatatgtgatttaatgaactaaaaacaacactcatcagtcttgggaaatttgaactttgatcaacttaactaaagaaggaagggtagtaagaatttttcaaatacaaatatttgccaattcacagatgataacatttaaggccttcaaaagtaagggtttttccttgtttctccagtcagcttttgtcaactctaatagttttttcataaacattttttatttgtataattgcaacagtttaagaaattatcacaactatttagaaacatttaaaatgttctttttgatataagctatatacttggaaaaatacattggtatctaaaatttgaggtgtgttaagactgctttttgttttaaaaaatggtttacattcaaatttttgaagtgttttatgcttcatatggctaagttgtagtttggcagagttaacagcataagaataaacatgctgtaattttaaaagatgctttgaataaaaatttattttaatttaaaa

SEQ ID NO: 202289 - DNA, 7027 bp, Homo sapiens
  Payload ID: 19903
  Gene Name: zinc finger protein 37A
  Uniprot ID: P17032
  ENST ID: ENST00000351773
  CDS Start-End: 831-2516
ggagatgtagtgtgcacttttcggcccccgtcgcgggagccgcttcgggccttctgggcatgtctgccatatggctccaggtttgtttttctccccggcactctgacggggagggctcccggcatctcctggcgtccgggtagaggacgcggagggtcgcagcttcattgcctgatgtcttcgggaagtattttgaagtcatcgtggctgtggattggggaatttcttgtttccactgacctgtgaggccgcgcacgcggagggaggcaccccaggccctccggcactgtccagcctcgcctgtgtccccattagcaccagtgggcattttcagagggtccagctcatggctcaagtgacaggaagatgtaggagctttctgtcttgaatgaggattcgaaccaaagggcttaggcccagctgtcttggagcaaagcagctgttgtgggacccccacaggctgggagctttgtgcccattcagatgtgggggcagaagagggcaaggccgaaggagcagacagcaccgcttcttggggagttgtgaaggcatcatgcggagggaagagcttagcagccaagtggaggacagcaccctccatgcctggattcgttactcgctcgttctagatgctgagctgctggcgcactgcagcacaactagagatgtacggatgcccccatcttgatcttacagaatcagaggtacagccgcgagaaaggtctagtcaagaacagacagagtcgcttgaggactcaggagggtgtttgctgcgttgacaacagactacaccctcacagtttgctctgctcttccaacaccagtggaagatgatcacatcccagggatcagtgtcgtttagggatgtgactgtgggcttcactcaagaggagtggcagcatctggaccctgctcagaggaccctgtacagggatgtgatgctggagaactacagccaccttgtctcagtagggtattgcattcctaaaccagaagtgattctcaagttggagaaaggcgaggagccatggatattagaggaaaaatttccaagccagagtcatctggaattaattaataccagtagaaactattcaataatgaagttcaatgagtttaacaaaggtggaaaatgtttctgtgatgaaaagcatgaaataattcattctgaagaggaaccttctgaatataataaaaatgggaacagcttctggctgaatgaagacctcatttggcatcagaaaattaaaaattgggaacaatcttttgaatacaatgaatgtgggaaagctttccctgagaattcactcttccttgtacataagagaggttacacaggacagaaaacctgcaaatatactgaacatgggaaaacctgtgatatgtcatttttcatcactcatcagcaaacacatccaagagaaaaccactatggtaatgaatgtggagaaaatatctttgaggaatccattctccttgaacatcagagtgtttacccattcagccagaagttaaatctcactccaattcagagaacccactcaattaacaatattattgaatataatgagtgtggaacatttttcagtgaaaaattagtccttcatttacaacagagaacacatacaggagaaaaaccttatgaatgtcatgaatgtggaaaaaccttcacccagaagtcagcccacacaagacatcagagaacacacacagggggaaaaccctatgaatgtcatgaatgtgggaagaccttctataagaattcagacctcattaaacatcaaagaattcatacaggggagagaccttatggatgtcatgaatgtgggaaatccttcagtgaaaagtcaacccttactcaacatcaaagaacgcacacaggggagaaaccatatgaatgtcatgaatgtgggaaaaccttctcatttaagtcagtccttactgtgcatcagaaaacacacacaggggagaagccctatgaatgctatgcatgtgggaaagcctttctcagaaaatcagacctcattaaacatcaaagaatacacacaggtgaaaaaccttatgaatgtaatgaatgtgggaagtcattctctgagaagtcaacccttactaaacatctaagaactcacacaggtgagaaaccttatgaatgtattcagtgtggaaaatttttctgctactactccggtttcacagaacatctgagaagacacacaggggagaaaccttttggatgtaatgaatgtgggaaaaccttccgtcagaagtcagccctaattgttcaccagagaactcatataagacagaaaccctatggatgtaatcaatgtggaaaatcattctgtgtgaagtcaaaactcattgcacatcatagaacacacacaggggagaaaccctatgaatgtaatgtttgtggaaaatcattctatgttaagtcaaaactaactgtacatcagagaatacacttggggagaaaccctataaatgtagtaaacgagggaaattactctgggtgaagtcagaactttgtagaacacagaacataaagggtgagagaaatctgttaatataatgataatgagaacacctttgccctgaagtcagttctcacagtatagaagagaacttaaagagggaaaaaacaatatgaagatagggaatgcaggaaaacattattctggaatttggaccatacactatgttacaaaactaaaagtggaaaaaacttattggtgaatgaatataggaaacattttgcccaatgccactcttcattaaacatcagagaattcacacggggtgaaacctgggtcagcatccctaggttgagaagggatgcatttttctgctactactacagtttcacagaatacctgagaagacacacttggagaaaccttttgggtgtaatgaatgtgggaaaacctttcatcagaagtcagctctaattgttcaccacagaactcatataagacagaaaccctatgggtgtaatgaatgtggaaaatcattctgtgtgaagtcaagaggccagagaaaatgcacaaactgtaggaaactataggaaagcatttactatgaggttatattttatggagtatatgtaataagaagtagcttctcagtgaacatcagatagtagagaaagtatttttaactgtatccaatgtgtggatgttttaagttaaaatctaaatttaatatagaacagaggtgttgagttgcaggatatctagcaatttaagaaaatgtggaaaaaatatttttattgagaaatagcattttactttgttaatatctagtttagttcattgtcaagactgctattttctaagagacttctaaagacgccactcaagccaatggctataagtagttcaaaggtttattgcttagccatatgaaaaataagggaagattttttagcaaggggacccacaaacaagagtgctcttgtatgtccagaagaaagagaaagaccatcaatcaggggccatagtacaggagcccaccagcaggatttttgaataatcctagggcagactaaattcagacgacccatctcagaatggtggatcaaagcagcaagtcaatttgccttgtatgcaacttatgaggattagtagaagagagtgggtccagatttctggtggtttctgccctgcagatgtctaacacataagccaggacattctgctgtgagtgacttattgtacccaactctatttctctccatactgaaacatgtctttcataggtgatacaactttttaaaatgtatgtgtagatataacttaaatatggagctttcaaaaagcacaaataggctggacatggtggctcatgcctgtaatcccagtactttgggaggctgaggtgggcaaatcacctgaggtcaggagttccagaccagcctggccaacatgatgaaaccctgtctctactaaaaatacaaaaattagccgggcatggtggtgcacatcggtagtcctggctactagagaggttgaggtgggaggatcacttgaacctgggaggtgggggtttcagtgagctgagatcatgccactgcactccagcctgagtgacagagagagattcaaaaaacaaaaaaaaagcaaaaatatactttgctattgggtaaggtatagtagttggcagcagaatggacccattgaggataactataaaattacagaaaatatttaaatgcaacttattgctatagaagcaaagaggactaaagggcaaaattctagagagtggtaaatctcagaaagcacaagcataaaatgcagctctgggggccctttccacttctggctatagggaagaacctgaatactgaacttgattcaggcagaggaccataacctgggggtcaggggaaggcatgggggggaccagaaaccagaagaacaatcaagactgcaatgaaaaaaatggatacattaggagcttcaaacacatataatttctcaagaaatttccagatgtctcatgctgcatagggcaggagcctgaaaagctaatttgagaagataataagtaggatttttgttttgttttgcattttgcagtacaaaggagaaatgattagaacttaggaagtgccagtgggttggtgaacatgccatcagtaaaagccctggaaacaaggtcatactagagattggttgtgccttgtcacaactgcaaacaatacctgagtggagtattcaaaaacttgcttagaaagaaaactctaggaacagatggcttcactgaagttattccaaatatttaagaaataataccaggcttttataaacttttctagaagaaaaaagatggaacttttccaattcagtttttgaggccagtacaaccttgataacaaaacctaaaaaaaaaacaacaaaaaaacccataaagctatagaccaaagtctcatagatttagatgcaaaatcctaaaattgaaaaaaacatctagccatatccataaactatatcatcaccaagagatgtttattagggcaatcaaaagatttattattttaaaaaaatcagtgtggacttccattcctctttcttttgattcccccctttgacttttcatgtatctctcctgccttccttccccagagtggaggagttagacttgcctcgtgggatgagaggagttgtggctttgtgtctgctggcaccaagagggctgagggtgaggtgtggaagggacagggggaggagatgggcagcattgttgagagattggtaacactgagcaaataaatatgttgagaatgatgacagcaagatttctccattagagaaggtatttataaaaataggaatgaggagagctagaaaacctggagtgtggcattagaatagaactcatatcttttaaatatataggaacaaataaataaattgttgtgtgtgcacatatgcatatattttgtgttcattctactgagaggacctaaacacaatgacacctcagtaacagtaagcacaccaactgccaagttattagttcctaaatactatccacaaaaaaggggaacagggatgattcctagtcagagattgggagaaatacaagatgagcctgaatcatctcatgtacctgacagtaagaaaatactctggctggtctcagtggctcatgtctgtaattctagcatgttagaaggtcaaggtgggtgggttgcttgagctcaggagtttgagaccagcctgggcaacatggcacaattgtctctacaaaaaatacaaaaattagccaggcatggtggcatgcacctgtagtccgaggtactcaggaggcagagacgtgggaggatcgcttgagcctgggagattgaggctgcactgagctgtgatcgtgccactgtactctagcctggaagacagagtgagaccccatctcaggaaaaaagaaaaaaaaaaagatgtcattcagcaggttaatggataaactgtggaacatccagaaaactttaacattcttcaaagaaatagaaaacacaatcctaaaatttatatgggaaccacaaaagacttagaatagtcagctatcctgagcaaaaggaatcaaactggaggaatcatattacctgacttccaattattcaacagagctacagtaaccaaaacagcatgatactggcataacaacagacacataggaacagtatagacaacccagaaacaaattcatacatctatggtgaccacttttgacaaaggaatgaagaacatacactggggaaaagataatgtctttaataaatggtgctgggaaaactggatatccatatgcagaagaatgaaactagacccccatctcttagcatatacaaaaatcaaaattaattaaaaagttaaatctaagacctcaaactatgaaacagctaaaagaaaacatcggggaatctctccaggacattggagtgggcaaagatttcttgtgtaatacctgacaaacaggcaaccaaagcaaaagtggacaaatgggatcacatcaagttaaaaatcttctgcattgcaaaggaaataacaaagtgaagagacaacccatagaatgtgagataatatttgcaaactatccatctgtattaggccatttttgaagtactacaaagaaatacttgagactgagtaatttataaagaagaggtttaattggctcacggttttgcaggctgtacaggaagcatggtgctaacatctgatcagcttgtagggaggcatcaggaagtttccaaccatggtggaaggcaaaaggggaataagtatctcacatggcaggtgcagggcaaagagaggggggaagggaagtgccacacaaccagatcttgtgagtactcagattttgtgaggggtgcttgaggtcatggatacccatttaccctgatgtgtttatacacatttcatacctgtattaaaatatctcatgtaccccataaacatatacacctactttgtacccacaaaaatttaaaaataaagttaatttcaatgtttaaagacttgttatt

SEQ ID NO: 202290 - DNA, 8738 bp, Homo sapiens
  Payload ID: 19903
  Gene Name: zinc finger protein 37A
  Uniprot ID: P17032
  ENST ID: ENST00000361085
  CDS Start-End: 346-2031
gtgcacttttcggcccccgtcgcgggagccgcttcgggccttctgggcatgtctgccatatggctccaggtttgtttttctccccggcactctgacggggagggctcccggcatctcctggcgtccgggtagaggacgcggaggatgctgagctgctggcgcactgcagcacaactagagatgtacggatgcccccatcttgatcttacagaatcagaggtacagccgcgagaaaggtctagtcaagaacagacagagtcgcttgaggactcaggagggtgtttgctgcgttgacaacagactacaccctcacagtttgctctgctcttccaacaccagtggaagatgatcacatcccagggatcagtgtcgtttagggatgtgactgtgggcttcactcaagaggagtggcagcatctggaccctgctcagaggaccctgtacagggatgtgatgctggagaactacagccaccttgtctcagtagggtattgcattcctaaaccagaagtgattctcaagttggagaaaggcgaggagccatggatattagaggaaaaatttccaagccagagtcatctggaattaattaataccagtagaaactattcaataatgaagttcaatgagtttaacaaaggtggaaaatgtttctgtgatgaaaagcatgaaataattcattctgaagaggaaccttctgaatataataaaaatgggaacagcttctggctgaatgaagacctcatttggcatcagaaaattaaaaattgggaacaatcttttgaatacaatgaatgtgggaaagctttccctgagaattcactcttccttgtacataagagaggttacacaggacagaaaacctgcaaatatactgaacatgggaaaacctgtgatatgtcatttttcatcactcatcagcaaacacatccaagagaaaaccactatggtaatgaatgtggagaaaatatctttgaggaatccattctccttgaacatcagagtgtttacccattcagccagaagttaaatctcactccaattcagagaacccactcaattaacaatattattgaatataatgagtgtggaacatttttcagtgaaaaattagtccttcatttacaacagagaacacatacaggagaaaaaccttatgaatgtcatgaatgtggaaaaaccttcacccagaagtcagcccacacaagacatcagagaacacacacagggggaaaaccctatgaatgtcatgaatgtgggaagaccttctataagaattcagacctcattaaacatcaaagaattcatacaggggagagaccttatggatgtcatgaatgtgggaaatccttcagtgaaaagtcaacccttactcaacatcaaagaacgcacacaggggagaaaccatatgaatgtcatgaatgtgggaaaaccttctcatttaagtcagtccttactgtgcatcagaaaacacacacaggggagaagccctatgaatgctatgcatgtgggaaagcctttctcagaaaatcagacctcattaaacatcaaagaatacacacaggtgaaaaaccttatgaatgtaatgaatgtgggaagtcattctctgagaagtcaacccttactaaacatctaagaactcacacaggtgagaaaccttatgaatgtattcagtgtggaaaatttttctgctactactccggtttcacagaacatctgagaagacacacaggggagaaaccttttggatgtaatgaatgtgggaaaaccttccgtcagaagtcagccctaattgttcaccagagaactcatataagacagaaaccctatggatgtaatcaatgtggaaaatcattctgtgtgaagtcaaaactcattgcacatcatagaacacacacaggggagaaaccctatgaatgtaatgtttgtggaaaatcattctatgttaagtcaaaactaactgtacatcagagaatacacttggggagaaaccctataaatgtagtaaacgagggaaattactctgggtgaagtcagaactttgtagaacacagaacataaagggtgagagaaatctgttaatataatgataatgagaacacctttgccctgaagtcagttctcacagtatagaagagaacttaaagagggaaaaaacaatatgaagatagggaatgcaggaaaacattattctggaatttggaccatacactatgttacaaaactaaaagtggaaaaaacttattggtgaatgaatataggaaacattttgcccaatgccactcttcattaaacatcagagaattcacacggggtgaaacctgggtcagcatccctaggttgagaagggatgcatttttctgctactactacagtttcacagaatacctgagaagacacacttggagaaaccttttgggtgtaatgaatgtgggaaaacctttcatcagaagtcagctctaattgttcaccacagaactcatataagacagaaaccctatgggtgtaatgaatgtggaaaatcattctgtgtgaagtcaagaggccagagaaaatgcacaaactgtaggaaactataggaaagcatttactatgaggttatattttatggagtatatgtaataagaagtagcttctcagtgaacatcagatagtagagaaagtatttttaactgtatccaatgtgtggatgttttaagttaaaatctaaatttaatatagaacagaggtgttgagttgcaggatatctagcaatttaagaaaatgtggaaaaaatatttttattgagaaatagcattttactttgttaatatctagtttagttcattgtcaagactgctattttctaagagacttctaaagacgccactcaagccaatggctataagtagttcaaaggtttattgcttagccatatgaaaaataagggaagattttttagcaaggggacccacaaacaagagtgctcttgtatgtccagaagaaagagaaagaccatcaatcaggggccatagtacaggagcccaccagcaggatttttgaataatcctagggcagactaaattcagacgacccatctcagaatggtggatcaaagcagcaagtcaatttgccttgtatgcaacttatgaggattagtagaagagagtgggtccagatttctggtggtttctgccctgcagatgtctaacacataagccaggacattctgctgtgagtgacttattgtacccaactctatttctctccatactgaaacatgtctttcataggtgatacaactttttaaaatgtatgtgtagatataacttaaatatggagctttcaaaaagcacaaataggctggacatggtggctcatgcctgtaatcccagtactttgggaggctgaggtgggcaaatcacctgaggtcaggagttccagaccagcctggccaacatgatgaaaccctgtctctactaaaaatacaaaaattagccgggcatggtggtgcacatcggtagtcctggctactagagaggttgaggtgggaggatcacttgaacctgggaggtgggggtttcagtgagctgagatcatgccactgcactccagcctgagtgacagagagagattcaaaaaacaaaaaaaaagcaaaaatatactttgctattgggtaaggtatagtagttggcagcagaatggacccattgaggataactataaaattacagaaaatatttaaatgcaacttattgctatagaagcaaagaggactaaagggcaaaattctagagagtggtaaatctcagaaagcacaagcataaaatgcagctctgggggccctttccacttctggctatagggaagaacctgaatactgaacttgattcaggcagaggaccataacctgggggtcaggggaaggcatgggggggaccagaaaccagaagaacaatcaagactgcaatgaaaaaaatggatacattaggagcttcaaacacatataatttctcaagaaatttccagatgtctcatgctgcatagggcaggagcctgaaaagctaatttgagaagataataagtaggatttttgttttgttttgcattttgcagtacaaaggagaaatgattagaacttaggaagtgccagtgggttggtgaacatgccatcagtaaaagccctggaaacaaggtcatactagagattggttgtgccttgtcacaactgcaaacaatacctgagtggagtattcaaaaacttgcttagaaagaaaactctaggaacagatggcttcactgaagttattccaaatatttaagaaataataccaggcttttataaacttttctagaagaaaaaagatggaacttttccaattcagtttttgaggccagtacaaccttgataacaaaacctaaaaaaaaaacaacaaaaaaacccataaagctatagaccaaagtctcatagatttagatgcaaaatcctaaaattgaaaaaaacatctagccatatccataaactatatcatcaccaagagatgtttattagggcaatcaaaagatttattattttaaaaaaatcagtgtggacttccattcctctttcttttgattcccccctttgacttttcatgtatctctcctgccttccttccccagagtggaggagttagacttgcctcgtgggatgagaggagttgtggctttgtgtctgctggcaccaagagggctgagggtgaggtgtggaagggacagggggaggagatgggcagcattgttgagagattggtaacactgagcaaataaatatgttgagaatgatgacagcaagatttctccattagagaaggtatttataaaaataggaatgaggagagctagaaaacctggagtgtggcattagaatagaactcatatcttttaaatatataggaacaaataaataaattgttgtgtgtgcacatatgcatatattttgtgttcattctactgagaggacctaaacacaatgacacctcagtaacagtaagcacaccaactgccaagttattagttcctaaatactatccacaaaaaaggggaacagggatgattcctagtcagagattgggagaaatacaagatgagcctgaatcatctcatgtacctgacagtaagaaaatactctggctggtctcagtggctcatgtctgtaattctagcatgttagaaggtcaaggtgggtgggttgcttgagctcaggagtttgagaccagcctgggcaacatggcacaattgtctctacaaaaaatacaaaaattagccaggcatggtggcatgcacctgtagtccgaggtactcaggaggcagagacgtgggaggatcgcttgagcctgggagattgaggctgcactgagctgtgatcgtgccactgtactctagcctggaagacagagtgagaccccatctcaggaaaaaagaaaaaaaaaaagatgtcattcagcaggttaatggataaactgtggaacatccagaaaactttaacattcttcaaagaaatagaaaacacaatcctaaaatttatatgggaaccacaaaagacttagaatagtcagctatcctgagcaaaaggaatcaaactggaggaatcatattacctgacttccaattattcaacagagctacagtaaccaaaacagcatgatactggcataacaacagacacataggaacagtatagacaacccagaaacaaattcatacatctatggtgaccacttttgacaaaggaatgaagaacatacactggggaaaagataatgtctttaataaatggtgctgggaaaactggatatccatatgcagaagaatgaaactagacccccatctcttagcatatacaaaaatcaaaattaattaaaaagttaaatctaagacctcaaactatgaaacagctaaaagaaaacatcggggaatctctccaggacattggagtgggcaaagatttcttgtgtaatacctgacaaacaggcaaccaaagcaaaagtggacaaatgggatcacatcaagttaaaaatcttctgcattgcaaaggaaataacaaagtgaagagacaacccatagaatgtgagataatatttgcaaactatccatctgtattaggccatttttgaagtactacaaagaaatacttgagactgagtaatttataaagaagaggtttaattggctcacggttttgcaggctgtacaggaagcatggtgctaacatctgatcagcttgtagggaggcatcaggaagtttccaaccatggtggaaggcaaaaggggaataagtatctcacatggcaggtgcagggcaaagagaggggggaagggaagtgccacacaaccagatcttgtgagtactcagattttgtgaggggtgcttgaggtcatggatacccatttaccctgatgtgtttatacacatttcatacctgtattaaaatatctcatgtaccccataaacatatacacctactttgtacccacaaaaatttaaaaataaagttaatttcaatgtttaaagacttgttattaaaataatagcagtttctataaatttaatatttcaataaaactcccagtatttattgttaacactggaaaaagttttccaaaacgtatatggcagaaatatgggccttgatgtgaggacagcatcaattaatgagggatcctctcccttgatcaaaacaccttccaccaagacccacctttaacgctgagcattacctctcaaagtgagatttgggcagggactaatatccaaactgtatcaacatctgacaaggtgttcacaaccagaatatataaggagctataacaattctatagaaaaaaaaatctgatttaaaactgggcaaaaatctgaatagacgtttctcaaaagaagacatacaaatggcaaacaggcatatgaaaaggtactcaacatcattgatccattagagaaatgcaaatcaaaactacaataagatatcatctcaccccagttaaaatgtcttctctccaaaagacagataataacaaatgctgaagaggatgtggagaaaagggaaacctcgtgcactgtggaaatgttattagtacaaccactatggacaacaatttggaggtacctcaaaaactaaaaatagagctatcatacaatcccacaattccactggtagttatataccccaaagacaggaaatcagtatattgaagatatatctgcaccgtgtttactgtagcactactcacaatagccaagatttggaagcaacctaagtgtctaacagcagatgaatggataaataaaatatggtacataaacacaatggagtactattcagccataaaaaagaatgagatcctgtcatttgcaacattgtagatggaactagagatcattaagtgaaataagccaggcacagcaagacagacatcatgttctgacgtatttgttggagctaaagatgaaaacaactgaacttatagagggtagaaggatgtttaccagaggcgggaaaggcagtgagggcatggtgagggggaagtggggaatgttaacgggcacaaaatgtagaatgactaagacctagtatttgatagcacaaggttactacagtcaataataattgtgcattttaaaggtataattgaattgtaacacaaaggataaatgcttgaggttatggataccccatttaccctgatgtgattattagacattgcatgcctatatcaaaatatatcatgtaccccatagatatatacacctagtatgtacccacaaaaattaaaaataaagtaaaatttcaatgattaggaagaccattgttaatatcagtttcctttaaatgtttctataaatttaatacaatttcaataaagctcccaatatttattcttagtactggaaaaagttttccaaaatgtgtatggcagaaatagggccaaaataggcaagaaaactattttcgagatgtcagttttcctcaaattgttctattaattaaacgccacctgaattaaaatttgacaagtggattataaatttatgtggacattcaaaacaattatggatacatgagtccagaatcacagccataaaccatgaggtgcttgggagattttcagaaaatatgccaatgaaatccaaggggaaagacatgtcttcaaaaagtggtgttacctttgactccccaaagcatatataaagcctctactcatcatagatctaaatataagagctcaaacttaaaacttgtagaagaaaacatgagaaaatttttgtaggtttgagttagatgatgatttctatataggacaataaaaatatggaacatacaaaaataaatttaatgcacttaattataatacaaatgatttactcactttaaactttgataaattagattttgttaaattcaaaagcttgtgttcttcaaagcacacagttaaggaaatggaaaggcgagtaatggactaaaaaaaatacctgtaaaacagctttggttaagaatagaagaaaaatcctaataagaaaattggtgaaagaatggtgtggaaagttcactacagaaaaaatatgaatggcaaataatcctgatttgggggagagtgttcaataccaatgctaattttttaaatgtcctgtgtttaattttttggagtttgtgatttgcaacatgcccctactgcatggagggagaggagatggtaaaatgaacagaagtaataattgtaaa

SEQ ID NO: 202291 - DNA, 8329 bp, Homo sapiens
  Payload ID: 19904
  Gene Name: zinc finger protein 382
  Uniprot ID: Q96SR6
  ENST ID: ENST00000292928
  CDS Start-End: 114-1766
gactcaccctgggccgggggtgaggcttggactgtttctttttccaaaagaggagctcaaaagagaaagttcatctagaaatctcaaagccatgtctcaggatgaactagagtatgcccttacagggatcagtgtcattcaaggatgtgactgtggacttcacccaggaggagtggcagcaactagaccctgctcagaaggcgctttacagggatgtgatgttggaaaactattgccacttcgtatctgtggggtttcacatggctaagcctgatatgatccgcaagttggaacaaggagaagagctatggacacagagaatttttccaagttacagctacctagaagaagatgggaaaactgaagatgtcttagtgaagttcaaagaataccaagacaggcattctagacccctcatattcatcaaccacaaaaaactaattaaggagagaagtaatatttatggtaaaacatttactctaggcaagaaccgtatttcaaaaacaatactatgtgaatataaacctgatggaaaagttttgaaaaatatttcagaactagtcattagaaatataagccccataaaagagaagtttggtgacagtactggatgggagaaatcactcctcaataccaagcatgagaaaattcatcctgcagtgaatctccataaacaaacagaaagagttctcagtggtaaacaggagcttattcagcatcagaaggttcaagctccagagcaaccatttgaccataatgaatgtgaaaaatccttcctgatgaaaggaatgctatttacacatactagagctcacagaggagaaagaacctttgaatacaataaagatggaattgccttcatagaaaagtcaagcctcagtgtccatccaagtaatcttatggaaaagaagccctctgcctacaacaaatatgggaaattcctctgcagaaagcctgtttttattatgcctcagagacctcaaacagaagagaaaccctttcactgtccttactgtgggaataactttagaaggaagtcatacctcattgaacatcagcgaattcacacaggtgaaaaaccttatgtttgcaatcaatgtggaaaggccttccgtcagaagacagccctcacccttcatgagaaaacacatatagaggggaaaccctttatttgtatcgattgtgggaagtccttccgccagaaggccaccctcactagacatcacaaaacacatacgggggagaaagcctatgaatgtcctcagtgtggaagtgcctttaggaagaagtcatacctcattgatcaccagagaactcacacaggagagaaaccgtatcagtgtaatgagtgtgggaaggcatttatccagaagacaaccctcactgttcatcagagaactcacacaggagagaaaccctatatttgcaatgaatgtgggaagtccttctgccaaaagacaaccctcactctccaccagagaattcacacgggggaaaaaccctatatttgtaatgaatgtgggaagtccttccgccagaaggcaatcctcactgttcatcacagaatacatacaggagaaaaatccaatgggtgtcctcagtgtgggaaagccttcagtaggaaatcaaacctcattcgccatcagaaaactcacacaggcgagaaaccatatgaatgtaaacagtgtgggaagttcttcagttgtaagtcaaacctcattgtccatcagaaaactcacaaggtagaaaccacgggaattcagtaagtaatgtggctttttttgtaaaaaaatgttaagtcatagtaaaccctgtagatgatgttgcttgcaagcgtaatatccaacagtttaaggtactataccacatggtaacctactgtttgccagcctgtaaaacacacacacacacacacacacacacacaaatattattagacaaattagatgacaaaaatcattaagaagtccaaactttttttttattactagcttcagcagacaaaaacttcctctgtcaaggtgttataaacatttaaaatcacattttccatttccatacatatctttttgttcatcagtaataactagttggccaactgactgtggtccatggactacacagtgagtagaggttctttaaaagaaggaggtatgaactgtatttctcattgcaaatacaaaataaaaattagttgttacctcctcacagttgaccatgattctgacttctaacattacaaattagtttttactattataaacctttctataaattggattatatatcatgtattctttcatatacagcttattaccttcatcatgtccgtgagtctaatcattagtacgtgtggcagaagtttatttatttttatccagtatagaattcaattatatgattatatcacaatttatccattctgctgttgatggacttttacattgtttacagcttagggtcataataaatcatgcttctgagaacatacttgtcttggtgtacatacatgtatttctcttgtgtatatacttaggagtggaatcgctgggtcttagagcatgtgtgtattcagtcagatactggcagacaattcagaactttcaccacatgagataattgacactgaagggaaacagctataaattttatcaatatggtgctggttcaaaccagagaattcatgctgcagggaaactcaatcaatgttattgtgaaaactgggaatgtgaatgtaatatatgtagaaaaacatttagccacagcccaaatcttccaggcaaatgtaataaacgtgacattgccgttagccacagtaaatgccttatttgaactcaaaaagtctactagaggagaggcatccagcatttcccttgttcaacatcagagaattccaactagagaaaagtcctgtgactgtgttgaagttagggcgtggggaggaatatagtctttacctatggtctgtatctactggtcaggtacaaatgatgaatatggaaaagcttatagccatcattcatatattatactacaccagggaattcacataggatgagaactcttcaaatgaaatgattgtaagaatgactttaactgttgctcatttcttttacaccatcaaagaattaataccaaagaaaggaagattacaaggaaacaaatgggtcttgggacttttttttttttttttttgagacagaatcttgctctgtcacccaggcgggagtgcagtggcatgatcttggctcactgcagcctctgcctcccaggttccagtgattctcctgcctcagcctcccgggtagctgagattacaggcacacgccacacgcacagctaattttcgtatttttagtagagacagggtttcatcatgttggccaggctggtctcgaactcctgacctcaggtgatctgcctgcctcggcctcccaaagtgctaggattacagggacttttaactctggggaaagctctctttcatgaaagaagtctagccataccgagaccataatgctaggaagtctatgtgtaggccccctggtcaacagctacagctgagctcccagccatcagctagcatcagctgccaaccatgtaagtgaggcctcttggacatccagtcaagccttcagatgactgtggaccctgctaacacccaactggtaccacaaatgagacctcaagcaagaactgcccagctgaggccttcccaaattcctggccaacaaaatcatcaggctttttaactacaaacagttttattttttatttaataaaaaagtttttatttaacttgattgttttattaaaagggaaaagtaattttttagtatctgttaatatataataaaaataaaggtataagcctgggcttggtggctcatttctgtaatcccagcactttgggaggtgttgggaggatcacttgagcccaggagttcgagaccagcctgggaaacatgccaaaaccccatctctacaaaaaattagccaggaatggtggcacatgcctgtagtcccagctactcgggaggctgagtgggaggatcacttgggcccgggaggcggaggttgcagtgagccaggatagcaccactgcactccagcctgggtaacagagcgagaccctgtctcataaataaataaatacataaaggtgtaaatatatggattctagagtcaatgagcaaaggtattgttgttactaataggtgattttggcatgaagaaaaactggccataaaatacagttgaagatttggctgcatttttgccttacgattacataccttaataattacaactcaattgaggggtccatatatattctttctcattttctggcagtaaatcatattcatcatatacttcccaattttgcacacacaaaaaatgaaaatagcccccaaaagaaaggcaggataatgcgatctatcctcaaaagaccccgtgctgtcatttctcaacaaaggcgcagagagaaatcaaggtatggaatctaatgaatgtccgtgaaggaggtacttttgaatgctttaaagaaagtctaaataaagttgcgttttcttttctttttttttttttttgagacagagtttcacttttgtttcccaggctggagtgcaatggcgcaatttcggctcattgcaacctctacctcaagcaattctcctgcctcagcctcccaagtagctgggattacaggcgcccacctgtatttttagtagagacggggtttcatcatgttggccaggctggtctccaaagcctgacctcaggcgatccacccgcctcagcctcccaaagtgctgagattacaggtgtgagccaccgcacccagccgaaattgtgttttctaaagctatttacatataagctgccgctccttaggaaaatttggtcctgtggtttatattttggcatgaaacagcattgggctgtattccagaatcctgcttgaagatttcttttgaagaaatcagaaattttctttgcattttttttatttttttgagacaggttctcagtctgtcacctaggctggagtagagtggtgccattatagctcactgcagacttgaattcctggactcaagcaattctcctgcctcagcctcccaagtagctaggactacaggcaggcgccattcctctcagctaatgtttttattttttatacatatggggtctcgttgtgttgcccaggctggtattgaactcctggcctcaagcaatcttccctcttcggcctcctaaaatgctggggttacaggtgtgagccacttcactcactttagagattttcactttatgaattgataaatacagcattgcatcacttaatagggatacattctgagaaatgcatcatgaggcagtgtcatgatcgtgcaagcatcacagagtgctgatacaaaccgagatggtacagcctactaaacacctaggctatatggtagagcctgttgctcctaggctacaaatctgtactgcatgttactgtgctggatactataggcaattgtaacacaatggtaattatttgtatatgtaaacctatctaaacacagaaaaggtacagtaaaaatgtggtactataatctttttttttttttgagacagagtctcactctgtcgcccaggctggtgtgcagtggtgtgatctcggctcattgcaacctccgcctcctgggttcaagtgattctcctgcctcagcctcatgagtagctgggactacaggtgcacaccaccaaacccggctaatttttgtatttttagtagagacggggtttcaccatgttggccaggatggtctcaatctcctgacctcgtgatccacccgcctcggcctctcaaagtgctgggattacaggtgtgagccaccatgcctggctggtactataatcttatgagaccaccattatatatgcagtccatcatggaccaaaatgtcatgtggtgcatgagtatttttcatctaacttatatattgctcaatgaagtttgggcaactctaaggagcaaacatgtttatagaatctaagtcaacttgacctaaacatatacgacaaaataggagtgattttacaaattcatattttgtagacctaactgcaaggtcataaggcatatgcaaaatgagttcatcagttcagaggactaacaggactccacagagcatacccaggaaatgtttttacttagaagcaaaggatgtggctcagcaaaagaaagggaaggtaagcattagggctcagaatcatctagctgcacattcctcagtggttttattcacacacagaccgcacactgtctctgaactgaagcactaagacctgtatcaaacttgatttggggagagctgacagcagaacttctctacatgggtttttttgttgtcattgttttgttttttgagacagagtcttgctctgtcacccaggctggagtgcaatggtgcaatctcagcccactgcaacctccgcctcccaggttcaagcaagtctcctgccacagcctccctaagtatctgggattacaggcatgtgccaccacaaccagctagtttttgtgtttttagtagagacagggtttctccatgttggccaggctggtctcgaagtcctgacctcaggcaatcctccgcccacctcggtttcccaaagtgctgggattataggcatgagccaccgtgcccagccactgcatgggtatttatgcttctctgttcactggttacatagtcaagccaggctatctaactggttatgtaagtttaaaaaagttaaaaagccatcataaacaaattggctctgggagtctcccagggaatatcagactttaactagtaccttgtatagctcactggccttatcccaaccaagagtcagagccagacatctgggcatcgtggagataattttagagctttgcagtctgactgtaaatcagctccatcttataaacatggttcctataactgctgtgtatttcctgataatgtatgtgaacaagcatatctcctcaccctctgtgtccccagtatcagatagtgcacagtacatctcaaatgtgatcatttcttgtcagctaatgcttgaatttctccactcagtttctggtctagcaatagagccaggcttgccatgtcctgcttcacaagtaatgtgcaacagcaaaagcacaggctccaacactagtctacaacatgcacctgggatgttctagatatttatcagtttataatcaggctttttttttttttttgagacagtgtctcgctctgtcgcccaggctggaggcagtggctcgatcttggctcactgtaagctccgcctcctgggttcacaccattgtcctgcctcagcctcctgagtagctgggactacaggcacctgccaccatgcccagctaattttttgtatttttagtagagacggggttttactgtgttagccagggtggtgtcgatctcctgacctcatgatccgcccacctcgacctcccaaagtgctgggattacaggcgtgagccaccgcacccggcctataatcggacttttcaaaaccctagatatgtgacaataccaagtgctgacaagaatgtggaacaactggaactctttcttttttaacttttgttttagattcaggagtacaggtgtggatttgttactggaactttcatacattgctaataggaaaggcaaaatggtaaagccggtctggaaaacaatatgccagtctcaaaaagttacacatccaatatgacccagcaatcccacttataagtacttatcctagagaaatgaaaaattatgtgcacacagaaacctgtacatgagtgtttgtaagtattatttataattaaaaaaaaaactagagacaagcaaatgttcttcagtgtgtaaatggatacactgtggtacattcccaagatggaattctactcaacgataacaataatgagctactgaaacatgcagctacatagatgaacctcaaatgcattacgctaaaggaaagaacccagtcccaaaaagttacatactgtatgattccatttatatgacatgctggaaaaggtgaaaatataacaacagaaaacagatcaaatgttgctgagtgtctggggtggggtggggtctgaatacagaggggttgcacgaggcaattctttgaggtgttggaattgttttgtatcctgcttgtggtcatagataaaaaatctatgcatgtgtaaaaaatagaagtatacatacaaaaaagtgaattgtactgtctgtaatttttttaaataaataaaaatccctagctctgcttc

SEQ ID NO: 202292 - DNA, 2657 bp, Homo sapiens
  Payload ID: 19904
  Gene Name: zinc finger protein 382
  ENST ID: ENST00000423582
  CDS Start-End: 710-2215
agtcccgcgggcccaatcggggacagtcagggctgtcccgggctgtgcacctgctgtgcacacacaccccctgctgtgcacaccccccgcccccccgggaccatcacaggcgcgcccactcacaccaccacacacggacgcagccacagaacggcacacacaaacacaatcacacagtctccctccccagcaggtgacttgcacacaggcctggggcttctgcctccacaaaccctctccgcgtcccatgaacccaggtcccctgccgtgagctcttctcgcatccagacccgggtcacctcaactcaccacatggaaaacgaacaccaggtcaacggaaaagggagccggggtcctggcagaagcgtagtgccagccgcaatagggcggccgtgggtgcaaacggaggggagcgccggcagctagcaccgcgcggcgactaacgggccgccccggagactcctgggagctcaggcccacgcgcgagtgcgcaggcgcagacgactcaccctgggccgggggtgaggcttggtgggtgccaggggtgctgaggaggccaaggagggcactgggagctccgttccgggagagctgtctaaggacgcggaaccgggtggggaggccagggaggactgtttctttttccaaaagaggagctcaaaagagaaagttcatctagaaatctcaaagccatgtctcagggtttcacatggctaagcctgatatgatccgcaagttggaacaaggagaagagctatggacacagagaatttttccaagttacagctacctagaagaagatgggaaaactgaagatgtcttagtgaagttcaaagaataccaagacaggcattctagacccctcatattcatcaaccacaaaaaactaattaaggagagaagtaatatttatggtaaaacatttactctaggcaagaaccgtatttcaaaaacaatactatgtgaatataaacctgatggaaaagttttgaaaaatatttcagaactagtcattagaaatataagccccataaaagagaagtttggtgacagtactggatgggagaaatcactcctcaataccaagcatgagaaaattcatcctgcagtgaatctccataaacaaacagaaagagttctcagtggtaaacaggagcttattcagcatcagaaggttcaagctccagagcaaccatttgaccataatgaatgtgaaaaatccttcctgatgaaaggaatgctatttacacatactagagctcacagaggagaaagaacctttgaatacaataaagatggaattgccttcatagaaaagtcaagcctcagtgtccatccaagtaatcttatggaaaagaagccctctgcctacaacaaatatgggaaattcctctgcagaaagcctgtttttattatgcctcagagacctcaaacagaagagaaaccctttcactgtccttactgtgggaataactttagaaggaagtcatacctcattgaacatcagcgaattcacacaggtgaaaaaccttatgtttgcaatcaatgtggaaaggccttccgtcagaagacagccctcacccttcatgagaaaacacatatagaggggaaaccctttatttgtatcgattgtgggaagtccttccgccagaaggccaccctcactagacatcacaaaacacatacgggggagaaagcctatgaatgtcctcagtgtggaagtgcctttaggaagaagtcatacctcattgatcaccagagaactcacacaggagagaaaccgtatcagtgtaatgagtgtgggaaggcatttatccagaagacaaccctcactgttcatcagagaactcacacaggagagaaaccctatatttgcaatgaatgtgggaagtccttctgccaaaagacaaccctcactctccaccagagaattcacacgggggaaaaaccctatatttgtaatgaatgtgggaagtccttccgccagaaggcaatcctcactgttcatcacagaatacatacaggagaaaaatccaatgggtgtcctcagtgtgggaaagccttcagtaggaaatcaaacctcattcgccatcagaaaactcacacaggcgagaaaccatatgaatgtaaacagtgtgggaagttcttcagttgtaagtcaaacctcattgtccatcagaaaactcacaaggtagaaaccacgggaattcagtaagtaatgtggctttttttgtaaaaaaatgttaagtcatagtaaaccctgtagatgatgttgcttgcaagcgtaatatccaacagtttaaggtactataccacatggtaacctactgtttgccagcctgtaaaacacacacacacacacacacacacacacaaatattattagacaaattagatgacaaaaatcattaagaagtccaaactttttttttattactagcttcagcagacaaaaacttcctctgtcaaggtgttataaacatttaaaatcacattttccatttccatacatatctttttgttcatcagtaataactagttggccaactgactgtggtccatggactacacagtgagtagaggttctttaaaagaaggaggtatgaactgtatttctcattgcaaatacaaaataaaaattagttgttacctcctca

SEQ ID NO: 202293 - DNA, 2742 bp, Homo sapiens
  Payload ID: 19904
  Gene Name: zinc finger protein 382
  Uniprot ID: Q96SR6
  ENST ID: ENST00000439428
  CDS Start-End: 76-1725
ggggtgaggcttggactgtttctttttccaaaagaggagctcaaaagagaaagttcatctagaaatctcaaagccatgtctcagggatcagtgtcattcaaggatgtgactgtggacttcacccaggaggagtggcagcaactagaccctgctcagaaggcgctttacagggatgtgatgttggaaaactattgccacttcgtatctgtggggtttcacatggctaagcctgatatgatccgcaagttggaacaaggagaagagctatggacacagagaatttttccaagttacagctacctagaagaagatgggaaaactgaagatgtcttagtgaagttcaaagaataccaagacaggcattctagacccctcatattcatcaaccacaaaaaactaattaaggagagaagtaatatttatggtaaaacatttactctaggcaagaaccgtatttcaaaaacaatactatgtgaatataaacctgatggaaaagttttgaaaaatatttcagaactagtcattagaaatataagccccataaaagagaagtttggtgacagtactggatgggagaaatcactcctcaataccaagcatgagaaaattcatcctgcagtgaatctccataaacaaacagaaagagttctcagtggtaaacaggagcttattcagcatcagaaggttcaagctccagagcaaccatttgaccataatgaatgtgaaaaatccttcctgatgaaaggaatgctatttacacatactagagctcacagaggagaaagaacctttgaatacaataaagatggaattgccttcatagaaaagtcaagcctcagtgtccatccaagtaatcttatggaaaagaagccctctgcctacaacaaatatgggaaattcctctgcagaaagcctgtttttattatgcctcagagacctcaaacagaagagaaaccctttcactgtccttactgtgggaataactttagaaggaagtcatacctcattgaacatcagcgaattcacacaggtgaaaaaccttatgtttgcaatcaatgtggaaaggccttccgtcagaagacagccctcacccttcatgagaaaacacatatagaggggaaaccctttatttgtatcgattgtgggaagtccttccgccagaaggccaccctcactagacatcacaaaacacatacgggggagaaagcctatgaatgtcctcagtgtggaagtgcctttaggaagaagtcatacctcattgatcaccagagaactcacacaggagagaaaccgtatcagtgtaatgagtgtgggaaggcatttatccagaagacaaccctcactgttcatcagagaactcacacaggagagaaaccctatatttgcaatgaatgtgggaagtccttctgccaaaagacaaccctcactctccaccagagaattcacacgggggaaaaaccctatatttgtaatgaatgtgggaagtccttccgccagaaggcaatcctcactgttcatcacagaatacatacaggagaaaaatccaatgggtgtcctcagtgtgggaaagccttcagtaggaaatcaaacctcattcgccatcagaaaactcacacaggcgagaaaccatatgaatgtaaacagtgtgggaagttcttcagttgtaagtcaaacctcattgtccatcagaaaactcacaaggtagaaaccacgggaattcagtaagtaatgtggctttttttgtaaaaaaatgttaagtcatagtaaaccctgtagatgatgttgcttgcaagcgtaatatccaacagtttaaggtactataccacatggtaacctactgtttgccagcctgtaaaacacacacacacacacacacacacacacaaatattattagacaaattagatgacaaaaatcattaagaagtccaaactttttttttattactagcttcagcagacaaaaacttcctctgtcaaggtgttataaacatttaaaatcacattttccatttccatacatatctttttgttcatcagtaataactagttggccaactgactgtggtccatggactacacagtgagtagaggttctttaaaagaaggaggtatgaactgtatttctcattgcaaatacaaaataaaaattagttgttacctcctcacagttgaccatgattctgacttctaacattacaaattagtttttactattataaacctttctataaattggattatatatcatgtattctttcatatacagcttattaccttcatcatgtccgtgagtctaatcattagtacgtgtggcagaagtttatttatttttatccagtatagaattcaattatatgattatatcacaatttatccattctgctgttgatggacttttacattgtttacagcttagggtcataataaatcatgcttctgagaacatacttgtcttggtgtacatacatgtatttctcttgtgtatatacttaggagtggaatcgctgggtcttagagcatgtgtgtattcagtcagatactggcagacaattcagaactttcaccacatgagataattgacactgaagggaaacagctataaattttatcaatatggtgctggttcaaaccagagaattcatgctgcagggaaactcaatcaatgttattgtgaaaactgggaatgtgaatgtaatatatgtagaaaaacatttagccacagcccaaatcttccaggcaa

SEQ ID NO: 202294 - DNA, 3865 bp, Homo sapiens
  Payload ID: 19904
  Gene Name: zinc finger protein 382
  Uniprot ID: Q96SR6
  ENST ID: ENST00000435416
  CDS Start-End: 1496-3145
aggaaatccatatgccaggccacttttgaaatattctattgttgatcaaacagtactttgtcctcttttcatatctttcagaaaattcctctttagctcatccaccaacctttaaaatactggttttcctcagatgctaattggttctcttcttcttcacagtccgtttttctctacgcacaatcagattcactctgaaggctacacttagtgtgattctagtgactctcaaatacccctctccactctagacctctgtccagagtgtcagaaccgaatattcaacctccagtagctatcaccacctgtatgttccacagacaaagtacatttccaaagcttacctcattacttcctttggtccagcttacattttcttccgtttcccattttcactttctagtcccagcagccatgcatttgcctatgcagataaaatgcctgtatcttttccactctacagccaatttacgaccatctctgttgtaatggtggtcatgtaggagcagttgtcctctgtcagcccgctgacacttccttaatctaggagacatttctaaccatggttacttaattgtcatttccacctaacatgtgataagccttttccagtcttcaggagtattacctcaaaacttttatcacataacgtgtgtcaacttatgtttattgatgttctttacattccttaaagcaacagacccaaagtagggcatgcctcacagtagaatgtataagacggtctattggaaggaaataaaatactaacaatttacattcgagagcagtattcattaacaatgtagattttcataaatgcctattgatggtttataaatagctacaatgttgggaatgtgttcagtatatctttaagaccactgttctgtaggaaaaaaaaatctagtatcatgtcataatatccccattgcctatctccatataccttttccttcttagagctcaaagactgtttcctaacatactgtgccttttgctatttcctgatttactaactggtttttttctccccatgaatttttaaaagctgatgccctgtattcctacaaaacaaattcgttgtgagtacaaaacttttatgtcctcaatgaagcctcggagtacaaaatgaaatttttccttgttttgtgacactttaccttgtacgtatttctgtcattgcatctgtaaaacctactaagtgcatgtatttacatgtatgcccctctcttagcctataacttctcatgagcagggtcagggttttattcattttggtctaccaggcaaccagtcacattcaggacaaatagtgtgatctcagtatgtttagcatgagattataagtaaatacaaatggatgtattttcagagagaattttatgcaatataaaacataaataaggaaactagtctgaccagtaaacattgtcagtactaggtctccaatatctagttctcacacatttccgatcacttcaggatgaactagagtatgcccttacagggatcagtgtcattcaaggatgtgactgtggacttcacccaggaggagtggcagcaactagaccctgctcagaaggcgctttacagggatgtgatgttggaaaactattgccacttcgtatctgtggggtttcacatggctaagcctgatatgatccgcaagttggaacaaggagaagagctatggacacagagaatttttccaagttacagctacctagaagatgggaaaactgaagatgtcttagtgaagttcaaagaataccaagacaggcattctagacccctcatattcatcaaccacaaaaaactaattaaggagagaagtaatatttatggtaaaacatttactctaggcaagaaccgtatttcaaaaacaatactatgtgaatataaacctgatggaaaagttttgaaaaatatttcagaactagtcattagaaatataagccccataaaagagaagtttggtgacagtactggatgggagaaatcactcctcaataccaagcatgagaaaattcatcctgcagtgaatctccataaacaaacagaaagagttctcagtggtaaacaggagcttattcagcatcagaaggttcaagctccagagcaaccatttgaccataatgaatgtgaaaaatccttcctgatgaaaggaatgctatttacacatactagagctcacagaggagaaagaacctttgaatacaataaagatggaattgccttcatagaaaagtcaagcctcagtgtccatccaagtaatcttatggaaaagaagccctctgcctacaacaaatatgggaaattcctctgcagaaagcctgtttttattatgcctcagagacctcaaacagaagagaaaccctttcactgtccttactgtgggaataactttagaaggaagtcatacctcattgaacatcagcgaattcacacaggtgaaaaaccttatgtttgcaatcaatgtggaaaggccttccgtcagaagacagccctcacccttcatgagaaaacacatatagaggggaaaccctttatttgtatcgattgtgggaagtccttccgccagaaggccaccctcactagacatcacaaaacacatacgggggagaaagcctatgaatgtcctcagtgtggaagtgcctttaggaagaagtcatacctcattgatcaccagagaactcacacaggagagaaaccgtatcagtgtaatgagtgtgggaaggcatttatccagaagacaaccctcactgttcatcagagaactcacacaggagagaaaccctatatttgcaatgaatgtgggaagtccttctgccaaaagacaaccctcactctccaccagagaattcacacgggggaaaaaccctatatttgtaatgaatgtgggaagtccttccgccagaaggcaatcctcactgttcatcacagaatacatacaggagaaaaatccaatgggtgtcctcagtgtgggaaagccttcagtaggaaatcaaacctcattcgccatcagaaaactcacacaggcgagaaaccatatgaatgtaaacagtgtgggaagttcttcagttgtaagtcaaacctcattgtccatcagaaaactcacaaggtagaaaccacgggaattcagtaagtaatgtggctttttttgtaaaaaaatgttaagtcatagtaaaccctgtagatgatgttgcttgcaagcgtaatatccaacagtttaaggtactataccacatggtaacctactgtttgccagcctgtaaaacacacacacacacacacacacacacacaaatattattagacaaattagatgacaaaaatcattaagaagtccaaactttttttttattactagcttcagcagacaaaaacttcctctgtcaaggtgttataaacatttaaaatcacattttccatttccatacatatctttttgttcatcagtaataactagttggccaactgactgtggtccatggactacacagtgagtagaggttctttaaaagaaggaggtatgaactgtatttctcattgcaaatacaaaataaaaattagttgttacctcctcacagttgaccatgattctgacttctaacattacaaattagtttttactattataaacctttctataaattggattatatatcatgtattctttcatatacagcttattaccttcatcatgtccgtgagtctaatcattagtacgtgtggcagaagtttatttatttttatccagtatagaattcaattatatgattatatcacaatttatccattctgctgttgatggacttttacattgtttacagcttagggtcataataaatcatgcttctgagaa

SEQ ID NO: 202295 - DNA, 712 bp, Homo sapiens
  Payload ID: 19904
  Gene Name: zinc finger protein 382
  ENST ID: ENST00000590785
  CDS Start-End: 161-712
gattatatcatcacttgtgtagtgtaaggtattaactttggtaagacattaatgtatacctcatttactaccttgaagttgtatctttatcttacttcaatagttttaaagtcgaaacagcttagaccaaaagtctcattttccatcatcagggtttcacatggctaagcctgatatgatccgcaagttggaacaaggagaagagctatggacacagagaatttttccaagttacagctacctagaagaagatgggaaaactgaagatgtcttagtgaagttcaaagaataccaagacaggcattctagacccctcatattcatcaaccacaaaaaactaattaaggagagaagtaatatttatggtaaaacatttactctaggcaagaaccgtatttcaaaaacaatactatgtgaatataaacctgatggaaaagttttgaaaaatatttcagaactagtcattagaaatataagccccataaaagagaagtttggtgacagtactggatgggagaaatcactcctcaataccaagcatgagaaaattcatcctgcagtgaatctccataaacaaacagaaagagttctcagtggtaaacaggagcttattcagcatcagaaggttcaagctccagagcaaccatttgaccataatgaatgtgaaaaatccttcctgatgaaaggaatgctatttacacatactagagct

SEQ ID NO: 202296 - DNA, 556 bp, Homo sapiens
  Payload ID: 19904
  Gene Name: zinc finger protein 382
  ENST ID: ENST00000460670
  CDS Start-End: 481-556
gcagacgactcaccctgggccgggggtgaggcttggtgggtgccaggggtgctgaggaggccaaggagggcactgggagctccgttccgggagagctgtctaaggacgcggaaccgggtggggaggccagggaggtaaccaagagtccgagccgggcctggaaattctgaggaggaaaccgggaccgcggtatccagacgctccgatctgtacgagccgggcctcgggcgtggtccatgggcgtgaccttgagggtgacccggagcgagctccgcgaagggggattttgcccgttctgatcccgcggaagcgccatcgctggcggcgggtccccgcgcggagcgggcgctgtgtgttcgcgcgcgcgggcgcgcgctgaataggggtggcctcctgcgcccaacctgctgcattttaggactgtttctttttccaaaagaggagctcaaaagagaaagttcatctagaaatctcaaagccatgtctcagggatcagtgtcattcaaggatgtgactgtggacttcacccaggaggagtggcagcaactagaccctg

SEQ ID NO: 202297 - DNA, 6760 bp, Homo sapiens
  Payload ID: 19905
  Gene Name: zinc finger protein 383
  Uniprot ID: Q8NA42
  ENST ID: ENST00000352998
  CDS Start-End: 259-1686
attgctctaaaaggcctctgtgccctgactgatcctccctccctgtcaactcctaatctttttattgtctccatagttttgccttttccagaatgttgtaatcatacagtatgtagtctttttgaattggcttctttcacttagcaatgtgcatttaagtttcctaagctgttgatcatgagactgagtccctttttatacttcaacagacatgagaacggcctcaaggaagactaaccatctgcaatactagaagccatggctgagggatcagtgatgttcagtgatgtgtccatagacttctctcaggaggagtgggactgcctggaccctgttcagagggacttatacagagatgtgatgttggagaactacggcaatctggtttcaatgggactttacactcctaagcctcaagtgatctccttattggaacaagggaaagagccctggatggttggcagagagcttacaagaggcctgtgttcagatctggaatcgatgtgtgaaaccaagttattatctctaaagaaggaagtttatgaaatagaattatgccagagggagataatgggacttacaaagcatggccttgagtactccagttttggagatgttttggaatatagaagccaccttgcaaaacaactgggatatccaaatgggcattttagtcaagaaatattcactcctgaatacatgcccacatttattcaacagacattccttactctccatcaaataattaataatgaagacagaccctatgaatgtaagaaatgtggaaaggcctttagtcagaactcacaatttattcaacatcagagaattcatattggtgaaaaatcttatgaatgtaaagagtgtgggaaattctttagttgtggttcacatgttactcggcatctgaaaattcatactggcgaaaaaccctttgaatgtaaggaatgtggaaaggccttcagttgtagctcatacctttctcaacatcagagaatccataccggtaagaaaccctatgaatgtaaggaatgtgggaaggcctttagttattgctcaaatcttattgaccatcagcgaattcacactggtgaaaaaccttatgaatgtaaagtatgtgggaaagcctttactaagagctcacaactttttcagcatgcacgaattcatacaggtgagaaaccctatgaatgtaaggaatgtggcaaagcctttacccagagctcaaagcttgttcaacatcagagaattcatactggtgagaaaccctatgagtgcaaggaatgtggcaaagcctttagtagtggctcagcacttactaatcatcagagaattcacactggtgagaaaccctatgattgtaaggaatgtggaaaggcttttactcagagctcacagcttcgtcaacatcagagaattcacgctggtgagaaaccctttgaatgtcttgaatgtgggaaggcctttactcagaactcacaacttttccagcatcagagaattcatacagatgaaaaaccatatgaatgtaatgaatgtggaaaggcctttaataaatgctcaaaccttactcgacatctgagaattcacactggtgaaaagccctataactgtaaggaatgtgggaaggcttttagtagtggctcggatctcattcgtcatcagggaattcatactaataaataataaaaattaaagcccctgtcaccttcctcatattttaaaccaaaaatcatgtctaatagttaccctcttccgtagttttttttaaaactttgtatttaaattttgtatccaaatgtatttcattccaggttataaattcggagtctaaagtgacattccctctctcccccagtcatataccgatgccagctgttctataattctttcattcattgttttgttctactttcttggtgacacattatactcatgtttatatttgcttgtgtttttagagctatcttttctgatctgtgtatttgtgtttgcaccagtatcacactgtttgaattgtgtgacctttaatatttttaaattccttgtggaggtttaactttgtttttgaagttagtgttagtctttttgttttattttattattattattatatgttttttgagacggagtttcactctgttgcccaggctggagtgcagtggcgcaatctcggctcgctgcaacctccacctcccggcttcaagcaattctcctgcctcagactcctgagtagctgggatcacaggcgtgtgccaccacaccctgctaattttctatttttagtagagacagggtttctccatgttggtcaggatagtcttgaactcctgacctcaggtgatccacctgcctcagcctcccaaagtgctgggattacaggcatgagcgattgcacctggctttattttttgttgagacggagtttcgctcttgttgcctaggctggagtgcaatggtgcaatctcggctcgtcacaaccttcgcctcccaggttcaagtggttcttctgcctcagccttttgagtagttgggattacaggcatgtgccacaacacccggctaattttttgtatttttagtagagacggggtttcaccatgttagccaggatggtctcaatctcccgacttcaggtgatccacccgcctcggcctccgaaagtgctgggattacaggcgtgagccactgcggccggtctttttattttacaaatgtacatttttaattgttaagccaaaatcacaaagcaaaaaattacaaactaaaaagccaaaattaattgtaatcatacttatagatggctgctctcaatttggtagagaaaatcgtgctatactttgcttttttaagaaagtgtaattatgatatgcatgctgtacccttaactgcttttatcatgccaaagatttcatgagtgccatttcagtaaatatagatttttattattttcatgacatatttaatgactttaaaatgactattcccattatggttgccactaaatttttgcagctataaaagctgacctcggctgggcacagtggctcatgcctgtaatcccagcactttgggaggccgaggtgggcggatcacaaggtctgaagattaaggccatcctggctaacagtgaaaccccgtctctacttagctgggcgtggtggcatgtacctgtaatcccagctactcgggaggctgagacaggagaattgcttgaacctgggaggcggaggttgcagtgagctgagatggtgccactgcactccagcctgggggacagagtgagattccgtctcaaaaaaacacaaaaactgctgacctcattggatgcttatttttacttttaaaacatttattttaattgctaaaattatctacattttctccttgtgagctgttttgttcccttacatcaatcctaatcccaatgccatactagaaagtaacactgttatgaaagtgttatttatcaatccagatattaattttttgtttgtttgtttttttttttttttgagatggagttcactctgttgcccaggctgaagtgcagtggcacaatctcagttcaccacaactgctgcctcccgggttcaagcgattctcctgcctcagccttcctagtatctgagactacaggcgcacgacaccatgcctggctaatttttgtatttttagtagagacagggtttcactatgttggccaggctggtcttgaactcttgaccttgtgatccacccacctcggcctcccaaagttcggggattacaggtgtgagccactgtgcccggtcaattattttttcttatagctattagtggtgtttttgttttttgagacacagtctcgctctgttgcccaggctggagggcagtggtgcaatctcggctcactgcaacctctgcctcccgagttcaagtgagtcttccgcctcagcctcccgagtagctgggactacaggcgcgcgccaccatgcctagctaatttttgtattattagtagagatggggtttcaccatattggccaggctgctctcaaactcctgacctcgtgatcctcctgccttggcttcccaaagtgctgggattataggtgtgagccaccgcccctggctgttagtggtattttaaaaaattatgtctaggcatctataataaggctgtatgtattggattgctgtgaagagtcaatgaattaataaatgcaaagtacctcaaactgttatcacataatacaggtttagtaaaagttttccactattatcagtgatatactcattatcataagtatcttcattaggatttatggaaaggattttaaccatgttgtttacctttggcaaatttgtaattcatggtggaaaaagagaaacacttgtaatgagtataacgaagcctttccctatcattattattcagtgtggaattttaaaaggaagagaaaaagtatgtgtgcatagtctttgttcagactttatcttttatgctacataaagaataccagtctgaggctgggcgcggtggctcacacctgtaatcctagcactttgggaggccaaggtgggtggatcacttgaggtcaggagctcgagaccagcctggccaacatggtgaaaccccgtctctactaaaaatacaaaaaaaacaaaaacaaaaacaaatagccaggcatggtgttgcatgcctgtaatcctagctactcaagaggctgaggtgggaggattgcttgaacctgggagttggaggttatagtgagctgagattgcaccactgcacactccagactgggtgacagagcgagactctgtcttacaaaataaaaaataaacggttaccaatctgaaaccctgaaaatatgatgagtagtagaaagcacagctgtcaaaaaagcaggaagagattataaaattttttctaatatttccccccaaaatgcagaaaacatactggcaacattatttgaccagaagaagcagtacaataggataaccatcaaatatctgattattaattcaatattccctcttaattaacatgggttaaggaataaatccctaatatatacattatttaaatgtacatgaaaatgaaaacaattgaaaaacctgtgagtggcagtaaaagttgtattggaagttttataacctaatatttgtgcatatattgtaatactaggaagaaaaaatatagaacccaaggaactaaaacaagctgaaatgaattgtgggaggaaggaggtagtattattttaaaaggcagaaataattgaaagaaaaaaactggatctgaatccaaaattgatatttgatggaagagaaaaaaaatgagacaaagtttagtgattccagaggtgaaataaggatgacaaataaacaatattgtatatgagaaattgaaatggctatatatgtaaacttaaaagaactgtgtcatttggggtaatgaaaatgtggcatgggtaaaggttgtacaattttgtttatatactacaggtcactcaactatacactttaaaagggtgaatattatgctgtgtgaatttgatctcaatttaaaaacttaaggctggttgcagtggctcatgcctgtaattccagcactttgggaggctgaggtaggagaatggcttgaggccaggagttcaagaccagtctaggtaacataatgagatccccctcccctcatctctacagaaaaaaaaaaaaattaaaacaacaaacttaaaagttggtattatagacatttttataatatatctgaaaatctggaaaaagtctgtgatttttaataagttgacgacatcagaattaactggaggtgtaaaatcttaatagacctccctccagaataaacttatttaaaaaaataagactggccaggcatggtggctcacgcctgtaatctcagcattctgtgaggccaaggcgggtggatcacctgaggtcggggatttgagaccagcctgaccaacatggagaaaccctgtctctactaaaaatacaaaaaattagccgggcgtggtggctcatgcctgtaatcccggctactcaggaggctgaggcaggagaaaggcttgaacccgggaggcagagattgcggtgagcggggatcatgccattgcactccagcctgggcaacaagagtgaaactctctcaaaaataaataagtgaaataaaatttttcttaaaatatattttaaatgtcaaattgctacactaaaaaagacaccaaggtagagatttttataggtgaaatctatgaaatgtcttaggaaactcttctaggacatagactgagatagcaaattatctatttttaaaatttgtcataatcctgatgttacaacctactagaacccaaaacaatttgtccagaatcagttatgaaaatacagcattataaattagcaaatcaaatctagtaacccattgaaaataaatatttgtcacattctgaatttaggaaaaaacaattctgataaatcaaactttctactttctgaaacttgaaaatcaaattgatttagataagattgtatttcttagtgtctgaactcaggaaccaaatagatgtggatagcatgggatttttggaatacaagataagataatttacatgggattgcaaaagttcaaataactaaagttctgtcaatgaaaatatatgctctaacctcaacatcttctagatgaacccttttttctagcagtatttgacaggatgggatatattttataaataaacttggactattatcc

SEQ ID NO: 202298 - DNA, 2268 bp, Homo sapiens
  Payload ID: 19905
  Gene Name: zinc finger protein 383
  Uniprot ID: Q8NA42
  ENST ID: ENST00000589413
  CDS Start-End: 584-2011
tgcatgggagtttgaagggactgaccaggctggtctggagtgttgggcatgcggagtttcgctgttgttgcccaggctggagtgcaatggcgcaatctcggctcaccgcaacctccgcctccccggttcaagcaattctcctgcctcagccttcctagtagctgggattacaggcgtgtgtcaccacgccctgctaattttgtattttcagtagagacggggtttctccgtgttggtcaggctggtctcgacctccccacctcagatagtagctgtagatccaaaatgacctctgatctgctcagtctgggccacaagaaaggcctggcatctcatcattcctttcttcttcagctctgctctcgtcaagagagttacccagaggaagaatggctgttgaccaaaccaaatacaagacggagtctcactctgttgcccaagctggagtgcagtggcatgatctcagctcactgcagcctctgctttccgggttcaagcgattctcttgcctcagcctcctgagtagctgggattacaggagaacggcctcaaggaagactaaccatctgcaatactagaagccatggctgagggatcagtgatgttcagtgatgtgtccatagacttctctcaggaggagtgggactgcctggaccctgttcagagggacttatacagagatgtgatgttggagaactacggcaatctggtttcaatgggactttacactcctaagcctcaagtgatctccttattggaacaagggaaagagccctggatggttggcagagagcttacaagaggcctgtgttcagatctggaatcgatgtgtgaaaccaagttattatctctaaagaaggaagtttatgaaatagaattatgccagagggagataatgggacttacaaagcatggccttgagtactccagttttggagatgttttggaatatagaagccaccttgcaaaacaactgggatatccaaatgggcattttagtcaagaaatattcactcctgaatacatgcccacatttattcaacagacattccttactctccatcaaataattaataatgaagacagaccctatgaatgtaagaaatgtggaaaggcctttagtcagaactcacaatttattcaacatcagagaattcatattggtgaaaaatcttatgaatgtaaagagtgtgggaaattctttagttgtggttcacatgttactcggcatctgaaaattcatactggcgaaaaaccctttgaatgtaaggaatgtggaaaggccttcagttgtagctcatacctttctcaacatcagagaatccataccggtaagaaaccctatgaatgtaaggaatgtgggaaggcctttagttattgctcaaatcttattgaccatcagcgaattcacactggtgaaaaaccttatgaatgtaaagtatgtgggaaagcctttactaagagctcacaactttttcagcatgcacgaattcatacaggtgagaaaccctatgaatgtaaggaatgtggcaaagcctttacccagagctcaaagcttgttcaacatcagagaattcatactggtgagaaaccctatgagtgcaaggaatgtggcaaagcctttagtagtggctcagcacttactaatcatcagagaattcacactggtgagaaaccctatgattgtaaggaatgtggaaaggcttttactcagagctcacagcttcgtcaacatcagagaattcacgctggtgagaaaccctttgaatgtcttgaatgtgggaaggcctttactcagaactcacaacttttccagcatcagagaattcatacagatgaaaaaccatatgaatgtaatgaatgtggaaaggcctttaataaatgctcaaaccttactcgacatctgagaattcacactggtgaaaagccctataactgtaaggaatgtgggaaggcttttagtagtggctcggatctcattcgtcatcagggaattcatactaataaataataaaaattaaagcccctgtcaccttcctcatattttaaaccaaaaatcatgtctaatagttaccctcttccgtagttttttttaaaactttgtatttaaattttgtatccaaatgtatttcattccaggttataaattcggagtctaaagtgacattccctctctcccccagtcatataccgatgccagctgttctataattctttcattcattgttttgttctactttcttggtgacacattatactcatgtttat

SEQ ID NO: 202299 - DNA, 582 bp, Homo sapiens
  Payload ID: 19905
  Gene Name: zinc finger protein 383
  ENST ID: ENST00000588371
  CDS Start-End: 240-582
tttgtgtgtggagacgagagattgtagaaataaagacccaagacagagatagaagaaaagacagctgggcctgagggaccactatcaccaagacacagagaccggtattggccccgaatgcctggtcgcgctgttatttattgtgtataaggcaaaggggcagggtatggagtgagagtcatctccagtgatcggagaacggcctcaaggaagactaaccatctgcaatactagaagccatggctgagggatcagtgatgttcagtgatgtgtccatagacttctctcaggaggagtgggactgcctggaccctgttcagagggacttatacagagatgtgatgttggagaactacggcaatctggtttcaatgggactttacactcctaagcctcaagtgatctccttattggaacaagggaaagagccctggatggttggcagagagcttacaagaggcctgtgttcagatctggaatcgatgtgtgaaaccaagttattatctctaaagaaggaagtttatgaaatagaattatgccagagggagataatgggacttacaaagcatggccttgagtact

SEQ ID NO: 202300 - DNA, 1673 bp, Homo sapiens
  Payload ID: 19905
  Gene Name: zinc finger protein 383
  Uniprot ID: Q8NA42
  ENST ID: ENST00000590503
  CDS Start-End: 225-1652
tttgcctgctggaccctccgcctcaaggatagtagctgtagatccaaaatgacctctgatctgctcagtctgggccacaagaaaggcctggcatctcatcattcctttcttcttcagctctgctctcgtcaagagagttacccagaggaagaatggctgttgaccaaaccaaatacaaggagaacggcctcaaggaagactaaccatctgcaatactagaagccatggctgagggatcagtgatgttcagtgatgtgtccatagacttctctcaggaggagtgggactgcctggaccctgttcagagggacttatacagagatgtgatgttggagaactacggcaatctggtttcaatgggactttacactcctaagcctcaagtgatctccttattggaacaagggaaagagccctggatggttggcagagagcttacaagaggcctgtgttcagatctggaatcgatgtgtgaaaccaagttattatctctaaagaaggaagtttatgaaatagaattatgccagagggagataatgggacttacaaagcatggccttgagtactccagttttggagatgttttggaatatagaagccaccttgcaaaacaactgggatatccaaatgggcattttagtcaagaaatattcactcctgaatacatgcccacatttattcaacagacattccttactctccatcaaataattaataatgaagacagaccctatgaatgtaagaaatgtggaaaggcctttagtcagaactcacaatttattcaacatcagagaattcatattggtgaaaaatcttatgaatgtaaagagtgtgggaaattctttagttgtggttcacatgttactcggcatctgaaaattcatactggcgaaaaaccctttgaatgtaaggaatgtggaaaggccttcagttgtagctcatacctttctcaacatcagagaatccataccggtaagaaaccctatgaatgtaaggaatgtgggaaggcctttagttattgctcaaatcttattgaccatcagcgaattcacactggtgaaaaaccttatgaatgtaaagtatgtgggaaagcctttactaagagctcacaactttttcagcatgcacgaattcatacaggtgagaaaccctatgaatgtaaggaatgtggcaaagcctttacccagagctcaaagcttgttcaacatcagagaattcatactggtgagaaaccctatgagtgcaaggaatgtggcaaagcctttagtagtggctcagcacttactaatcatcagagaattcacactggtgagaaaccctatgattgtaaggaatgtggaaaggcttttactcagagctcacagcttcgtcaacatcagagaattcacgctggtgagaaaccctttgaatgtcttgaatgtgggaaggcctttactcagaactcacaacttttccagcatcagagaattcatacagatgaaaaaccatatgaatgtaatgaatgtggaaaggcctttaataaatgctcaaaccttactcgacatctgagaattcacactggtgaaaagccctataactgtaaggaatgtgggaaggcttttagtagtggctcggatctcattcgtcatcagggaattcatactaataaataataaaaattaaagcccctgtca

SEQ ID NO: 202301 - DNA, 639 bp, Homo sapiens
  Payload ID: 19905
  Gene Name: zinc finger protein 383
  ENST ID: ENST00000588250
  CDS Start-End: 43-288
aacggcctcaaggaagactaaccatctgcaatactagaagccatggctgagggatcagtgatgttcagtgatgtgtccatagacttctctcaggaggagtgggactgcctggaccctgttcagagggacttatacagagatgtgatgttggagaactacggcaatctggtttcaatgggtaagggcatctgtaccagtgattcccagttctcctctggaatgtctccttcttccacagtgaatttctcagctgcttttcaggactttacactcctaagcctcaagtgatctccttattggaacaagggaaagagccctggatggttggcagagagcttacaagaggcctgtgttcagatctggaatcgatgtgtgaaaccaagttattatctctaaagaaggaagtttatgaaatagaattatgccagagggagataatgggacttacaaagcatggccttgagtactccagttttggagatgttttggaatatagaagccaccttgcaaaacaactgggatatccaaatgggcattttagtcaagaaatattcactcctgaatacatgcccacatttattcaacagacattccttactctccatcaaataattaataatgaagacagaccctatgaat

SEQ ID NO: 202302 - DNA, 3266 bp, Homo sapiens
  Payload ID: 19906
  Gene Name: zinc finger protein 384
  Uniprot ID: Q8TF68
  ENST ID: ENST00000319770
  CDS Start-End: 479-2029
gctatttccctccctccccccttttcgtttccggcgctcccgccttctctccgcagagctcttctctgagcctgttggggggagggaggggggcgtggaggaactggggttcgcgggagcacgagctgcagcaccacttccgggtgagtgcaaggggagggcagcaaggagggggggccacccactacctcgcgcccccgccctgcgggtgtctcgcgcgcgttccgtgcgtgtgagtgtgtgggtctgtctcgctccagaagtgcgtgcccgcgcgctgcgccttgcgctttttcccctccctcgccccttcctggtcctcccaccctcctcggctccctcctttcccagcaaacgccgcccctcccgcgccctggctcaggctctggcgccgccgcagccgtcgccgcccgaaagttcaggagccctggaaaggagaaggaataagacggcaggaggaagagagagagagggtagaatggaagaatctcacttcaattctaacccgtacttctggccttctatccccacagtctcaggtcagatcgagaacacaatgttcatcaacaagatgaaggatcagctgttgccagagaagggctgtggtctggccccacctcactaccccaccttgctgacagtgcctgcctcagtgtccctgccctcaggcatcagtatggacacagagtccaagtcagaccagctgaccccacacagccaagcgtccgttacccagaatatcacggtggtccctgtgccgtctacaggactgatgactgctggagtctcctgttctcagaggtggagaagagaagggagtcaatcaaggggtccgggtttggtaatcacgtccccctcaggctctcttgtgaccacagcatcatcagctcagaccttccccatttcggctcccatgattgtctcagctcttccccctggctcacaagccctgcaggttgtccctgacctctccaagaaggtagcatcgaccctaaccgaggaaggaggcggaggtggtggtggaggtggcagtgtggctcctaagccaccccggggccggaagaagaagcggatgctggaatcagggctgcccgagatgaatgacccttatgtcctctcccctgaggatgatgatgaccatcagaaagacggcaagacctacaggtgccggatgtgctcactgacattctactccaagtcggagatgcagatccactccaagtcacacaccgagaccaagccccacaagtgcccacattgctccaagaccttcgccaacagctcctacctggcccagcacatccgtatacactcaggggctaagccctacagttgtaacttctgtgagaaatccttccgccagctctcccaccttcagcagcacacccgaatccacactggtgatagaccatacaaatgtgcacacccaggctgtgagaaagccttcacacaactctccaatctgcagtcccacagacggcaacacaacaaagataaacccttcaagtgccacaactgtcatcgggcgtacacggatgcagcctcactagaggtgcacctgtctacgcacacagtgaagcatgccaaggtgtacacctgcactatctgcagtcgggcatacacatcagaaacataccttatgaaacatatgcgcaaacacaacccgcctgatcttcagcaacaggtgcaggcagcagcagcagcggcagcagtggcccaggcccaggctcaagctcaagcccaggctcaggctcaggctcaagcccaggcccaggcccaggcctcccaggcatcacagcagcagcagcagcagcagcagcagcagcagcagcagcagcaacagccaccaccacacttccagtctcctggggcagccccccagggtgggggtggtggggacagcaatcccaaccctccaccccagtgttcctttgacctgaccccgtataagacggcggagcatcataaggacatctgcctcactgtcaccaccagcaccatccaggtggagcacctggccagctcttagagatccgtgctgccacccactgggaagaggaagaagtagtcctggtgtcttctttctccaactcttggtgggaaaagtccttttcttccttgacaggccttggctccatctccttgggcctctgtcacggctttccttcacaggataccatcctttttctgaactcttcttcaaaaggaacatcagccctcctgattgcaaaggaatactgagctgatggtgtcatccagcagcctcccctcccaagcaaagcttctaaaactgggggtcggtgctcaagggaaggatttgctatgacctcatagaaccttgtccagtgtggccacttaccctatccttaccctccttatcctcaaagtttgggctgatgtaagactagaggctggccctcccagataacagagaaaagggagccccaaatgcaaccagcctcttgttctattcttgcctgcaaaagaacagaggtttctcaaatgcctcagtccctgagagccatttcttcccctacatcgtctcactttgcttcctattgactgctggtagaaggagatttggggtaggggctagacctccttttatttgaagggggcaagggctgagatgtggtccccaaggggccagaaattcccaagttggtcacaggtggcttagaagtgtgtgttatggttttacggatttccttgaagcctctctccttctctgcctacaaagaccctatactctcagtctccccaacccacccccaaggagctgtgggaggctttgtgttatctgtgaaactccaaaacaggggtgttgcggagaagggagagttcaaggcaaacgcaaggactggacttagctccctaggtgccacagtcagatgccggacacggatttatatataaatatatatatataaatatattatactcactcatcacggccatctttgttgtaaccatttctgtgtttataaatgcattatctctgagaattttcatatttgatgttttgtttatttttgtcctttttttccctctctccacccctgtcctctagccacagcatttttctttttgtcttttttttttttttttaaatcatggcagatttcagaggaaaggaaattaaaaaaaaaatcaggaaaccagttgttataaagtaatttaaaaatgaagaaaaaaagaaaaaaacttatgtacaaaccaaggggtgtttttagaacattgtatagaaataaattcatgtaaaagga

SEQ ID NO: 202303 - DNA, 2514 bp, Homo sapiens
  Payload ID: 19906
  Gene Name: zinc finger protein 384
  Uniprot ID: Q8TF68
  ENST ID: ENST00000355772
  CDS Start-End: 153-1538
agctcttctctgagcctgttggggggagggaggggggcgtggaggaactggggttcgcgggagcacgagctgcagcaccacttccggaaagttcaggagccctggaaaggagaaggaataagacggcaggaggaagagagagagagggtagaatggaagaatctcacttcaattctaacccgtacttctggccttctatccccacagtctcaggtcagatcgagaacacaatgttcatcaacaagatgaaggatcagctgttgccagagaagggctgtggtctggccccacctcactaccccaccttgctgacagtgcctgcctcagtgtccctgccctcaggcatcagtatggacacagagtccaagtcagaccagctgaccccacacagccaagcgtccgttacccagaatatcacggtggtccctgtgccgtctacaggactgatgactgctgccctgcaggttgtccctgacctctccaagaaggtagcatcgaccctaaccgaggaaggaggcggaggtggtggtggaggtggcagtgtggctcctaagccaccccggggccggaagaagaagcggatgctggaatcagggctgcccgagatgaatgacccttatgtcctctcccctgaggatgatgatgaccatcagaaagacggcaagacctacaggtgccggatgtgctcactgacattctactccaagtcggagatgcagatccactccaagtcacacaccgagaccaagccccacaagtgcccacattgctccaagaccttcgccaacagctcctacctggcccagcacatccgtatacactcaggggctaagccctacagttgtaacttctgtgagaaatccttccgccagctctcccaccttcagcagcacacccgaatccacactggtgatagaccatacaaatgtgcacacccaggctgtgagaaagccttcacacaactctccaatctgcagtcccacagacggcaacacaacaaagataaacccttcaagtgccacaactgtcatcgggcgtacacggatgcagcctcactagaggtgcacctgtctacgcacacagtgaagcatgccaaggtgtacacctgcactatctgcagtcgggcatacacatcagaaacataccttatgaaacatatgcgcaaacacaacccgcctgatcttcagcaacaggtgcaggcagcagcagcagcggcagcagtggcccaggcccaggctcaagctcaagcccaggctcaggctcaggctcaagcccaggcccaggcccaggcctcccaggcatcacagcagcagcagcagcagcagcagcagcagcagcagcagcagcaacagccaccaccacacttccagtctcctggggcagccccccagggtgggggtggtggggacagcaatcccaaccctccaccccagtgttcctttgacctgaccccgtataagacggcggagcatcataaggacatctgcctcactgtcaccaccagcaccatccaggtggagcacctggccagctcttagagatccgtgctgccacccactgggaagaggaagaagtagtcctggtgtcttctttctccaactcttggtgggaaaagtccttttcttccttgacaggccttggctccatctccttgggcctctgtcacggctttccttcacaggataccatcctttttctgaactcttcttcaaaaggaacatcagccctcctgattgcaaaggaatactgagctgatggtgtcatccagcagcctcccctcccaagcaaagcttctaaaactgggggtcggtgctcaagggaaggatttgctatgacctcatagaaccttgtccagtgtggccacttaccctatccttaccctccttatcctcaaagtttgggctgatgtaagactagaggctggccctcccagataacagagaaaagggagccccaaatgcaaccagcctcttgttctattcttgcctgcaaaagaacagaggtttctcaaatgcctcagtccctgagagccatttcttcccctacatcgtctcactttgcttcctattgactgctggtagaaggagatttggggtaggggctagacctccttttatttgaagggggcaagggctgagatgtggtccccaaggggccagaaattcccaagttggtcacaggtggcttagaagtgtgtgttatggttttacggatttccttgaagcctctctccttctctgcctacaaagaccctatactctcagtctccccaacccacccccaaggagctgtgggaggctttgtgttatctgtgaaactccaaaacaggggtgttgcggagaagggagagttcaaggcaaacgcaaggactggacttagctccctaggtgccacagtcagatgccggacacggatttatatataaatatatatatataaatatattatactcactcatcacggccatctttgttgtaaccatttctgtgtttataaatgcattatctctgagaa

SEQ ID NO: 202304 - DNA, 2978 bp, Homo sapiens
  Payload ID: 19906
  Gene Name: zinc finger protein 384
  Uniprot ID: Q8TF68
  ENST ID: ENST00000361959
  CDS Start-End: 261-1994
cgcgttccgtgcgtgtgagtgtgtgggtctgtctcgctccagaagtgcgtgcccgcgcgctgcgccttgcgctttttcccctccctcgccccttcctggtcctcccaccctcctcggctccctcctttcccagcaaacgccgcccctcccgcgccctggctcaggctctggcgccgccgcagccgtcgccgcccgaaagttcaggagccctggaaaggagaaggaataagacggcaggaggaagagagagagagggtagaatggaagaatctcacttcaattctaacccgtacttctggccttctatccccacagtctcaggtcagatcgagaacacaatgttcatcaacaagatgaaggatcagctgttgccagagaagggctgtggtctggccccacctcactaccccaccttgctgacagtgcctgcctcagtgtccctgccctcaggcatcagtatggacacagagtccaagtcagaccagctgaccccacacagccaagcgtccgttacccagaatatcacggtggtccctgtgccgtctacaggactgatgactgctggagtctcctgttctcagaggtggagaagagaagggagtcaatcaaggggtccgggtttggtaatcacgtccccctcaggctctcttgtgaccacagcatcatcagctcagaccttccccatttcggctcccatgattgtctcagctcttccccctggctcacaagccctgcaggttgtccctgacctctccaagaaggtagcatcgaccctaaccgaggaaggaggcggaggtggtggtggaggtggcagtgtggctcctaagccaccccggggccggaagaagaagcggatgctggaatcagggctgcccgagatgaatgacccttatgtcctctcccctgaggatgatgatgaccatcagaaagacggcaagacctacaggtgccggatgtgctcactgacattctactccaagtcggagatgcagatccactccaagtcacacaccgagaccaagccccacaagtgcccacattgctccaagaccttcgccaacagctcctacctggcccagcacatccgtatacactcaggggctaagccctacagttgtaacttctgtgagaaatccttccgccagctctcccaccttcagcagcacacccggatccactccaagatgcacacggagaccatcaagccccacaagtgcccgcactgctccaagaccttcgccaacacctcctacctggcccagcacctccgtatccactcgggggccaagccctacaactgttcctactgccagaaggccttccgccagctctcccacctccagcagcacacacgaatccacactggtgatagaccatacaaatgtgcacacccaggctgtgagaaagccttcacacaactctccaatctgcagtcccacagacggcaacacaacaaagataaacccttcaagtgccacaactgtcatcgggcgtacacggatgcagcctcactagaggtgcacctgtctacgcacacagtgaagcatgccaaggtgtacacctgcactatctgcagtcgggcatacacatcagaaacataccttatgaaacatatgcgcaaacacaacccgcctgatcttcagcaacaggtgcaggcagcagcagcagcggcagcagtggcccaggcccaggctcaagctcaagcccaggctcaggctcaggctcaagcccaggcccaggcccaggcctcccaggcatcacagcagcagcagcagcagcagcagcagcagcagcagcagcagcaacagccaccaccacacttccagtctcctggggcagccccccagggtgggggtggtggggacagcaatcccaaccctccaccccagtgttcctttgacctgaccccgtataagacggcggagcatcataaggacatctgcctcactgtcaccaccagcaccatccaggtggagcacctggccagctcttagagatccgtgctgccacccactgggaagaggaagaagtagtcctggtgtcttctttctccaactcttggtgggaaaagtccttttcttccttgacaggccttggctccatctccttgggcctctgtcacggctttccttcacaggataccatcctttttctgaactcttcttcaaaaggaacatcagccctcctgattgcaaaggaatactgagctgatggtgtcatccagcagcctcccctcccaagcaaagcttctaaaactgggggtcggtgctcaagggaaggatttgctatgacctcatagaaccttgtccagtgtggccacttaccctatccttaccctccttatcctcaaagtttgggctgatgtaagactagaggctggccctcccagataacagagaaaagggagccccaaatgcaaccagcctcttgttctattcttgcctgcaaaagaacagaggtttctcaaatgcctcagtccctgagagccatttcttcccctacatcgtctcactttgcttcctattgactgctggtagaaggagatttggggtaggggctagacctccttttatttgaagggggcaagggctgagatgtggtccccaaggggccagaaattcccaagttggtcacaggtggcttagaagtgtgtgttatggttttacggatttccttgaagcctctctccttctctgcctacaaagaccctatactctcagtctccccaacccacccccaaggagctgtgggaggctttgtgttatctgtgaaactccaaaacaggggtgttgcggagaagggagagttcaaggcaaacgcaaggactggacttagctccctaggtgccacagtcagatgccggacacggatttatatataaatatatatatataaatatattatactcactcatcacggccatctttgttgtaaccatttctgtgtttataaatgcattatctctgagaattttcata

SEQ ID NO: 202305 - DNA, 3008 bp, Homo sapiens
  Payload ID: 19906
  Gene Name: zinc finger protein 384
  Uniprot ID: Q8TF68
  ENST ID: ENST00000396801
  CDS Start-End: 209-1942
gctatttccctccctccccccttttcgtttccggcgctcccgccttctctccgcagagctcttctctgagcctgttggggggagggaggggggcgtggaggaactggggttcgcgggagcacgagctgcagcaccacttccggaaagttcaggagccctggaaaggagaaggaataagacggcaggaggaagagagagagagggtagaatggaagaatctcacttcaattctaacccgtacttctggccttctatccccacagtctcaggtcagatcgagaacacaatgttcatcaacaagatgaaggatcagctgttgccagagaagggctgtggtctggccccacctcactaccccaccttgctgacagtgcctgcctcagtgtccctgccctcaggcatcagtatggacacagagtccaagtcagaccagctgaccccacacagccaagcgtccgttacccagaatatcacggtggtccctgtgccgtctacaggactgatgactgctggagtctcctgttctcagaggtggagaagagaagggagtcaatcaaggggtccgggtttggtaatcacgtccccctcaggctctcttgtgaccacagcatcatcagctcagaccttccccatttcggctcccatgattgtctcagctcttccccctggctcacaagccctgcaggttgtccctgacctctccaagaaggtagcatcgaccctaaccgaggaaggaggcggaggtggtggtggaggtggcagtgtggctcctaagccaccccggggccggaagaagaagcggatgctggaatcagggctgcccgagatgaatgacccttatgtcctctcccctgaggatgatgatgaccatcagaaagacggcaagacctacaggtgccggatgtgctcactgacattctactccaagtcggagatgcagatccactccaagtcacacaccgagaccaagccccacaagtgcccacattgctccaagaccttcgccaacagctcctacctggcccagcacatccgtatacactcaggggctaagccctacagttgtaacttctgtgagaaatccttccgccagctctcccaccttcagcagcacacccggatccactccaagatgcacacggagaccatcaagccccacaagtgcccgcactgctccaagaccttcgccaacacctcctacctggcccagcacctccgtatccactcgggggccaagccctacaactgttcctactgccagaaggccttccgccagctctcccacctccagcagcacacacgaatccacactggtgatagaccatacaaatgtgcacacccaggctgtgagaaagccttcacacaactctccaatctgcagtcccacagacggcaacacaacaaagataaacccttcaagtgccacaactgtcatcgggcgtacacggatgcagcctcactagaggtgcacctgtctacgcacacagtgaagcatgccaaggtgtacacctgcactatctgcagtcgggcatacacatcagaaacataccttatgaaacatatgcgcaaacacaacccgcctgatcttcagcaacaggtgcaggcagcagcagcagcggcagcagtggcccaggcccaggctcaagctcaagcccaggctcaggctcaggctcaagcccaggcccaggcccaggcctcccaggcatcacagcagcagcagcagcagcagcagcagcagcagcagcagcagcaacagccaccaccacacttccagtctcctggggcagccccccagggtgggggtggtggggacagcaatcccaaccctccaccccagtgttcctttgacctgaccccgtataagacggcggagcatcataaggacatctgcctcactgtcaccaccagcaccatccaggtggagcacctggccagctcttagagatccgtgctgccacccactgggaagaggaagaagtagtcctggtgtcttctttctccaactcttggtgggaaaagtccttttcttccttgacaggccttggctccatctccttgggcctctgtcacggctttccttcacaggataccatcctttttctgaactcttcttcaaaaggaacatcagccctcctgattgcaaaggaatactgagctgatggtgtcatccagcagcctcccctcccaagcaaagcttctaaaactgggggtcggtgctcaagggaaggatttgctatgacctcatagaaccttgtccagtgtggccacttaccctatccttaccctccttatcctcaaagtttgggctgatgtaagactagaggctggccctcccagataacagagaaaagggagccccaaatgcaaccagcctcttgttctattcttgcctgcaaaagaacagaggtttctcaaatgcctcagtccctgagagccatttcttcccctacatcgtctcactttgcttcctattgactgctggtagaaggagatttggggtaggggctagacctccttttatttgaagggggcaagggctgagatgtggtccccaaggggccagaaattcccaagttggtcacaggtggcttagaagtgtgtgttatggttttacggatttccttgaagcctctctccttctctgcctacaaagaccctatactctcagtctccccaacccacccccaaggagctgtgggaggctttgtgttatctgtgaaactccaaaacaggggtgttgcggagaagggagagttcaaggcaaacgcaaggactggacttagctccctaggtgccacagtcagatgccggacacggatttatatataaatatatatatataaatatattatactcactcatcacggccatctttgttgtaaccatttctgtgtttataaatgcattatctctgagaattttcatatttgatgttttgtttatttttgtcctttttttccctctctccacccctgtcctctagccacagcatttttctttttgtcttt

SEQ ID NO: 202306 - DNA, 1286 bp, Homo sapiens
  Payload ID: 19906
  Gene Name: zinc finger protein 384
  ENST ID: ENST00000417772
  CDS Start-End: 154-1286
gagctcttctctgagcctgttggggggagggaggggggcgtggaggaactggggttcgcgggagcacgagctgcagcaccacttccggaaagttcaggagccctggaaaggagaaggaataagacggcaggaggaagagagagagagggtagaatggaagaatctcacttcaattctaacccgtacttctggccttctatccccacagtctcaggtcagatcgagaacacaatgttcatcaacaagatgaaggatcagctgttgccagagaagggctgtggtctggccccacctcactaccccaccttgctgacagtgcctgcctcagtgtccctgccctcaggcatcagtatggacacagagtccaagtcagaccagctgaccccacacagccaagcgtccgttacccagaatatcacggtggtccctgtgccgtctacaggactgatgactgctggagtctcctgttctcagaggtggagaagagaagggagtcaatcaaggggtccgggtttggtaatcacgtccccctcaggctctcttgtgaccacagcatcatcagctcagaccttccccatttcggctcccatgattgtctcagctcttccccctggctcacaagccctgcaggttgtccctgacctctccaagaaggtagcatcgaccctaaccgaggaaggaggcggaggtggtggtggaggtggcagtgtggctcctaagccaccccggggccggaagaagaagcggatgctggaatcagggctgcccgagatgaatgacccttatgtcctctcccctgaggatgatgatgaccatcagaaagacggcaagacctacaggagcgaagggaactgcggcacaggaaatggacagagccttgggctcatggattcagttcccggctccaccacgaatttgctgtgtgaccctgggtgccggatgtgctcactgacattctactccaagtcggagatgcagatccactccaagtcacacaccgagaccaagccccacaagtgcccacattgctccaagaccttcgccaacagctcctacctggcccagcacatccgtatacactcaggggctaagccctacagttgtaacttctgtgagaaatccttccgccagctctcccaccttcagcagcacacccggatccactccaagatgcacacggagaccatcaagccccacaagtgcccgcactgctccaagaccttcgccaacacctcctacctggcccagcacctccgtatccactcgggggccaagccctacaactg

SEQ ID NO: 202307 - DNA, 1096 bp, Homo sapiens
  Payload ID: 19906
  Gene Name: zinc finger protein 384
  ENST ID: ENST00000436774
  CDS Start-End: 266-1096
tcgcgcgcgttccgtgcgtgtgagtgtgtgggtctgtctcgctccagaagtgcgtgcccgcgcgctgcgccttgcgctttttcccctccctcgccccttcctggtcctcccaccctcctcggctccctcctttcccagcaaacgccgcccctcccgcgccctggctcaggctctggcgccgccgcagccgtcgccgcccgaaagttcaggagccctggaaaggagaaggaataagacggcaggaggaagagagagagagggtagaatggaagaatctcacttcaattctaacccgtacttctggccttctatccccacagtctcaggtcagatcgagaacacaatgttcatcaacaagatgaaggatcagctgttgccagagaagggctgtggtctggccccacctcactaccccaccttgctgacagtgcctgcctcagtgtccctgccctcaggcatcagtatggacacagagtccaagtcagaccagctgaccccacacagccaagcgtccgttacccagaatatcacggtggtccctgtgccgtctacaggactgatgactgctggtccgggtttggtaatcacgtccccctcaggctctcttgtgaccacagcatcatcagctcagaccttccccatttcggctcccatgattgtctcagctcttccccctggctcacaagccctgcaggttgtccctgacctctccaagaaggtagcatcgaccctaaccgaggaaggaggcggaggtggtggtggaggtggcagtgtggctcctaagccaccccggggccggaagaagaagcggatgctggaatcagggctgcccgagatgaatgacccttatgtcctctcccctgaggatgatgatgaccatcagaaagacggcaagacctacaggtgccggatgtgctcactgacattctactccaagtcggagatgcagatccactccaagtcacacaccgagaccaagccccacaagtgcccacattgctccaagaccttcgccaacagctcctacctggcccagcacatccgtatacactcaggggctaagccctacagttgtaacttctgtgagaaatccttc

SEQ ID NO: 202308 - DNA, 912 bp, Homo sapiens
  Payload ID: 19906
  Gene Name: zinc finger protein 384
  ENST ID: ENST00000535485
  CDS Start-End: 409-912
tcaggggcacagaccctcctcctcctccatctctaatgttctctgacccctggttacctgtggcctgggaacgaacaaggaccagtctctgagcctaggagtgaaacccaaacgctggtgatagaattcgtcttagtttctgggaattggatttatttctcttgtatccacgtagagggtagcactagactgctgttattatatccacccgtctttggattgctggctggggggtctgcctgccttccagactgactgctgacaaataattcctgaggttctccacagttctctggtggctgcaccctgcctggcccctgtaacctagacaatttgtttacagaaagttcaggagccctggaaaggagaaggaataagacggcaggaggaagagagagagagggtagaatggaagaatctcacttcaattctaacccgtacttctggccttctatccccacagtctcaggtcagatcgagaacacaatgttcatcaacaagatgaaggatcagctgttgccagagaagggctgtggtctggccccacctcactaccccaccttgctgacagtgcctgcctcagtgtccctgccctcaggcatcagtatggacacagagtccaagtcagaccagctgaccccacacagccaagcgtccgttacccagaatatcacggtggtccctgtgccgtctacaggactgatgactgctggtccgggtttggtaatcacgtccccctcaggctctcttgtgaccacagcatcatcagctcagaccttccccatttcggctcccatgattgtctcagctcttccccctggctcacaagccctgcaggttgtccctgacctctccaagaaggtagcatcgaccctaaccgaggaaggaggcggaggtggtggtggaggtggc

SEQ ID NO: 202309 - DNA, 557 bp, Homo sapiens
  Payload ID: 19906
  Gene Name: zinc finger protein 384
  ENST ID: ENST00000544482
  CDS Start-End: 208-557
tctcgcgcgcgttccgtgcgtgtgagtgtgtgggtctgtctcgctccagaagtgcgtgcccgcgcgctgcgccttgcgctttttcccctccctcgccccttcctggtcctcccaccctcctcggctccctcctttcccagcaaacgccgcccctcccgcgccctggctcaggctctggcgccgccgcagccgtcgccgcccggtagaatggaagaatctcacttcaattctaacccgtacttctggccttctatccccacagtctcaggtcagatcgagaacacaatgttcatcaacaagatgaaggatcagctgttgccagagaagggctgtggtctggccccacctcactaccccaccttgctgacagtgcctgcctcagtgtccctgccctcaggcatcagtatggacacagagtccaagtcagaccagctgaccccacacagccaagcgtccgttacccagaatatcacggtggtccctgtgccgtctacaggactgatgactgctggagtctcctgttctcagaggtggagaagagaagggagtcaatcaag

SEQ ID NO: 202310 - DNA, 572 bp, Homo sapiens
  Payload ID: 19906
  Gene Name: zinc finger protein 384
  ENST ID: ENST00000542351
  CDS Start-End: 219-572
aaggaagggtctttgagaaaggggtaggggacgacatcaggagaaggctcccaggaactgtctcaggggagcgaaggttttgaggggacagctggggtctccagtagatagaccacggtgcaggctgagggaggtacttcttggcacaaggcctcggaaagttcaggagccctggaaaggagaaggaataagacggcaggaggaagagagagagaggaatggaagaatctcacttcaattctaacccgtacttctggccttctatccccacagtctcaggtcagatcgagaacacaatgttcatcaacaagatgaaggatcagctgttgccagagaagggctgtggtctggccccacctcactaccccaccttgctgacagtgcctgcctcagtgtccctgccctcaggcatcagtatggacacagagtccaagtcagaccagctgaccccacacagccaagcgtccgttacccagaatatcacggtggtccctgtgccgtctacaggactgatgactgctggagtctcctgttctcagaggtggagaagagaagggagtcaatcaaggggt

SEQ ID NO: 202311 - DNA, 1140 bp, Homo sapiens
  Payload ID: 19906
  Gene Name: zinc finger protein 384
  ENST ID: ENST00000540915
  CDS Start-End: 529-1140
gaagtcctcgaagaagtggggggaaggctagaggaagtggctgggcctgaactggcactgtgcctgccacaaggtcttgtgcatcccccagccctcagctttgccttctgaagccactcctcaggggcacagaccctcctcctcctccatctctaatgttctctgacccctggttacctgtggcctgggaacgaacaaggaccagtctctgagcctaggagtgaaacccaaacgctggtgatagaattcgtcttagtttctgggaattggatttatttctcttgtatccacgtagagggtagcactagactgctgttattatatccacccgtctttggattgctggctggggggtctgcctgccttccagactgactgctgacaaataattcctgaggttctccacagttctctggtggctgcaccctgcctggcccctgtaacctagacaatttgtttacagaaagttcaggagccctggaaaggagaaggaataagacggcaggaggaagagagagagagggtagaatggaagaatctcacttcaattctaacccgtacttctggccttctatccccacagtctcaggtcagatcgagaacacaatgttcatcaacaagatgaaggatcagctgttgccagagaagggctgtggtctggccccacctcactaccccaccttgctgacagtgcctgcctcagtgtccctgccctcaggcatcagtatggacacagagtccaagtcagaccagctgaccccacacagccaagcgtccgttacccagaatatcacggtggtccctgtgccgtctacaggactgatgactgctggagtctcctgttctcagaggtggagaagagaagggagtcaatcaaggggtccgggtttggtaatcacgtccccctcaggctctcttgtgaccacagcatcatcagctcagaccttccccatttcggctcccatgattgtctcagctcttccccctggctcacaagccctgcaggttgtccctgacctctccaagaaggtagcatcgaccctaaccgaggaaggaggcggaggtggtggtggaggtggcagtgtggctcctaagccaccccggggccggaagaagaagcggatgctggaatcagggctg

SEQ ID NO: 202312 - DNA, 506 bp, Homo sapiens
  Payload ID: 19906
  Gene Name: zinc finger protein 384
  ENST ID: ENST00000538829
  CDS Start-End: 126-506
agagttcagctccctggaggggaaggagggacgtcccaaggaagggtctttgagaaagggaaagttcaggagccctggaaaggagaaggaataagacggcaggaggaagagagagagagggtagaatggaagaatctcacttcaattctaacccgtacttctggccttctatccccacagtctcaggtcagatcgagaacacaatgttcatcaacaagatgaaggatcagctgttgccagagaagggctgtggtctggccccacctcactaccccaccttgctgacagtgcctgcctcagtgtccctgccctcaggcatcagtatggacacagagtccaagtcagaccagctgaccccacacagccaagcgtccgttacccagaatatcacggtggtccctgtgccgtctacaggactgatgactgctggagtctcctgttctcagaggtggagaagagaagggagtcaatcaaggggtccgggtttggtaatcacgtccccctca

SEQ ID NO: 202313 - DNA, 500 bp, Homo sapiens
  Payload ID: 19906
  Gene Name: zinc finger protein 384
  ENST ID: ENST00000545946
  CDS Start-End: 1-478
cttcaagtgccacaactgtcatcgggcgtacacggatgcagcctcactagaggtgcacctgtctacgcacacagtgaagcatgccaaggtgtacacctgcactatctgcagtcgggcatacacatcacaacaggtgcaggcagcagcagcagcggcagcagtggcccaggcccaggctcaagctcaagcccaggctcaggctcaggctcaagcccaggcccaggcccaggcctcccaggcatcacagcagcagcagcagcagcagcagcagcagcagcagcagcagcaacagccaccaccacacttccagtctcctggggcagccccccagggtgggggtggtggggacagcaatcccaaccctccaccccagtgttcctttgacctgaccccgtataagacggcggagcatcataaggacatctgcctcactgtcaccaccagcaccatccaggtggagcacctggccagctcttagagatccgtgctgccacccactg

SEQ ID NO: 202314 - DNA, 2076 bp, Homo sapiens
  Payload ID: 19907
  Gene Name: zinc finger protein 385A
  Uniprot ID: Q96PM9
  ENST ID: ENST00000352268
  CDS Start-End: 38-955
agagcgacgcggaaccccgggcgcctgggtccccagcatgatcctcggcagcctgagccgggcagggcccctgcctctgctacggcagcccccgatcatgcagcccccactggacctcaagcagatcctgcccttcccactcgagccagcccctacccttggcctcttcagcaactacagcaccatggaccctgtgcagaaggctgtgctctcccacacttttgggggacccttgctcaagaccaagcggcccgtcatttcctgtaatatctgtcaaatccgcttcaattctcagagccaggctgaggcgcactacaaaggtaatcgccacgcccgacgagtcaaaggcattgaggctgccaagaccagaggcagggagcctggcgtccgagaacctggagacccagctcccccaggcagcaccccaacaaatggggatggtgtagcaccccgtccaggtactaagcacaagacaattctggaggcccgaagtgggctcgggcccatcaaagcttaccctcggctggggcctcccaccccgggggaaccagaggctcctgcccaggaccgaactttccactgtgagatctgcaatgtcaaggtcaactcggaggtccaactgaaacagcacatctccagccggcggcaccgagacggcgtggccgggaagcccaacccactactgagccgtcacaagaagtctaggggcgccggggagctggcgggcacgctgactttctccaaggagctgcccaagtccctggcgggcggcctgctccccagccccctggcggtggctgcagtgatggcagcggcagcaggctcgccgctgtccctgcgcccggctccagccgcacctcttctccagggaccgccgatcactcaccctctgcttcacccggcccccggacccatccgaactgcgcacggacccatcctcttctccccgtactgacctcaaccctgaacccctcccattcaactccccacctccagccgggacccaggcgtccgggctcccagcccgcccctcctcccggcactccctaaatgatctctccttccccccccccaccccgagatacggggttccaggaaaggggaggggtagcgggggaggggggcttcagaagggggggaacaccccagatctcagggaaccccgccccctgcctttccctctcccctagaaaagggggggccgtctcacccccgagcccccttggagacaccccccctcccaaaagccatgtccatccagcccttccccccaaacctagcacaaaacggggttcacaagccatggtcggggtccgggggggacagaaatggattttcttggcaataagcggactctgggactccggctccctaccccaaactgaagcgcttccgtgaacacccccgtcctccgtagggggaggggagcaggcgggatcctgggtccctcataagcactttggttttaccgcctgcaacctcactgtgcccgccccgcaccatgccctagccccaggtctagccgggcccattgcagggggcagcacttgggggcatctccggcacttgggtgggaccaaggagatgccaccatagacctttccctcgccttcttcctccctagtccgggttccattcttttcaccagcacccatcgcccaaggggtaccgaggggggcaaggggtgtccagtccaagcccacccccgcctcgccttccgcaaaactgtgagcaaaaagcaatagaagcctcgcccccgcccttccccttcgcaggattcgccgagtctgtagcctccccgatccaagttcctagacctcatggctgtcccctcccaccagtcacctccactgcacaactcgggcgggggtgtgacacctctcccccacccccgactccgtggtttccgtatcgtcaacccttcagccgccgacccgggaggggtctggcctacactggtcttccccttcccatcaactctttctgcttgacaatgtagcaacccaggccccccacccacggtcctcccctttttcctctccctgacaataaagtctgaatttgttctgccctccg

SEQ ID NO: 202315 - DNA, 2331 bp, Homo sapiens
  Payload ID: 19907
  Gene Name: zinc finger protein 385A
  Uniprot ID: Q96PM9
  ENST ID: ENST00000338010
  CDS Start-End: 55-1215
agaacggcccccgggacagagcgacgcggaaccccgggcgcctgggtccccagcatgatcctcggcagcctgagccgggcagggcccctgcctctgctacggcagcccccgatcatgcagcccccactggacctcaagcagatcctgcccttcccactcgagccagcccctacccttggcctcttcagcaactacagcaccatggaccctgtgcagaaggctgtgctctcccacacttttgggggacccttgctcaagaccaagcggcccgtcatttcctgtaatatctgtcaaatccgcttcaattctcagagccaggctgaggcgcactacaaaggtaatcgccacgcccgacgagtcaaaggcattgaggctgccaagaccagaggcagggagcctggcgtccgagaacctggagacccagctcccccaggcagcaccccaacaaatggggatggtgtagcaccccgtccagtttccatggagaatggactggggccagccccaggatccccagagaaacagcctggctccccatcccctcccagcattccggagactggtcagggtgtaaccaagggtgaaggggggactccagccccggcttccttgcctgggggtagcaaggaagaggaggagaaagccaagcggctgctctactgtgctctgtgcaaggtggctgtgaactccctgtcccagcttgaggcacataacaaaggtactaagcacaagacaattctggaggcccgaagtgggctcgggcccatcaaagcttaccctcggctggggcctcccaccccgggggaaccagaggctcctgcccaggaccgaactttccactgtgagatctgcaatgtcaaggtcaactcggaggtccaactgaaacagcacatctccagccggcggcaccgagacggcgtggccgggaagcccaacccactactgagccgtcacaagaagtctaggggcgccggggagctggcgggcacgctgactttctccaaggagctgcccaagtccctggcgggcggcctgctccccagccccctggcggtggctgcagtgatggcagcggcagcaggctcgccgctgtccctgcgcccggctccagccgcacctcttctccagggaccgccgatcactcaccctctgcttcacccggcccccggacccatccgaactgcgcacggacccatcctcttctccccgtactgacctcaaccctgaacccctcccattcaactccccacctccagccgggacccaggcgtccgggctcccagcccgcccctcctcccggcactccctaaatgatctctccttccccccccccaccccgagatacggggttccaggaaaggggaggggtagcgggggaggggggcttcagaagggggggaacaccccagatctcagggaaccccgccccctgcctttccctctcccctagaaaagggggggccgtctcacccccgagcccccttggagacaccccccctcccaaaagccatgtccatccagcccttccccccaaacctagcacaaaacggggttcacaagccatggtcggggtccgggggggacagaaatggattttcttggcaataagcggactctgggactccggctccctaccccaaactgaagcgcttccgtgaacacccccgtcctccgtagggggaggggagcaggcgggatcctgggtccctcataagcactttggttttaccgcctgcaacctcactgtgcccgccccgcaccatgccctagccccaggtctagccgggcccattgcagggggcagcacttgggggcatctccggcacttgggtgggaccaaggagatgccaccatagacctttccctcgccttcttcctccctagtccgggttccattcttttcaccagcacccatcgcccaaggggtaccgaggggggcaaggggtgtccagtccaagcccacccccgcctcgccttccgcaaaactgtgagcaaaaagcaatagaagcctcgcccccgcccttccccttcgcaggattcgccgagtctgtagcctccccgatccaagttcctagacctcatggctgtcccctcccaccagtcacctccactgcacaactcgggcgggggtgtgacacctctcccccacccccgactccgtggtttccgtatcgtcaacccttcagccgccgacccgggaggggtctggcctacactggtcttccccttcccatcaactctttctgcttgacaatgtagcaacccaggccccccacccacggtcctcccctttttcctctccctgacaataaagtctgaatttgttctgcc

SEQ ID NO: 202316 - DNA, 2430 bp, Homo sapiens
  Payload ID: 19907
  Gene Name: zinc finger protein 385A
  Uniprot ID: Q96PM9
  ENST ID: ENST00000394313
  CDS Start-End: 210-1310
attgctctggagccagcaggggaagtgtgtacactatgtgcactgagggtgacacttctgagtgtgggggccctggctagggagtgggactggcaggcttgggtggggttcccaagctttaatcttcctaccccacagaatgttttctctgcccttcaggcagcctgagccgggcagggcccctgcctctgctacggcagcccccgatcatgcagcccccactggacctcaagcagatcctgcccttcccactcgagccagcccctacccttggcctcttcagcaactacagcaccatggaccctgtgcagaaggctgtgctctcccacacttttgggggacccttgctcaagaccaagcggcccgtcatttcctgtaatatctgtcaaatccgcttcaattctcagagccaggctgaggcgcactacaaaggtaatcgccacgcccgacgagtcaaaggcattgaggctgccaagaccagaggcagggagcctggcgtccgagaacctggagacccagctcccccaggcagcaccccaacaaatggggatggtgtagcaccccgtccagtttccatggagaatggactggggccagccccaggatccccagagaaacagcctggctccccatcccctcccagcattccggagactggtcagggtgtaaccaagggtgaaggggggactccagccccggcttccttgcctgggggtagcaaggaagaggaggagaaagccaagcggctgctctactgtgctctgtgcaaggtggctgtgaactccctgtcccagcttgaggcacataacaaaggtactaagcacaagacaattctggaggcccgaagtgggctcgggcccatcaaagcttaccctcggctggggcctcccaccccgggggaaccagaggctcctgcccaggaccgaactttccactgtgagatctgcaatgtcaaggtcaactcggaggtccaactgaaacagcacatctccagccggcggcaccgagacggcgtggccgggaagcccaacccactactgagccgtcacaagaagtctaggggcgccggggagctggcgggcacgctgactttctccaaggagctgcccaagtccctggcgggcggcctgctccccagccccctggcggtggctgcagtgatggcagcggcagcaggctcgccgctgtccctgcgcccggctccagccgcacctcttctccagggaccgccgatcactcaccctctgcttcacccggcccccggacccatccgaactgcgcacggacccatcctcttctccccgtactgacctcaaccctgaacccctcccattcaactccccacctccagccgggacccaggcgtccgggctcccagcccgcccctcctcccggcactccctaaatgatctctccttccccccccccaccccgagatacggggttccaggaaaggggaggggtagcgggggaggggggcttcagaagggggggaacaccccagatctcagggaaccccgccccctgcctttccctctcccctagaaaagggggggccgtctcacccccgagcccccttggagacaccccccctcccaaaagccatgtccatccagcccttccccccaaacctagcacaaaacggggttcacaagccatggtcggggtccgggggggacagaaatggattttcttggcaataagcggactctgggactccggctccctaccccaaactgaagcgcttccgtgaacacccccgtcctccgtagggggaggggagcaggcgggatcctgggtccctcataagcactttggttttaccgcctgcaacctcactgtgcccgccccgcaccatgccctagccccaggtctagccgggcccattgcagggggcagcacttgggggcatctccggcacttgggtgggaccaaggagatgccaccatagacctttccctcgccttcttcctccctagtccgggttccattcttttcaccagcacccatcgcccaaggggtaccgaggggggcaaggggtgtccagtccaagcccacccccgcctcgccttccgcaaaactgtgagcaaaaagcaatagaagcctcgcccccgcccttccccttcgcaggattcgccgagtctgtagcctccccgatccaagttcctagacctcatggctgtcccctcccaccagtcacctccactgcacaactcgggcgggggtgtgacacctctcccccacccccgactccgtggtttccgtatcgtcaacccttcagccgccgacccgggaggggtctggcctacactggtcttccccttcccatcaactctttctgcttgacaatgtagcaacccaggccccccacccacggtcctcccctttttcctctccctgacaataaagtctgaatttgttctgccctcc

SEQ ID NO: 202317 - DNA, 2494 bp, Homo sapiens
  Payload ID: 19907
  Gene Name: zinc finger protein 385A
  Uniprot ID: Q96PM9
  ENST ID: ENST00000546970
  CDS Start-End: 291-1391
gggcagaaccaagggaaggggacgctgtcaggcccaggcccctggggggccagggccaggccactgcctgggggcagcaggcatcagaaactaaaggatgaatcacccacttgactctcttcttcctggggcgataccaagctttaggatcccctgggggaaagcaaaaccagaagaagagggtggccaggggcttgaggctgggagtcctgctggttcagcaggcagcctgcagaaaaggcagcctgagccgggcagggcccctgcctctgctacggcagcccccgatcatgcagcccccactggacctcaagcagatcctgcccttcccactcgagccagcccctacccttggcctcttcagcaactacagcaccatggaccctgtgcagaaggctgtgctctcccacacttttgggggacccttgctcaagaccaagcggcccgtcatttcctgtaatatctgtcaaatccgcttcaattctcagagccaggctgaggcgcactacaaaggtaatcgccacgcccgacgagtcaaaggcattgaggctgccaagaccagaggcagggagcctggcgtccgagaacctggagacccagctcccccaggcagcaccccaacaaatggggatggtgtagcaccccgtccagtttccatggagaatggactggggccagccccaggatccccagagaaacagcctggctccccatcccctcccagcattccggagactggtcagggtgtaaccaagggtgaaggggggactccagccccggcttccttgcctgggggtagcaaggaagaggaggagaaagccaagcggctgctctactgtgctctgtgcaaggtggctgtgaactccctgtcccagcttgaggcacataacaaaggtactaagcacaagacaattctggaggcccgaagtgggctcgggcccatcaaagcttaccctcggctggggcctcccaccccgggggaaccagaggctcctgcccaggaccgaactttccactgtgagatctgcaatgtcaaggtcaactcggaggtccaactgaaacagcacatctccagccggcggcaccgagacggcgtggccgggaagcccaacccactactgagccgtcacaagaagtctaggggcgccggggagctggcgggcacgctgactttctccaaggagctgcccaagtccctggcgggcggcctgctccccagccccctggcggtggctgcagtgatggcagcggcagcaggctcgccgctgtccctgcgcccggctccagccgcacctcttctccagggaccgccgatcactcaccctctgcttcacccggcccccggacccatccgaactgcgcacggacccatcctcttctccccgtactgacctcaaccctgaacccctcccattcaactccccacctccagccgggacccaggcgtccgggctcccagcccgcccctcctcccggcactccctaaatgatctctccttccccccccccaccccgagatacggggttccaggaaaggggaggggtagcgggggaggggggcttcagaagggggggaacaccccagatctcagggaaccccgccccctgcctttccctctcccctagaaaagggggggccgtctcacccccgagcccccttggagacaccccccctcccaaaagccatgtccatccagcccttccccccaaacctagcacaaaacggggttcacaagccatggtcggggtccgggggggacagaaatggattttcttggcaataagcggactctgggactccggctccctaccccaaactgaagcgcttccgtgaacacccccgtcctccgtagggggaggggagcaggcgggatcctgggtccctcataagcactttggttttaccgcctgcaacctcactgtgcccgccccgcaccatgccctagccccaggtctagccgggcccattgcagggggcagcacttgggggcatctccggcacttgggtgggaccaaggagatgccaccatagacctttccctcgccttcttcctccctagtccgggttccattcttttcaccagcacccatcgcccaaggggtaccgaggggggcaaggggtgtccagtccaagcccacccccgcctcgccttccgcaaaactgtgagcaaaaagcaatagaagcctcgcccccgcccttccccttcgcaggattcgccgagtctgtagcctccccgatccaagttcctagacctcatggctgtcccctcccaccagtcacctccactgcacaactcgggcgggggtgtgacacctctcccccacccccgactccgtggtttccgtatcgtcaacccttcagccgccgacccgggaggggtctggcctacactggtcttccccttcccatcaactctttctgcttgacaatgtagcaacccaggccccccacccacggtcctcccctttttcctctccctgacaataaagtctg

SEQ ID NO: 202318 - DNA, 1111 bp, Homo sapiens
  Payload ID: 19907
  Gene Name: zinc finger protein 385A
  Uniprot ID: Q96PM9
  ENST ID: ENST00000551771
  CDS Start-End: 160-1017
gacacttctgagtgtgggggccctggctagggagtgggactggcaggcttgggtggggttcccaagctttaatcttcctaccccacagaatgttttctctgcccttcaggcagcctgagccgggcagggcccctgcctctgctacggcagcccccgatcatgcagcccccactggacctcaagcagatcctgcccttcccactcgagccagcccctacccttggcctcttcagcaactacagcaccatggaccctgtgcagaaggctgtgctctcccacacttttgggggacccttgctcaagaccaagcggcccgtcatttcctgtaatatctgtcaaatccgcttcaattctcagagccaggctgaggcgcactacaaaggtaatcgccacgcccgacgagtcaaaggcattgaggctgccaagaccagaggcagggagcctggcgtccgagaacctggagacccagctcccccaggcagcaccccaacaaatggggatggtgtagcaccccgtccaggtactaagcacaagacaattctggaggcccgaagtgggctcgggcccatcaaagcttaccctcggctggggcctcccaccccgggggaaccagaggctcctgcccaggaccgaactttccactgtgagatctgcaatgtcaaggtcaactcggaggtccaactgaaacagcacatctccagccggcggcaccgagacggcgtggccgggaagcccaacccactactgagccgtcacaagaagtctaggggcgccggggagctggcgggcacgctgactttctccaaggagctgcccaagtccctggcgggcggcctgctccccagccccctggcggtggctgcagtgatggcagcggcagcaggctcgccgctgtccctgcgcccggctccagccgcacctcttctccagggaccgccgatcactcaccctctgcttcacccggcccccggacccatccgaactgcgcacggacccatcctcttctccccgtactgacctcaaccctgaacccctcccattcaactccccacctccagccgggacccaggcgtccgggctcccagcccgcccctcctcccggcactcccta

SEQ ID NO: 202319 - DNA, 568 bp, Homo sapiens
  Payload ID: 19907
  Gene Name: zinc finger protein 385A
  ENST ID: ENST00000547210
  CDS Start-End: 75-568
attgctctggagccagcaggggaagcagcctgagccgggcagggcccctgcctctgctacggcagcccccgatcatgcagcccccactggacctcaagcagatcctgcccttcccactcgagccagcccctacccttggcctcttcagcaactacagcaccatggaccctgtgcagaaggctgtgctctcccacacttttgggggacccttgctcaagaccaagcggcccgtcatttcctgtaatatctgtcaaatccgcttcaattctcagagccaggctgaggcgcactacaaaggtaatcgccacgcccgacgagtcaaaggcattgaggctgccaagaccagaggcagggagcctggcgtccgagaacctggagacccagctcccccaggcagcaccccaacaaatggggatggtgtagcaccccgtccagtttccatggagaatggactggggccagccccaggatccccagagaaacagcctggctccccatcccctcccagcattccggagactggtcagggtgtaaccaagggtgaaggggggactccagccccggcttc

SEQ ID NO: 202320 - DNA, 775 bp, Homo sapiens
  Payload ID: 19907
  Gene Name: zinc finger protein 385A
  ENST ID: ENST00000546919
  CDS Start-End: 81-775
cagaactggacctgtagctgagcattcctggcagcctgagccgggcagggcccctgcctctgctacggcagcccccgatcatgcagcccccactggacctcaagcagatcctgcccttcccactcgagccagcccctacccttggcctcttcagcaactacagcaccatggaccctgtgcagaaggctgtgctctcccacacttttgggggacccttgctcaagaccaagcggcccgtcatttcctgtaatatctgtcaaatccgcttcaattctcagagccaggctgaggcgcactacaaaggtaatcgccacgcccgacgagtcaaaggcattgaggctgccaagaccagaggcagggagcctggcgtccgagaacctggagacccagctcccccaggcagcaccccaacaaatggggatggtgtagcaccccgtccagtttccatggagaatggactggggccagccccaggatccccagagaaacagcctggctccccatcccctcccagcattccggagactggtcagggtgtaaccaagggtgaaggggggactccagccccggcttccttgcctgggggtagcaaggaagaggaggagaaagccaagcggctgctctactgtgctctgtgcaaggtggctgtgaactccctgtcccagcttgaggcacataacaaaggtactaagcacaagacaattctggaggcccgaagtgggctcgggcccatcaaagcttaccctcggctggggcctcccaccccgggggaacc

SEQ ID NO: 202321 - DNA, 761 bp, Homo sapiens
  Payload ID: 19907
  Gene Name: zinc finger protein 385A
  ENST ID: ENST00000549937
  CDS Start-End: 1-761
cctacccttggcctcttcagcaactacagcaccatggaccctgtgcagaaggctgtgctctcccacacttttgggggacccttgctcaagaccaagcggcccgtcatttcctgtaatatctgtcaaatccgcttcaattctcagagccaggctgaggcgcactacaaaggtaatcgccacgcccgacgagtcaaaggcattgaggctgccaagaccagaggcagggagcctggcgtccgagaacctggagacccagctcccccaggcagcaccccaacaaatggggatggtgtagcaccccgtccagagtctcactctgtcgcccaggctagagtgcagtggcacaatctcagctcactgcaacctccacctcccaggttcaagcgattctcctgcctcagcctcctgagtagctgggattacaggcacctgccaccacacccggtttccatggagaatggactggggccagccccaggatccccagagaaacagcctggctccccatcccctcccagcattccggagactggtcagggtgtaaccaagggtgaaggggggactccagccccggcttccttgcctgggggtagcaaggaagaggaggagaaagccaagcggctgctctactgtgctctgtgcaaggtggctgtgaactccctgtcccagcttgaggcacataacaaaggtactaagcacaagacaattctggaggcccgaagtgggctcgggcccatcaaagcttaccctcggctggggcc

SEQ ID NO: 202322 - DNA, 477 bp, Homo sapiens
  Payload ID: 19907
  Gene Name: zinc finger protein 385A
  ENST ID: ENST00000550120
  CDS Start-End: 196-477
agcaggggaagtgtgtacactatgtgcactgagggtgacacttctgagtgtgggggccctggctagggagtgggactggcaggcttgggtggggttcccaagctttaatcttcctaccccacagaatgttttctctgcccttcaggcagcctgagccgggcagggcccctgcctctgctacggcagcccccgatcatgcagcccccactggacctcaagcagatcctgcccttcccactcgagccagcccctacccttggcctcttcagcaactacagcaccagccaggctgaggcgcactacaaaggtaatcgccacgcccgacgagtcaaaggcattgaggctgccaagaccagaggcagggagcctggcgtccgagaacctggagacccagctcccccaggcagcaccccaacaaatggggatggtgtagcaccccgtccagtttccatggagaatggactggggccagcccca

SEQ ID NO: 202323 - DNA, 2369 bp, Homo sapiens
  Payload ID: 19907
  Gene Name: zinc finger protein 385A
  Uniprot ID: Q96PM9
  ENST ID: ENST00000551109
  CDS Start-End: 146-1246
ggcagaaccaagggaaggggacgctgtcaggcccaggcccctggggggccagggccaggccactgcctgggggcagcaggcatcagaaactaaaggcagcctgagccgggcagggcccctgcctctgctacggcagcccccgatcatgcagcccccactggacctcaagcagatcctgcccttcccactcgagccagcccctacccttggcctcttcagcaactacagcaccatggaccctgtgcagaaggctgtgctctcccacacttttgggggacccttgctcaagaccaagcggcccgtcatttcctgtaatatctgtcaaatccgcttcaattctcagagccaggctgaggcgcactacaaaggtaatcgccacgcccgacgagtcaaaggcattgaggctgccaagaccagaggcagggagcctggcgtccgagaacctggagacccagctcccccaggcagcaccccaacaaatggggatggtgtagcaccccgtccagtttccatggagaatggactggggccagccccaggatccccagagaaacagcctggctccccatcccctcccagcattccggagactggtcagggtgtaaccaagggtgaaggggggactccagccccggcttccttgcctgggggtagcaaggaagaggaggagaaagccaagcggctgctctactgtgctctgtgcaaggtggctgtgaactccctgtcccagcttgaggcacataacaaaggtactaagcacaagacaattctggaggcccgaagtgggctcgggcccatcaaagcttaccctcggctggggcctcccaccccgggggaaccagaggctcctgcccaggaccgaactttccactgtgagatctgcaatgtcaaggtcaactcggaggtccaactgaaacagcacatctccagccggcggcaccgagacggcgtggccgggaagcccaacccactactgagccgtcacaagaagtctaggggcgccggggagctggcgggcacgctgactttctccaaggagctgcccaagtccctggcgggcggcctgctccccagccccctggcggtggctgcagtgatggcagcggcagcaggctcgccgctgtccctgcgcccggctccagccgcacctcttctccagggaccgccgatcactcaccctctgcttcacccggcccccggacccatccgaactgcgcacggacccatcctcttctccccgtactgacctcaaccctgaacccctcccattcaactccccacctccagccgggacccaggcgtccgggctcccagcccgcccctcctcccggcactccctaaatgatctctccttccccccccccaccccgagatacggggttccaggaaaggggaggggtagcgggggaggggggcttcagaagggggggaacaccccagatctcagggaaccccgccccctgcctttccctctcccctagaaaagggggggccgtctcacccccgagcccccttggagacaccccccctcccaaaagccatgtccatccagcccttccccccaaacctagcacaaaacggggttcacaagccatggtcggggtccgggggggacagaaatggattttcttggcaataagcggactctgggactccggctccctaccccaaactgaagcgcttccgtgaacacccccgtcctccgtagggggaggggagcaggcgggatcctgggtccctcataagcactttggttttaccgcctgcaacctcactgtgcccgccccgcaccatgccctagccccaggtctagccgggcccattgcagggggcagcacttgggggcatctccggcacttgggtgggaccaaggagatgccaccatagacctttccctcgccttcttcctccctagtccgggttccattcttttcaccagcacccatcgcccaaggggtaccgaggggggcaaggggtgtccagtccaagcccacccccgcctcgccttccgcaaaactgtgagcaaaaagcaatagaagcctcgcccccgcccttccccttcgcaggattcgccgagtctgtagcctccccgatccaagttcctagacctcatggctgtcccctcccaccagtcacctccactgcacaactcgggcgggggtgtgacacctctcccccacccccgactccgtggtttccgtatcgtcaacccttcagccgccgacccgggaggggtctggcctacactggtcttccccttcccatcaactctttctgcttgacaatgtagcaacccaggccccccacccacggtcctcccctttttcctctccctgacaataaagtctgaatttgttctgccctccgcc

SEQ ID NO: 202324 - DNA, 545 bp, Homo sapiens
  Payload ID: 19907
  Gene Name: zinc finger protein 385A
  ENST ID: ENST00000550774
  CDS Start-End: 111-545
agaacggcccccgggacagagcgacgcggaaccccgggcgcctgggtccccagcatgatcctcgcctgagccgggcagggcccctgcctctgctacggcagcccccgatcatgcagcccccactggacctcaagcagatcctgcccttcccactcgagccagcccctacccttggcctcttcagcaactacagcaccatggaccctgtgcagaaggctgtgctctcccacacttttgggggacccttgctcaagaccaagcggcccgtcatttcctgtaatatctgtcaaatccgcttcaattctcagagccaggctgaggcgcactacaaaggtaatcgccacgcccgacgagtcaaaggcattgaggctgccaagaccagaggcagggagcctggcgtccgagaacctggagacccagctcccccaggcagcaccccaacaaatggggatggtgtagcaccccgtccagtttccatggagaatggactggggccagccccaggatccccagagaaacagcctggctccccatcccctcccagc

SEQ ID NO: 202325 - DNA, 572 bp, Homo sapiens
  Payload ID: 19907
  Gene Name: zinc finger protein 385A
  ENST ID: ENST00000549962
  CDS Start-End: 38-572
agagcgacgcggaaccccgggcgcctgggtccccagcatgatcctcggcagcctgagccgggcagggcccctgcctctgctacggcagcccccgatcatgcagcccccactggacctcaagcagatcctgcccttcccactcgagccagcccctacccttggcctcttcagcaactacagcaccagccaggctgaggcgcactacaaaggtaatcgccacgcccgacgagtcaaaggcattgaggctgccaagaccagaggcagggagcctggcgtccgagaacctggagacccagctcccccaggcagcaccccaacaaatggggatggtgtagcaccccgtccagtttccatggagaatggactggggccagccccaggatccccagagaaacagcctggctccccatcccctcccagcattccggagactggtcagggtgtaaccaagggtgaaggggggactccagccccggcttccttgcctgggggtagcaaggaagaggaggagaaagccaagcggctgctctactgtgctctgtgcaaggtggctgtgaactccctgtcccagc

SEQ ID NO: 202326 - DNA, 2099 bp, Homo sapiens
  Payload ID: 19907
  Gene Name: zinc finger protein 385A
  ENST ID: ENST00000550779
  CDS Start-End: 1-342
gagccagcccctacccttggcctcttcagcaactacagcaccatggaccctgtgcagaaggctgtgctctcccacacttttgggggacccttgctcaagaccaagcggcccgtcatttcctgtaatatctgtcaaatccgcttcaattctcagagccaggctgaggcgcactacaaaggtaatcgccacgcccgacgagtcaaaggcattgaggctgccaagaccagaggcagggagcctggcgtccgagaacctggagacccagctcccccaggcagcaccccaacaaatggggatggtgtagcaccccgtccagcattccggagactggtcagggtgtaaccaagggtgaaggggggactccagccccggcttccttgcctgggggtagcaaggaagaggaggagaaagccaagcggctgctctactgtgctctgtgcaaggtggctgtgaactccctgtcccagcttgaggcacataacaaaggtactaagcacaagacaattctggaggcccgaagtgggctcgggcccatcaaagcttaccctcggctggggcctcccaccccgggggaaccagaggctcctgcccaggaccgaactttccactgtgagatctgcaatgtcaaggtcaactcggaggtccaactgaaacagcacatctccagccggcggcaccgagacggcgtggccgggaagcccaacccactactgagccgtcacaagaagtctaggggcgccggggagctggcgggcacgctgactttctccaaggagctgcccaagtccctggcgggcggcctgctccccagccccctggcggtggctgcagtgatggcagcggcagcaggctcgccgctgtccctgcgcccggctccagccgcacctcttctccagggaccgccgatcactcaccctctgcttcacccggcccccggacccatccgaactgcgcacggacccatcctcttctccccgtactgacctcaaccctgaacccctcccattcaactccccacctccagccgggacccaggcgtccgggctcccagcccgcccctcctcccggcactccctaaatgatctctccttccccccccccaccccgagatacggggttccaggaaaggggaggggtagcgggggaggggggcttcagaagggggggaacaccccagatctcagggaaccccgccccctgcctttccctctcccctagaaaagggggggccgtctcacccccgagcccccttggagacaccccccctcccaaaagccatgtccatccagcccttccccccaaacctagcacaaaacggggttcacaagccatggtcggggtccgggggggacagaaatggattttcttggcaataagcggactctgggactccggctccctaccccaaactgaagcgcttccgtgaacacccccgtcctccgtagggggaggggagcaggcgggatcctgggtccctcataagcactttggttttaccgcctgcaacctcactgtgcccgccccgcaccatgccctagccccaggtctagccgggcccattgcagggggcagcacttgggggcatctccggcacttgggtgggaccaaggagatgccaccatagacctttccctcgccttcttcctccctagtccgggttccattcttttcaccagcacccatcgcccaaggggtaccgaggggggcaaggggtgtccagtccaagcccacccccgcctcgccttccgcaaaactgtgagcaaaaagcaatagaagcctcgcccccgcccttccccttcgcaggattcgccgagtctgtagcctccccgatccaagttcctagacctcatggctgtcccctcccaccagtcacctccactgcacaactcgggcgggggtgtgacacctctcccccacccccgactccgtggtttccgtatcgtcaacccttcagccgccgacccgggaggggtctggcctacactggtcttccccttcccatcaactctttctgcttgacaatgtagcaacccaggccccccacccacggtcctcccctttttcctctccctgacaataaagtctgaatttgttctgcc

SEQ ID NO: 202327 - DNA, 2610 bp, Homo sapiens
  Payload ID: 19908
  Gene Name: zinc finger protein 385B
  Uniprot ID: Q569K4
  ENST ID: ENST00000336917
  CDS Start-End: 244-1353
agtaattagagctaagcggcaattacaggacgtatgatttgttcagaagcactgcctgccggctgtttcctagcaccacatttcacgggagcaccaggttgagatgatggaattatttacttttaaatgtaacatctcgtacagtgctcaaatgcagacgtgaacgtggactgtaaccttaaaaacaaaggcagtacatgccacactactacccttcctgctcttgtgcgcacacctaccctgatgatgcagccttcactggatatcaaaccatttatgtcttttccagtggacagtagttctgctgttgggctctttccaaattttaacacaatggatcctgtgcaaaaagcggttattaaccatacatttggagtatccattcccccaaagaagaaacaagttatttcttgtaatgtctgtcagcttcgctttaactcagatagccaggccgaggcccactacaaaggaagtaaacatgccaagaaggtcaaagcactagacgcaacgaaaaataaacccaaaatggttccttccaaggacagcgcaaaggctaatcccagctgctccatcactccaatcacaggcaacaactctgacaaatcagaagataaagggaagttaaaagccagcagttccagtcagccatcaagctctgaaagtggctcatttctcctcaaatctggcacaacacccctgccacctggagcagccacttctccctccaagagcacaaatggagctcccggtactgttgttgaatcagaagaagaaaaagccaaaaaattactttattgttcactatgcaaagtggctgtgaactccctgtcacagctagaggcacacaacacaggatctaaacacaagaccatggttgaagctcgtaatggggctggtccaattaaatcctatcctagacctggatcaagattaaagatgcagaatggcagtaaggggtcaggactacagaacaagacatttcattgtgaaatctgtgatgttcatgttaattcagaaattcaactcaaacagcacatttctagccgaaggcataaagatcgagttgcagggaaaccactgaagccaaaatacagcccttacaacaaactccagcggagcccgagtattctagcagcaaaacttgcattccagaaagatatgatgaagcctttggccccagccttcctgtcctcacctctcgcagcggcggcagccgtgtcctcagcgctgtcactcccaccccggccctctgcctcgctcttccaggctccagccattcctccagctcttctgaggcctgggcatgggcccatccgcgccactcctgcctccatcctctttgctccgtactaacgtctgcaaaccccaagacgtttgaggccagtaggaagttgagaaagaaagccacaaggattcagcaatttaagcagtttgtgttgcagtaccccccattcacccacaaaatgcagcccaccacccagtcccccaattccagagagaaacacatcactagattgacgagggcttttagagactgctcctataattgaggaatcagcagcataggctttatctccctacttcctcccccaccctaccgcgttcaatttgtgtatctcagatatttgatttcttgagcatgtattggtcagaaagaaaaagaaagaaaaccattctctatttttccatgggtatgatctggcttaaaacaatatggaatattttcctgacagacttgaaaactaggatcttcctcagatgtctgtaaataactctggtatccaactgggtgtattctagtgtggaacaaaaaacagtgaacacaagtgcttacttgtggatactatcttaccaacggatcacaaagttctctttttggtgtactgttgttgacagggattgtgtactgtttcgacccaagtactgctgtatcctgtgtagtactagatctgtatctcttgtctgaattaaacatttttagttgctgtgtaaatgttaggaagcaaagtagctttgaattttctctgtaagagaataaaagataaaataatgtattttctttatttcacattttatttggagatatttaaatgaaatagaaagccatataacatagctataattactacctgtttgctatttttgtttaacttattttgtagcttcctcactggtttgtgttgctaagcaaacgtatacaaacagaaaaagagcttcctaaattgcacatttttgcacctcttgtgcattctgcaagaagacaatgaatccatgtatttctatataagtatcttcttcatttttaacctgttttcatttgtaatgatgctacataattttgtggctccctaatgcaataatgtacagaagataaaaaaatttataattgaacaatttgtctttctgttcgctgaatatattgcaggtcatgctcccatgcccccctttctaagccgatatcaacaagactggaatgtttgtgatatcaggggcaagagttatcatagaacaacaaaatagagtggactcttttagagcatctatatctgcaacctgtaaatggtaaaatgtctgtgtatttttttaaatgtaccttttcaataaaagtac

SEQ ID NO: 202328 - DNA, 2750 bp, Homo sapiens
  Payload ID: 19908
  Gene Name: zinc finger protein 385B
  Uniprot ID: Q569K4
  ENST ID: ENST00000409343
  CDS Start-End: 306-1493
agtgcttctggtttcagcacacatggagatatagaattgaaattgctctgctttctttacaaatgactcagagtgtgcttgtccttccctaaaatgttgccagcatgtaaaggattttcaatgagcagtgcaataagccagcaactgggaaggcttggagcggcactgatataacgtggtgctgtcacacagataatcagggctggagccaagtctcggtagcgctgtgcattatcctggtcacatactggaagttttgtttatccaacttggttgctcttgaagctggtgagagccctgccaggatgtggagtggacttcctagcagaggcagtacatgccacactactacccttcctgctcttgtgcgcacacctaccctgatgatgcagccttcactggatatcaaaccatttatgtcttttccagtggacagtagttctgctgttgggctctttccaaattttaacacaatggatcctgtgcaaaaagcggttattaaccatacatttggagtatccattcccccaaagaagaaacaagttatttcttgtaatgtctgtcagcttcgctttaactcagatagccaggccgaggcccactacaaaggaagtaaacatgccaagaaggtcaaagcactagacgcaacgaaaaataaacccaaaatggttccttccaaggacagcgcaaaggctaatcccagctgctccatcactccaatcacaggcaacaactctgacaaatcagaagataaagggaagttaaaagccagcagttccagtcagccatcaagctctgaaagtggctcatttctcctcaaatctggcacaacacccctgccacctggagcagccacttctccctccaagagcacaaatggagctcccggtactgttgttgaatcagaagaagaaaaagccaaaaaattactttattgttcactatgcaaagtggctgtgaactccctgtcacagctagaggcacacaacacaggatctaaacacaagaccatggttgaagctcgtaatggggctggtccaattaaatcctatcctagacctggatcaagattaaagatgcagaatggcagtaaggggtcaggactacagaacaagacatttcattgtgaaatctgtgatgttcatgttaattcagaaattcaactcaaacagcacatttctagccgaaggcataaagatcgagttgcagggaaaccactgaagccaaaatacagcccttacaacaaactccagcggagcccgagtattctagcagcaaaacttgcattccagaaagatatgatgaagcctttggccccagccttcctgtcctcacctctcgcagcggcggcagccgtgtcctcagcgctgtcactcccaccccggccctctgcctcgctcttccaggctccagccattcctccagctcttctgaggcctgggcatgggcccatccgcgccactcctgcctccatcctctttgctccgtactaacgtctgcaaaccccaagacgtttgaggccagtaggaagttgagaaagaaagccacaaggattcagcaatttaagcagtttgtgttgcagtaccccccattcacccacaaaatgcagcccaccacccagtcccccaattccagagagaaacacatcactagattgacgagggcttttagagactgctcctataattgaggaatcagcagcataggctttatctccctacttcctcccccaccctaccgcgttcaatttgtgtatctcagatatttgatttcttgagcatgtattggtcagaaagaaaaagaaagaaaaccattctctatttttccatgggtatgatctggcttaaaacaatatggaatattttcctgacagacttgaaaactaggatcttcctcagatgtctgtaaataactctggtatccaactgggtgtattctagtgtggaacaaaaaacagtgaacacaagtgcttacttgtggatactatcttaccaacggatcacaaagttctctttttggtgtactgttgttgacagggattgtgtactgtttcgacccaagtactgctgtatcctgtgtagtactagatctgtatctcttgtctgaattaaacatttttagttgctgtgtaaatgttaggaagcaaagtagctttgaattttctctgtaagagaataaaagataaaataatgtattttctttatttcacattttatttggagatatttaaatgaaatagaaagccatataacatagctataattactacctgtttgctatttttgtttaacttattttgtagcttcctcactggtttgtgttgctaagcaaacgtatacaaacagaaaaagagcttcctaaattgcacatttttgcacctcttgtgcattctgcaagaagacaatgaatccatgtatttctatataagtatcttcttcatttttaacctgttttcatttgtaatgatgctacataattttgtggctccctaatgcaataatgtacagaagataaaaaaatttataattgaacaatttgtctttctgttcgctgaatatattgcaggtcatgctcccatgcccccctttctaagccgatatcaacaagactggaatgtttgtgatatcaggggcaagagttatcatagaacaacaaaatagagtggactcttttagagcatctatatctgcaacctgtaaatggtaaaatgtctgtgtatttttttaaatgtaccttttcaataaaagtac

SEQ ID NO: 202329 - DNA, 2109 bp, Homo sapiens
  Payload ID: 19908
  Gene Name: zinc finger protein 385B
  Uniprot ID: Q569K4
  ENST ID: ENST00000409692
  CDS Start-End: 301-1410
agtagactataagcttttggaaaacagggactatgtcttcttcaacaatgtgtacacaacaagtagcaggttgtttggcacatggcagatgctcgatacgttgatctggcagcggcatgggagatggatccaaagagattaaaactggagtgaaggagtccagtaatgatgtgaagagatgagggtctgaactaggacagaagtcagtcacagggatggatttgagacgttttggagggttacacatgcagtacatgccacactactacccttcctgctcttgtgcgcacacctaccctgatgatgcagccttcactggatatcaaaccatttatgtcttttccagtggacagtagttctgctgttgggctctttccaaattttaacacaatggatcctgtgcaaaaagcggttattaaccatacatttggagtatccattcccccaaagaagaaacaagttatttcttgtaatgtctgtcagcttcgctttaactcagatagccaggccgaggcccactacaaaggaagtaaacatgccaagaaggtcaaagcactagacgcaacgaaaaataaacccaaaatggttccttccaaggacagcgcaaaggctaatcccagctgctccatcactccaatcacaggcaacaactctgacaaatcagaagataaagggaagttaaaagccagcagttccagtcagccatcaagctctgaaagtggctcatttctcctcaaatctggcacaacacccctgccacctggagcagccacttctccctccaagagcacaaatggagctcccggtactgttgttgaatcagaagaagaaaaagccaaaaaattactttattgttcactatgcaaagtggctgtgaactccctgtcacagctagaggcacacaacacaggatctaaacacaagaccatggttgaagctcgtaatggggctggtccaattaaatcctatcctagacctggatcaagattaaagatgcagaatggcagtaaggggtcaggactacagaacaagacatttcattgtgaaatctgtgatgttcatgttaattcagaaattcaactcaaacagcacatttctagccgaaggcataaagatcgagttgcagggaaaccactgaagccaaaatacagcccttacaacaaactccagcggagcccgagtattctagcagcaaaacttgcattccagaaagatatgatgaagcctttggccccagccttcctgtcctcacctctcgcagcggcggcagccgtgtcctcagcgctgtcactcccaccccggccctctgcctcgctcttccaggctccagccattcctccagctcttctgaggcctgggcatgggcccatccgcgccactcctgcctccatcctctttgctccgtactaacgtctgcaaaccccaagacgtttgaggccagtaggaagttgagaaagaaagccacaaggattcagcaatttaagcagtttgtgttgcagtaccccccattcacccacaaaatgcagcccaccacccagtcccccaattccagagagaaacacatcactagattgacgagggcttttagagactgctcctataattgaggaatcagcagcataggctttatctccctacttcctcccccaccctaccgcgttcaatttgtgtatctcagatatttgatttcttgagcatgtattggtcagaaagaaaaagaaagaaaaccattctctatttttccatgggtatgatctggcttaaaacaatatggaatattttcctgacagacttgaaaactaggatcttcctcagatgtctgtaaataactctggtatccaactgggtgtattctagtgtggaacaaaaaacagtgaacacaagtgcttacttgtggatactatcttaccaacggatcacaaagttctctttttggtgtactgttgttgacagggattgtgtactgtttcgacccaagtactgctgtatcctgtgtagtactagatctgtatctcttgtctgaattaaacatttttagttgctgtgtaaatgttaggaagcaaagtagctttgaattttctctgtaagagaataaaagataaaataatg

SEQ ID NO: 202330 - DNA, 3288 bp, Homo sapiens
  Payload ID: 19908
  Gene Name: zinc finger protein 385B
  Uniprot ID: Q569K4
  ENST ID: ENST00000410066
  CDS Start-End: 605-2020
gcacgtccaaaccccggggtcctcggccaggccaggggggcgggcgtgcggcggggccgggccgggccgggcgcgcccagcgggctccgggcacacgcccctcacctgggcgaggcccggtgcgcaggcgctcagcgcgggggcagcggccgggcgcttaagcccggcgcgggcaagagttggacagttcaggggccgcgccgggccgagctgtcgcccgcgccacctccaccgccgccgctgctaccgccaccgccaccgcctgggctgcagcagatcgcgggagaacgtctgcgcgaagccccggtgcagccctggcgggaccgcagcaaccaccggagcgtgagcaacagcttcccggctggaggagccactgccccacgcgcccgcggcccgcgcgccgagatgttctacatttcaactccatcaaatattaaattgatgtttatgggctaacctggaaaccgaaaaacagtttgtttcactacaagaataagaaaatatgtccaaattcctgtcagctgacttataaagggacttttagaacacaacccaatgcatgaggtactccttaagccctgacaaccatcttgaagatggaatcatgaatatggcaaattttctacggggctttgaagaaaaggggataaagaacgacaggcctgaggaccagttgagcaaagagaaaaagaaaattcttttctccttctgtgaggtgtgcaacatccagctgaactctgcagcccaggctcaggtgcattccaacggcaaatcccaccgcaaacgagtgaagcagctgagtgatgggcagcccccaccacccgcccaggccagccccagcagcaacagcagcacaggcagtacatgccacactactacccttcctgctcttgtgcgcacacctaccctgatgatgcagccttcactggatatcaaaccatttatgtcttttccagtggacagtagttctgctgttgggctctttccaaattttaacacaatggatcctgtgcaaaaagcggttattaaccatacatttggagtatccattcccccaaagaagaaacaagttatttcttgtaatgtctgtcagcttcgctttaactcagatagccaggccgaggcccactacaaaggaagtaaacatgccaagaaggtcaaagcactagacgcaacgaaaaataaacccaaaatggttccttccaaggacagcgcaaaggctaatcccagctgctccatcactccaatcacaggcaacaactctgacaaatcagaagataaagggaagttaaaagccagcagttccagtcagccatcaagctctgaaagtggctcatttctcctcaaatctggcacaacacccctgccacctggagcagccacttctccctccaagagcacaaatggagctcccggtactgttgttgaatcagaagaagaaaaagccaaaaaattactttattgttcactatgcaaagtggctgtgaactccctgtcacagctagaggcacacaacacaggatctaaacacaagaccatggttgaagctcgtaatggggctggtccaattaaatcctatcctagacctggatcaagattaaagatgcagaatggcagtaaggggtcaggactacagaacaagacatttcattgtgaaatctgtgatgttcatgttaattcagaaattcaactcaaacagcacatttctagccgaaggcataaagatcgagttgcagggaaaccactgaagccaaaatacagcccttacaacaaactccagcggagcccgagtattctagcagcaaaacttgcattccagaaagatatgatgaagcctttggccccagccttcctgtcctcacctctcgcagcggcggcagccgtgtcctcagcgctgtcactcccaccccggccctctgcctcgctcttccaggctccagccattcctccagctcttctgaggcctgggcatgggcccatccgcgccactcctgcctccatcctctttgctccgtactaacgtctgcaaaccccaagacgtttgaggccagtaggaagttgagaaagaaagccacaaggattcagcaatttaagcagtttgtgttgcagtaccccccattcacccacaaaatgcagcccaccacccagtcccccaattccagagagaaacacatcactagattgacgagggcttttagagactgctcctataattgaggaatcagcagcataggctttatctccctacttcctcccccaccctaccgcgttcaatttgtgtatctcagatatttgatttcttgagcatgtattggtcagaaagaaaaagaaagaaaaccattctctatttttccatgggtatgatctggcttaaaacaatatggaatattttcctgacagacttgaaaactaggatcttcctcagatgtctgtaaataactctggtatccaactgggtgtattctagtgtggaacaaaaaacagtgaacacaagtgcttacttgtggatactatcttaccaacggatcacaaagttctctttttggtgtactgttgttgacagggattgtgtactgtttcgacccaagtactgctgtatcctgtgtagtactagatctgtatctcttgtctgaattaaacatttttagttgctgtgtaaatgttaggaagcaaagtagctttgaattttctctgtaagagaataaaagataaaataatgtattttctttatttcacattttatttggagatatttaaatgaaatagaaagccatataacatagctataattactacctgtttgctatttttgtttaacttattttgtagcttcctcactggtttgtgttgctaagcaaacgtatacaaacagaaaaagagcttcctaaattgcacatttttgcacctcttgtgcattctgcaagaagacaatgaatccatgtatttctatataagtatcttcttcatttttaacctgttttcatttgtaatgatgctacataattttgtggctccctaatgcaataatgtacagaagataaaaaaatttataattgaacaatttgtctttctgttcgctgaatatattgcaggtcatgctcccatgcccccctttctaagccgatatcaacaagactggaatgtttgtgatatcaggggcaagagttatcatagaacaacaaaatagagtggactcttttagagcatctatatctgcaacctgtaaatggtaaaatgtctgtgtatttttttaaatgtaccttttcaataaaagtacaaaaaataaaa

SEQ ID NO: 202331 - DNA, 956 bp, Homo sapiens
  Payload ID: 19908
  Gene Name: zinc finger protein 385B
  ENST ID: ENST00000457304
  CDS Start-End: 168-956
cccagtcagttgctgctgctggtcctagggcaggctatctgtgtcgggatgccgagcattactgccactataatcactgaggcatctgccagagatctcatggctgaaaactaggcagtacatgccacactactacccttcctgctcttgtgcgcacacctaccctgatgatgcagccttcactggatatcaaaccatttatgtcttttccagtggacagtagttctgctgttgggctctttccaaattttaacacaatggatcctgtgcaaaaagcggttattaaccatacatttggagtatccattcccccaaagaagaaacaagttatttcttgtaatgtctgtcagcttcgctttaactcagatagccaggccgaggcccactacaaaggaagtaaacatgccaagaaggtcaaagcactagacgcaacgaaaaataaacccaaaatggttccttccaaggacagcgcaaaggctaatcccagctgctccatcactccaatcacaggcaacaactctgacaaatcagaagataaagggaagttaaaagccagcagttccagtcagccatcaagctctgaaagtggctcatttctcctcaaatctggcacaacacccctgccacctggagcagccacttctccctccaagagcacaaatggagctcccggtactgttgttgaatcagaagaagaaaaagccaaaaaattactttattgttcactatgcaaagtggctgtgaactccctgtcacagctagaggcacacaacacaggatctaaacacaagaccatggttgaagctcgtaatggggctggtccaattaaatcctatcctagacctggatcaagattaaagatgcagaatggcagtaaggggtcaggactacagaacaagacatttcattgtgaaatctgtgatgttcatgttaattcagaaattcaactcaaacag

SEQ ID NO: 202332 - DNA, 501 bp, Homo sapiens
  Payload ID: 19908
  Gene Name: zinc finger protein 385B
  ENST ID: ENST00000439340
  CDS Start-End: 87-501
tagactataagcttttggaaaacagggactatgtcttcttcaacaatgtgtacacaacaagtagcaggttgtttggcacatggcagatgctcggcagtacatgccacactactacccttcctgctcttgtgcgcacacctaccctgatgatgcagccttcactggatatcaaaccatttatgtcttttccagtggacagtagttctgctgttgggctctttccaaattttaacacaaaaagaagaggcttatttgagaccaataaattttgccagatggatcctgtgcaaaaagcggttattaaccatacatttggagtatccattcccccaaagaagaaacaagttatttcttgtaatgtctgtcagcttcgctttaactcagatagccaggccgaggcccactacaaaggaagtaaacatgccaagaaggtcaaagcactagacgcaacgaaaaataaacccaaaatggttccttccaaggacagcgcaaaggctaatc

SEQ ID NO: 202333 - DNA, 404 bp, Homo sapiens
  Payload ID: 19908
  Gene Name: zinc finger protein 385B
  ENST ID: ENST00000438871
  CDS Start-End: 311-404
agggggatagctccctcatcttggatctaggggagcttataacatcttttaaaaggcgaaaattcaagttatctgtggactgtcagaacattttgcataagtcatccccagatgttctacatttcaactccatcaaatattaaattgatgtttatgggctaacctggaaaccgaaaaacagtttgtttcactacaagaataagaaaatatgtccaaattcctgtcagctgacttataaagggacttttagaacacaacccaatgcatgaggtactccttaagccctgacaaccatcttgaagatggaatcatgaatatggcaaattttctacggggctttgaagaaaaggggataaagaacgacaggcctgaggaccagttgagcaaagagaaaaagaaaattc

SEQ ID NO: 202334 - DNA, 565 bp, Homo sapiens
  Payload ID: 19908
  Gene Name: zinc finger protein 385B
  ENST ID: ENST00000451732
  CDS Start-End: 340-565
agggtgacataatggtagaacacagaacacttgtagaaatacttgaggaatgagtctgtgaggtttaatttgtgctaaaaattcatcaacacatctagagcaacgcaaatcttcccaagacagatggagactgttttaagatgttctacatttcaactccatcaaatattaaattgatgtttatgggctaacctggaaaccgaaaaacagtttgtttcactacaagaataagaaaatatgtccaaattcctgtcagctgacttataaagggacttttagaacacaacccaatgcatgaggtactccttaagccctgacaaccatcttgaagatggaatcatgaatatggcaaattttctacggggctttgaagaaaaggggataaagaacgacaggcctgaggaccagttgagcaaagagaaaaagaaaattcttttctccttctgtgaggtgtgcaacatccagctgaactctgcagcccaggctcaggtgcattccaacggcaaatcccaccgcaaacgagtgaagcagctgagtgatgggcagcccccaccacccgcccagg

SEQ ID NO: 202335 - DNA, 1380 bp, Homo sapiens
  Payload ID: 19909
  Gene Name: zinc finger protein 385C
  ENST ID: ENST00000436535
  CDS Start-End: 2-1380
tatgaagcggccactgagcccacccccaccggctgagaaggagacccccatatctggagctgctgagtgcctccctcggcccccagaaccacctaagcccaagcgagaaagaaagcggccatcgtacacgctctgtgatgtctgcaacatccagctgaactcggcggcccaggcccaggtgcactgtggggggcgggcccaccagaggcggcttcggcagctcagcttggggaagagcccctcagggccagcaggcccggcctccggcgcccccagccccctgctggcctccctgcccctgcccacccggcctctgcagcccccgctggacttcaagcacttgctcgccttccacttcaatggcgctgccccgctcagtctcttccccaacttcagcacgatggacccggtccagaaagctgtcatcagccacacgtttggtgtcccctcccctctgaagaagaagctgttcatttcctgtaacatctgtcacctgaggttcaactcagcgaaccaggccgaggcacattataaaggccacaaacacgccagaaaactcaaggctgtcgaggctgccaagagcaagcagaggccacacacccaggcccaggatggggctgtagtgtccccaatcccaacgctggccagtggagcccctggagagccacagagtaaagcagttcctgcagcccctcctcttgggcctccactccagccaccaccaactccagaccctacatgcagggagccagcccactcagagctcttggatgctgcctcctcatcctcttcttcctcctgcccaccttgctccccagagcctgggagagaggcaccggggcctgagccagcggcagctgccgtgggaagcagcatgagtggggaaggcaggagtgagaaggggcacctctactgccccacgtgtaaggtgacagtgaactcggcctcccagcttcaggctcacaacacaggagccaagcaccggtggatgatggaaggtcagcgaggggctccccggaggagccggggccgcccggtgtccaggggaggtgccggacacaaagccaagagagtcacagggggccggggcggccggcaggggcccagccctgccttccactgtgctctctgtcagctccaggtcaattcagagacccaactgaagcagcacatgagcagcaggaggcacaaagaccgcctggccgggaagacccccaagccctccagccagcacagcaagctgcagaagcacgcagcgctggcttctaaactggccttgcagaagcaactcaccaagacgttggcagcccgcttcctgcccagcccgctccccaccgcagccactgccatctgtgctctgccagggcccctggccctccg

SEQ ID NO: 202336 - DNA, 2596 bp, Homo sapiens
  Payload ID: 19909
  Gene Name: zinc finger protein 385C
  ENST ID: ENST00000618554
  CDS Start-End: 1-1275
atgggtctggctgcaggcccggcctccggcgcccccagccccctgctggcctccctgcccctgcccacccggcctctgcagcccccgctggacttcaagcacttgctcgccttccacttcaatggcgctgccccgctcagtctcttccccaacttcagcacgatggacccggtccagaaagctgtcatcagccacacgtttggtgtcccctcccctctgaagaagaagctgttcatttcctgtaacatctgtcacctgaggttcaactcagcgaaccaggccgaggcacattataaaggccacaaacacgccagaaaactcaaggctgtcgaggctgccaagagcaagcagaggccacacacccaggcccaggatggggctgtagtgtccccaatcccaacgctggccagtggagcccctggagagccacagagtaaagttcctgcagcccctcctcttgggcctccactccagccaccaccaactccagaccctacatgcagggagccagcccactcagagctcttggatgctgcctcctcatcctcttcttcctcctgcccaccttgctccccagagcctgggagagaggcaccggggcctgagccagcggcagctgccgtgggaagcagcatgagtggggaaggcaggagtgagaaggggcacctctactgccccacgtgtaaggtgacagtgaactcggcctcccagcttcaggctcacaacacaggagccaagcaccggtggatgatggaaggtcagcgaggggctccccggaggagccggggccgcccggtgtccaggggaggtgccggacacaaagccaagagagtcacagggggccggggcggccggcaggggcccagccctgccttccactgtgctctctgtcagctccaggtcaattcagagacccaactgaagcagcacatgagcagcaggaggcacaaagaccgcctggccgggaagacccccaagccctccagccagcacagcaagctgcagaagcacgcagcgctggctgtgagtatcctcaagtctaaactggccttgcagaagcaactcaccaagacgttggcagcccgcttcctgcccagcccgctccccaccgcagccactgccatctgtgctctgccagggcccctggccctccgccctgcccctacagcagccactaccctcttcccggctcccatcctgggcccagctctgtttcgcaccccagcaggagctgtccgccctgccacaggacctatcgtccttgccccttattagccctcatggggaggccagagctgatttcccaatagccactccttgtctcctcctgtcctgagacaccttggtttcctacatgccacagggactgtgaacagcttcaggggtcctgcccgatccagaaagagctgggctagttttaagggcagctgccttccaaggactgtccccaccctcctttcgcaggccttccagggttaatcctaggcttgcctgcatttcccaccctgacagaccccaaagatctatgcaaaatctcagccccagccatgtggtgctctcactttcctccacccaagacccacatggccagactctaggaatcttagcttctacaagccatcctctcctagccaggggacgactctctgacctctattcctaggctttggggcttcactggagatagggatggggtctctagctgcagcaggctcaaggctgtcaggacaaggtgaccatgggagtgtgacagaggaccatggaggagaaagggggacccaaaagtccttcgatcagcagtgctaaggtggggcagagccaaggaggtagtggggctggttctgaaagcttttgggggcttcatctgctctgaaggggtgggactaagagaggaggtgatgttctggttgggcccagggttttgttttaatcttaagtcttctgggcattcatgggcccagtctttttttctgtctgagagtatcattctgttgcccaggttagagtgcagtggtgcaatcttggctcactgcatgcagcctctgcctccctggttcaagtgatacttgctgataagcccagtcttaatattgagggagtaactcatccctcagaagctcttcttcttagcctttctctgacttcctgaaccccaactcttggagggcgggtgtgggtctccctcagactatggactcagctaacaccgaaccccccgcagagctcccaaaggaagagctttcccctacagcttcccactccaaactggtcctagcactaaattcagctttcccttctcccaaccagcccctgccactgtgaagctgagtgttgggaggcagtctcacatgcactggcaagacccattttcatgctgtcaatgtcaatgtcacaaactcctttccactgcagcactgccccctccccaccccacaatatgggaccctgccagtatccccctgtatcttttttttgttttttaaagacatttccaatgggagaaccagaaaaagggggaggggagggaaactttttgataacaattgtggttttattgtgtccaaccaatgcatcaataaatgaacttgaagcccaa

SEQ ID NO: 202337 - DNA, 10699 bp, Homo sapiens
  Payload ID: 19910
  Gene Name: zinc finger protein 385D
  Uniprot ID: Q9H6B1
  ENST ID: ENST00000281523
  CDS Start-End: 520-1707
acagtggtgaatttctcctgtgtgttcctgtgtggatcccgacactcttctcgctttaagagagcctcccgcgcccctcactccgccccttcccaagtctctgggctcgtcaaagcttcccgagagccatggttggtccaggcaggcagtcggagcacctcgtggagcggctgctaacccagggtggggtggggtggggtggaggggtctgcttgtagtactctcagtcctgatgtcacaggcgcggcaaggacatcgcaaggaggagtcggattacagtaaggatgggcagtgcagcaggcagcccgagcgcactctccagccgccggggatcttagccctggaaaggcagcctgcaaggcgctcatcccgcggaggaggcacgctctcggcgctcactgctctccacgccggggacatttccaccgaatgtagcatgaaagggctctgctctacgtgccagccttgggtgagagctgatgctgaagacaccgcggtgggattccagctgtctgattaatgagaaacataatgtattttggtggtacatgccagagtcctgctctcccggcccttgtccgtccaccagcccctcctttgcaaccatcgctggatattaaaccatttcttccctttcctcttgacactgcagctgcagtcaacctcttccccaatttcaatgcgatggacccgattcagaaagctgtaataaaccatacattcggggttcctcttccccaccgaagaaagcaaatcatatcatgcaacatttgccagttgagatttaattctgatagccaggctgcggcccactacaaaggcacgaaacatgccaagaagctcaaagcactggaagccatgaaaaataagcagaaatctgtaactgccaaggacagcgcaaagactaccttcacctccatcactaccaataccatcaataccagctctgacaaaacagacggtactgcagggacaccagcaatatcaacgacgacaactgtggaaatccgcaaaagcagtgttatgacaactgagatcacctctaaagtggaaaaaagcccaacgacagccactggcaatagctcatgtccttctactgagaccgaggaagaaaaggcaaaacggcttctttactgttcgctatgcaaggttgctgtcaactctgcctcgcagctggaggcgcacaacagtggtactaagcacaaaaccatgttagaagcccggaatggaagtggcactatcaaagcctttcctagggcaggagtgaaaggcaaaggacctgttaataaaggaaacacaggcctccaaaataaaacatttcactgtgaaatctgtgatgtgcacgtcaactcggaaacgcaacttaaacagcacattagcagtagaaggcacaaagacagagctgctgggaagcccccgaaacctaaatacagtccttacaacaaactacagaagacagcacatccactgggggtaaaattagtattttcaaaagaaccttcaaagccattggctccacgaattctaccaaatcctctagcagctgcagcagccgcagcagcagtggcagtgagttcccccttcagtcttcgaactgctccagcagcaacactgttccagacttccgcgcttcctccggcactcctgcggccagctcctggacccattcggaccgcccacactcctgtgctgtttgctccttactaaattccaaataggagtaattgtactgcaataatttttcaaaaaacaaaaaacaaaacaaacaaaagagaactatgcagtgtttatttatagtttaaagtatatctgaagagccaggacttttgatagtgaattgaaaaggttataaaaaagtgggggaggtttgggggtgggagggagggagtggtattttctccaaattaaagcattcctcttgaacgctgattgttttagaagtgatctccagcattgatttgtagtggtatctagaccttctgaagcctctgtgactgtgcttttgggcacctatttccctctgcattgtctgtcctgctttatgaaacaactatacattgtctaagggcattaactggttccaatgtatataaaataatttactctgtagattaaaatcgtacaaaaaaaaaggaaaaaaacaaaaacaaaagcaacactgtgaatagtactacccgtgctggtcctcttgctatgacggcaattactgggtatttatcccaacaaaagtagatacagtagatgtcttgtaaaacaatagtgctgtgtctcaatctatgccactaggttttaaagaattgcaaaggtagaatgaacaactatttcataccaataagcagtcaaaaaataaacatacaccggatggtgtcatggaggtctccctggtcagcattctcccctcctgtctagcttgaagatataacagggctaagcttagagatgggggaggcattaataaaggtgatttcttataaagtagtaacttcccaccctgaagatatattgctggaaacagggaagtgtttataatgaacctatatctgaaagcagagaaacccatgcatcatgagtgttaagaaagaaatcaatacaactcttctatttcaaggatgaagaatcataacctagaatgataatgcaaagtaaagatctttcatttagtacatatccagtaaaaacggagaatgttgcatctctgcagtatcccctttatatcataccagtagggttgtttcttaggcaaaggtttctgctttaagtatgatggtagaattaagcattagctatttttatgggtttttcttgttttttagattacctgctgacatgatataaacaattaatatatatttaaatgttaataacaacaggaaatatgaatctgagttaattgcacaccaatgacatagtgttaaaaaatactggtaagttccactcgacaattatttctccagtggagttgtgaaatactgagagcctttgatattcaccatcaggctgaaagaagttgatgttttacctttaaaacaagatttatcaggggtatatataaatatatgtatattgtatatatgttagaaagattaagagaataagttataaaaagaaaaaatctatataaaataattatataaccatccagtgttacatgttatcattaaattggtaacaaatggcataaaaatagctgtgcctttaatttgtgataaaggctatttgctttttcccatagaaagctgacatatacctatcaaaatggtggggtttgatgcagccagtctgttgcattaataagagcaatgacactgaaacttagaataatgacaaaacatacatgatttaggtttagagaaaaaactatttttgaaaaggttttctaaagactatttaaaaatatagggaaggattgggtgtggccttcctgaaactgctctcaaagtgttgtaacccttggagaggtataaagaatcaagaggaaaccatttgagacataggtatttagcatttatcattttatatttaagaaacaccatagcgtgcttggtgctcaacattaaacatggttttttggagttcttctccaccatctagctatagaaatttgtcatataaatgaatctttaaagcagttggctttatatatcctttgttaaccaaccaaaacaaaaacaaaaaaaaagaaggaaagaaggaaggaaggaaggaagaatggaaggaaggaaggaagaaaggagggaaggaaggaaggaaaggagatggggaagggaagaaaaggaaggaaggaagaaaggaagataatgtgttccatcagtattctggtagaaagaatttcaaaccatgcttctctggttaaatatattgattagcattaaaatttgttttgaaagtatctggtgattttgcatttaccagcatctctattctctagttttagcaagtgtttcctttttcacctacagaccctggtagttcagccaggtggatagttgcccataagtctgttgtttggggctctgtctgtatcccatgtgaccagcttctaaccattttgaactttagtttcccttttctgctatgtcaaatattttgattttccataatcatcctgagtccctatccaacaacctttacaactgatacagcctcactttctgttagataacttagtgttaattaaagcagtctcactaaaacgtgcttttgctgttctttcccattttcaccaaagtgaatgagccagtccactaaaaatcagggcctatgggatacacagtgtcctgggtcacaaggcattactgtctttaatgatttgctgggaacaaacgaatcagccatattttctccatcagccatataagaaatctcagaaatacctggatcccttctgcctcacttcgctatggaaccatttttgtttaaatggtcttttaaattggagttgtaagcatcagttgtcttttattcactacctaataaaggatgaagcctaaccacagaacttacagtggattctctgtgagttgtttcccccacactccatatatttaccaataccagattaacatccattatagttcaggctgccataaaactgtatcttttcccttagggaacttttttcatgaataaagatccacaatttagattggtcagcagtgtgctgtgaaaatccctgagggtggtctgactttatggttttacattccttcccatgcatcacaccatggcaaggaaagtgatagagaaagcagctctgattcatttgaaacaaatataaatgcattgcagaagccaaatgcctctggaaaaagcattgttgcacctcaatcagatcgtccagacaaatgggaaacagtcattggggaggtactgtatttctcttatgagaaaacaggcaattacacatgataaattgctcctctcactggacctcaactttgaagagtactttttttattcacataagcaaacatacttggcttttggcaatttatatcacccctgcctcatttgaaaggatttctatctttaggtactatttggcttctcctgatctatcgcagtaattcactgccattatcatcagagatgaaatttggtttttctaaaggtgctacatattttgttgccaagaaactagttagcaaaggagtatttatatgtacttgaaaattaaaagagcaggaaatcataaaagactaagaattaaaagacagcagaagtttcaaaatagaatcaaagaggctgtgcctatttgagtttctaaggcacaaaccaacacatagtagacatgagcaataaatatcaccaattacaattaaattttaaattaatatctttgtctttgtaccagtgtaatgtttcaattgttctgaagaaatcagatcagaaagctaaaaggtaactgaagtggtatataggcctgtttctttagatctgaattgaagtagaaaattacctttctatacataagcatggatgacattgtattaataactttgttcacccaaaagccgcatgaagtggtgggaaaagcaatgaggagccttagagtagccagagtctattgtagactttgtccctgaccaacagggtaacttaaatagtcaactaatgccttgcccttaatttcttcatcagtaaaatggatgacagtgattaatagctaagctggtttaatacatcagcactagaggggcattgcttttatcctctcaggaataaaaattctttattcgagtgaccaatgcagctactcacatacttgcatatgtccagaaaaatattctgtattcctttccatcctgagtgtaagccatattgtaggtcattcatatgctcaaccagaatgtacatttcaccaatattggagtagttgctaattcacttagtactcacttattatgatcgcacttatgccaacatcatgtaagatatgctacttctattttcccagtcaagaatgtaataaattctgaacaaaaccaaccctgaaaaaggcaatagacagctggcagtgggggtgtggaagggaacaacaatttaaatgcatcatccttatttcttttgttgcactttctctcttcaataggaaggggtcccgactaagccataactaattctgtcctgcgtttgcatgtattttaactaatggttgccttattaagaccatctcttccacagacaagtatatcagttatgcgctcttgtcattgttacaggaattatttaaactgagtcctaacagtgaaagttttacctgacttttgctgatttttttttctttctacatggggagatttatctctggagcatctcttgtgtttttgtatggtttgcttcagtagctagagaggctactatcaggaagtgaaatggatcatttctaatggtaggtctccattgcctacatggtatttctgagagtggtatcagggtgtccagtgaaagacggataggttgacatgtcatgctcatttggcctaaaggttgttactgccaggaatggacttacaacttaccagaatgtgaatggtgacaaaaggcaggttctactctggaaaaatatgtgttattttattagaagttcatggccgggcgcggtggctcacgcctgtaatcccagcactttgggaggccgaggcgggtggatcatgaggtcaggagatcgagaccatcctggctaacaaggtgaaaccccgtctctactaaaaatacaaaaaattagccgggcgcggtggcgggcgcctgtagtcccagctactcgggaggctgaggcaggagaatggcgtgaacccgggaagcggagcttgcagtgagccgagattgcgccactgcagtccgcagtccgacctgggcgacagagcgagactccgtctcaaaaaaaaaaaaaaaaaaaaaaaaaagaagttcatgcaggtcatgaagagtcacagagtttaaagaattctctggttgggtcatcaatgttcagatgtcaagggactgaacattaccttcaatttgagggtcttctctttcctcttctcagtgatggaaactcatccttcctaggtggctaagttgactgtagaaactgctaaaatgtatttgtcaaacgaagtaaaatctgactattaatatatatgatcaggtagagtatcttagagtttggttaactaagacagccgataatggggtcatgttattttcagactggcaggtcatctctaaaggcaatttttaaagattagggctaaaatgatttgtgagcaaagaagtataattaaaaataagtaatagtatagtgacgagttctaaggttaatgcttatatacgcacacacatacagaattgtaaaaatatgagtcttagtacctgtcattcttttacaaagccatggtaaaatcattttattttcaatgattaggttggttttactttaacaaaaggaactccaatgtcacacttgggagtcttaatcattttggggcattaatcattttagggcattggaggggctgggaagtagatataatgttaagatgttatgcactctagcaagactattatgctaacagtttgagttgggtcatacaattgtatcatttcacatcagctactgactttgagtactgactttgaatgcttataaaatcttcctcaaatccaggtagtgtgcaggacatggtataacaagacaacggaaaattagcagagagagccttcattggaaacccagattgtatttttgccagtacaacaaatattatttttaaagtctctcactaataggattgttcaacataaatctattgagaaacaatgatgtcagagagttttaaagctatagtgaagtgtgttaaattttgttaaccaaaataatgatatgggttttattggacgtttgtcaacccaacttaacacacattgttatataatttcagtataggaccctagggctaggggcaactaatattggataaagacccttcgtgagatgctttatgtctcttatgatgttatgctaacattagtagagatgaaaaaggaattgagttcgtgagatcctggaaagtttaacttttatcaaatagtcaagaaaaattccattttatggcatctggtttttaaatggattatagaaaaatgtgtggaagtactggatattggcgaaaaagccttgtggccaagggatctgggcacaagatcgagcatcacagaacagtgaacacagttgttggcttcactaccaatcatctacgaggaaactgggccaattcacttgacattttgatgattctctctgataaaaatagggataatgactgattacagaaatgtgcttttaaaaaagctgaatttagtaaaagcaagtcatttgctactcaaaatagctccaaaatctaagccatatttctataaatttcataaagtcgttttaaaatgtgacttatagttacagcgtttatattactacatatttaagatggaactgacctgatgccaaagctacatcatttgtagctatattagctttctcttttgtcctgaaaaaaggttggagtgtttttaaaaatatagtttttaatctgcacatggagctatatgcaaagaacattgtttcttcggggaatatttttagtcatagtttctttcatttattttatcagcaaaaatcttatgtcagtttcaactaaggtctcctaactgaacttttttttgttttgttttgttttgttttgttttgttttgtaaatccacagcaatttttattaaataaaagcctaggtgagaaaaataagttatatcctagcacatgaaacttagtcaataatttcttctaataatatttaattcactgaaattttacaacaaattttaaatcgactaccaagagtggtcagtcggggaaaatttagtgttatccaatgtatgatgaaatattcagctctcacaaaaactggatgtttggctattttaaaatggctgttcttcacaataaaactacaaacagacactgtcgaataaattgagtgataagtatgtctatttactaacatgagccaatttgaactttagttttgagatctaaaaatattttaatccacatgcatttagtgactataaattgaaggcagtgttcttttgacaaccaagcttattgaaaactttggcattaatgttcacaaacatgagcactattttgaaattaaaaatagactatggtttgctctacatgcttgtgaccctgcaaaaaataaaggaaaaatattcatgctatttttctcctcttatattcttatggcttaaaaaatataaccagggttttatctaatatcaatctcttggcaaaggatcatataaggttttacctgctaacaagaatacctcatttgaaagagcattaccacaagcattggagggaggtacagttgacatggtgaatttgattttacaaaaactaacaaagctggggggtggcaaagcattgacttaactataatcactagtcacaccaatgtgagattccgaatcattggtcagccacagtgatgccaccttggcatcaaacttgcctgttccatctttatcaatgtatctggaagtctgacttgagtaccagaagccaaaacgctcagaatgctaatttgtgccaccttaatggcccatgtgttcggtaaataaatttgctttttacatctcgtcaaatcttactgaataaacctttcatcagagttctacatatccccaggtgggcttggaaacgtgagataggattttattgtgttttatattatgatagttgaatgatgattctatatgttattgttatatttgttttcattaaaaacccaaagaactaccctttgtataccagtaaagtactattttttcttgaaaaaaagtaataataataataattaaggcaattcacatagtttgttttatgccagtcttctgttttaagtcatgtgataacatctccccaaacatcaatttctcaccctacatgatatgtgataaaatcccccatatgccaataatttcccccactataaaatgaagctgcttccaatattattgactcagaaatgtaaaatatagcacagtttatcttgtctgtggtcctgtactaagttaaacttgcagctgtgaacaaattaatatttatttttattaggaattctttaagatgaattttcagttttagtaaaagaaagacaccagtgatatttttatggatgaaagctctctggttccttcagcagctctaggaacatccttagccattatatcctctctctttgacaatatcaaaattgtccaggtaaatgtaatattgccagtggtgtcaagacattggtctgttcatgtccttattcttcgcttggtttgtggaatcaaaatggttgcttattttcctctcttctgtagataatccataggcaatgttttcaatttgggaaactttttttttcaacttggtttaagtttgaaggctctaaggaagaggaatattagaacaaattatgtattctctatgttctattccacttgtttgtaatatactcctgttctgagagttatggtaaacctatataacacgactgttccaagtgccaagtgagaattgtagtgactcacagaacacgtctcatgactatttatcaaaagaaatgtgctgattaaagaaaaaaagtaaaatatcttattttca

SEQ ID NO: 202338 - DNA, 900 bp, Homo sapiens
  Payload ID: 19910
  Gene Name: zinc finger protein 385D
  ENST ID: ENST00000446749
  CDS Start-End: 199-510
gccgccggggatcttagccctggaaaggcagcctgcaaggcgctcatcccgcggaggaggcacgctctcggcgctcactgctctccacgccggggacatttccaccgaatgtagcatgaaagggctctgctctacgtgccagccttgggtgagagctgatgctgaagacaccgcggtgggattccagctgtctgattaatgagaaacataatgtattttggtggtacatgccagagtcctgctctcccggcccttgtccgtccaccagcccctcctttgcaaccatcgctggatattaaaccatttcttccctttcctcttgacactgcagctgcagtcaacctcttccccaatttcaatgcgatggacccgattcagaaagctgtaataaaccatacattcggggttcctcttccccaccgaagaaagcaaatcatatcatgcaacatttgccagttgagatttaattctgatatggcacaagcaaaagaactggattggccccattaggtagtacaaacacactggagcctcccaacaatggactggggcatgaaagatccatgcgctgaaaaaatgacactaagttgaacttctcagactacccttgagccaggctgcggcccactacaaaggcacgaaacatgccaagaagctcaaagcactggaagccatgaaaaataagcagaaatctgtaactgccaaggacagcgcaaagactaccttcacctccatcactaccaataccatcaataccagctctgacaaaacagacggtactgcagggacaccagcaatatcaacgacgacaactgtggaaatccgcaaaagcagtgttatgacaactgagatcacctctaaagtggaaaaaagcccaacgacagccactggcaatagctc

SEQ ID NO: 202339 - DNA, 4079 bp, Homo sapiens
  Payload ID: 19911
  Gene Name: zinc finger protein 391
  Uniprot ID: Q9UJN7
  ENST ID: ENST00000244576
  CDS Start-End: 546-1622
agcgcagagctgcgaccgctgctgatacgttgctcagtctcagtgtggtctctgttttgcaactggtcgtccgcgtcaggagacttaggtccaggcgactgcccagacaatgactggtcccgcataccgagcagagcatgatcagcagcagtctgagtggaagagtgcctgtgatcttagggaacctgatgggcgttggagcagcggttcgacgcatgggtttctctttaatccttccgacttccccaagcccagcgcactcaggttccgctccaagtgcgggacccgcccggggtgtgtcgggggtactcggccggaggcggccggtgagtgaggcttacagggccccgggaccaaggaaccccagcatgttaattgaacttgatcacccagttgaaggaagaataatagtagatgttggatcttcaggaagctgaagagggcagtgcccagaaatacctgtcttgatagggggatttgagctgaaccaaagcatcaacaccaatcagactgtttccgaagaactagagttttctgggtcagcaatggaaagcctcagagggaatactgctcagggtcctacaaatgaagaagactataaaaacgaaggccaattatcaaggcaaacaaaatgtcctgcacagaagaaatcctcttttgagaacacagtggtcagaaaagtgtcagtgacactcaaagaaattttcacaggggaggaaggccctgaatccagtgaatttagtctaagcccaaaccttgacgcacaacagaaaattccaaagggacatggatccccaatatctaggaaaaactccaaagataattcagacttaattaaacaccaaagacttttctcacaaagaaaaccttgtaaatgcaatgaatgtgaaaaagcctttagttaccaatcagaccttcttgtacacagtagaattcatggtggagaaaagccttttgaatgcaacaaatgtgggaaatctttcagccgaagtacacaccttattgaacatcaaagaactcacactggagagaaaccttatgaatgcaatgaatgtggaaaagcttttagccggagcacacatcttagtctacatcagagaatccatactggagaaaaaccatatgaatgtagtgaatgtggaaaagcctttagccgaagcactaaccttagtcagcatcagcgaactcatactcaagaaaggccttacaaatgtaatgaatgtgggaaagccttcggtgaccgttcaaccataattcagcatcaacgaatacacactggagagaatccctatgaatgcagtaaatgtggaaaagctttcagttggatctcatcgcttactgaacatcagagaacacacactggggagaacccctatgagtgcagtgaatgtgggaaagtgttcagtcgaagctcgtctcttacagaacatcagagaatccacagtggagaaaagcctcacgagtgtagagtgtgtggaaagggcttcagtcgaagctcatcccttattattcatcagagaactcataccggggagaagccgtacaaatgtaatgactgtggaaaagccttctgtcagagttcaactctgatcagacatcagcaccttcatactaaagagtaatatctgagcttttattaatgttagcataagaacacatatacctaacctcccaccactgaaatatatatatttcaagtatatatatacttgttctaattttcttttattagatacctatacccgttttaagctttcattcgttctttccatccatctatccttctttcgtctcccctcccttcttccctccttccctccttcctactttttctccctctccctgttctttctttctcttttctcaaataagttcacaataaaacaaagggatgactcaaaaaacataacatatgaaatctaatattctgaagggctccaactttagagtataaagctatctgacaccttgtagtttctctgctaatctattccttcaagcgtgggtccccgaaccaccaggttctcctctgttttctaaccacatcagcccctgcacatgaagagaaaatcctgtgtgtgtgtcttcatacttgctggctctagtaccagaagagagggatctggcttcagagcaggactgaaaacttctcaccagtctggggataatagtgttgaggcaaattcattctcttgacttgcaaaaacagatttttctcatcttcctccttctctcaccttttttgcagtagcatttttcctcaaagtacaactcatttttttactaacgcctaactaatcctagtgttattttatcatatttttaccaagaatgttctaaaaatcttggagacgttcctccatgatcttgggaaaaaaagttgccaaatgctgtgctgttttttttgtttgtttttaattttctttcatttacagatttcatgaaacttatattctgtggctttgaccctcaccaatcttggaagattgatctctcaaggacaaacccagtgcctatttctcagtcctttttctacttgacatttgcagaattggcactttttgccactgttatgccttaaatcttgagcttctttcaggatccatgattctgtgctgatctacacttttcctacctctcagcatttctttgattgtcaatgatcagctctgtgatttggggcaagggttaggccagaattatctcattttatcaagttataaaacttgaggtagtgcaactagattatacacttcttgaagacagaaatcttggtttgtttgttgttttatttttgagagaaggtcttgctgtgttgcccaggctggagtgcaatggcacaatcatagctcactgtagccttgaacttctgggctcctgccacagcctcctgagtagctagggctgcaagtgtgtaccaccacacccacaattttaaagtttttttgtggagacaggatctcactatattggcaaggctggcctccatctcctgaactcaaacaattctcccacctcggcttccgaaaacactgacattacaggtgtgagccaccacacctgccagaaatcttgtttttgattgatataaaacatcacaaagtactgagtagacactaaatgctctgtaattattgctcactgattcctctttatctgtaatcaatcaacttgactttatttgatatggattaataattgatttctttctctctttctactgctgcttccaagttcttggtaccttgtgcctagattactaaattgatcactgttgactcactaccattatctagctccttactaaactactactttgttaaaaaaaaatagtcgtttcccagtgacctctgccccaaatgtaaacttctttaacctaaaggtctttcatagtttgatctacttacttacttcctttctcttctcaaagataatacatgcgggcaggcctgttttgtccctactataccctcttctcacacttttcttcttttcaaactgttccttggcacttctacatgtcctactttcttcgttgtattccagaaaccctatccacccttttttaaaggccatgctcatatcctggctctgtgacactttcagtcccctgccttcttagaaatcctttgtagtgatggtttgcattattctcctgtattagacaccttctttactgttttctggttctttcacaagtacttttttacataagctgttttgaagttgtaaatcatcctaaatcttttataagcctcatataatacatagtacaatgccagcctggactctagttttaatctaaatacatagggtttaatttagcagcataatctttttagtcttttgaatgatgaggtaacctcataggtattttggcccattttgtttttccttgaattacatatataactgactatttagactgactcctttagatctcctgggatgctgacctcttggctttccaattcatgagactattgtaaagaataagtgagttcattcatgtaaagtagtaaaacagtgcctgacaaaagtaaatgctcaataaattctaattgttatgattctagtga

SEQ ID NO: 202340 - DNA, 749 bp, Homo sapiens
  Payload ID: 19911
  Gene Name: zinc finger protein 391
  ENST ID: ENST00000461521
  CDS Start-End: 351-749
aagtgcgggacccgcccggggtgtgtcgggggtactcggccggaggcggccggtgagtgaggcttacagggccccgggaccaaggttcataggtggaagaaattcatctccagatgagactttggacttggacttgggacttttgagttaatgccagaatgatgaaccccagcatgttaattgaacttgatcacccagttgaaggaagaataatagtagatgttggatcttcaggaagctgaagagggcagtgcccagaaatacctgtcttgatagggggatttgagctgaaccaaagcatcaacaccaatcagactgtttccgaagaactagagttttctgggtcagcaatggaaagcctcagagggaatactgctcagggtcctacaaatgaagaagactataaaaacgaaggccaattatcaaggcaaacaaaatgtcctgcacagaagaaatcctcttttgagaacacagtggtcagaaaagtgtcagtgacactcaaagaaattttcacaggggaggaaggccctgaatccagtgaatttagtctaagcccaaaccttgacgcacaacagaaaattccaaagggacatggatccccaatatctaggaaaaactccaaagataattcagacttaattaaacaccaaagacttttctcacaaagaaaaccttgtaaatgcaatgaatgtgaaaaagcctttagttaccaatcagaccttcttgtacacagtagaattcatggtgga

SEQ ID NO: 202341 - DNA, 2179 bp, Homo sapiens
  Payload ID: 19912
  Gene Name: zinc finger protein 394
  Uniprot ID: Q53GI3
  ENST ID: ENST00000337673
  CDS Start-End: 205-1890
gcttccggcacgggatgttttcggttgtttgaccgagagagttgtaggcgcaaagctgaggaaaggagagtgtggagaggggcctggtgtggtggggcccggtgtttgggaccggagggtgttgacggctgatgagttccttgggtttgctctttcttcacctgaaaagaagactccaggaagggcagcacatgccggagaaagatgaattccagcttgaccgcccagaggcgcggcagtgacgccgagttgggaccctgggtgatggctgcgaggtccaaggacgcggcgccgtcccaacgcgacggacttttgcccgtgaaagtggaggaagactcacccggaagttgggagcccaactatcccgcggcttcgccggaccccgaaacttctcgactgcactttaggcagctgcgttaccaggaggtggctggaccggaagaggcgctgagccggctccgagaactctgtcgtcggtggctgagacccgagctgctctccaaggagcagatcctggagctgctggtgctggagcagttcctcaccatcctgcccgaggagcttcaagcctgggtgcgagagcactgcccagagagcggggaggaggcggtggccgtggtgcgggctctgcagcgagcgctcgatggaacctcatcccaggggatggtgactttcgaggacacggctgtgtctctaacctgggaggagtgggagcgcctggacccagcacggagggacttctgcagagagagtgcgcagaaggattccgggagcacagttccgccgagtttggaaagcagagtggagaacaaagagttgattccaatgcaacaaattttagaagaagcggagccacaggggcaactacaagaagcgttccaggggaagcgccccctgttttctaagtgtggcagtacccatgaggacagggtggaaaagcagtccggagaccccttgcccctgaaacttgaaaattctcctgaagcagaaggactcaacagcatctcagatgtcaataagaatggttccatagaaggggaagactctaaaaataatgaattgcagaacagtgccaggtgttccaaccttgttctatgtcagcacatcccgaaagcagagaggcccactgacagtgaggaacacgggaacaagtgcaagcaaagtttccacatggtgacgtggcacgtgctgaaacctcacaagtctgacagtggagacagtttccatcattccagcctttttgagacccagaggcagctccatgaagaaagaccttataaatgtggtaactgtgggaagagtttcaaacaacgctctgacctctttagacaccagagaatccacacaggtgagaaaccctatggctgccaagaatgtgggaaaagcttcagccagagtgctgccctgaccaagcaccagaggacacacacaggcgagaagccgtacacctgtctgaaatgtggggagcgcttcaggcagaattcacacctaaatcgtcatcaaagtacccacagtagagacaaacattttaaatgtgaggaatgcggggaaacctgtcatatttccaacctttttagacatcagagactacataaaggggaaagaccctataagtgtgaagaatgcgagaagagcttcaaacagcgctctgacctctttaaacaccacagaatccacactggggagaagccctatggatgttccgtctgtgggaaacgcttcaatcagagtgcaaccctcattaaacaccagagaattcacactggggaaaagccttacaaatgtcttgaatgtggggaaagatttagacaaagtacacaccttatccgacaccaaagaattcatcaaaataaagtgctgtcggctgggcgtggtggctcacgcctataatcccagcactttgggaggccaaggcaggcagatcatttgagatcaggagtttgaaaccagcctggccaacatggtaaaatcctgtctctactaaaaatacaaaaatgagccgggcatggtggtgcatgcctgtaagcccagctattcgggaggctgaggtaggagaatcacttgaacccaggaggcggaagttgcagtgagctgagatcatgccactgcactccagcctgggcaacagagcgagactccatctcaaaaaagaaataaagtgctgtcattttgatatgtt

SEQ ID NO: 202342 - DNA, 2017 bp, Homo sapiens
  Payload ID: 19912
  Gene Name: zinc finger protein 394
  Uniprot ID: Q53GI3
  ENST ID: ENST00000426306
  CDS Start-End: 172-660
cgagagagttgtaggcgcaaagctgaggaaaggagagtgtggagaggggcctggtgtggtggggcccggtgtttgggaccggagggtgttgacggctgatgagttccttgggtttgctctttcttcacctgaaaagaagactccaggaagggcagcacatgccggagaaagatgaattccagcttgaccgcccagaggcgcggcagtgacgccgagttgggaccctgggtgatggctgcgaggtccaaggacgcggcgccgtcccaacgcgacggacttttgcccgtgaaagtggaggaagactcacccggaagttgggagcccaactatcccgcggcttcgccggaccccgaaacttctcgactgcactttaggcagctgcgttaccaggaggtggctggaccggaagaggcgctgagccggctccgagaactctgtcgtcggtggctgagacccgagctgctctccaaggagcagatcctggagctgctggtgctggagcagttcctcaccatcctgcccgaggagcttcaagcctgggtgcgagagcactgcccagagagcggggaggaggcggtggccgtggtgcgggctctgcagcgagcgctcgatggaacctcatcccaggtttggaaagcagagtggagaacaaagagttgattccaatgcaacaaattttagaagaagcggagccacaggggcaactacaagaagcgttccaggggaagcgccccctgttttctaagtgtggcagtacccatgaggacagggtggaaaagcagtccggagaccccttgcccctgaaacttgaaaattctcctgaagcagaaggactcaacagcatctcagatgtcaataagaatggttccatagaaggggaagactctaaaaataatgaattgcagaacagtgccaggtgttccaaccttgttctatgtcagcacatcccgaaagcagagaggcccactgacagtgaggaacacgggaacaagtgcaagcaaagtttccacatggtgacgtggcacgtgctgaaacctcacaagtctgacagtggagacagtttccatcattccagcctttttgagacccagaggcagctccatgaagaaagaccttataaatgtggtaactgtgggaagagtttcaaacaacgctctgacctctttagacaccagagaatccacacaggtgagaaaccctatggctgccaagaatgtgggaaaagcttcagccagagtgctgccctgaccaagcaccagaggacacacacaggcgagaagccgtacacctgtctgaaatgtggggagcgcttcaggcagaattcacacctaaatcgtcatcaaagtacccacagtagagacaaacattttaaatgtgaggaatgcggggaaacctgtcatatttccaacctttttagacatcagagactacataaaggggaaagaccctataagtgtgaagaatgcgagaagagcttcaaacagcgctctgacctctttaaacaccacagaatccacactggggagaagccctatggatgttccgtctgtgggaaacgcttcaatcagagtgcaaccctcattaaacaccagagaattcacactggggaaaagccttacaaatgtcttgaatgtggggaaagatttagacaaagtacacaccttatccgacaccaaagaattcatcaaaataaagtgctgtcggctgggcgtggtggctcacgcctataatcccagcactttgggaggccaaggcaggcagatcatttgagatcaggagtttgaaaccagcctggccaacatggtaaaatcctgtctctactaaaaatacaaaaatgagccgggcatggtggtgcatgcctgtaagcccagctattcgggaggctgaggtaggagaatcacttgaacccaggaggcggaagttgcagtgagctgagatcatgccactgcactccagcctgggcaacagagcgagactccatctcaaaaaagaaataaagtgctgtcattttgatatg

SEQ ID NO: 202343 - DNA, 4808 bp, Homo sapiens
  Payload ID: 19913
  Gene Name: zinc finger protein 395
  Uniprot ID: Q9H8N7
  ENST ID: ENST00000344423
  CDS Start-End: 133-1674
aggttcaagtgcgcatgtgcgcgaggagtcgctcgggcacttattgagcgccgactgtctacgggcggccgggggtgatgggcagaggcttcagtgtccccttcgcctccgcaggagaggagaggcagcagcatggcgagtgtcctgtcccgacgccttggaaagcggtccctcctgggagcccgggtgttgggacccagtgcctcggaggggccctcggctgccccaccctcggagccactgctagaaggggccgctccccagcctttcaccacctctgatgacaccccctgccaggagcagcccaaggaagtccttaaggctcccagcacctcgggccttcagcaggtggcctttcagcctgggcagaaggtttatgtgtggtacgggggtcaagagtgcacaggactggtggagcagcacagctggatggagggtcaggtgaccgtctggctgctggagcagaagctgcaggtctgctgcagggtggaggaggtgtggctggcagagctgcagggcccctgtccccaggcaccacccctggagcccggagcccaggccctggcctacaggcccgtctccaggaacatcgatgtcccaaagaggaagtcggacgcagtggaaatggatgagatgatggcggccatggtgctgacgtccctgtcctgcagccctgttgtacagagtcctcccgggaccgaggccaacttctctgcttcccgtgcggcctgcgacccatggaaggagagtggtgacatctcggacagcggcagcagcactaccagcggtcactggagtgggagcagtggtgtctccaccccctcgcccccccacccccaggccagccccaagtatttgggggatgcttttggttctccccaaactgatcatggctttgagaccgatcctgaccctttcctgctggacgaaccagctccacgaaaaagaaagaactctgtgaaggtgatgtacaagtgcctgtggccaaactgtggcaaagttctgcgctccattgtgggcatcaaacgacacgtcaaagccctccatctgggggacacagtggactctgatcagttcaagcgggaggaggatttctactacacagaggtgcagctgaaggaggaatctgctgctgctgctgctgctgctgccgcaggcaccccagtccctgggactcccacctccgagccagctcccacccccagcatgactggcctgcctctgtctgctcttccaccacctctgcacaaagcccagtcctccggcccagaacatcctggcccggagtcctccctgccctcaggggctctcagcaagtcagctcctgggtccttctggcacattcaggcagatcatgcataccaggctctgccatccttccagatcccagtctcaccacacatctacaccagtgtcagctgggctgctgccccctccgccgcctgctctctctctccggtccggagccggtcgctaagcttcagcgagccccagcagccagcacctgcgatgaaatctcatctgatcgtcacttctccaccccgggcccagagtggtgccaggaaagcccgaggggaggctaagaagtgccgcaaggtgtatggcatcgagcaccgggaccagtggtgcacggcctgccggtggaagaaggcctgccagcgctttctggactgagctgtgctgcaggttctactctgttcctggccctgccggcagccactgacaagaggccagtgtgtcaccagccctcagcagaaaccgaaagagaaagaacggaaacacggagtttgggctctgttggctaaggtgtaacacttaaagcaattttctcccattgtgcgaacattttattttttaaaaaaaagaaacaaaaatatttttccccctaaaataggagagagccaaaactgaccaaggctattcagcagtgaaccagtgaccaaagaattaattaccctccgtttcccacatccccactctctaggggattagcttgtgcgtgtcaaaagaaggaacagctcgttctgcttcctgctgagtcggtgaattctttgctttctaaactcttccagaaaggactgtgagcaagatgaatttacttttcttaaaaaaaaaaaaaaaaaaaaaaaaaaagagtttctggctgatgggtgactcagagtgcaggactgcctggccgtggggcagaggggtttgcccttctcggagggtacctcctgttccctgtctgagcatcctgcatggaagtcaaaggaaatccctttcttggtgacgacttaaatctgggttccctcagacattgggttgcaccccaacaaatattaaatggcttcttcttaaagcccagagaaagaggttttttaaaagactgtcgccaaatagctgagccaaaaggctgatcagaattcactttttggaatgtggcagttaaacactaccttgatcattctctcctctttcctcgaggaactcctggagggtttgagcgtctggaaactctctgctctgacccgaggaagcaccctcctgacgccgccttcctccggttattgaaaggacgcctcagaaatgctttgttttcttttacgatgtattcagaagcctttactgattaaagttttcttttatttgggtggccgggagagacccagggaggttctggaggttcctttctgtctcctggccccaccagggatttccccatttctgtttgctgcctgaaagcaggatgaggaaggccaaggagagtccttgcacccgtgagcgtcaggatgaggaaatgacaggaggaagacgtgggtttgggttagtggctgctggcgttttggcccttggtgtttctggagcctccagggatctaggggagcctgggctgcgtgcatgtcgataagcagagctgttcttggggagaaggagggaggtctcgggagtgtagcaccatgccaaccagccctgcgcgaagacagagtgagccacgcccggatggcagggcatgtttctgttttggtgtctcactttcctcccagcgtgacttatttggggattcctcagggcctactggaatgtgactgcccactgcccagctgcctcgggtacaagtcctggccctatgtcccagctgtcaggggctcagggaatcctacccagccacctgtcctgggatggagtgtcagcatccaccccttggttgtcatcgaggccgccctcccagtcctgggtgaagatatttgggccaccagggctcccttggccccttcacgtaggaaatagacacgtgctttttaatgcaggacactttgagtgttacaaaatctgtagacctggcagtagggtcatgatgttgggaagggtgtagtgccctaggttggtgacagaagggacagacacttgtgcacaggtgtctttggtgatggggtttttttttttataacttagtaaaaaaaaaaaaatgtatgtggaattctgtctcttggtaaagctcaaagccaggctagcctgaggtggcgcagggctctccttcctgtcccttcgatctccttgagaattaagagctggcagctgctgatggtgtttcccaacccccctcacttcccaagacaacccccagcttcaggtcctcatggggaggggagggcacgttcttgacacatgggaacttcgctcaggagggcctccccttcccctctccctcagagttttcactgccgtctcgtctttagaaagctgtttgaattccccccgcccccagtttggaccgtgtagatataactggatatacggatttttctctttgtgcaggcttcttatgccgttggtatacagggcaggaaagagaggaataaagggagagagcagtgtggaaaccacggtggttttgctttgttcttactaggttttggtgccaccttccctgcctgcgcttgtgccccctctcctccttggcactggcggcctccttgcctcccttccacccgtgctgccatcccgtgcctgtcgtgttggttcttcacacgtgctctgttctcggggttgttccattcatgccttcttggagggtgagggtggcttgggaaccgacccagtgatcatgcctactttcttctttgtatctccctccttcccagcccacccgggcagcagactctgatggaaggaaggtgccgtaggtgggcttttagaaactaacgggactggttttcaaagcagttatcttgggaaactgtttattccagcgatgtgacttttttcagaatatttcttggaatcatattcagagtctggggctgtgtgttgagcagccttaaggatgctagacactcatttagtgcccagggagtccagcgaatgacgtctgtggccaagcgaggtctcaggtgcaaagcaaaaggaccatttaaagtaaaatagcttggattcaatcatgtgacttttaaattggctcagaaagcaattttgtaatttcagagagtgttttgagccatggccacgttgtcattgtgagtctatagcttgactccttggagaacaatattcatttggttgtggagactgatttgctgggagaaatctgtcctgttactttctggtcatcccaggttctgacttttaccaggggcaaaaaaaaaaaaagcaagagggagataaatcccatctgtgagtttgtcttattggcgcctttttcctcagctgtcttccaagtattatttttactgttaaaaaattttttaaaaatgtgaaatgtaatgtttttacagcaacaatatgaaatatattttataaggaataaaatggtaccttgtctgatttaa

SEQ ID NO: 202344 - DNA, 625 bp, Homo sapiens
  Payload ID: 19913
  Gene Name: zinc finger protein 395
  ENST ID: ENST00000520535
  CDS Start-End: 1-93
ctgccctcaggggctctcagcaagtcagctcctgggtccttctggcacattcaggcagatcatgcataccaggaaagcccgaggggaggctaagaagtgccgcaaggtgtatggcatcgagcaccgggaccagtggtgcacggcctgccggtggaagaaggcctgccagcgctttctggactgagctgtgctgcaggttctactctgttcctggccctgccggcagccactgacaagaggccagtgtgtcaccagccctcagcagaaaccgaaagagaaagaacggaaacacggagtttgggctctgttggctaaggtgtaacacttaaagcaattttctcccattgtgcgaacattttattttttaaaaaaaagaaacaaaaatatttttccccctaaaataggagagagccaaaactgaccaaggctattcagcagtgaaccagtgaccaaagaattaattaccctccgtttcccacatccccactctctaggggattagcttgtgcgtgtcaaaagaaggaacagctcgttctgcttcctgctgagtcggtgaattctttgctttctaaactcttccagaaaggactgtgagcaagatgaatttacttttcttaaaaaaaaa

SEQ ID NO: 202345 - DNA, 584 bp, Homo sapiens
  Payload ID: 19913
  Gene Name: zinc finger protein 395
  ENST ID: ENST00000521185
  CDS Start-End: 212-584
acttattgagcgccgactgtctacgggcggccgggggcctgagccgcgccttgctgctgggtctccacttgtggggaagagagaactggaccaggacagcgcgggaaactgacaatgccactgcttgctagctttgggattttggacaaataggtgatgggcagaggcttcagtgtccccttcgcctccgcaggagaggagaggcagcagcatggcgagtgtcctgtcccgacgccttggaaagcggtccctcctgggagcccgggtgttgggacccagtgcctcggaggggccctcggctgccccaccctcggagccactgctagaaggggccgctccccagcctttcaccacctctgatgacaccccctgccaggagcagcccaaggaagtccttaaggctcccagcacctcgggccttcagcaggtggcctttcagcctgggcagaaggtttatgtgtggtacgggggtcaagagtgcacaggactggtggagcagcacagctggatggagggtcaggtgaccgtctggctgctggagcagaagctgcaggtctgctgcagggtggaggaggtgtggctgg

SEQ ID NO: 202346 - DNA, 699 bp, Homo sapiens
  Payload ID: 19913
  Gene Name: zinc finger protein 395
  ENST ID: ENST00000521912
  CDS Start-End: 137-699
gtcttgcactgtttcctaggctggagtgcagtggcacaatcacagctcactgcagccttgacttccccaggctcaagccattctcctacctcagcctcccaagcagttgggaccacaggagaggagaggcagcagcatggcgagtgtcctgtcccgacgccttggaaagcggtccctcctgggagcccgggtgttgggacccagtgcctcggaggggccctcggctgccccaccctcggagccactgctagaaggggccgctccccagcctttcaccacctctgatgacaccccctgccaggagcagcccaaggaagtccttaaggctcccagcacctcgggccttcagcaggtggcctttcagcctgggcagaaggtttatgtgtggtacgggggtcaagagtgcacaggactggtggagcagcacagctggatggagggtcaggtgaccgtctggctgctggagcagaagctgcaggtctgctgcagggtggaggaggtgtggctggcagagctgcagggcccctgtccccaggcaccacccctggagcccggagcccaggccctggcctacaggcccgtctccaggaacatcgatgtcccaaagaggaagtcggacgcagtggaaatggatgagatgatggcggccatggtgctgacgtccctgtcctgcagccctgttgtacagagtcctcccgg

SEQ ID NO: 202347 - DNA, 1790 bp, Homo sapiens
  Payload ID: 19913
  Gene Name: zinc finger protein 395
  Uniprot ID: Q9H8N7
  ENST ID: ENST00000523095
  CDS Start-End: 89-1630
gctagccgtccgagccgagccgtccgagccggggaagccgggcgcgtgctgccgctcgtggcgggccgaggagaggagaggcagcagcatggcgagtgtcctgtcccgacgccttggaaagcggtccctcctgggagcccgggtgttgggacccagtgcctcggaggggccctcggctgccccaccctcggagccactgctagaaggggccgctccccagcctttcaccacctctgatgacaccccctgccaggagcagcccaaggaagtccttaaggctcccagcacctcgggccttcagcaggtggcctttcagcctgggcagaaggtttatgtgtggtacgggggtcaagagtgcacaggactggtggagcagcacagctggatggagggtcaggtgaccgtctggctgctggagcagaagctgcaggtctgctgcagggtggaggaggtgtggctggcagagctgcagggcccctgtccccaggcaccacccctggagcccggagcccaggccctggcctacaggcccgtctccaggaacatcgatgtcccaaagaggaagtcggacgcagtggaaatggatgagatgatggcggccatggtgctgacgtccctgtcctgcagccctgttgtacagagtcctcccgggaccgaggccaacttctctgcttcccgtgcggcctgcgacccatggaaggagagtggtgacatctcggacagcggcagcagcactaccagcggtcactggagtgggagcagtggtgtctccaccccctcgcccccccacccccaggccagccccaagtatttgggggatgcttttggttctccccaaactgatcatggctttgagaccgatcctgaccctttcctgctggacgaaccagctccacgaaaaagaaagaactctgtgaaggtgatgtacaagtgcctgtggccaaactgtggcaaagttctgcgctccattgtgggcatcaaacgacacgtcaaagccctccatctgggggacacagtggactctgatcagttcaagcgggaggaggatttctactacacagaggtgcagctgaaggaggaatctgctgctgctgctgctgctgctgccgcaggcaccccagtccctgggactcccacctccgagccagctcccacccccagcatgactggcctgcctctgtctgctcttccaccacctctgcacaaagcccagtcctccggcccagaacatcctggcccggagtcctccctgccctcaggggctctcagcaagtcagctcctgggtccttctggcacattcaggcagatcatgcataccaggctctgccatccttccagatcccagtctcaccacacatctacaccagtgtcagctgggctgctgccccctccgccgcctgctctctctctccggtccggagccggtcgctaagcttcagcgagccccagcagccagcacctgcgatgaaatctcatctgatcgtcacttctccaccccgggcccagagtggtgccaggaaagcccgaggggaggctaagaagtgccgcaaggtgtatggcatcgagcaccgggaccagtggtgcacggcctgccggtggaagaaggcctgccagcgctttctggactgagctgtgctgcaggttctactctgttcctggccctgccggcagccactgacaagaggccagtgtgtcaccagccctcagcagaaaccgaaagagaaagaacggaaacacggagtttgggctctgttggctaaggtgtaacacttaaagcaattttctccca

SEQ ID NO: 202348 - DNA, 2068 bp, Homo sapiens
  Payload ID: 19913
  Gene Name: zinc finger protein 395
  Uniprot ID: Q9H8N7
  ENST ID: ENST00000523202
  CDS Start-End: 337-1878
ctgcacagggagtttgtcttgtgcaaacaatttccaaggcagcgttttcttccctgcctgggagtgcagggctcagcgccttcactttggaactgactcagagacctaaagaagcccacctggccagcgggaaggggggccgccgccgcctcccggttttgggcagccctggccagctccctgtggccttggaggacttccaccgggcaggcgttcccatgatgccaggctaccaggcgcgggggattcctgcaggccggcgctgcttttcttagaaccccctttctagaaaagtacacctgggggttttgcttcaaagagaggagaggcagcagcatggcgagtgtcctgtcccgacgccttggaaagcggtccctcctgggagcccgggtgttgggacccagtgcctcggaggggccctcggctgccccaccctcggagccactgctagaaggggccgctccccagcctttcaccacctctgatgacaccccctgccaggagcagcccaaggaagtccttaaggctcccagcacctcgggccttcagcaggtggcctttcagcctgggcagaaggtttatgtgtggtacgggggtcaagagtgcacaggactggtggagcagcacagctggatggagggtcaggtgaccgtctggctgctggagcagaagctgcaggtctgctgcagggtggaggaggtgtggctggcagagctgcagggcccctgtccccaggcaccacccctggagcccggagcccaggccctggcctacaggcccgtctccaggaacatcgatgtcccaaagaggaagtcggacgcagtggaaatggatgagatgatggcggccatggtgctgacgtccctgtcctgcagccctgttgtacagagtcctcccgggaccgaggccaacttctctgcttcccgtgcggcctgcgacccatggaaggagagtggtgacatctcggacagcggcagcagcactaccagcggtcactggagtgggagcagtggtgtctccaccccctcgcccccccacccccaggccagccccaagtatttgggggatgcttttggttctccccaaactgatcatggctttgagaccgatcctgaccctttcctgctggacgaaccagctccacgaaaaagaaagaactctgtgaaggtgatgtacaagtgcctgtggccaaactgtggcaaagttctgcgctccattgtgggcatcaaacgacacgtcaaagccctccatctgggggacacagtggactctgatcagttcaagcgggaggaggatttctactacacagaggtgcagctgaaggaggaatctgctgctgctgctgctgctgctgccgcaggcaccccagtccctgggactcccacctccgagccagctcccacccccagcatgactggcctgcctctgtctgctcttccaccacctctgcacaaagcccagtcctccggcccagaacatcctggcccggagtcctccctgccctcaggggctctcagcaagtcagctcctgggtccttctggcacattcaggcagatcatgcataccaggctctgccatccttccagatcccagtctcaccacacatctacaccagtgtcagctgggctgctgccccctccgccgcctgctctctctctccggtccggagccggtcgctaagcttcagcgagccccagcagccagcacctgcgatgaaatctcatctgatcgtcacttctccaccccgggcccagagtggtgccaggaaagcccgaggggaggctaagaagtgccgcaaggtgtatggcatcgagcaccgggaccagtggtgcacggcctgccggtggaagaaggcctgccagcgctttctggactgagctgtgctgcaggttctactctgttcctggccctgccggcagccactgacaagaggccagtgtgtcaccagccctcagcagaaaccgaaagagaaagaacggaaacacggagtttgggctctgttggctaaggtgtaacacttaaagcaattttctcccattgtgcgaacattttattttttaaaaaaaa

SEQ ID NO: 202349 - DNA, 224 bp, Homo sapiens
  Payload ID: 19913
  Gene Name: zinc finger protein 395
  ENST ID: ENST00000517459
  CDS Start-End: 83-224
tcgggttctgtggacacaggcaggaagcttaagaggctctgctgagcagggacctggggaagaggagaggagaggcagcagcatggcgagtgtcctgtcccgacgccttggaaagcggtccctcctgggagcccgggtgttgggacccagtgcctcggaggggccctcggctgccccaccctcggagccactgctagaaggggccgctccccagcctttcacca

SEQ ID NO: 202350 - DNA, 501 bp, Homo sapiens
  Payload ID: 19913
  Gene Name: zinc finger protein 395
  ENST ID: ENST00000522795
  CDS Start-End: 194-501
ggagccgggccgcgggccgcgccgggagggcgggcagggccgcggccgctgcagcccggagctgagctagccgtccgagccgagccgtccgagccggggaagccgggcgcgtgctgccgctcgtggcgggccgaggtgatgggcagaggcttcagtgtccccttcgcctccgcaggagaggagaggcagcagcatggcgagtgtcctgtcccgacgccttggaaagcggtccctcctgggagcccgggtgttgggacccagtgcctcggaggggccctcggctgccccaccctcggagccactgctagaaggggccgctccccagcctttcaccacctctgatgacaccccctgccaggagcagcccaaggaagtccttaaggctcccagcacctcgggccttcagcaggtggcctttcagcctgggcagaaggtttatgtgtggtacgggggtcaagagtgcacaggactggtggagcagcacagctggatggagggtca

SEQ ID NO: 202351 - DNA, 703 bp, Homo sapiens
  Payload ID: 19913
  Gene Name: zinc finger protein 395
  ENST ID: ENST00000520290
  CDS Start-End: 234-703
gcgaggagtcgctcgggcacttattgagcgccgactgtctacgggcggccggggacagtcttgcactgtttcctaggctggagtgcagtggcacaatcacagctcactgcagccttgacttccccaggctcaagccattctcctacctcagcctcccaagcagttgggaccacaggtgatgggcagaggcttcagtgtccccttcgcctccgcaggagaggagaggcagcagcatggcgagtgtcctgtcccgacgccttggaaagcggtccctcctgggagcccgggtgttgggacccagtgcctcggaggggccctcggctgccccaccctcggagccactgctagaaggggccgctccccagcctttcaccacctctgatgacaccccctgccaggagcagcccaaggaagtccttaaggctcccagcacctcgggccttcagcaggtggcctttcagcctgggcagaaggtttatgtgtggtacgggggtcaagagtgcacaggactggtggagcagcacagctggatggagggtcaggtgaccgtctggctgctggagcagaagctgcaggtctgctgcagggtggaggaggtgtggctggcagagctgcagggcccctgtccccaggcaccacccctggagcccggagcccaggccctggcctacaggcccgtctccaggaacatcgatgtcccaaa

SEQ ID NO: 202352 - DNA, 2788 bp, Homo sapiens
  Payload ID: 19914
  Gene Name: zinc finger protein 396
  Uniprot ID: Q96N95
  ENST ID: ENST00000306346
  CDS Start-End: 133-1134
agaaccggaagttgttgcgcagctggcagttccccggtttctccccgacggcgtcgggaggagtgtccatcaggacagcttcacctccttgaggattaaagcctaacagtactgagctatttgtctgtcaaaatgtctgcaaaattgggaaagtcatcatcactcctaacacaaacttcagaggagtgtaatgggattctgacagagaagatggaagaggaagagcagacctgtgatccagactctagcctccactggagcagcagctacagcccagagaccttccgccagcaattcaggcagtttggctaccaggattcacctgggccccatgaggctctgagccggctctgggaactttgtcatctctggctgaggccggaagtgcacaccaaggagcagatcctggagctgctggtgctggagcagttcctggccatcctcccaaaagagcttcaggcctgggtgcagaagcatcatccagagaatggagaggaaactgtgactatgctggaggatgtggagagagagcttgatggaccaaagcagatcttttttggacgaaggaaggacatgattgcagagaagctagcaccttcagaaatcactgaggaattgccaagtagccagctcatgcccgtgaagaagcagctccagggagcatcatgggagcttcagtccttaagaccacatgatgaagacatcaaaactacaaatgtgaaatctgcttcaaggcaaaagacttctttaggcatagaactgcattgcaatgtttccaatatccttcatatgaatggctcccagagttccacatatagaggaacctatgaacaagatggtaggtttgaaaagagacaaggaaacccttcttggaaaaaacaacagaaatgtgatgaatgtggcaaaatctttagtcagagctcagcccttattttacatcagagaatccacagtggaaagaaaccttatgcatgtgacgagtgtgcaaaggcattcagccgaagcgcaattctgattcagcatcgacgaacccatactgattcaaaatatgaacatgcgattgcagaggcccaaaagaatatgtacttcaagactaggctgaagtgccccaggtcactttcaggaggcagataaataaaggccttatcttatgaaagcacacaagagcctccatactattaatatcaagttaatttcccgtgttggaaaaaaataatctcctttgcaatgtaatttggaaataagtcaatggaaacatgaaaatgactgcttgtctacaaggagtcagctaaacataaggaatgttttcataacaatattaatctatgggtgcttctgtaagatggatgatcatcttaatataaagaaaaaagggagatgaacaaaattgtcaaacaagactgatgtaccacaagtgttgtcaagtacagtgtgtgtcggagagatgtaccacagcttaactggaagaggaagcccgtaactgctgatgacaatactttcagtgtccccttttctggcataaatcaactatgaatatgtttcaagcatcacaagacaaccttttcagagtcttctgtattcttagtaagatgagtttctagacacgctgtcatgaaatgagaccctggattttgatgctcttgtacatatggacaaatcactgaagttcaatttaaagggtccactgcagtcccttataaacaattgttgaacctaaccattatagtttataagttttaagacatttatgggatatcttatttggcttatctatgggatatgagtaactatgttttacctgcatttaattcagccagattccctgtttaaaattactgaatcgtacattattaaaattattctgacagtatacaaacaacaaaattatctattttccagagattcttgataaaactctgtaatgttactacaataatacatgtattgtgttttccatggtgctacagttacacaatatggaggcaaacatcagaaatcaaagtccttggaataagggaagagactcatagtaaacttctttgtctggttgggttcctcataaagtataaaacatttcattctcagaaaatccaaccatatcttagagtatctccagaaactggcttagaggagctccaaatatgtggaattaccacactctgcttagttagtatgctgataaatgtaagattagtaggaggagaagtgaatgtaaattttattatagaattttctgatagtgattatgatttgtagctctagtgaatatgaattttatattgagttgtgtgtatcttgagtcactaaaaatgtaggatactttttatttggggctcattgtctttgtaattacggagaggaacaaaccatctattgaaacaacaagtgcctcagagatgtatatattgtgaattactgcttaattacggaaagagtttcttaggttctatgtgaataagatggcagaatctaaatcaagtattttgaaggaagcacccatcttcacttggtgctgccatcaactttgtaagattgcattctatttattgtgaataatttgagtgtttccacaggaaagtggtatgaatcatatcgtctaagtatatgatgaatctttaaagggtgtctctgtgtactttgaattattttgcagttatgtaggtatcctaatgagtgaatggtactagtttatataaaaggagaattcattgagctaaccttggttttaaaaattagcattagcacccccattatattaattttcagggatagtaaatactccaaaatg

SEQ ID NO: 202353 - DNA, 578 bp, Homo sapiens
  Payload ID: 19914
  Gene Name: zinc finger protein 396
  ENST ID: ENST00000587422
  CDS Start-End: 460-578
agttccccggtttctccccgacggcgtcgggagaagtattcttcaaaagcatggtttctgggcctggcgtggtggctcaagcctgtaatcccagcacctcaggaggccaaggcgggtggatcacctgaggtcaggagttcgagactagcctggccaacgtggtgaaaccctgtctctactgaaaatacaaaaattagccaggcgtggtggcgggtacctgtagtcccagctacttaggacgctgaagcatgagaatcacttgaacccaggaggcagaggttgcagtgagccgagatcacaccattgcactccagcctgggcaacagagcaagactccatctcaaaaataaataaataaataaaagcatggtttctgttaagactaaggagtgtccatcaggacagcttcacctccttgaggattaaagcctaacagtactgagctatttgtctgtcaaaatgtctgcaaaattgggaaagtcatcatcactcctaacacaaacttcagaggagtgtaatgggattctgacagagaagatggaagaggaagagcagacctgtgatccagactctagcct

SEQ ID NO: 202354 - DNA, 1884 bp, Homo sapiens
  Payload ID: 19914
  Gene Name: zinc finger protein 396
  Uniprot ID: Q96N95
  ENST ID: ENST00000589332
  CDS Start-End: 133-1140
agaaccggaagttgttgcgcagctggcagttccccggtttctccccgacggcgtcgggaggagtgtccatcaggacagcttcacctccttgaggattaaagcctaacagtactgagctatttgtctgtcaaaatgtctgcaaaattgggaaagtcatcatcactcctaacacaaacttcagaggagtgtaatgggattctgacagagaagatggaagaggaagagcagacctgtgatccagactctagcctccactggagcagcagctacagcccagagaccttccgccagcaattcaggcagtttggctaccaggattcacctgggccccatgaggctctgagccggctctgggaactttgtcatctctggctgaggccggaagtgcacaccaaggagcagatcctggagctgctggtgctggagcagttcctggccatcctcccaaaagagcttcaggcctgggtgcagaagcatcatccagagaatggagaggaaactgtgactatgctggaggatgtggagagagagcttgatggaccaaagcagatcttttttggacgaaggaaggacatgattgcagagaagctagcaccttcagaaatcactgaggaattgccaagtagccagctcatgcccgtgaagaagcagctccagggagcatcatgggagcttcagtccttaagaccacatgatgaagacatcaaaactacaaatgtgaaatctgcttcaaggcaaaagacttctttaggcatagaactgcattgcaatgtttccaatatccttcatatgaatggctcccagagttccacatatagaggaacctatgaacaagatggtaggtttgaaaagagacaaggaaacccttcttggaaaaaacaacagaaatgtgatgaatgtggcaaaatctttagtcagagctcagcccttattttacatcagagaatccacagtggaaagaaaccttatgcatgtgacgagtgtgcaaaggcattcagccgaagcgcaattctgattcagcatcgacgaacccatactggtgagaagccctacaagtgtcatgactgtggcaaagcctttagtcagagctcaaatctttttagacataggaaaagacacattagaaaaaaagtcccataagtatcatgagggaatcaaagcatttactcagagctatttcagcacaagggaagacaccagatgcaaacgctccttagtacaaatcagtggtcttagtaagcaccagtctcctttcaagactcatgaaagccacaggagagaaggttgaagatctcaggtcagcattatttgcttttctgcttatcaatgcagtctcaattctgacgtttgcaattccaaagcttaattcagatttccatccctatgcaggccttgaaaaggcattctcagacatgttctactattttcattattaacacatataatgaattagtatatatctttttagacaagtatgttttttccctcattgagaaggaatgtgtgagttactcagtgtaaaaatagacattctcctccatttcataacttgagcactagaattctaaagaccaaaaattaaagcactcaaaaagaattcctggctgggtgcggttggctcatgcctgtaatcctagcactttgggaggccgaggcaggcagattgcctgaactcaggagttcaagaccagcctggacaacacggcgaaaccccgtctctactaaaattcaaaaaattagccaggcatggcaacgtgtacctgtaatcccagctactagggaggctgaggcaggaaaattgcttgaaccgctcagacagagcaagactccgtctttaaaataaataaataaataaataaataaataaataaaaataaaaataaa

SEQ ID NO: 202355 - DNA, 1320 bp, Homo sapiens
  Payload ID: 19914
  Gene Name: zinc finger protein 396
  Uniprot ID: Q96N95
  ENST ID: ENST00000586687
  CDS Start-End: 133-765
agaaccggaagttgttgcgcagctggcagttccccggtttctccccgacggcgtcgggaggagtgtccatcaggacagcttcacctccttgaggattaaagcctaacagtactgagctatttgtctgtcaaaatgtctgcaaaattgggaaagtcatcatcactcctaacacaaacttcagaggagtgtaatgggattctgacagagaagatggaagaggaagagcagacctgtgatccagactctagcctccactggagcagcagctacagcccagagaccttccgccagcaattcaggcagtttggctaccaggattcacctgggccccatgaggctctgagccggctctgggaactttgtcatctctggctgaggccggaagtgcacaccaaggagcagatcctggagctgctggtgctggagcagttcctggccatcctcccaaaagagcttcaggcctgggtgcagaagcatcatccagagaatggagaggaaactgtgactatgctggaggatgtggagagagagcttgatggaccaaagcagatcttttttggacgaaggaaggacatgattgcagagaagctagcaccttcagaaatcactgaggaattgccaagtagccagctcatgcccgtgaagaagcagctccagggagcatcatgggagcttcagtccttaagaccacatggtgagggggcaggattcagttcatgttggaaggtgtgggggccctctgctcaccacacacatctcagctgatttatgcaagaggcctcaaatctccccctctcatctcctccttactgtgggaacttctgttatttgtcctactaaatgaagatcttcagtattttgttcttgcttctttttcagagattcttataaaatcttcagactttaaatccctgacatctgcatcagggttttcatgcctttttaaagtagcccttttatcttcaggcagcccttgaggcctttctgtgggaccccaaggtacacagcccagagaccactgatcctcatcatcatttcctatataactgctcagttactggtgggatctcgtagcagaatcgcctatattgctgctaaggtgactttgctctcatacgtgctttgaatacacttctctactccctcacatcttcaactggcctcaactgctctttgcattgctttctataagtgctccagaatagctgtgtagcaatctattcttccattgcagatactaaacaaataagtgctatggggaaaaaataaaaacaaaacagaataagggggctagagggaaggtgagaagtagaaataagg

SEQ ID NO: 202356 - DNA, 670 bp, Homo sapiens
  Payload ID: 19914
  Gene Name: zinc finger protein 396
  ENST ID: ENST00000585522
  CDS Start-End: 277-670
agaaccggaagttgttgcgcagctggcagttccccggtttctccccgacggcgtcgggagcacatcattgtgtaaagttgtatcatttatttggtaacaactttatgaactcacaggctttatacagggcctagaacaatacttggtgaagtgagaaaataagtcaaatggcaggatacataacgatggaagacggaggcgcacgagtgtccatcaggacagcttcacctccttgaggattaaagcctaacagtactgagctatttgtctgtcaaaatgtctgcaaaattgggaaagtcatcatcactcctaacacaaacttcagaggagtgtaatgggattctgacagagaagatggaagaggaagagcagacctgtgatccagactctagcctccactggagcagcagctacagcccagagaccttccgccagcaattcaggcagtttggctaccaggattcacctgggccccatgaggctctgagccggctctgggaactttgtcatctctggctgaggccggaagtgcacaccaaggagcagatcctggagctgctggtgctggagcagttcctggccatcctcccaaaagagcttcaggcctgggtgcagaagcatcatccagagaatggagaggaaactgtgactatgctggaggatgtggaga

SEQ ID NO: 202357 - DNA, 1419 bp, Homo sapiens
  Payload ID: 19915
  Gene Name: zinc finger protein 397
  Uniprot ID: Q8NF99
  ENST ID: ENST00000261333
  CDS Start-End: 136-963
gtggcttgcagctcggggtgggtggctcatttcctggccgctcctgggcttcgcggaaagaagagattactcacactccttcgcaagcacagaaccagttgtactgagctttttgctaagctgtttcagccaagaatggctgtggaatctggagtgatttcaaccctgatacctcaggatcctccggaacaagaactaatactagtgaaagtagaagataacttttcctgggatgagaaatttaagcagaatgggagtactcaatcctgccaagaattgtttcgtcagcaattcagaaaattttgctaccaggagacacctgggccccgggaggctctgagccgactccaggaactttgctatcagtggctaatgccagagttgcacacaaaggagcagatcttagaactgctggtactggagcagttcctgagcattctgcctgaggagctgcagatctgggttcagcaacataatccagaaagcggcgaggaagctgtgaccctgttggaggatttagagagggagtttgatgacccagggcagcaggtcccagctagtccacagggaccagcagtgccatggaaggatttaacatgtctcagagcatcccaagagtcaacagacatccacctccagcccttaaagacacagctgaaatcctggaaaccatgcctttcccctaaaagtgattgtgagaacagtgaaacagcaacaaaagagggcatctcagaagaaaaatcacagggactccctcaggaaccttcatttcgaggaattaagttgtccagacctcccaaagcttcttcagctatccgttgggaatgtgtttctccaggaagttttcccggcgatatcatagctgctgaggctacacattcaacaatttcttgctttgccatcaacactttgccagccaccatcctgccatctaaaaatgtgaatagaaagtatttttcctgaagaacacatcgtcaataaatcacctgcacccaaatctccatctcaggcgctacttctggcaaggcatatcatgaggctagtgaagcacctacaagaaacttataactcaaggttgtaaaaatggcatggtgactcttacaatcatatcacagtgggcctctccaacaatttaaacctcatgacctaggtgaaagctgtgaaaggatccacattaattcttcagaggcagggctaagactttcaagactgaaaagagactagcataaggagacttaacaggaacccagtcaaggccattcatggccatgggaccacgcataaatggagaacgagtaaattttgctaagtccaaggacattggagagatagagtcactattactgatatggtgactgagtcaacaacatactgccactatgaagtaataagaaaataaaaagttaaaaaatgtaacag

SEQ ID NO: 202358 - DNA, 5251 bp, Homo sapiens
  Payload ID: 19915
  Gene Name: zinc finger protein 397
  Uniprot ID: Q8NF99
  ENST ID: ENST00000330501
  CDS Start-End: 154-1758
cgcgcacttccggtctttgtggcttgcagctcggggtgggtggctcatttcctggccgctcctgggcttcgcggaaagaagagattactcacactccttcgcaagcacagaaccagttgtactgagctttttgctaagctgtttcagccaagaatggctgtggaatctggagtgatttcaaccctgatacctcaggatcctccggaacaagaactaatactagtgaaagtagaagataacttttcctgggatgagaaatttaagcagaatgggagtactcaatcctgccaagaattgtttcgtcagcaattcagaaaattttgctaccaggagacacctgggccccgggaggctctgagccgactccaggaactttgctatcagtggctaatgccagagttgcacacaaaggagcagatcttagaactgctggtactggagcagttcctgagcattctgcctgaggagctgcagatctgggttcagcaacataatccagaaagcggcgaggaagctgtgaccctgttggaggatttagagagggagtttgatgacccagggcagcaggtcccagctagtccacagggaccagcagtgccatggaaggatttaacatgtctcagagcatcccaagagtcaacagacatccacctccagcccttaaagacacagctgaaatcctggaaaccatgcctttcccctaaaagtgattgtgagaacagtgaaacagcaacaaaagagggcatctcagaagaaaaatcacagggactccctcaggaaccttcatttcgaggaattagtgagcatgaaagcaatttagtgtggaagcaaggaagtgctacaggggagaaactaagatctccttcccaagggggcagttttagtcaagtgatcttcacaaacaaatctctaggaaagagagacctttatgatgaggctgaaagatgcttgattctaactacagactctataatgtgtcagaaagttcctccagaagagagaccttatagatgtgatgtatgtgggcacagcttcaagcagcattcctctctaacacaacatcagagaatccatactggagaaaagccctataaatgtaaccagtgtgggaaggcctttagtttgaggtcctatcttattattcatcagagaattcatagtggtgagaaagcatatgaatgtagtgaatgtgggaaagctttcaatcagagctcagccctcattagacatcggaaaatccatactggtgagaaagcttgtaaatgtaatgagtgtggcaaagcattcagtcaaagttcatatctcattatacatcaaagaattcacactggtgagaaaccttatgagtgtaatgaatgtgggaaaacctttagccagagctcaaaactcattagacatcagcgaattcacacaggagagagaccctatgaatgtaatgaatgtggaaaagctttcaggcagagctcagagctgattactcatcagagaatacatagtggagagaaaccctatgaatgtagtgaatgtggaaaagctttcagtttgagctcaaaccttatcagacatcagagaattcatagtggggaggaaccttatcagtgtaatgaatgtggcaaaactttcaaaaggagctcagcccttgttcagcatcagagaattcattctggggatgaagcttatatatgtaatgaatgtgggaaggctttcaggcacagatcggtccttatgcgccatcaaagagtccacactataaagtaatttgtgaatactgtgaatagtgtaaatacttcagtcagatttttaagtttgttagtcaaaagagtttactttggagcaaaactccataaaggttataaaatactaggtcttgagtctagcttgctttgtgcagcatttcccagtgctaatgtaaagtgtcccttgaaagcttttcctgtgactaatcagaacagaatacagaagaatcattacttccagctcttctcttattaggaatactcaggaaatacgaaaagtgggaatgtaacattgaaacctcattttgtatgaaagtgtcatgaatatagcaacccaggctctgtcactgcatctgattgttagtgtgccaggttatggggctggtgtggactgtgtgaggcacttcgtctcaggaactaaaaaaaaaaaaaaaactgacccaataaagaacagtgacagagcagcaggaaaggtggggaaatggcttcatcaatgatttgttgagcccagggcaggccaggaattagataggcatgagaagaaagaatataatttacccaaaggttattttttgagtacctactttgtcccaggaactaggaatacagtggaaaacaagactgtagtctctacagtctaatgggcaaggcagccagacaggcagtgaaagtggaatgctcctatgtgaccttaaggagcacctgactcagccttggataaggaaatgggggaaatggcctgaaggatgaggaggagttagccaaggtggtactctagggaagtggtaccccagtaaagaacagtagccaaaggccagaaacaaagtgtggagcattccttgagttcctgttgtagtgaggtcttgtctgtcagagaagtctgggtctggccagactcttaagcagtgccaatggagaagttcctgttaatagacaaaacctggagcccttgggccacagggtagtcaagagctttgtcttggtttatgtgaccccagggaaagggcaaatatgtggtttccttgcccaacctgtaggctatcctagaacttccatgagggtggtggtgggaatgagggtgagaaagagcccagcctatacctcaagagtctgctagagtgttaagactctattctcctttgattctaaagacaatatcagagctgctgtcaggtttcttaaaattcccaacgctctggatcagaagctgccatatcatttgtttctggggctatacgcccacaattcctagtacattcccttgggctttggtgctcaaaaaatatttgtcagttgctgggtctgtgacattctttgggcacctcgcacatgttcagttttgtcttatgtcaccagtatttcacaatatcttttgcaatttttttttttttttttttttttttgagatggagttcgctcttgtccaggctggagtgcaatggcacgatcttggctcaccgcaaactctgcctcctgggttcaagcgattctcctgcctcagccttctgagtagctgggattacaggcatgcaccaccacagctggctaattttgtatttttaggaaagacagggtttctccatgttggtcaggctggtctcgaattctcgatctcaggtgatccgcccgcctcggccccccaaagtgctgggattacaggcgtgagccatggcgcccaaccatcttttgcaaattttattaaagacaatgctaaaaggaagtgacaactgaaactaatggtcacagtcagtcaagacttcccttttctgaggggcctagcaggaagagaatatttagactgatgcttagtgtaagaaggaatgttgtacaggttaaccagcaacacaaagacatattcaaaagacctaataggtcagaagaataacataccacaccaaaaacaaatctgtatggaaatctagaatcatgtgcatagaaaaagaattttcatgaggataaaaagaagcaaagagaagtaatgctcttattggggcgtgcatcagtggacatgtgctaaccagtaagaacagcaggaggcctaaatgcccatgtttagggagagaatatggaaaaaatggatgggattatttggaaaagatgtaagagattaaaatacgtggtaagagctactcaactcttgtttttctccttttccatagataaagacctgaacaaactgaaaaggtaggacgtaaagtaggaattgtaaaacggaaatactctttatataagaaagctctactgtatgtcagaaagcaatgtaatagatagaccaagcacagtggctcacacctataatgccagcactttgggaggccaaggctggaggattgcttgagtctaggagttcaagccgagcctgggcagcatagtgagaccccatctctacaaaaaataaacagaatttgccagacgtggtagtgcatgcctgtagacccaagtatttgggaggctgaggtgagaggttcgcttgagccctggaagtcgaggcttcagtgaggcaagatcacaccactgcactccagcctgggagagcaagaccctgtctccaaaccaaaaaaaaaggaaaaaagtaaatgtaatagatacttgctaagggctttgtatatacttattattgttatttctcagcacgtatgtagcagatgaggaaatgaaggctaaaggtcatatatctacaaagtggggaggtcagactttgaacccacaacctgactgtggagccacttcagtatactctctccccataagaaagttccaatagaaaaaaaatgctacttaagtagggaaatcacaaaataagtgccaatgaacaataaatgttcaacctcactacagttaaaatgtatattaaagcaagagttgagatgacacttttccttataaaacagacagggattcagggacattgggactctaatgctgctggtaagacatgaataaatacataccatctctggcaatcaataccagaagctttaagcattgccttttgactttgaaattgtacctggaaatgtatgtttcagtaaccatcatgaatgtacacaaaatcctgaaactcttaaaactgatgtcacaggccaggcacagtggctcatgcctgtaatcccagcactttgggaggctgaggcgggtggatcacctgagatcaggagttcgagaccagcctgaccaatatggtgaaaccccgtctctactaaaaatacaaaacaattagctggtgtggtggcatgtgcctgtagtcccagctacttgggaggctgagacaggagaattgcatgaacccgggaggtggaggttgcagtgagccgagattgtaccactgtattccagcctgggtgacagagtgagactgtgtctcaaaaaaaaaaaaaaaaaaaaaaaaaacactgatgtcaattaatattaaatgaagtattcatgatatattgttaagtaaaaatattacaaaacaatatgtacagtatgatcctatgtaaaatatatatttatgtattaaaaatactgaaaac

SEQ ID NO: 202359 - DNA, 2162 bp, Homo sapiens
  Payload ID: 19915
  Gene Name: zinc finger protein 397
  ENST ID: ENST00000355632
  CDS Start-End: 136-873
gtggcttgcagctcggggtgggtggctcatttcctggccgctcctgggcttcgcggaaagaagagattactcacactccttcgcaagcacagaaccagttgtactgagctttttgctaagctgtttcagccaagaatggctgtggaatctggagtgatttcaaccctgatacctcaggatcctccggaacaagaactaatactagtgaaagtagaagataacttttcctgggatgagaaatttaagcagaatgggagtactcaatcctgccaagaattgtttcgtcagcaattcagaaaattttgctaccaggagacacctgggccccgggaggctctgagccgactccaggaactttgctatcagtggctaatgccagagttgcacacaaaggagcagatcttagaactgctggtactggagcagttcctgagcattctgcctgaggagctgcagatctgggttcagcaacataatccagaaagcggcgaggaagctgtgaccctgttggaggatttagagagggagtttgatgacccagggcagcaggtcccagctagtccacagggaccagcagtgccatggaaggatttaacatgtctcagagcatcccaagagtcaacagacatccacctccagcccttaaagacacagctgaaatcctggaaaccatgcctttcccctaaaagtgagttgtccagacctcccaaagcttcttcagctatccgttgggaatgtgtttctccaggaagttttcccggcgatatcatagctgctgaggctacacattcaacaatttcttgctttgccatcaacactttgccagccaccatcctgccatctaaaaatgtgaatagaaagtatttttcctgaagaacacatcgtcaataaatcacctgcacccaaatctccatctcaggcgctacttctggcaaggcatatcatgaggctagtgaagcacctacaagaaacttataactcaaggttgtaaaaatggcatggtgactcttacaatcatatcacagtgggcctctccaacaatttaaacctcatgacctaggtgaaagctgtgaaaggatccacattaattcttcagaggcagggctaagactttcaagactgaaaagagactagcataaggagacttaacaggaacccagtcaaggccattcatggccatgggaccacgcataaatggagaacgagtaaattttgctaagtccaaggacattggagagatagagtcactattactgatatggtgactgagtcaacaacatactgccactatgaagtaataagaaaataaaaagttaaaaaatgtaacagataacagttggagggtgaatatattttaaatcaatcagattctcattagagtattttattttgtcttgatccccaaacttcagatgaatgtggagaaactgaagcatgtccagagaaaagtggcaagatatccaaacagacagaacacagatgggatcagagggagtgagaggcttagttaaaacaaggtcaggaggctgggcacggtggctcatgcctgtaattccagcactttgggaggccgaggcgggtggataacaaggtcaggagtttgagaacagcctggccaatatggtgaaaccccatctctactaaaaatacaaaaattagccaggcgtggtggcgggtgcctgtagtcccagctactcgggaggctgaggcaggagaatcacttgaacccaggagttggaggttgtagtgagccaagatcacaccactgcactctagcttgggcgacagagccagactccatctcaaaaaaaaaaaaaaaaaaaaaaaaaaaaaaaaggtcaaagtgcagtgtactcactgcattcaagtatagattgtgttttatgaggactctgtaaactaaagaaagtggattatgaataaattaaagttgggagtatttcatatggacataaggaagaattttaatatagtatgtttactagggtttccacaacaaaataccacagaatgggtggtaaacaacagaaatctcttttctcacaattctagagactagaagtccaagatcaatgtgtcagcaggtttggtttcttctctctccttggcttgcagatgatggccaccttcttttcttgttgttgttgagatagtctcactct

SEQ ID NO: 202360 - DNA, 602 bp, Homo sapiens
  Payload ID: 19915
  Gene Name: zinc finger protein 397
  ENST ID: ENST00000588119
  CDS Start-End: 1-602
ggctgtggaatctggagtgatttcaaccctgatacctcaggatcctccggaacaagaactaatactagtgaaagtagaagataacttttcctgggatgagaaatttaagcagaatgggagtactcaatcctgccaagaattgtttcgtcagcaattcagaaaattttgctaccaggagacacctgggccccgggaggctctgagccgactccaggaactttgctatcagtggctaatgccagagttgcacacaaaggagcagatcttagaactgctggtactggagcagttcctgagcattctgcctgaggagctgcagatctgggttcagcaacataatccagaaagcggcgaggaagctgtgaccctgttggaggatttagagagggagtttgatgacccagggcagcaggtgggaacggagaaaagtgatgtgggaaaaggaatttacagcctggagcatgtaatggtcccagctagtccacagggaccagcagtgccatggaaggatttaacatgtctcagagcatcccaagagtcaacagacatccacctccagcccttaaagacacagctgaaatcctggaaaccatgcctttccc

SEQ ID NO: 202361 - DNA, 1516 bp, Homo sapiens
  Payload ID: 19915
  Gene Name: zinc finger protein 397
  Uniprot ID: Q8NF99
  ENST ID: ENST00000591206
  CDS Start-End: 154-777
cgcgcacttccggtctttgtggcttgcagctcggggtgggtggctcatttcctggccgctcctgggcttcgcggaaagaagagattactcacactccttcgcaagcacagaaccagttgtactgagctttttgctaagctgtttcagccaagaatggctgtggaatctggagtgatttcaaccctgatacctcaggatcctccggaacaagaactaatactagtgaaagtagaagataacttttcctgggatgagaaatttaagcagaatgggagtactcaatcctgccaagaattgtttcgtcagcaattcagaaaattttgctaccaggagacacctgggccccgggaggctctgagccgactccaggaactttgctatcagtggctaatgccagagttgcacacaaaggagcagatcttagaactgctggtactggagcagttcctgagcattctgcctgaggagctgcagatctgggttcagcaacataatccagaaagcggcgaggaagctgtgaccctgttggaggatttagagagggagtttgatgacccagggcagcaggtcccagctagtccacagggaccagcagtgccatggaaggatttaacatgtctcagagcatcccaagagtcaacagacatccacctccagcccttaaagacacagctgaaatcctggaaaccatgcctttcccctaaaagtggtgaggaatgggaaatcatctggaaactcttgacacttaggcctctgtttttgagaatgcagaattaattgcacttgacaaacttgccacatgtgagcatcacctttattattctaaaccagaggtgctcgctttagcggctttgtattcacccctcatgaattgctgtcagccctcctgtgtgagtttccctgttattcattcattcatttcattatgttgtaactttataaagcgtcaatacatgtctggtactgtggtaggccccaggagaggtttcaggtctaggtgggtgatggacaaataaaaaggcagttgcaatgtagtaaattatagaatataagtaggcagtgggtactgttggagcacatctaaaggcacctaacccaatcttagaggatcaaggaacacttcctgaaggaagaaaatctaagctaagacttgaactatgagtaagagaaagccaggtaaataggtgggaggaggagtagcccaagtaaaggccataccatcccgaaggtgtgagaatataacccattctgaaaattgcaggtagtttaatttgacttgaatggagaattgacaggtggtaagagaagaaccagagaggaaaataggatccaagtcatgaagacctgtatgtcatgttaatttgtttgtatagtttcttaagtgcagtgggatgcagttgaaggattttggacaaggagtgacatagtttgatttgcagtttagaagttagctgcaaatggagaatcatgtaaggaaggcaagagtatagtcctattaaagactgctgtaatccaa

SEQ ID NO: 202362 - DNA, 2046 bp, Homo sapiens
  Payload ID: 19915
  Gene Name: zinc finger protein 397
  Uniprot ID: Q8NF99
  ENST ID: ENST00000585800
  CDS Start-End: 715-1338
ggcttgcagctcggggtgggtggctcatttcctggccgctcctgggcttcgcggtgagggacgtgggcccctaggaagagggaggtggggttgggagcgcgcgccggacagtggaggagctccgctcctcggcctgcccatccccaggtcgcggccctttggcccgcgcggcgtctccaagcgactggggaactcagaggaggccagcactcaaactcctgctttccaaaggaaaacgcagttccgctgaccccgtgacttcgtaaatgctgcggtttaaccaaggatataaaaatagaagggctagttagttagttagttagtgcggccggactggttaaaccttaaatttgtaggctaaatattttaattcatctcttaacgttaaccgtagtgtgaggaatgaattttactcatctgtcctgacaaactaagggcatacattcctatcgatatctcgccatcctaaaagcaggtcaagtttggtctgtgtcacaacatttaatacctatttgttaccatattttgcttttgaacatttttagtcttgggatattctaagctttttcagaactgatacggatctctttgctgcttttgtgtatgtgatacctatcatgtttttgaacacatggaaagaagagattactcacactccttcgcaagcacagaaccagttgtactgagctttttgctaagctgtttcagccaagaatggctgtggaatctggagtgatttcaaccctgatacctcaggatcctccggaacaagaactaatactagtgaaagtagaagataacttttcctgggatgagaaatttaagcagaatgggagtactcaatcctgccaagaattgtttcgtcagcaattcagaaaattttgctaccaggagacacctgggccccgggaggctctgagccgactccaggaactttgctatcagtggctaatgccagagttgcacacaaaggagcagatcttagaactgctggtactggagcagttcctgagcattctgcctgaggagctgcagatctgggttcagcaacataatccagaaagcggcgaggaagctgtgaccctgttggaggatttagagagggagtttgatgacccagggcagcaggtcccagctagtccacagggaccagcagtgccatggaaggatttaacatgtctcagagcatcccaagagtcaacagacatccacctccagcccttaaagacacagctgaaatcctggaaaccatgcctttcccctaaaagtggtgaggaatgggaaatcatctggaaactcttgacacttaggcctctgtttttgagaatgcagaattaattgcacttgacaaacttgccacatgtgagcatcacctttattattctaaaccagaggtgctcgctttagcggctttgtattcacccctcatgaattgctgtcagccctcctgtgtgagtttccctgttattcattcattcatttcattatgttgtaactttataaagcgtcaatacatgtctggtactgtggtaggccccaggagaggtttcaggtctaggtgggtgatggacaaataaaaaggcagttgcaatgtagtaaattatagaatataagtaggcagtgggtactgttggagcacatctaaaggcacctaacccaatcttagaggatcaaggaacacttcctgaaggaagaaaatctaagctaagacttgaactatgagtaagagaaagccaggtaaataggtgggaggaggagtagcccaagtaaaggccataccatcccgaaggtgtgagaatataacccattctgaaaattgcaggtagtttaatttgacttgaatggagaattgacaggtggtaagagaagaaccagagaggaaaataggatccaagtcatgaagacctgtatgtcatgttaatttgtttgtatagtttcttaagtgcagtgggatgcagttgaaggattttggacaaggagtgacatagtttgatttgcagtttagaagttagctgcaaatggagaatcatgtaaggaaggcaagag

SEQ ID NO: 202363 - DNA, 1104 bp, Homo sapiens
  Payload ID: 19915
  Gene Name: zinc finger protein 397
  ENST ID: ENST00000592264
  CDS Start-End: 82-648
ggaaagaagagattactcacactccttcgcaagcacagaaccagttgtactgagctttttgctaagctgtttcagccaagaatggctgtggaatctggagtgatttcaaccctgatacctcaggatcctccggaacaagaactaatactagtgaaagtagaagataacttttcctgggatgagaaatttaagcagaatgggagtactcaatcctgccaagaattgtttcgtcagcaattcagaaaattttgctaccaggagacacctgggccccgggaggctctgagccgactccaggaactttgctatcagtggctaatgccagagttgcacacaaaggagcagatcttagaactgctggtactggagcagttcctgagcattctgcctgaggagctgcagatctgggttcagcaacataatccagaaagcggcgaggaagctgtgaccctgttggaggatttagagagggagtttgatgacccagggcagcaggtcccagctagtccacagggaccagcagtgccatggaaggatttaacatgtctcagagcatcccaagagtcaacagacatccacctccagcccttaaagacacagctgaaatcctggaaaccatgcctttcccctaaaagtgatttttcctgaagaacacatcgtcaataaatcacctgcacccaaatctccatctcaggcgctacttctggcaaggcatatcatgaggctagtgaagcacctacaagaaacttataactcaaggttgtaaaaatggcatggtgactcttacaatcatatcacagtgggcctctccaacaatttaaacctcatgacctaggtgaaagctgtgaaaggatccacattaattcttcagaggcagggctaagactttcaagactgaaaagagactagcataaggagacttaacaggaacccagtcaaggccattcatggccatgggaccacgcataaatggagaacgagtaaattttgctaagtccaaggacattggagagatagagtcactattactgatatggtgactgagtcaacaacatactgccactatgaagtaataagaaaataaaaagttaaaaaatgtaacag

SEQ ID NO: 202364 - DNA, 532 bp, Homo sapiens
  Payload ID: 19915
  Gene Name: zinc finger protein 397
  ENST ID: ENST00000601719
  CDS Start-End: 117-532
acgcgcacttccggtctttgtggcttgcagctcggggaaagaagagattactcacactccttcgcaagcacagaaccagttgtactgagctttttgctaagctgtttcagccaagaatggctgtggaatctggagtgatttcaaccctgatacctcaggatcctccggaacaagaactaatactagtgaaagtagaagataacttttcctgggatgagaaatttaagcagaatgggagtactcaatcctgccaagaattgtttcgtcagcaattcagaaaattttgctaccaggagacacctgggccccgggaggctctgagccgactccaggaactttgctatcagtggctaatgccagagttgcacacaaaggagcagatcttagaactgctggtactggagcagttcctgagcattctgcctgaggagctgcagatctgggttcagcaacataatccagaaagcggcgaggaagctgtgaccctgttggaggatttagagagggagtttgatgacccagggcagcaggt

SEQ ID NO: 202365 - DNA, 5268 bp, Homo sapiens
  Payload ID: 19916
  Gene Name: zinc finger protein 398
  Uniprot ID: Q8TD17
  ENST ID: ENST00000426851
  CDS Start-End: 852-2267
tcggtcctcagaggaggggcccgggcaccctccgtgcgggccgcagcacgccggtctttgagggacccttggactcccggatctgcatgcgagggatgcggtcgaagacgagatgagggagctgacgggaggggaaacggaggggcaggtgaacatggagagagcaggaacagggagagagtagggacagcgactgggagacgcgctccacagaaacccggactgagaggcagcgagaggacgtagtcttgctctgttgcctaggctggagtagagtggtgtgatcttggctcactgcaacctccgcctcccaggttcaagcgattctcctgcctcagcctcccaagtagttgggattacagacatctgaatgggactccgagtgccttacatccctgcagccccttcctcttcctacacccccagcagcaaatgaggcacacctgcagacagcagctatctctctgtggacagtggtggccgccgtgcaggctatagagaggaaggtggagatccacagccggcgactcctacacctggaaggtcggacagggacagcagagaagaaactagccagctgtgaaaagacagttaccgagcttgggaaccagctggagggcaagtgggccgtgctgggaaccctgctgcaggagtacgggctgctgcagaggcggctggagaacttggagaacctgctgcgcaacaggaacttctggatcctgcggctccctccaggtattaagggagatatcccaaaggtgcctgtggcatttgatgatgtctccatctacttttccactccagagtgggaaaaattagaagaatggcaaaaggaactttacaagaatatcatgaagggcaactacgagtctctcatctccatggattatgctataaatcaacctgatgtcttatctcagattcaaccagaaggggaacataatacagaggaccaggcagggccagaggaaagtgagattcccacagaccccagtgaagagcctggtatttcaacatcagatattctgtcttggattaaacaagaagaagagcctcaggttggggccccaccggagtccaaggagagtgacgtgtacaaaagcacttatgctgatgaagagcttgtcatcaaagctgaaggccttgctagatcctcgttgtgccctgaggttccagtccctttctcttctccaccagcagcagcaaaggatgctttttcagatgtggctttcaaaagccagcagtctacatccatgacaccttttggacgtccagccactgacctgcctgaagcctctgagggacaagtgacttttactcagttgggtagctatcccctcccacctccagttggcgagcaggtgttctcatgccaccactgtggcaagaatctcagccaagacatgttgctgacccaccaatgtagccatgctactgagcaccccttaccctgtgcccagtgccctaagcactttactccacaggcggacctcagcagcacctcccaggaccatgccagcgagacaccccccacctgcccacactgtgccaggacttttactcacccatcaagacttacctaccatcttcgggtccataacagcactgagcgtcctttcccctgtcctgattgccccaagcgctttgctgaccaggctcgactcaccagccaccggagagctcatgcaagcgaaaggcccttccgctgtgcccagtgcggcaggagcttcagcttgaaaatcagcctcctgctccaccagcggggtcatgcacaagagcgccctttctcctgccctcagtgtggcattgacttcaacggccactcggccctgatccgccaccagatgatccacacaggcgagcgtccttacccctgcactgactgcagtaagagcttcatgcgcaaggagcacctgctgaaccaccggcggctgcacacaggcgagcggcccttcagttgtcctcactgtggcaagagcttcatccgcaagcaccacctaatgaaacaccagcgcatccacaccggggagcggccctacccctgctcctactgtggcaggagcttccgctacaaacagacactcaaggaccacctccgttcaggccacaatggaggctgtgggggtgatagtgacccatcaggtcagccacccaacccaccaggtcccctcataactgggcttgaaacttctggcctgggtgtcaacactgaaggtctagagaccaaccagtggtatggggaagggagtggagggggagttttgtaaatccaaatctctgtggcttcatgcttgtatatgctcacagcagggcacaaaatccaagagaaggtctgtgagccccatccaacacccacagtaattattatctggcacatcaatgaatttggggtcctatacacttgactagagacatgcttgtgttttggaatttcacacccttacaagaataccacattttgaaacccagaaagacctggaaaggagcccagcatgtccatcttttcaaagatacaacaaaagcagaagttacaagaatattgcggagaggttggaaagcaggatttaacctctagttctcttgttctcagagaacagcaggttgatagtagattatgtctctaggtagagacagatacatgagaagagcctccaaaactggaagcccatcataaggcatgagaatgtttaactataaagccttttattagttctttgatagctaagatggttgttggagaaagtgcttaagccactgtttatgttgctgcctcctctctcaaaaccagccaagatctgttcacacacctctgtggctgtctttccctgaaacatggtaactcaagactgcctgcctaggtttcttagattaattattcacataaattttgtttaatattggttgaacaagaaatctgactttaaaagattattaaggagaatattccttaactatactggcttgatttgaaacaggctcttattgccatttaaactgccagaaatctttgccaaggtcctggttaaaaaaattggaaacggttttcttagccccagctttaaaagctagagatctcagagaaatagctggcttaacaatgacagaacagcttaaaatttgtgcctacaccatgttctgagagtcgttcacatcaaattcttatcttttccaagccagtaagttggcttctccattcctggtgtctgatattcttgacaatcatcagcaacaaagatcacagcactttccagaagcatggagcttcagaaagtgccagtgaactcttggtcctcagtagtgagatgataacagtgttataatgcagcttccttgagccatcagagagagtgtatgttcaccctatctggctgtatcccattggcagtggacagattgaggaaattcctagatcactgagagctaagcaccatgcatagacaacagtttgttcttgcctgtgttgcttttagggactttgactaccacatgttcttttcttggggtgatttaatcacctgggagcatctgagtctgctcctaagtggctttgcaactgggcctaagttctgtttcctttatggatctcaaattttcatctgcacaatgaggctgttgaaaggaaaaaaagtgagcctctaggaattattcaaaaaaagtctgtgatacattccttttcctgccaaagttctgtctctgtctttggcttctgtccaggcaaagctaaataagacagcaaagtcaaagcagataaattcttgttgaaacttgactaaaatttatttgatttgttgttttactcccacttggaatcctgaggtagaagacagaatgcagaagtcttacatcttgggcaggaaactggtttattcctatactcttgtttcctctgcttcttcctgaggtctagaacaaggtctggaaatgtttagacaggatattttcttgatgaagtgataaggaaaggacccatttttttgctcatcacctagcccatccttcactctctctagttatgcataacaacactagaagaaggtgttagcccagctaactttgcttctgggaaggctatgtctgaacatgttgctctgtaggataatcacacttagaaaacatctgctccatgacattcacaataccagggaccatgggagacacaagaaatgtgtgtctgctgtcataacttacagtgaaaaagcccaataatacagaacaagacatgatgggcaataccctagcatattgggattaagagctttctagccagaatctggacctataccatgggaaaatttaggggtgctgggaatcccaaagccaaggttctggcttcattggcaacccactaggaacttgaatgtgagattcagctctagtttgcaccttgatttccccagtgaaaagggagaagagccaaagtattgtctaggtgctgagttcccttttctgagtggatttcaagcatttgccagggtatgctggaggagggactcctaaagtaggtgagatgtgggactaggtaacactttaaatacttttttactcaaagatttgccaagaacacagcttattagtgaaagagacctgtggattgaaatggctgcagatagatcccgcagtcccttctgaaaggaactgtgtagccagcagggacctaaactttggcaaaaagtgaacacaattcaaatacgaatgaaggaagagccctcagatggaacgaaaggcgatgtgcaaggccatcccagagagacggaagcaggtgcgatactaagcctcagcccaagaataaaagagagttcaactgttactcttttctttcatcaatcccctatcagttagaactgcaggccagttccaaagagtgtttgcttaagattcaaaagtgggtaagtaaaatggatcagtgggaaggataaggtgtccaacagaaagtgtggaggagaaactcttggcctatcaagtgctcctgagagaaaccatgcaatttaacacttcagttaaagaaatacatgagaactgcttgtcatgaccagacaagataggaaaggggaaaccccagaaacgtgctcttcatctgtcagccttttggaccaagaagctgtcactatcacacataagcaccattcccttagagtggatccaggtgttgactataaccagatttactctttgcttactaggttttccattgtcaccattggatgaacctctggtttagccacagttgtgaaaataaatggaagttggttgattgtctagaaagtgcaa

SEQ ID NO: 202366 - DNA, 2121 bp, Homo sapiens
  Payload ID: 19916
  Gene Name: zinc finger protein 398
  Uniprot ID: Q8TD17
  ENST ID: ENST00000483892
  CDS Start-End: 624-2039
ggccgcgggagcgttcgtcaccagcaatctgagcggtggcgcgggcggcatttaagtgtgcggaggcgcattcccgccgcgctgcgtgacgcctgggctcccggcaccggactcgggacacgcgggaggccctcccgaaatagctgccgaatgaatgacatctgaatgggactccgagtgccttacatccctgcagccccttcctcttcctacacccccagcagcaaatgaggcacacctgcagacagcagctatctctctgtggacagtggtggccgccgtgcaggctatagagaggaaggtggagatccacagccggcgactcctacacctggaaggtcggacagggacagcagagaagaaactagccagctgtgaaaagacagttaccgagcttgggaaccagctggagggcaagtgggccgtgctgggaaccctgctgcaggagtacgggctgctgcagaggcggctggagaacttggagaacctgctgcgcaacaggaacttctggatcctgcggctccctccaggtgcctgtggcatttgatgatgtctccatctacttttccactccagagtgggaaaaattagaagaatggcaaaaggaactttacaagaatatcatgaagggcaactacgagtctctcatctccatggattatgctataaatcaacctgatgtcttatctcagattcaaccagaaggggaacataatacagaggaccaggcagggccagaggaaagtgagattcccacagaccccagtgaagagcctggtatttcaacatcagatattctgtcttggattaaacaagaagaagagcctcaggttggggccccaccggagtccaaggagagtgacgtgtacaaaagcacttatgctgatgaagagcttgtcatcaaagctgaaggccttgctagatcctcgttgtgccctgaggttccagtccctttctcttctccaccagcagcagcaaaggatgctttttcagatgtggctttcaaaagccagcagtctacatccatgacaccttttggacgtccagccactgacctgcctgaagcctctgagggacaagtgacttttactcagttgggtagctatcccctcccacctccagttggcgagcaggtgttctcatgccaccactgtggcaagaatctcagccaagacatgttgctgacccaccaatgtagccatgctactgagcaccccttaccctgtgcccagtgccctaagcactttactccacaggcggacctcagcagcacctcccaggaccatgccagcgagacaccccccacctgcccacactgtgccaggacttttactcacccatcaagacttacctaccatcttcgggtccataacagcactgagcgtcctttcccctgtcctgattgccccaagcgctttgctgaccaggctcgactcaccagccaccggagagctcatgcaagcgaaaggcccttccgctgtgcccagtgcggcaggagcttcagcttgaaaatcagcctcctgctccaccagcggggtcatgcacaagagcgccctttctcctgccctcagtgtggcattgacttcaacggccactcggccctgatccgccaccagatgatccacacaggcgagcgtccttacccctgcactgactgcagtaagagcttcatgcgcaaggagcacctgctgaaccaccggcggctgcacacaggcgagcggcccttcagttgtcctcactgtggcaagagcttcatccgcaagcaccacctaatgaaacaccagcgcatccacaccggggagcggccctacccctgctcctactgtggcaggagcttccgctacaaacagacactcaaggaccacctccgttcaggccacaatggaggctgtgggggtgatagtgacccatcaggtcagccacccaacccaccaggtcccctcataactgggcttgaaacttctggcctgggtgtcaacactgaaggtctagagaccaaccagtggtatggggaagggagtggagggggagttttgtaaatccaaatctctgtggcttcatgcttgtatatgctcacagcagggcacaaaatccaagagaaggtctgtgagccccatccaa

SEQ ID NO: 202367 - DNA, 2232 bp, Homo sapiens
  Payload ID: 19916
  Gene Name: zinc finger protein 398
  Uniprot ID: Q8TD17
  ENST ID: ENST00000491174
  CDS Start-End: 680-2095
gcctgcacgcagccccgtagaatgagaaggggacggtcaggccgcggggaaagcactgatcgcatttgccacccaagaggtctttggtcacctctaggagagcaattgtactgggcacgcttactaatctgcttacaggaatggagaaagaatgattggactgattcaaggccggaggttagctgagcagacatctgaatgggactccgagtgccttacatccctgcagccccttcctcttcctacacccccagcagcaaatgaggcacacctgcagacagcagctatctctctgtggacagtggtggccgccgtgcaggctatagagaggaaggtggagatccacagccggcgactcctacacctggaaggtcggacagggacagcagagaagaaactagccagctgtgaaaagacagttaccgagcttgggaaccagctggagggcaagtgggccgtgctgggaaccctgctgcaggagtacgggctgctgcagaggcggctggagaacttggagaacctgctgcgcaacaggaacttctggatcctgcggctccctccaggtattaagggagatatcccaaaggtgcctgtggcatttgatgatgtctccatctacttttccactccagagtgggaaaaattagaagaatggcaaaaggaactttacaagaatatcatgaagggcaactacgagtctctcatctccatggattatgctataaatcaacctgatgtcttatctcagattcaaccagaaggggaacataatacagaggaccaggcagggccagaggaaagtgagattcccacagaccccagtgaagagcctggtatttcaacatcagatattctgtcttggattaaacaagaagaagagcctcaggttggggccccaccggagtccaaggagagtgacgtgtacaaaagcacttatgctgatgaagagcttgtcatcaaagctgaaggccttgctagatcctcgttgtgccctgaggttccagtccctttctcttctccaccagcagcagcaaaggatgctttttcagatgtggctttcaaaagccagcagtctacatccatgacaccttttggacgtccagccactgacctgcctgaagcctctgagggacaagtgacttttactcagttgggtagctatcccctcccacctccagttggcgagcaggtgttctcatgccaccactgtggcaagaatctcagccaagacatgttgctgacccaccaatgtagccatgctactgagcaccccttaccctgtgcccagtgccctaagcactttactccacaggcggacctcagcagcacctcccaggaccatgccagcgagacaccccccacctgcccacactgtgccaggacttttactcacccatcaagacttacctaccatcttcgggtccataacagcactgagcgtcctttcccctgtcctgattgccccaagcgctttgctgaccaggctcgactcaccagccaccggagagctcatgcaagcgaaaggcccttccgctgtgcccagtgcggcaggagcttcagcttgaaaatcagcctcctgctccaccagcggggtcatgcacaagagcgccctttctcctgccctcagtgtggcattgacttcaacggccactcggccctgatccgccaccagatgatccacacaggcgagcgtccttacccctgcactgactgcagtaagagcttcatgcgcaaggagcacctgctgaaccaccggcggctgcacacaggcgagcggcccttcagttgtcctcactgtggcaagagcttcatccgcaagcaccacctaatgaaacaccagcgcatccacaccggggagcggccctacccctgctcctactgtggcaggagcttccgctacaaacagacactcaaggaccacctccgttcaggccacaatggaggctgtgggggtgatagtgacccatcaggtcagccacccaacccaccaggtcccctcataactgggcttgaaacttctggcctgggtgtcaacactgaaggtctagagaccaaccagtggtatggggaagggagtggagggggagttttgtaaatccaaatctctgtggcttcatgcttgtatatgctcacagcagggcacaaaatccaagagaaggtctgtgagccccatccaacacccacagtaattattatctggcacatcaatgaatttggggtcctatacacttg

SEQ ID NO: 202368 - DNA, 2860 bp, Homo sapiens
  Payload ID: 19916
  Gene Name: zinc finger protein 398
  Uniprot ID: Q8TD17
  ENST ID: ENST00000475153
  CDS Start-End: 268-2196
agctgaggggccgctgcgggtggagtgcggcggagtcggcctcgcgaccccagcttgatccgccgcctgctgcaccgcgcctccgccgcgttcctgcgcgtcccgagccccgacggccgcgtgagtcccgtccgtgcggggaaggcagggccgggtcggcgccgcctgtggagaggacccggcggccgggcctgcttggagccgggcgcggtggcagcggcggcagcggcggcgacttccgaggcccgggctagacagcgcagggccatggctgaggcggccccggccccgacatctgaatgggactccgagtgccttacatccctgcagccccttcctcttcctacacccccagcagcaaatgaggcacacctgcagacagcagctatctctctgtggacagtggtggccgccgtgcaggctatagagaggaaggtggagatccacagccggcgactcctacacctggaaggtcggacagggacagcagagaagaaactagccagctgtgaaaagacagttaccgagcttgggaaccagctggagggcaagtgggccgtgctgggaaccctgctgcaggagtacgggctgctgcagaggcggctggagaacttggagaacctgctgcgcaacaggaacttctggatcctgcggctccctccaggtattaagggagatatcccaaaggtgcctgtggcatttgatgatgtctccatctacttttccactccagagtgggaaaaattagaagaatggcaaaaggaactttacaagaatatcatgaagggcaactacgagtctctcatctccatggattatgctataaatcaacctgatgtcttatctcagattcaaccagaaggggaacataatacagaggaccaggcagggccagaggaaagtgagattcccacagaccccagtgaagagcctggtatttcaacatcagatattctgtcttggattaaacaagaagaagagcctcaggttggggccccaccggagtccaaggagagtgacgtgtacaaaagcacttatgctgatgaagagcttgtcatcaaagctgaaggccttgctagatcctcgttgtgccctgaggttccagtccctttctcttctccaccagcagcagcaaaggatgctttttcagatgtggctttcaaaagccagcagtctacatccatgacaccttttggacgtccagccactgacctgcctgaagcctctgagggacaagtgacttttactcagttgggtagctatcccctcccacctccagttggcgagcaggtgttctcatgccaccactgtggcaagaatctcagccaagacatgttgctgacccaccaatgtagccatgctactgagcaccccttaccctgtgcccagtgccctaagcactttactccacaggcggacctcagcagcacctcccaggaccatgccagcgagacaccccccacctgcccacactgtgccaggacttttactcacccatcaagacttacctaccatcttcgggtccataacagcactgagcgtcctttcccctgtcctgattgccccaagcgctttgctgaccaggctcgactcaccagccaccggagagctcatgcaagcgaaaggcccttccgctgtgcccagtgcggcaggagcttcagcttgaaaatcagcctcctgctccaccagcggggtcatgcacaagagcgccctttctcctgccctcagtgtggcattgacttcaacggccactcggccctgatccgccaccagatgatccacacaggcgagcgtccttacccctgcactgactgcagtaagagcttcatgcgcaaggagcacctgctgaaccaccggcggctgcacacaggcgagcggcccttcagttgtcctcactgtggcaagagcttcatccgcaagcaccacctaatgaaacaccagcgcatccacaccggggagcggccctacccctgctcctactgtggcaggagcttccgctacaaacagacactcaaggaccacctccgttcaggccacaatggaggctgtgggggtgatagtgacccatcaggtcagccacccaacccaccaggtcccctcataactgggcttgaaacttctggcctgggtgtcaacactgaaggtctagagaccaaccagtggtatggggaagggagtggagggggagttttgtaaatccaaatctctgtggcttcatgcttgtatatgctcacagcagggcacaaaatccaagagaaggtctgtgagccccatccaacacccacagtaattattatctggcacatcaatgaatttggggtcctatacacttgactagagacatgcttgtgttttggaatttcacacccttacaagaataccacattttgaaacccagaaagacctggaaaggagcccagcatgtccatcttttcaaagatacaacaaaagcagaagttacaagaatattgcggagaggttggaaagcaggatttaacctctagttctcttgttctcagagaacagcaggttgatagtagattatgtctctaggtagagacagatacatgagaagagcctccaaaactggaagcccatcataaggcatgagaatgtttaactataaagccttttattagttctttgatagctaagatggttgttggagaaagtgcttaagccactgtttatgttgctgcctcctctctcaaaaccagccaagatctgttcacacacctctgtggctgtctttccctgaaacatggtaactcaagactgcctgcctaggtttcttagattaattattcacataaattttgtttaatattggttgaacaagaaatctgactttaaaagatta

SEQ ID NO: 202369 - DNA, 1844 bp, Homo sapiens
  Payload ID: 19917
  Gene Name: zinc finger protein 404
  ENST ID: ENST00000324394
  CDS Start-End: 1-1656
tttcaggtgccattgacattcagcgatgttgccatagacttctctcaggaggagtgggaatatttaaactcggatcagagggatttgtacagagatgtgatgttggagaattatactaacttggtctcattggactttaatttcacaactgaaagcaacaagttatcttcagaaaaaagaaattatgaagtaaatgcgtaccatcaggagacatggaaaagaaataaaaccttcaaccttatgaggtttattttcagaactgacccacagtacacaattgaatttgggagacaacagagacctaaagtgggatgttttagtcaaatgatattcaaaaaacataaatcccttcctctacataagagaaataacacaagagagaaatcatatgagtgtaaggaatataagaagggctttagaaaatatttgcaccttactgaacatctgagagaccatactggtgtgataccctatgaatgtaatgaatgtggaaaagcatttgtagttttccagcattttattagacatcgaaaaatccacactgatttgaaaccctatgaatgcaatggatgtgagaaggcctttaggttttattcacagcttattcagcatcagataattcatactggtatgaaaccctatgaatgtaagcaatgcgggaaggcttttagacgtcattctcaccttacagaacatcagaaaattcatgttggcttgaaaccctttgaatgtaaggaatgtggggaaacgtttagattatatcgacatatgtgtctgcatcagaaaattcatcatggtgtgaaaccctacaaatgtaaagaatgtggaaaggcttttggtcatcgttcaagtctttaccaacataagaaaattcattctggtgagaaaccatataaatgtgaacaatgtgaaaaggcctttgttcgcagctatctacttgttgaacatcaaagaagtcatactggtgagaaacctcatgaatgcatggaatgtggaaaggcttttggtaagggctcaagccttcttaaacataagagaattcatagtagtgagaaactctatgattgtaaggattgtggaaaggccttttgtagaggctctcaacttacacagcatcagagaattcatactggtgagaagccacatgaatgtaaagaatgtgggaagacttttaagcttcattcatatcttattcaacatcagataattcatactgatttgaagccatatgaatgtaagcaatgtgggaaagccttcagtcgtgttggagaccttaagacacatcaatcaattcatgctggggagaaaccctatgaatgtaaggaatgtggaaaaacctttagacttaattctcaactaatttatcatcagacaattcatactggtttgaaaccctatgtatgtaaagaatgtaagaaggcctttcgttctatctcaggtctttctcaacataagagaattcatactggtgaaaaaccctatgaatgtaaagaatgtgataaggcctttaatcgcagtgatcgacttactcaacatgagacaattcatactggtgtgaaaccacagaaatgcaaagaatgtggtaaggcctttagtcattgctatcaacttagtcaacatcaaagatttcaccatggtgagagactcttaatgtaatgagagggaaagcctttagccatggcacatttttactgttgtcactattatgatgctatagtgaagattaaactagttaatatagaatataaatacttggaaaggcatctggcacatcgtatttgcttactaaatacattatttttatgataattgttagaattactaaaaataaatcttatagaagg

SEQ ID NO: 202370 - DNA, 1851 bp, Homo sapiens
  Payload ID: 19917
  Gene Name: zinc finger protein 404
  Uniprot ID: Q494X3
  ENST ID: ENST00000587539
  CDS Start-End: 1-1659
atggcccgggtgccattgacattcagcgatgttgccatagacttctctcaggaggagtgggaatatttaaactcggatcagagggatttgtacagagatgtgatgttggagaattatactaacttggtctcattggactttaatttcacaactgaaagcaacaagttatcttcagaaaaaagaaattatgaagtaaatgcgtaccatcaggagacatggaaaagaaataaaaccttcaaccttatgaggtttattttcagaactgacccacagtacacaattgaatttgggagacaacagagacctaaagtgggatgttttagtcaaatgatattcaaaaaacataaatcccttcctctacataagagaaataacacaagagagaaatcatatgagtgtaaggaatataagaagggctttagaaaatatttgcaccttactgaacatctgagagaccatactggtgtgataccctatgaatgtaatgaatgtggaaaagcatttgtagttttccagcattttattagacatcgaaaaatccacactgatttgaaaccctatgaatgcaatggatgtgagaaggcctttaggttttattcacagcttattcagcatcagataattcatactggtatgaaaccctatgaatgtaagcaatgcgggaaggcttttagacgtcattctcaccttacagaacatcagaaaattcatgttggcttgaaaccctttgaatgtaaggaatgtggggaaacgtttagattatatcgacatatgtgtctgcatcagaaaattcatcatggtgtgaaaccctacaaatgtaaagaatgtggaaaggcttttggtcatcgttcaagtctttaccaacataagaaaattcattctggtgagaaaccatataaatgtgaacaatgtgaaaaggcctttgttcgcagctatctacttgttgaacatcaaagaagtcatactggtgagaaacctcatgaatgcatggaatgtggaaaggcttttggtaagggctcaagccttcttaaacataagagaattcatagtagtgagaaactctatgattgtaaggattgtggaaaggccttttgtagaggctctcaacttacacagcatcagagaattcatactggtgagaagccacatgaatgtaaagaatgtgggaagacttttaagcttcattcatatcttattcaacatcagataattcatactgatttgaagccatatgaatgtaagcaatgtgggaaagccttcagtcgtgttggagaccttaagacacatcaatcaattcatgctggggagaaaccctatgaatgtaaggaatgtggaaaaacctttagacttaattctcaactaatttatcatcagacaattcatactggtttgaaaccctatgtatgtaaagaatgtaagaaggcctttcgttctatctcaggtctttctcaacataagagaattcatactggtgaaaaaccctatgaatgtaaagaatgtgataaggcctttaatcgcagtgatcgacttactcaacatgagacaattcatactggtgtgaaaccacagaaatgcaaagaatgtggtaaggcctttagtcattgctatcaacttagtcaacatcaaagatttcaccatggtgagagactcttaatgtaatgagagggaaagcctttagccatggcacatttttactgttgtcactattatgatgctatagtgaagattaaactagttaatatagaatataaatacttggaaaggcatctggcacatcgtatttgcttactaaatacattatttttatgataattgttagaattactaaaaataaatcttatagaaggaaga

SEQ ID NO: 202371 - DNA, 7948 bp, Homo sapiens
  Payload ID: 19918
  Gene Name: zinc finger protein 407
  Uniprot ID: Q9C0G0
  ENST ID: ENST00000299687
  CDS Start-End: 1-6747
atgatggatagtgagaataaacccgaaaatgatgaggatgaaaagataaacaaagaagcacaagacttgacaaagctttcatcccataatgaagacggtgggcctgtatctgatgtgatagcaagtttccctgagaattctatgggcaaaagaggtttttcagaatcatcgaactctgatagtgttgttataggagaagacagaaataaacatgcttccaaacgcaggaaattagatgaggcagagccccttaaatctggaaagcaaggtatttgtagattagaaacttctgagagctcagtcacagaagggggtattgcattagatgaaacagggaaggagacctttctgagtgactgcacagttggaggcacatgtctcccaaatgccctctccccttcttgcaattttagcactattgatgttgtttctctgaaaacagacactgaaaaaacatctgctcaggaaatggtttcccttgatctggaaagagaatctcctttccccccgaaagaaattagtgttagttgtaccattgggaatgtagatacagttctcaaatgcagcatctgtgggcatttgttttcttcttgctctgacttggaaaaacatgctgagtctcacatgcagcagcctaaggaacatacctgttgtcactgcagccacaaagcagagagcagctcagcactacatatgcatatcaaacaagcacatgggccacagaaggtcttttcctgtgatctttgtggttttcagtgttcagaagaaaacttgttgaatgcacattatcttggcaaaacacatctccgtcgtcagaatctggctgctcgtggaggatttgtacagatcttaacaaaacaaccttttcctaaaaaatcacgtacaatggcaacaaaaaatgttcactcaaaaccaagaacttctaaatcaatagcaaagaatagtgattcaaaaggattacgaaatgtgggaagcacgtttaaagatttcagaggaagtatttctaaacaaagtggtagtagcagtgagcttcttgttgaaatgatgccttccagaaatactttgtcacaggaagtagagattgttgaagaacatgttacttcccttggtctagctcagaatcctgaaaaccagagtagaaagctagacaccttagtaacctcagagggtctcttagagaaattggaatctacaaaaaatacccttcaggcagcacacggtaacagtgtaacctcgaggccaagacctgagcgaaatattctcgtgttgggtaatagctttcgtcgacgaagcagcactttcaccttgaagggccaggcaaagaaaaggtttaatcttttaggaattaaaagaggtacaagtgaaactcagaggatgtatatgaaacacttgagaacacagatgaaaacacacgatgcagaatcagtgctgaaacacctggaagcgtgcagcagtgtgcagagagtgtgtgtgactacctcagaaacccaggaggcagagcagggccaggggagtgcccgtcctccggactccgggctgcattccctgacagtgaagccagcttctggctctcagacgttgtgtgcttgtacagactgtgggcaagtagctacaaataggacagatttggaaatccatgtgaaaaggtgccatgccagagagatgaaattttactgccgtacttgtgacttctctagtatgtcaagaagggacttagatgaacatttgcacagtaaccagcatcagcaaactgcttctgtcctgagttgtcagtgttgttcatttatatccttggatgaaataaatcttagagaccacatgaaggaaaagcacaatatgcattttctttgcaccccttgtaatctgttctttttgtctgaaaaagatgtggaagaacacaaagccaccgagaagcatattaattcattggttcaaccaaagactttgcaatcatctaacagtgatttggttttacagactttacctttgagtactttagaatcagaaaacgcaaaagagtctatggatgactcaggaaaagcatctcaggaagaacctctgaagtccagggtaagccatggtaatgaagtgaggcattccagtaagcctcagtttcagtgtaagaagtgtttttataaaacaagatcttctactgttctcacgagacatataaagcttcggcatggtcaagactatcattttctttgtaaagcttgtaatctttattcattgagcaaagaaggaatggagaaacacattaaaagaagcaagcatcttgaaaatgctaagaaaaataatattggcttaagctttgaagaatgtattgaaagggtatgtataggtgcaaatgataaaaaagaagagtttgatgtttccggaaatggaaggattgaaggccatataggtgtgcaattacaagagcattcctatcttgagaagggcatgctggcgtctgaggaactgtcacagtctggtggtagcaccaaagatgatgaattagcttcaaccactactccaaagagagggagacctaaaggtaacatctcacggacgtgttcacactgtggccttttggcctctagtattacaaacttgactgttcacattagacgaaaacacagtcaccagtatagttatttatgcaaagtgtgtaagtattacactgtaactaagggagatatggaacgtcattgtgccaccaagaaacataaaggacgggtagaaatagaagcaagtggaaaacacagttcagatatcattgttggccctgaagggggtagccttgaagctggtaaaaagaatgctggctcagcagtgaccatgtcagatgaacatgctaacaaaccagctgagtcacccacctccgttttagagaagccagatcgtggaaactcaattgaagctgaagttgaaaatgtatttcattctctagatggagaagttaacagccatcttcttgataaaaaggagcaaatatcttcagagccagaggacttcgcccagccgggggatgtgtactcccagagagatgttacaggcacaggtgagaataagtgtttgcactgtgagtttagtgctcactcctctgcttctctagagctgcatgtaaaacggaaacatacaaaagagtttgagttttattgcatggcatgcgattactacgcggtgactcgtcgcgagatgaccaggcatgcagcaacagagaagcacaaaatgaaaaggcagtcttatctcaactctgctaatgtagaagctggttctgcagacatgtccaaaaacatcattatgcctgaagaagagcatcaacaaaattctgaggaatttcaaataatttcaggtcaaccatctgatactcttaaatctagaaatgctgcagattgctctattttaaatgagaatactaatttagatatgtctaaagtgctctgcgctgctgactctgtagaagttgagactgaagaagaatctaatttcaatgaagaccattccttttgtgagactttccaacaggctcctgtcaaggataaagttaggaaacctgaggagatgatgtcacttactatgtcctcaaactatggctccccaagcagatttcaaaatgaaaattcaggaagctctgccttaaattgtgagacagcaaagaaaaaccatgagatatcgaatgatgcaggtgagctgcgtgtccattgtgagggtgaaggaggaaacgcaggagacggtggaggtgttgtcccccacagacacctgtgccctgtgacgctcgatggggagcgctcggctgaaagccctgtgctcgttgtgacaagaataaccagagaacagggaaatctggagagcgggggtcagaacagagttgcacgtgggcatggtttggaagacttgaaaggtgtccaagaagatcccgttctggggaataaggaaattctgatgaattcacaacatgaaacagaatttattttggaggaggatggcccagcttctgatagcacagttgaaagtagtgatgtctatgaaactataattagtattgatgataaagggcaggccatgtacagttttggtcgatttgactcctccataataagaataaagaaccctgaagatggtgagttgatagaccagtctgaagagggcttgatagcaacgggagtgagaattagtgagctgcccttgaaagactgtgctcaaggtgtgaaaaagaagaaatctgagggcagttccattggtgagtctacacgaattcgctgtgatgattgtggcttcttagcagatggactgagtggactgaatgttcacatagccatgaagcatcctacaaaagagaagcacttccattgtttactctgtggaaagtcgttctataccgaaagcaaccttcaccagcatctggctagtgccggccacatgagaaatgagcaggccagtgtggaggagcttccggagggaggggccacctttaaatgtgtcaagtgcacagagccctttgattctgaacagaatttatttttacatattaaaggacagcatgaggaattgctgcgggaggtgaataagtatatagtggaagacactgagcaaatcaaccgcgagagggaggaaaaccagggaaacgtctgcaagtattgtgggaagatgtgtcgaagcagcaactcgatggccttcctggcacacattcgcactcacacaggatcaaaaccattcaagtgcaagatatgccattttgcaacagctcagcttggagatgccagaaaccatgtgaaaaggcaccttgggatgagggaatacaagtgtcatgtctgtggggttgcttttgtaatgaagaagcacttaaatactcatctactaggcaagcatggagttggcaccccaaaagaaaggaaatttacatgccacttatgtgatagaagtttcacagagaagtgggccctgaacaaccacatgaaactccacacgggagaaaagccgtttaaatgtacctggcccacgtgccattactcattcctcacagcctccgcaatgaaagaccactacaggacgcacacaggcgagaagtcgtttctgtgtgacctctgcggctttgccggcgggacccgccacgccctcaccaagcatcgcagacagcacacaggagaaaaacctttcaagtgcgatgagtgtaactttgcctccacaactcagtcccatttgactcggcataaacgtgtccacactggagaaaagccctacagatgcccctggtgtgactacaggtcaaactgtgctgaaaatatccgcaaacacattctgcatactggcaaacatgaaggagtcaagatgtacaactgtcccaagtgtgactacgggaccaacgtcccggtggagttccggaaccatttgaaggaacagcatcctgacatcgaaaacccggacctcgcttacctgcatgctggcattgtttccaagtcgtacgagtgccgtctaaagggacaaggagccaccttcgtggagacagacagccccttcaccgcggcggccttggcagaagagcccctcgtcaaggagaagcccctcagaagcagcaggaggccagcgccgccccctgagcaggtgcagcaggtcatcatcttccagggctacgacggggagtttgccctggacccctcggtggaggagacggccgccgccacgctgcagacgctggccatggccggccaggtggcccgggtggtgcatatcacggaggatggccaggtcatcgccacgagtcagagcggggcacatgtaggcagcgtggtgcccggacccatcctccccgagcagctggctgatggagccacccaggtggtcgtcgtggggggctccatggaaggccacggcatggatgagtccctcagtccaggtggcgctgtgatacaacaggtgaccaagcaggagattttaaacctctcggaggctggagtcgctccccccgaggcatcctcagccctggatgcattgctctgtgcggtcactgaattaggggaggtggagggcagggctgggctcgaggagcaaggcaggcccggcgccaaagacgtgctgatccagctgcccgggcaggaggtctcccatgtggctgccgaccccgaggcccccgagatccagatgttcccacaggcccaggagagcccggccgccgtggaggtgctcacccaggtggtccatccctcagcagccatggcctctcaggagcgggcacaggtggccttcaagaagatggtccagggcgtcctccagtttgctgtgtgtgacacggccgcggccggccagttggtcaaggacggtgtcacccaggtggtggtgagcgaagagggtgccgtccacatggtcgccggggagggtgcccagatcatcatgcaggaggcgcagggcgagcacatggatctggtggagtccgacggggagatctcgcagatcatcgtgacggaggagctggtccaggccatggtgcaggagtccagtggcggcttctccgagggcaccacgcactacatcctgacagagctgcccccaggggtgcaggacgagccgggcctgtactcccacaccgtgctggagactgcggactcgcaggaactcctgcaggccggggccacgctaggcacagaggccggggccccaagcagggcagagcagctggccagcgtggtcatctacacccaggagggctcctcggccgcggcggcaattcagagccaaagagaaagcagcgaactccaggaagcatgagacgcgcggcacctttactcagcacagggcaggtgtgggaaggtccagcttcggtgggggaccgtgttccctgagcttcatctgaaaccttcaaaaccatgaggacaaggctcccgtgagctctgagcatgccctcccagcgagagtcacactggccaccagccaggcgcccacagagggtaccgtgggctgggcctcggggagcaggctgccaagtgcaggggagggccgggcgcaggccgcacagggagctccggtccactgggggcccttcgatcagtggcctcccgcttcgtcctggccgctgtgctgaagagaagccaagtgttgttggtgtttttctctcccaagtgttttcccatttcagttatcagaaggtcatggccgtggggaaagtggtgaagatacccctcctggcttggggtgcacctgcttgtgcagtcagcatgtagctgcctttccatttcattctctactgggctaaaaattgcagctacaagtgttaccatcttgaagcagtccacttccattcaattttttttttttaattttagaataacagtgtccccataccaaaggaagcctgctagctcatttcatgtataaatttcccatcttcaaacagtttaggtgtatttgttgctctggtcacattctgcataaaagaaatcctcttaagcctatggttaagaaaagccttgaagtttatattcagttaaaatatatgtcggtggagatagccagtgcttctaattttgacttagtttcatacagtaaagcctaaatgtgaaacgcacacgctggaagatattgttcctatcaatattttgctttttataacaagggtttgttcatattgatgccatttttgcaggatttcttcgtgatttctgtccatatgaaaatgctgacattaaacattaacacatggagaccgtgccctgtggccctgccgtggctgccagcatggtctgtgtttccttgtggattcacctgtggccctgctgtggccaccagcatggtctgtgtcctcgtggattcactgcagctgtcggatgcgagtttctgtcataatcatttgtttcctgatacaattgttcttattcttttccaaaactgtaaaataatctcctccctcaaatgcaaaggttgtttttgttctgtttctgttttctttgaaataaaattataacgttaaaag

SEQ ID NO: 202372 - DNA, 5595 bp, Homo sapiens
  Payload ID: 19918
  Gene Name: zinc finger protein 407
  Uniprot ID: Q9C0G0
  ENST ID: ENST00000309902
  CDS Start-End: 58-5040
acaggttatgagtgccagtgagccgccttagatagaagcatcgtcagcactttattaatgatggatagtgagaataaacccgaaaatgatgaggatgaaaagataaacaaagaagcacaagacttgacaaagctttcatcccataatgaagacggtgggcctgtatctgatgtgatagcaagtttccctgagaattctatgggcaaaagaggtttttcagaatcatcgaactctgatagtgttgttataggagaagacagaaataaacatgcttccaaacgcaggaaattagatgaggcagagccccttaaatctggaaagcaaggtatttgtagattagaaacttctgagagctcagtcacagaagggggtattgcattagatgaaacagggaaggagacctttctgagtgactgcacagttggaggcacatgtctcccaaatgccctctccccttcttgcaattttagcactattgatgttgtttctctgaaaacagacactgaaaaaacatctgctcaggaaatggtttcccttgatctggaaagagaatctcctttccccccgaaagaaattagtgttagttgtaccattgggaatgtagatacagttctcaaatgcagcatctgtgggcatttgttttcttcttgctctgacttggaaaaacatgctgagtctcacatgcagcagcctaaggaacatacctgttgtcactgcagccacaaagcagagagcagctcagcactacatatgcatatcaaacaagcacatgggccacagaaggtcttttcctgtgatctttgtggttttcagtgttcagaagaaaacttgttgaatgcacattatcttggcaaaacacatctccgtcgtcagaatctggctgctcgtggaggatttgtacagatcttaacaaaacaaccttttcctaaaaaatcacgtacaatggcaacaaaaaatgttcactcaaaaccaagaacttctaaatcaatagcaaagaatagtgattcaaaaggattacgaaatgtgggaagcacgtttaaagatttcagaggaagtatttctaaacaaagtggtagtagcagtgagcttcttgttgaaatgatgccttccagaaatactttgtcacaggaagtagagattgttgaagaacatgttacttcccttggtctagctcagaatcctgaaaaccagagtagaaagctagacaccttagtaacctcagagggtctcttagagaaattggaatctacaaaaaatacccttcaggcagcacacggtaacagtgtaacctcgaggccaagacctgagcgaaatattctcgtgttgggtaatagctttcgtcgacgaagcagcactttcaccttgaagggccaggcaaagaaaaggtttaatcttttaggaattaaaagaggtacaagtgaaactcagaggatgtatatgaaacacttgagaacacagatgaaaacacacgatgcagaatcagtgctgaaacacctggaagcgtgcagcagtgtgcagagagtgtgtgtgactacctcagaaacccaggaggcagagcagggccaggggagtgcccgtcctccggactccgggctgcattccctgacagtgaagccagcttctggctctcagacgttgtgtgcttgtacagactgtgggcaagtagctacaaataggacagatttggaaatccatgtgaaaaggtgccatgccagagagatgaaattttactgccgtacttgtgacttctctagtatgtcaagaagggacttagatgaacatttgcacagtaaccagcatcagcaaactgcttctgtcctgagttgtcagtgttgttcatttatatccttggatgaaataaatcttagagaccacatgaaggaaaagcacaatatgcattttctttgcaccccttgtaatctgttctttttgtctgaaaaagatgtggaagaacacaaagccaccgagaagcatattaattcattggttcaaccaaagactttgcaatcatctaacagtgatttggttttacagactttacctttgagtactttagaatcagaaaacgcaaaagagtctatggatgactcaggaaaagcatctcaggaagaacctctgaagtccagggtaagccatggtaatgaagtgaggcattccagtaagcctcagtttcagtgtaagaagtgtttttataaaacaagatcttctactgttctcacgagacatataaagcttcggcatggtcaagactatcattttctttgtaaagcttgtaatctttattcattgagcaaagaaggaatggagaaacacattaaaagaagcaagcatcttgaaaatgctaagaaaaataatattggcttaagctttgaagaatgtattgaaagggtatgtataggtgcaaatgataaaaaagaagagtttgatgtttccggaaatggaaggattgaaggccatataggtgtgcaattacaagagcattcctatcttgagaagggcatgctggcgtctgaggaactgtcacagtctggtggtagcaccaaagatgatgaattagcttcaaccactactccaaagagagggagacctaaaggtaacatctcacggacgtgttcacactgtggccttttggcctctagtattacaaacttgactgttcacattagacgaaaacacagtcaccagtatagttatttatgcaaagtgtgtaagtattacactgtaactaagggagatatggaacgtcattgtgccaccaagaaacataaaggacgggtagaaatagaagcaagtggaaaacacagttcagatatcattgttggccctgaagggggtagccttgaagctggtaaaaagaatgctggctcagcagtgaccatgtcagatgaacatgctaacaaaccagctgagtcacccacctccgttttagagaagccagatcgtggaaactcaattgaagctgaagttgaaaatgtatttcattctctagatggagaagttaacagccatcttcttgataaaaaggagcaaatatcttcagagccagaggacttcgcccagccgggggatgtgtactcccagagagatgttacaggcacaggtgagaataagtgtttgcactgtgagtttagtgctcactcctctgcttctctagagctgcatgtaaaacggaaacatacaaaagagtttgagttttattgcatggcatgcgattactacgcggtgactcgtcgcgagatgaccaggcatgcagcaacagagaagcacaaaatgaaaaggcagtcttatctcaactctgctaatgtagaagctggttctgcagacatgtccaaaaacatcattatgcctgaagaagagcatcaacaaaattctgaggaatttcaaataatttcaggtcaaccatctgatactcttaaatctagaaatgctgcagattgctctattttaaatgagaatactaatttagatatgtctaaagtgctctgcgctgctgactctgtagaagttgagactgaagaagaatctaatttcaatgaagaccattccttttgtgagactttccaacaggctcctgtcaaggataaagttaggaaacctgaggagatgatgtcacttactatgtcctcaaactatggctccccaagcagatttcaaaatgaaaattcaggaagctctgccttaaattgtgagacagcaaagaaaaaccatgagatatcgaatgatgcaggtgagctgcgtgtccattgtgagggtgaaggaggaaacgcaggagacggtggaggtgttgtcccccacagacacctgtgccctgtgacgctcgatggggagcgctcggctgaaagccctgtgctcgttgtgacaagaataaccagagaacagggaaatctggagagcgggggtcagaacagagttgcacgtgggcatggtttggaagacttgaaaggtgtccaagaagatcccgttctggggaataaggaaattctgatgaattcacaacatgaaacagaatttattttggaggaggatggcccagcttctgatagcacagttgaaagtagtgatgtctatgaaactataattagtattgatgataaagggcaggccatgtacagttttggtcgatttgactcctccataataagaataaagaaccctgaagatggtgagttgatagaccagtctgaagagggcttgatagcaacgggagtgagaattagtgagctgcccttgaaagactgtgctcaaggtgtgaaaaagaagaaatctgagggcagttccattggtgagtctacacgaattcgctgtgatgattgtggcttcttagcagatggactgagtggactgaatgttcacatagccatgaagcatcctacaaaagagaagcacttccattgtttactctgtggaaagtcgttctataccgaaagcaaccttcaccagcatctggctagtgccggccacatgagaaatgagcaggccagtgtggaggagcttccggagggaggggccacctttaaatgtgtcaagtgcacagagccctttgattctgaacagaatttatttttacatattaaaggacagcatgaggaattgctgcgggaggtgaataagtatatagtggaagacactgagcaaatcaaccgcgagagggaggaaaaccagggaaacgtctgcaagtattgtgggaagatgtgtcgaagcagcaactcgatggccttcctggcacacattcgcactcacacaggatcaaaaccattcaagtgcaagatatgccattttgcaacagctcagcttggagatgccagaaaccatgtgaaaaggcaccttgggatgagggaatacaagtgtcatgtctgtggggttgcttttgtaatgaagaagcacttaaatactcatctactaggcaagcatggagttggcaccccaaaagaaagagtaaaggttgcatatcgaaagatcgggacgttgccaggaatacagaacaacaggaacgcgtcgagtgcctctgaagcccaaagtctttgtgagcacttttcataactgatgggacctgcagtgggaggattggctgaggacttattttggttgaagttagacatatttcattgtctttttttttttccttttatctgtgtacttctttgcatacttgaattcatttgtgtgatgtaaatcatcacacaaatgtaggctagtctagtgattttctggaaggaactgttattttaaaaattgagtactcagttttataaaattgtcatcatcaatgagttaaaaaaaaaaaaacccttaatgattcagggtttatttaaagctgactgtccaatcaaagtttttgtaagcatgccatgtgacaaatgcctggcatattcagtaaggaacatattaattattctaattaacacatgacttcagagaagtctttcgttaatcagcacatggatcttggttatttgtacccttttgggaaaatttcacactcagatgcaaaaataccaggctaaatacattgctttgtttgtatgtggagaggatattcatcacaatggtactatacatctaagaaaacagaaagtaattaaaatgctgattact

SEQ ID NO: 202373 - DNA, 5662 bp, Homo sapiens
  Payload ID: 19918
  Gene Name: zinc finger protein 407
  Uniprot ID: Q9C0G0
  ENST ID: ENST00000582337
  CDS Start-End: 122-5104
aaagggaagacggtgagccggaggagtcagtcagaggggcgagcaggagcgattccgtcgccaaacaggttatgagtgccagtgagccgccttagatagaagcatcgtcagcactttattaatgatggatagtgagaataaacccgaaaatgatgaggatgaaaagataaacaaagaagcacaagacttgacaaagctttcatcccataatgaagacggtgggcctgtatctgatgtgatagcaagtttccctgagaattctatgggcaaaagaggtttttcagaatcatcgaactctgatagtgttgttataggagaagacagaaataaacatgcttccaaacgcaggaaattagatgaggcagagccccttaaatctggaaagcaaggtatttgtagattagaaacttctgagagctcagtcacagaagggggtattgcattagatgaaacagggaaggagacctttctgagtgactgcacagttggaggcacatgtctcccaaatgccctctccccttcttgcaattttagcactattgatgttgtttctctgaaaacagacactgaaaaaacatctgctcaggaaatggtttcccttgatctggaaagagaatctcctttccccccgaaagaaattagtgttagttgtaccattgggaatgtagatacagttctcaaatgcagcatctgtgggcatttgttttcttcttgctctgacttggaaaaacatgctgagtctcacatgcagcagcctaaggaacatacctgttgtcactgcagccacaaagcagagagcagctcagcactacatatgcatatcaaacaagcacatgggccacagaaggtcttttcctgtgatctttgtggttttcagtgttcagaagaaaacttgttgaatgcacattatcttggcaaaacacatctccgtcgtcagaatctggctgctcgtggaggatttgtacagatcttaacaaaacaaccttttcctaaaaaatcacgtacaatggcaacaaaaaatgttcactcaaaaccaagaacttctaaatcaatagcaaagaatagtgattcaaaaggattacgaaatgtgggaagcacgtttaaagatttcagaggaagtatttctaaacaaagtggtagtagcagtgagcttcttgttgaaatgatgccttccagaaatactttgtcacaggaagtagagattgttgaagaacatgttacttcccttggtctagctcagaatcctgaaaaccagagtagaaagctagacaccttagtaacctcagagggtctcttagagaaattggaatctacaaaaaatacccttcaggcagcacacggtaacagtgtaacctcgaggccaagacctgagcgaaatattctcgtgttgggtaatagctttcgtcgacgaagcagcactttcaccttgaagggccaggcaaagaaaaggtttaatcttttaggaattaaaagaggtacaagtgaaactcagaggatgtatatgaaacacttgagaacacagatgaaaacacacgatgcagaatcagtgctgaaacacctggaagcgtgcagcagtgtgcagagagtgtgtgtgactacctcagaaacccaggaggcagagcagggccaggggagtgcccgtcctccggactccgggctgcattccctgacagtgaagccagcttctggctctcagacgttgtgtgcttgtacagactgtgggcaagtagctacaaataggacagatttggaaatccatgtgaaaaggtgccatgccagagagatgaaattttactgccgtacttgtgacttctctagtatgtcaagaagggacttagatgaacatttgcacagtaaccagcatcagcaaactgcttctgtcctgagttgtcagtgttgttcatttatatccttggatgaaataaatcttagagaccacatgaaggaaaagcacaatatgcattttctttgcaccccttgtaatctgttctttttgtctgaaaaagatgtggaagaacacaaagccaccgagaagcatattaattcattggttcaaccaaagactttgcaatcatctaacagtgatttggttttacagactttacctttgagtactttagaatcagaaaacgcaaaagagtctatggatgactcaggaaaagcatctcaggaagaacctctgaagtccagggtaagccatggtaatgaagtgaggcattccagtaagcctcagtttcagtgtaagaagtgtttttataaaacaagatcttctactgttctcacgagacatataaagcttcggcatggtcaagactatcattttctttgtaaagcttgtaatctttattcattgagcaaagaaggaatggagaaacacattaaaagaagcaagcatcttgaaaatgctaagaaaaataatattggcttaagctttgaagaatgtattgaaagggtatgtataggtgcaaatgataaaaaagaagagtttgatgtttccggaaatggaaggattgaaggccatataggtgtgcaattacaagagcattcctatcttgagaagggcatgctggcgtctgaggaactgtcacagtctggtggtagcaccaaagatgatgaattagcttcaaccactactccaaagagagggagacctaaaggtaacatctcacggacgtgttcacactgtggccttttggcctctagtattacaaacttgactgttcacattagacgaaaacacagtcaccagtatagttatttatgcaaagtgtgtaagtattacactgtaactaagggagatatggaacgtcattgtgccaccaagaaacataaaggacgggtagaaatagaagcaagtggaaaacacagttcagatatcattgttggccctgaagggggtagccttgaagctggtaaaaagaatgctggctcagcagtgaccatgtcagatgaacatgctaacaaaccagctgagtcacccacctccgttttagagaagccagatcgtggaaactcaattgaagctgaagttgaaaatgtatttcattctctagatggagaagttaacagccatcttcttgataaaaaggagcaaatatcttcagagccagaggacttcgcccagccgggggatgtgtactcccagagagatgttacaggcacaggtgagaataagtgtttgcactgtgagtttagtgctcactcctctgcttctctagagctgcatgtaaaacggaaacatacaaaagagtttgagttttattgcatggcatgcgattactacgcggtgactcgtcgcgagatgaccaggcatgcagcaacagagaagcacaaaatgaaaaggcagtcttatctcaactctgctaatgtagaagctggttctgcagacatgtccaaaaacatcattatgcctgaagaagagcatcaacaaaattctgaggaatttcaaataatttcaggtcaaccatctgatactcttaaatctagaaatgctgcagattgctctattttaaatgagaatactaatttagatatgtctaaagtgctctgcgctgctgactctgtagaagttgagactgaagaagaatctaatttcaatgaagaccattccttttgtgagactttccaacaggctcctgtcaaggataaagttaggaaacctgaggagatgatgtcacttactatgtcctcaaactatggctccccaagcagatttcaaaatgaaaattcaggaagctctgccttaaattgtgagacagcaaagaaaaaccatgagatatcgaatgatgcaggtgagctgcgtgtccattgtgagggtgaaggaggaaacgcaggagacggtggaggtgttgtcccccacagacacctgtgccctgtgacgctcgatggggagcgctcggctgaaagccctgtgctcgttgtgacaagaataaccagagaacagggaaatctggagagcgggggtcagaacagagttgcacgtgggcatggtttggaagacttgaaaggtgtccaagaagatcccgttctggggaataaggaaattctgatgaattcacaacatgaaacagaatttattttggaggaggatggcccagcttctgatagcacagttgaaagtagtgatgtctatgaaactataattagtattgatgataaagggcaggccatgtacagttttggtcgatttgactcctccataataagaataaagaaccctgaagatggtgagttgatagaccagtctgaagagggcttgatagcaacgggagtgagaattagtgagctgcccttgaaagactgtgctcaaggtgtgaaaaagaagaaatctgagggcagttccattggtgagtctacacgaattcgctgtgatgattgtggcttcttagcagatggactgagtggactgaatgttcacatagccatgaagcatcctacaaaagagaagcacttccattgtttactctgtggaaagtcgttctataccgaaagcaaccttcaccagcatctggctagtgccggccacatgagaaatgagcaggccagtgtggaggagcttccggagggaggggccacctttaaatgtgtcaagtgcacagagccctttgattctgaacagaatttatttttacatattaaaggacagcatgaggaattgctgcgggaggtgaataagtatatagtggaagacactgagcaaatcaaccgcgagagggaggaaaaccagggaaacgtctgcaagtattgtgggaagatgtgtcgaagcagcaactcgatggccttcctggcacacattcgcactcacacaggatcaaaaccattcaagtgcaagatatgccattttgcaacagctcagcttggagatgccagaaaccatgtgaaaaggcaccttgggatgagggaatacaagtgtcatgtctgtggggttgcttttgtaatgaagaagcacttaaatactcatctactaggcaagcatggagttggcaccccaaaagaaagagtaaaggttgcatatcgaaagatcgggacgttgccaggaatacagaacaacaggaacgcgtcgagtgcctctgaagcccaaagtctttgtgagcacttttcataactgatgggacctgcagtgggaggattggctgaggacttattttggttgaagttagacatatttcattgtctttttttttttccttttatctgtgtacttctttgcatacttgaattcatttgtgtgatgtaaatcatcacacaaatgtaggctagtctagtgattttctggaaggaactgttattttaaaaattgagtactcagttttataaaattgtcatcatcaatgagttaaaaaaaaaaaaacccttaatgattcagggtttatttaaagctgactgtccaatcaaagtttttgtaagcatgccatgtgacaaatgcctggcatattcagtaaggaacatattaattattctaattaacacatgacttcagagaagtctttcgttaatcagcacatggatcttggttatttgtacccttttgggaaaatttcacactcagatgcaaaaataccaggctaaatacattgctttgtttgtatgtggagaggatattcatcacaatggtactatacatctaagaaaacagaaagtaattaaaatgctgattactata

SEQ ID NO: 202374 - DNA, 5794 bp, Homo sapiens
  Payload ID: 19918
  Gene Name: zinc finger protein 407
  Uniprot ID: Q9C0G0
  ENST ID: ENST00000577538
  CDS Start-End: 1-5448
atgatggatagtgagaataaacccgaaaatgatgaggatgaaaagataaacaaagaagcacaagacttgacaaagctttcatcccataatgaagacggtgggcctgtatctgatgtgatagcaagtttccctgagaattctatgggcaaaagaggtttttcagaatcatcgaactctgatagtgttgttataggagaagacagaaataaacatgcttccaaacgcaggaaattagatgaggcagagccccttaaatctggaaagcaaggtatttgtagattagaaacttctgagagctcagtcacagaagggggtattgcattagatgaaacagggaaggagacctttctgagtgactgcacagttggaggcacatgtctcccaaatgccctctccccttcttgcaattttagcactattgatgttgtttctctgaaaacagacactgaaaaaacatctgctcaggaaatggtttcccttgatctggaaagagaatctcctttccccccgaaagaaattagtgttagttgtaccattgggaatgtagatacagttctcaaatgcagcatctgtgggcatttgttttcttcttgctctgacttggaaaaacatgctgagtctcacatgcagcagcctaaggaacatacctgttgtcactgcagccacaaagcagagagcagctcagcactacatatgcatatcaaacaagcacatgggccacagaaggtcttttcctgtgatctttgtggttttcagtgttcagaagaaaacttgttgaatgcacattatcttggcaaaacacatctccgtcgtcagaatctggctgctcgtggaggatttgtacagatcttaacaaaacaaccttttcctaaaaaatcacgtacaatggcaacaaaaaatgttcactcaaaaccaagaacttctaaatcaatagcaaagaatagtgattcaaaaggattacgaaatgtgggaagcacgtttaaagatttcagaggaagtatttctaaacaaagtggtagtagcagtgagcttcttgttgaaatgatgccttccagaaatactttgtcacaggaagtagagattgttgaagaacatgttacttcccttggtctagctcagaatcctgaaaaccagagtagaaagctagacaccttagtaacctcagagggtctcttagagaaattggaatctacaaaaaatacccttcaggcagcacacggtaacagtgtaacctcgaggccaagacctgagcgaaatattctcgtgttgggtaatagctttcgtcgacgaagcagcactttcaccttgaagggccaggcaaagaaaaggtttaatcttttaggaattaaaagaggtacaagtgaaactcagaggatgtatatgaaacacttgagaacacagatgaaaacacacgatgcagaatcagtgctgaaacacctggaagcgtgcagcagtgtgcagagagtgtgtgtgactacctcagaaacccaggaggcagagcagggccaggggagtgcccgtcctccggactccgggctgcattccctgacagtgaagccagcttctggctctcagacgttgtgtgcttgtacagactgtgggcaagtagctacaaataggacagatttggaaatccatgtgaaaaggtgccatgccagagagatgaaattttactgccgtacttgtgacttctctagtatgtcaagaagggacttagatgaacatttgcacagtaaccagcatcagcaaactgcttctgtcctgagttgtcagtgttgttcatttatatccttggatgaaataaatcttagagaccacatgaaggaaaagcacaatatgcattttctttgcaccccttgtaatctgttctttttgtctgaaaaagatgtggaagaacacaaagccaccgagaagcatattaattcattggttcaaccaaagactttgcaatcatctaacagtgatttggttttacagactttacctttgagtactttagaatcagaaaacgcaaaagagtctatggatgactcaggaaaagcatctcaggaagaacctctgaagtccagggtaagccatggtaatgaagtgaggcattccagtaagcctcagtttcagtgtaagaagtgtttttataaaacaagatcttctactgttctcacgagacatataaagcttcggcatggtcaagactatcattttctttgtaaagcttgtaatctttattcattgagcaaagaaggaatggagaaacacattaaaagaagcaagcatcttgaaaatgctaagaaaaataatattggcttaagctttgaagaatgtattgaaagggtatgtataggtgcaaatgataaaaaagaagagtttgatgtttccggaaatggaaggattgaaggccatataggtgtgcaattacaagagcattcctatcttgagaagggcatgctggcgtctgaggaactgtcacagtctggtggtagcaccaaagatgatgaattagcttcaaccactactccaaagagagggagacctaaaggtaacatctcacggacgtgttcacactgtggccttttggcctctagtattacaaacttgactgttcacattagacgaaaacacagtcaccagtatagttatttatgcaaagtgtgtaagtattacactgtaactaagggagatatggaacgtcattgtgccaccaagaaacataaaggacgggtagaaatagaagcaagtggaaaacacagttcagatatcattgttggccctgaagggggtagccttgaagctggtaaaaagaatgctggctcagcagtgaccatgtcagatgaacatgctaacaaaccagctgagtcacccacctccgttttagagaagccagatcgtggaaactcaattgaagctgaagttgaaaatgtatttcattctctagatggagaagttaacagccatcttcttgataaaaaggagcaaatatcttcagagccagaggacttcgcccagccgggggatgtgtactcccagagagatgttacaggcacaggtgagaataagtgtttgcactgtgagtttagtgctcactcctctgcttctctagagctgcatgtaaaacggaaacatacaaaagagtttgagttttattgcatggcatgcgattactacgcggtgactcgtcgcgagatgaccaggcatgcagcaacagagaagcacaaaatgaaaaggcagtcttatctcaactctgctaatgtagaagctggttctgcagacatgtccaaaaacatcattatgcctgaagaagagcatcaacaaaattctgaggaatttcaaataatttcaggtcaaccatctgatactcttaaatctagaaatgctgcagattgctctattttaaatgagaatactaatttagatatgtctaaagtgctctgcgctgctgactctgtagaagttgagactgaagaagaatctaatttcaatgaagaccattccttttgtgagactttccaacaggctcctgtcaaggataaagttaggaaacctgaggagatgatgtcacttactatgtcctcaaactatggctccccaagcagatttcaaaatgaaaattcaggaagctctgccttaaattgtgagacagcaaagaaaaaccatgagatatcgaatgatgcaggtgagctgcgtgtccattgtgagggtgaaggaggaaacgcaggagacggtggaggtgttgtcccccacagacacctgtgccctgtgacgctcgatggggagcgctcggctgaaagccctgtgctcgttgtgacaagaataaccagagaacagggaaatctggagagcgggggtcagaacagagttgcacgtgggcatggtttggaagacttgaaaggtgtccaagaagatcccgttctggggaataaggaaattctgatgaattcacaacatgaaacagaatttattttggaggaggatggcccagcttctgatagcacagttgaaagtagtgatgtctatgaaactataattagtattgatgataaagggcaggccatgtacagttttggtcgatttgactcctccataataagaataaagaaccctgaagatggtgagttgatagaccagtctgaagagggcttgatagcaacgggagtgagaattagtgagctgcccttgaaagactgtgctcaaggtgtgaaaaagaagaaatctgagggcagttccattggtgagtctacacgaattcgctgtgatgattgtggcttcttagcagatggactgagtggactgaatgttcacatagccatgaagcatcctacaaaagagaagcacttccattgtttactctgtggaaagtcgttctataccgaaagcaaccttcaccagcatctggctagtgccggccacatgagaaatgagcaggccagtgtggaggagcttccggagggaggggccacctttaaatgtgtcaagtgcacagagccctttgattctgaacagaatttatttttacatattaaaggacagcatgaggaattgctgcgggaggtgaataagtatatagtggaagacactgagcaaatcaaccgcgagagggaggaaaaccagggaaacgtctgcaagtattgtgggaagatgtgtcgaagcagcaactcgatggccttcctggcacacattcgcactcacacaggatcaaaaccattcaagtgcaagatatgccattttgcaacagctcagcttggagatgccagaaaccatgtgaaaaggcaccttgggatgagggaatacaagtgtcatgtctgtggggttgcttttgtaatgaagaagcacttaaatactcatctactaggcaagcatggagttggcaccccaaaagaaaggaaatttacatgccacttatgtgatagaagtttcacagagaagtgggccctgaacaaccacatgaaactccacacgggagaaaagccgtttaaatgtacctggcccacgtgccattactcattcctcacagcctccgcaatgaaagaccactacaggacgcacacaggcgagaagtcgtttctgtgtgacctctgcggctttgccggcgggacccgccacgccctcaccaagcatcgcagacagcacacaggagaaaaacctttcaagtgcgatgagtgtaactttgcctccacaactcagtcccatttgactcggcataaacgtgtccacactggagaaaagccctacagatgcccctggtgtgactacaggtcaaactgtgctgaaaatatccgcaaacacattctgcatactggcaaacatgaaggagtcaagatgtacaactgtcccaagtgtgactacgggaccaacgtcccggtggagttccggaaccatttgaaggaacagcatcctgacatcgaaaacccggacctcgcttacctgcatgctggtaagggacagaaactgtgaaaacttgtttctaacaggatttcatgtgatcacagcagttataatgctatttgtacattaccatgatttattgtaatggagtagagtatgtgatagtatctgcttcaagacctatagaaaagtacattccagtttgatcccactcaactatgaaaacaggacttttcaactgtattttatcaaaaaaggaaatctgacagagtaattatttgatgactgtaaagttaataatagtaaatatttaaagcatagttgacctgaaatgagagtagttgttaaatcttcatatgttgactaattgctaaaattttaattttttttcttaaaaaatgcttgtgatttgaaa

SEQ ID NO: 202375 - DNA, 793 bp, Homo sapiens
  Payload ID: 19918
  Gene Name: zinc finger protein 407
  ENST ID: ENST00000581829
  CDS Start-End: 1-413
catgccacttatgtgatagaagtttcacagagaagtgggccctgaacaaccacatgaaactccacacgggagaaaagccgtttaaatgtacctggcccacgtgccattactcattcctcacagcctccgcaatgaaagaccactacaggacgcacacaggcgagaagtcgtttctgtgtgacctctgcggctttgccggcgggacccgccacgccctcaccaagcatcgcagacagcacacaggagaaaaacctttcaagtgcgatgagtgtaactttgcctccacaactcagtcccatttgactcggcataaacgtgtccacactggagaaaagccctacagatgcccctggtgtgactacagcttctttgtttccacatattctgaaatattgcctgtctggagcctgtagaaaaaatgtgaaagacagaaagacaaactttgaacatttggaaaatggtgatgccgtcgtttttatgaagcagaggaagacagagcagcttatgtatcagcgtgtctgactcattccactccctctaggcataagatgctgccttctgtgtggtagcatttattgtgtatattttggctcatccctaagaatttctttaagacaatattatatcttttataaattttacatctttgtcttcttaattagggaatgtagcacaaattttttgttggattttttttcctattcatattattttcgtacttaactacatttattagaagttctagaaaaagaactacttctgaggttttgttttgttttggtaaaacaatgtt

SEQ ID NO: 202376 - DNA, 1013 bp, Homo sapiens
  Payload ID: 19918
  Gene Name: zinc finger protein 407
  ENST ID: ENST00000584235
  CDS Start-End: 1-390
aaatttacatgccacttatgtgatagaagtttcacagagaagtgggccctgaacaaccacatgaaactccacacgggagaaaagccgtttaaatgtacctggcccacgtgccattactcattcctcacagcctccgcaatgaaagaccactacaggacgcacacaggcgagaagtcgtttctgtgtgacctctgcggctttgccggcgggacccgccacgccctcaccaagcatcgcagacagcacacaggagaaaaacctttcaagtgcgatgagtgtaactttgcctccacaactcagtcccatttgactcggcataaacgtgtccacactggagaaaagccctacagatgcccctggtgtgactacagtgcctatgattgggtctgaaaggctggccttgctcccagacgtttagaaaagcagctagatgtgcacaggtttcctgcgggtgacagagaggccagcgcagcgcctgctgttcaggagcgtctcagaggcacacgagagccggttggctgctcgcgcagagagcgcatgtggacacctggacagccgcgtgacttggaagcatgggagtttatcctctcaagggtggtggatgagaccaagaatgcgtcagtgttcatccacttctgtgctaacttacaagtttctttctcttatgaggcactgtgctgttttagaatcactttttatcgcataataaacatgaacagaaatataactgagaaatggagagaaaaattcaatgtgcatcaatttgtcctaagaactagtttcaaagaatttagatttatgaaaagcaaaaagtaatgagtaaatgatctaatggaaattatcccattcaataaatagctaccagttataataaaggaaaataaaattcataagatttagagcaaggtgatccagaaactctccaactaaaatttcctcttgctgaaaatgtccaaaggattgtattttgtgattacctcagattgctgtaaactctttttatctgaataaaa

SEQ ID NO: 202377 - DNA, 2442 bp, Homo sapiens
  Payload ID: 19919
  Gene Name: zinc finger protein 408
  Uniprot ID: Q9H9D4
  ENST ID: ENST00000311764
  CDS Start-End: 231-2393
gctttcccagctagtcgaatcactggtgcacctccggaatccgaggttcgcattgctctcggacagagttctgcctccccagtactcccaaactcccagtcctgtgcaccaatgaggtccagctctgaggcttctttcctgagaaaaaaatttggaagtccgtgactgtttcctggaggagctgagaagaggaagctcacttccggcgtagggaggctttctgacccggaatggaggaggcggaggagctgctcttggaggggaagaaggcgctgcaactcgcccgcgagccgcgcctgggcctggacttaggatggaacccttccggagaaggctgtacgcagggcctcaaagacgtcccacccgagccgacccgagacatcctcgctttaaagagccttccccggggcttggcccttggcccctcactcgccaaggaacagcgcttgggggtctggtgtgtcggggaccccctgcagcccggcctgctgtgggggccgctggaagaggagtctgcctccaaggagaagggcgagggagtaaagccacggcaggaggagaacctgtcattaggcccatggggagacgtgtgtgcctgtgagcagagttctggctggactagcttggtacaacggggcaggctggagagtgagggaaatgtggccccagtgcggatcagcgagaggcttcatctgcaagtgtaccagctggtgctgccaggctctgaactgctgctgtggccccagccttcctctgagggcccaagtctcacccagcctgggctggacaaagaggcagctgtagcagtggtgacagaagtggagtctgctgtacagcaggaagtggcctcccctggggaggatgcagcagaaccttgcatagatcctggttcccagtcaccctctggcatccaggcagagaatatggtgagccctggacttaagttcccaacccaggaccgaatttccaaggatagccagccacttggcccattgcttcaggatggcgacgtggatgaggaatgcccggcccaggcacagatgccacctgaacttcagagcaattcggctacccagcaggacccagatggcagtggagccagtttctcatcttctgccaggggcacccagccgcatggctacctggccaagaagttacacagccccagtgatcagtgcccacccagagcaaagaccccagagcctggagcccagcagtctggcttccctacactctcgcggagccctcctggcccagcaggaagctccccaaagcaggggcgacggtaccggtgtggagagtgtggcaaggcattcctacagctgtgccacctaaagaagcacgcatttgtgcacacgggccacaagccctttctttgcactgagtgtggcaagagctatagctcagaggagagcttcaaagcccatatgctgggccaccgtggggtgcggcccttcccctgtccacaatgcgacaaggcctatggcacccagcgagacctcaaagagcaccaggtggtacattcaggtgcccggccctttgcttgtgaccagtgtggcaaggcctttgcccgccggccctccctgcggctgcatcgcaagacccaccaggtgccagctgcccctgccccttgcccatgccctgtgtgtgggcggcccctggccaaccagggctccctgcggaaccatatgaggctccatacaggagaaaagcctttcctgtgcccgcactgtggccgggcgtttcgtcagcggggcaacctgcgtgggcatttgcggctccacaccggggagcgtccttaccgctgcccacactgtgccgatgccttcccccagctgcctgaactgcggcgccatctcatctcacacaccggggaggcccacttgtgcccggtgtgtggcaaggccctccgagacccacacacgctccgagctcacgagcgcctgcactccggagagaggccctttccctgtccccagtgtggccgtgcttacacgctggccaccaagctgcggcgccacctcaaatctcacttggaggacaagccctaccgctgccccacctgtggcatgggctacaccctcccgcagagcctcaggcggcatcagctcagtcaccggcctgaggcaccctgcagcccaccctctgtgccttctgctgcttctgagcccactgtggtgctcctgcaggctgagccacaactgctggacacacacagagaggaggaagtctcccccgccagggatgttgttgaggtcaccatttcagaaagccaggagaagtgctttgtggtgccagaggagccagatgccgcccccagcctggtgctaatccataaggacatgggcctcggcgcctgggcagaggtggtggaggtggagatgggcacctgacagctttgccttttgctgacacagctccataaagactcgtgctttctca

SEQ ID NO: 202378 - DNA, 4297 bp, Homo sapiens
  Payload ID: 19920
  Gene Name: zinc finger protein 41
  Uniprot ID: P51814
  ENST ID: ENST00000313116
  CDS Start-End: 407-2746
gtaagggcacccaccaggtgtaattgtgggcgagcggccgcttcggagctgacactaagcatgtgcagatcaagtccagaagcgccggggttcctcgaagcagttttcaggacttaaggctctgggacatccagcacagtgagcggcccctgggcaccaccagaaaacatttgtgagtgaacgtggagtgatgaccatgtggacactgtctttccagggtttcttggagcctctgcagagtctgggggccaggcttcttagtggaaactgcaggatcttccttctgacccctgcttgcctcgccccagcagctccggttgagtccacagatgccagctcagcttccagcttggggaagagtggggttgtcagcaggagagcctgagggctgaggcccagcgtgaacatggcagctaatggggactctcccccatggtccccggccctggctgcagagggacgtggcagctcatgtgaggcttcagtgtcatttgaggacgtgactgtggacttcagcaaggaggagtggcagcacttggaccctgcccagagacgcctgtactgggatgtgacactagagaactacagccacctgctctcagtggggtaccaaattcccaagtcagaggctgccttcaagttggagcaaggagaggggccatggatgctggagggggaagccccacatcagagctgttcaggtgaggctattgggaaaatgcagcaacagggaattcctggaggaattttcttccactgtgagagatttgatcaacccataggagaagattcattatgttctattttagaagaactgtggcaagataatgaccagctagagcaacgtcaggaaaaccagaataaccttttaagtcatgtgaaagtattgattaaggagaggggctatgaacataaaaacattgaaaaaataattcatgtgactaccaagcttgttccttcaattaaaagactccataactgtgacacaattttgaagcatactttaaactcacataatcataatagaaacagtgcaacaaagaaccttggcaagatttttggaaatggtaacaatttcccccatagcccttcctctactaagaatgagaatgctaaaacaggagcaaattcctgtgaacatgaccactatgaaaaacatctcagccacaaacaagctcccacccaccatcagaaaattcatcctgaggagaagctttatgtgtgtactgaatgtgtaatgggcttcactcagaagtcacatctgtttgagcatcagagaattcatgctggagaaaagtcccgtgaatgtgacaaaagcaacaaagtcttcccccagaaaccccaggttgatgtacatccaagtgtttatacaggagaaaaaccctatctgtgtactcaatgtgggaaagtctttaccctcaaatcaaacctcattacacatcaaaaaattcataccgggcagaaaccctacaaatgcagtgaatgtggaaaagcctttttccagagatcagacctctttagacatctgagaattcatacaggagaaaaaccttatgaatgcagtgaatgtggaaaaggcttctcccagaactcagacctcagtatacatcagaaaactcataccggagagaaacactatgaatgcaatgaatgtgggaaggctttcacaagaaaatcagcactcaggatgcatcagagaatccacacgggagagaaaccttatgtatgcgctgactgtgggaaggccttcatccagaaatcacatttcaacacacatcagagaattcatactggagaaaagccgtatgaatgcagtgactgtgggaaatccttcactaagaagtcacaactccatgtgcatcaaagaattcacaccggagagaaaccctatatatgtacagaatgtggaaaggtcttcactcacaggacaaacctcaccacacatcagaaaactcatactggggaaaaaccctatatgtgtgctgaatgtggaaaggcttttactgaccagtcaaatctcattaaacaccagaaaactcacactggagagaaaccctataagtgcaatggctgtggaaaagccttcatatggaagtcgcgcctcaaaatacatcagaaatctcatattggagagagacactatgaatgcaaggactgcgggaaagccttcatccagaaatcaacactaagcgtgcatcagagaatccatacaggagagaaaccgtacgtttgtcctgaatgcgggaaggcctttatccagaaatcgcacttcattgcgcatcatagaatccatactggagagaagccttatgaatgcagcgactgtgggaaatgcttcactaagaagtcacaactccgtgtgcatcagaaaatccacacaggtgagaagcccaatatatgtgctgaatgtggaaaggccttcactgaccgatcaaatctcataacacatcagaaaatccacactagggagaaaccctatgaatgtggtgactgcgggaaaaccttcacctggaagtcacgcctcaatatacatcagaagtctcatactggagaaagacactatgaatgtagtaaatgtgggaaagctttcatccagaaagccacactaagtatgcatcagataattcatacaggaaagaaaccttatgcttgtacagaatgtcagaaggcctttactgacagatcgaatctcattaaacaccagaaaatgcatagtggagaaaaacgctataaagccagtgactgagaaagtcttcacctggaaatcacaactgggtatgcatcaggtatctaatagcagggaggaggaaggcctgttgctgcaatcattgtacagggggaaatgggtatgagagactgaggcttgagtgaactgaaggcaaacagagccaagtatccttcagtccactggaaagacaagttcctgcatcaccacagtgtatatgcaattctatgcataggaagagcctttagagaaagcatttgagcgaaagtcatgtttggtgacatgattcatacagacctcttgagctcctggaaatagtagaattaagacctgaggagatgactcgtcatctcttatgcttcactttttggataaagaactttttaaattcagtactgattggttcagcatatcctgggacataaaaatactcactactgggaaaaactttttcaaatttctaggttgaggagaagagttttcattgtccaaacactggcagggcactgacatcaaggcagaaaacctacttgggaatgcagatatctgtttttgtgatcattggcacttaagacatagaaaagatttccatgaaaaacttttttcttttcccttgggaagtcctcatggtatatatattttaagtgcaatggaatttttaaatttaaagatataactttatgaattgagaaattaggcctagctctaggctatgttacagaaatatagtcattgaatgatacagacatataaaggtagtagttgtctcattattaattccctgctgggagagcagatgagtcataccctataagaagtatgcatgccttctaacctatgtccccaaagctgtcatttgcataagctgcaggccatagattcctgattccctcagtaactgaccctacgacaatggaactgatccacggcactctagattttcaggctaacccaccaacacccctgctttccttgggatttcctgaaaaagaatggttgaaaaattgagtttcacttcctaatattttgtttttcttcctatttggttaaggtatattcatttcctacatgcacattaagggtagttttgtgtagactgctatgtgataaagtcatgttgcattgcaattagttattctaagacataattacagtttatcatagttgaataactggaagacttctcaagaaagagcactgctcttttttaacactgatatatagacacgttctcattttcccttaaacattttttacaatactcataaaaaggaactttctttctagcatgcaattgtatttttattttattttaaaatctttttattaaactataatgtatacagaaaatgcatatatcataaacatacagctcagtgcattctcaaaaactgaacatactcagatcaagaaacagaacatgaccagcaccccagaagccttccccactttcccttccaggcaagcccccaagggtatacattatcctggcttctcacagcatagattcattttgcctgttttgtattttatataaattgagtcaattatatatcatataattgagccata

SEQ ID NO: 202379 - DNA, 4531 bp, Homo sapiens
  Payload ID: 19920
  Gene Name: zinc finger protein 41
  Uniprot ID: P51814
  ENST ID: ENST00000377065
  CDS Start-End: 641-2980
cggaggctccccggtagggacggcctgaggccgagggcaccctgagggcggaagaggcaaagcgcctcgcccgccggggcctcggaggtgactaactcctagaggctgcggcggaggggagaagcctggtggtacattccatggcccagtgcctcggccactggaaaatcccacaggggtatatcgagtaggggaccgcgggctccgcggcagaaatgaccgcccttccaagatggcggctcccgtagagacactcccaaggagacagccatgttccttgcctgagagtcactgaaggaaattggaaagcccgcctctccttcgacgcacacgcgcacgcgcacgcacgcaccggcgcggtcatccagcacagtgagcggcccctgggcaccaccagaaaacatttgtgagtgaacgtggagtgatgaccatgtggacactgtctttccagggtttcttggagcctctgcagagtctgggggccaggcttcttagtggaaactgcaggatcttccttctgacccctgcttgcctcgccccagcagctccggttgagtccacagatgccagctcagcttccagcttggggaagagtggggttgtcagcaggagagcctgagggctgaggcccagcgtgaacatggcagctaatggggactctcccccatggtccccggccctggctgcagagggacgtggcagctcatgtgaggcttcagtgtcatttgaggacgtgactgtggacttcagcaaggaggagtggcagcacttggaccctgcccagagacgcctgtactgggatgtgacactagagaactacagccacctgctctcagtggggtaccaaattcccaagtcagaggctgccttcaagttggagcaaggagaggggccatggatgctggagggggaagccccacatcagagctgttcaggtgaggctattgggaaaatgcagcaacagggaattcctggaggaattttcttccactgtgagagatttgatcaacccataggagaagattcattatgttctattttagaagaactgtggcaagataatgaccagctagagcaacgtcaggaaaaccagaataaccttttaagtcatgtgaaagtattgattaaggagaggggctatgaacataaaaacattgaaaaaataattcatgtgactaccaagcttgttccttcaattaaaagactccataactgtgacacaattttgaagcatactttaaactcacataatcataatagaaacagtgcaacaaagaaccttggcaagatttttggaaatggtaacaatttcccccatagcccttcctctactaagaatgagaatgctaaaacaggagcaaattcctgtgaacatgaccactatgaaaaacatctcagccacaaacaagctcccacccaccatcagaaaattcatcctgaggagaagctttatgtgtgtactgaatgtgtaatgggcttcactcagaagtcacatctgtttgagcatcagagaattcatgctggagaaaagtcccgtgaatgtgacaaaagcaacaaagtcttcccccagaaaccccaggttgatgtacatccaagtgtttatacaggagaaaaaccctatctgtgtactcaatgtgggaaagtctttaccctcaaatcaaacctcattacacatcaaaaaattcataccgggcagaaaccctacaaatgcagtgaatgtggaaaagcctttttccagagatcagacctctttagacatctgagaattcatacaggagaaaaaccttatgaatgcagtgaatgtggaaaaggcttctcccagaactcagacctcagtatacatcagaaaactcataccggagagaaacactatgaatgcaatgaatgtgggaaggctttcacaagaaaatcagcactcaggatgcatcagagaatccacacgggagagaaaccttatgtatgcgctgactgtgggaaggccttcatccagaaatcacatttcaacacacatcagagaattcatactggagaaaagccgtatgaatgcagtgactgtgggaaatccttcactaagaagtcacaactccatgtgcatcaaagaattcacaccggagagaaaccctatatatgtacagaatgtggaaaggtcttcactcacaggacaaacctcaccacacatcagaaaactcatactggggaaaaaccctatatgtgtgctgaatgtggaaaggcttttactgaccagtcaaatctcattaaacaccagaaaactcacactggagagaaaccctataagtgcaatggctgtggaaaagccttcatatggaagtcgcgcctcaaaatacatcagaaatctcatattggagagagacactatgaatgcaaggactgcgggaaagccttcatccagaaatcaacactaagcgtgcatcagagaatccatacaggagagaaaccgtacgtttgtcctgaatgcgggaaggcctttatccagaaatcgcacttcattgcgcatcatagaatccatactggagagaagccttatgaatgcagcgactgtgggaaatgcttcactaagaagtcacaactccgtgtgcatcagaaaatccacacaggtgagaagcccaatatatgtgctgaatgtggaaaggccttcactgaccgatcaaatctcataacacatcagaaaatccacactagggagaaaccctatgaatgtggtgactgcgggaaaaccttcacctggaagtcacgcctcaatatacatcagaagtctcatactggagaaagacactatgaatgtagtaaatgtgggaaagctttcatccagaaagccacactaagtatgcatcagataattcatacaggaaagaaaccttatgcttgtacagaatgtcagaaggcctttactgacagatcgaatctcattaaacaccagaaaatgcatagtggagaaaaacgctataaagccagtgactgagaaagtcttcacctggaaatcacaactgggtatgcatcaggtatctaatagcagggaggaggaaggcctgttgctgcaatcattgtacagggggaaatgggtatgagagactgaggcttgagtgaactgaaggcaaacagagccaagtatccttcagtccactggaaagacaagttcctgcatcaccacagtgtatatgcaattctatgcataggaagagcctttagagaaagcatttgagcgaaagtcatgtttggtgacatgattcatacagacctcttgagctcctggaaatagtagaattaagacctgaggagatgactcgtcatctcttatgcttcactttttggataaagaactttttaaattcagtactgattggttcagcatatcctgggacataaaaatactcactactgggaaaaactttttcaaatttctaggttgaggagaagagttttcattgtccaaacactggcagggcactgacatcaaggcagaaaacctacttgggaatgcagatatctgtttttgtgatcattggcacttaagacatagaaaagatttccatgaaaaacttttttcttttcccttgggaagtcctcatggtatatatattttaagtgcaatggaatttttaaatttaaagatataactttatgaattgagaaattaggcctagctctaggctatgttacagaaatatagtcattgaatgatacagacatataaaggtagtagttgtctcattattaattccctgctgggagagcagatgagtcataccctataagaagtatgcatgccttctaacctatgtccccaaagctgtcatttgcataagctgcaggccatagattcctgattccctcagtaactgaccctacgacaatggaactgatccacggcactctagattttcaggctaacccaccaacacccctgctttccttgggatttcctgaaaaagaatggttgaaaaattgagtttcacttcctaatattttgtttttcttcctatttggttaaggtatattcatttcctacatgcacattaagggtagttttgtgtagactgctatgtgataaagtcatgttgcattgcaattagttattctaagacataattacagtttatcatagttgaataactggaagacttctcaagaaagagcactgctcttttttaacactgatatatagacacgttctcattttcccttaaacattttttacaatactcataaaaaggaactttctttctagcatgcaattgtatttttattttattttaaaatctttttattaaactataatgtatacagaaaatgcatatatcataaacatacagctcagtgcattctcaaaaactgaacatactcagatcaagaaacagaacatgaccagcaccccagaagccttccccactttcccttccaggcaagcccccaagggtatacattatcctggcttctcacagcatagattcattttgcctgttttgtattttatataaattgagtcaattatatatcatataattgagccata

SEQ ID NO: 202380 - DNA, 613 bp, Homo sapiens
  Payload ID: 19920
  Gene Name: zinc finger protein 41
  ENST ID: ENST00000432977
  CDS Start-End: 78-613
agcttccagcttggggaagagtggggttgtcagcaggagagcctgagggctgaggcccagcgtgaacatggcagctaatggggactctcccccatggtccccggccctggctgcagagggacgtggcagctcatgtgagtgctgaccatgctgccttgaacagcattgtgtcgttacaggcttcagtgtcatttgaggacgtgactgtggacttcagcaaggaggagtggcagcacttggaccctgcccagagacgcctgtactgggatgtgacactagagaactacagccacctgctctcagtggggtaccaaattcccaagtcagaggctgccttcaagttggagcaaggagaggggccatggatgctggagggggaagccccacatcagagctgttcaggtgaggctattgggaaaatgcagcaacagggaattcctggaggaattttcttccactgtgagagatttgatcaacccataggagaagattcattatgttctattttagaagaactgtggcaagataatgaccagctagagcaacgtcaggaaaaccagaataaccttttaagtcatgtgaaagtattgattaaggagaggggctatgaaca

SEQ ID NO: 202381 - DNA, 2293 bp, Homo sapiens
  Payload ID: 19921
  Gene Name: zinc finger protein 410
  Uniprot ID: Q86VK4
  ENST ID: ENST00000324593
  CDS Start-End: 261-1556
gccaaacttcctgtcccgcgctcgagctgcttccggcgggagccggaagacgctgtgtgtggacggaattcgggaccgactgacggccggccggcttcccggaactggaaggttacattgattacccacctagtacaacatcttacgggaagagcatagtatttcctagaggaatatgaacataacaggaaggtatcattggctctgaattaaatttgaacttgtcccctgaatagctacaggttttggaagctgaatcaatgttatcagatgagttagaatccaaaccagagctcctggtacagtttgttcagaatacgtccatcccattgggacaggggcttgtagaatcagaagctaaagatattacttgcttgtccctccttcccgtgactgaagcctcagaatgcagtcggctaatgttaccagatgatactacaaatcattctaactcctccaaggaggtcccttcctcagctgttttgagaagccttcgggtgaatgtgggtccagacggagaggagacgagagctcagactgtacagaaatccccggagtttttgtccacttcagagtcttctagcttgttgcaagatctacagccaagtgatagcacttcttttattcttcttaacctaacaagagcaggtctgggctcttcagctgagcacttagtgtttgtacaggatgaggcagaagattcagggaatgatttcctctccagtgagagcacagacagtagcattccatggttcctccgggttcaggagttggcccatgacagtttgattgctgctactcgtgcacaactggcaaagaatgcaaaaaccagcagcaatggagaaaatgtccaccttggttctggtgatgggcagtcaaaagattctgggccccttcctcaagtggaaaagaagctcaagtgtacagttgaaggttgtgaccggacatttgtatggccagctcactttaaataccacctcaagactcatcgaaatgaccgctccttcatctgtcctgcagaaggttgtgggaaaagcttctatgtgctgcagaggctgaaggtgcacatgaggacccacaatggagagaagccctttatgtgccatgagtctggctgtggtaagcagtttactacagctggaaacctgaagaaccaccggcgcatccacacaggagagaaacctttcctttgtgaagcccaaggatgtggccgttcctttgctgagtattctagcctccgaaaacatctggtggttcactcaggagagaagcctcatcagtgccaagtctgtgggaagaccttctctcagagtggaagcaggaatgtgcatatgagaaagcatcacctgcagctgggagcagctgggagtcaagagcaggagcaaactgaggtgcttgctgaaggatccccacgttccctgtcttcagtgcctgatgtgacacatcacctggtgaccatgcagtcagggaggcaatcatatgaagtttctgtcttaactgcagtaaatccacaagagttactaaaccaaggagatttaactgaaagacggacatgagcgtgggtgctgactcctggaagagcaactctatctgatctcaaaatgcgtatactgggaacaggatgccttagcccacaacagaaccagaatgaatctttgaaggcacaagactctgcttttgccactcttcctctttcctggtatagaagatggatgtaggagagcttcttttctaactaccatctgatcagacaaggaatgaagcaatgactgtgggctgggaaactgtacctacctctcttcccactgcaaatttctgggatagaccaaaagtgaatttgattatgtgttggctgaagttcttcattctgactgttgaggggaggttttcctttgaagagttttcatcccagactcagctgtcttttcacatggatgaaataattcctgctaccaacaacagagcttcaccaggaagttgagttttcaagatgccttgttgctttgaagaagggagtgatgtcaattctcttgttacattctccctttagcaacctgagtaagagactctctgccactgggctgcaaaaaaataaattacttgaatctccccttggcccaggctgaggtactatcttgtcctatacacttctacttggtcactttgctttcttcgttaatggaacatacagtagcatgttaagagggatttcatgtttttgtttttttaaagttaaaaattacatgatgcagagattcaggttttcctttaaataaacaaaacagcccagtca

SEQ ID NO: 202382 - DNA, 2193 bp, Homo sapiens
  Payload ID: 19921
  Gene Name: zinc finger protein 410
  ENST ID: ENST00000334521
  CDS Start-End: 210-1487
aggttacattgattacccacctagtacaacatcttacgggaagagcatagtatttcctagaggaatatgaacataacaggaagctcctggtacagtttgttcagaatacgtccatcccattgggacaggggcttgtagaatcagaagctaaagatattacttgcttgtccctccttcccgtgactgaagcctcagaatgcagtcggctaatgttaccagatgatactacaaatcattctaactcctccaaggaggtcccttcctcagctgttttgagaagccttcgggtgaatgtgggtccagacggagaggagacgagagctcagactgtacagaaatccccggagtttttgtccacttcagagtcttctagcttgttgcaagatctacagccaagtgatagcacttcttttattcttcttaacctaacaagagcaggtctgggctcttcagctgagcacttagtgtttgtacaggatgaggcagaagattcagggaatgatttcctctccagtgagagcacagacagtagcattccatggttcctccgggttcaggagttggcccatgacagtttgattgctgctactcgtgcacaactggcaaagaatgcaaaaaccagcagcaatggagaaaatgtccaccttggttctggtgatgggcagtcaaaagattctgggccccttcctcaagtggaaaagaagctcaagtgtacagttgaaggttgtgaccggacatttgtatggccagctcactttaaataccacctcaagactcatcgaaatgaccgctccttcatctgtcctgcagaaggttgtgggaaaagcttctatgtgctgcagaggctgaaggtgcacatgaggacccacaatggagagaagccctttatgtgccatgagtctggctgtggtaagcagtttactacagctggaaacctgaagaaccaccggcgcatccacacaggagagaaacctttcctttgtgaagcccaaggatgtggccgttcctttgctgagtattctagcctccgaaaacatctggtggttcactcaggagagaagcctcatcagtgccaagtctgtgggaagaccttctctcagagtggaagcaggaatgtgcatatgagaaagcatcacctgcagctgggagcagctgggagtcaagagcaggagcaaactgctgagccactaatgggcagtagtttgcttgaagaggcttcagtacccagtaaaaacctggtgtctatgaattcccagcccagccttggtggagagtccttgaacctaccaaataccaattctatcctgggagttgatgatgaggtgcttgctgaaggatccccacgttccctgtcttcagtgcctgatgtgacacatcacctggtgaccatgcagtcagggaggcaatcatatgaagtttctgtcttaactgcagtaaatccacaagagttactaaaccaaggagatttaactgaaagacggacatgagcgtgggtgctgactcctggaagagcaactctatctgatctcaaaatgcgtatactgggaacaggatgccttagcccacaacagaaccagaatgaatctttgaaggcacaagactctgcttttgccactcttcctctttcctggtatagaagatggatgtaggagagcttcttttctaactaccatctgatcagacaaggaatgaagcaatgactgtgggctgggaaactgtacctacctctcttcccactgcaaatttctgggatagaccaaaagtgaatttgattatgtgttggctgaagttcttcattctgactgttgaggggaggttttcctttgaagagttttcatcccagactcagctgtcttttcacatggatgaaataattcctgctaccaacaacagagcttcaccaggaagttgagttttcaagatgccttgttgctttgaagaagggagtgatgtcaattctcttgttacattctccctttagcaacctgagtaagagactctctgccactgggctgcaaaaaaataaattacttgaatctccccttggcccaggctgaggtactatcttgtcctatacacttctacttggtcactttgctttcttcgttaatggaacatacagtagcatgttaagagggatttcatgtttttgtttttttaaagttaaaaattacatgatgcagagattcaggt

SEQ ID NO: 202383 - DNA, 2461 bp, Homo sapiens
  Payload ID: 19921
  Gene Name: zinc finger protein 410
  Uniprot ID: Q86VK4
  ENST ID: ENST00000398139
  CDS Start-End: 195-1013
aattcgggaccgactgacggccggccggcttcccggaactggaaggttacattgattacccacctagtacaacatcttacgggaagagcatagtatttcctagaggaatatgaacataacaggaaggtatcattggctctgaattaaatttgaacttgtcccctgaatagctacaggttttggaagctgaatcaatgttatcagatgagttagaatccaaaccagagctcctggtacagtttgttcagaatacgtccatcccattgggacaggggcttgtagaatcagaagctaaagatattacttgcttgtccctccttcccgtgactgaagcctcagaatgcagtcggctaatgttaccagatgatactacaaatcattctaactcctccaaggaggtcccttcctcagctgttttgagaagccttcgggtgaatgtgggtccagacggagaggagacgagagctcagactgtacagaaatccccggagtttttgtccacttcagagtcttctagcttgttgcaagatctacagccaagtgatagcacttcttttattcttcttaacctaacaagagcaggtctgggctcttcagctgagcacttagtgtttgtacaggatgaggcagaagattcagggaatgatttcctctccagtgagagcacagacagtagcattccatggttcctccgggttcaggagttggcccatgacagtttgattgctgctactcgtgcacaactggcaaagaatgcaaaaaccagcagcaatggagaaaatgtccaccttggttctggtgatgggcagtcaaaagattctgggccccttcctcaagtggaaaagaagctcaagtgtacagttgaaggttgtgaccggacatttgtatggccagctcactttaaataccacctcaagactcatcgaaggttgtgggaaaagcttctatgtgctgcagaggctgaaggtgcacatgaggacccacaatggagagaagccctttatgtgccatgagtctggctgtggtaagcagtttactacagctggaaacctgaagaaccaccggcgcatccacacaggagagaaacctttcctttgtgaagcccaaggatgtggccgttcctttgctgagtattctagcctccgaaaacatctggtggttcactcaggagagaagcctcatcagtgccaagtctgtgggaagaccttctctcagagtggaagcaggaatgtgcatatgagaaagcatcacctgcagctgggagcagctgggagtcaagagcaggagcaaactgctgagccactaatgggcagtagtttgcttgaagaggcttcagtacccagtaaaaacctggtgtctatgaattcccagcccagccttggtggagagtccttgaacctaccaaataccaattctatcctgggagttgatgatgaggtgcttgctgaaggatccccacgttccctgtcttcagtgcctgatgtgacacatcacctggtgaccatgcagtcagggaggcaatcatatgaagtttctgtcttaactgcagtaaatccacaagaggtggagtcttgctatgttgcccaggctggagtgcagtggcaccatctcggctcactgcaacctctacctcccgaattcaagcggttcttctgcctcagcctcctgagtagctgggaccacagttactaaaccaaggagatttaactgaaagacggacatgagcgtgggtgctgactcctggaagagcaactctatctgatctcaaaatgcgtatactgggaacaggatgccttagcccacaacagaaccagaatgaatctttgaaggcacaagactctgcttttgccactcttcctctttcctggtatagaagatggatgtaggagagcttcttttctaactaccatctgatcagacaaggaatgaagcaatgactgtgggctgggaaactgtacctacctctcttcccactgcaaatttctgggatagaccaaaagtgaatttgattatgtgttggctgaagttcttcattctgactgttgaggggaggttttcctttgaagagttttcatcccagactcagctgtcttttcacatggatgaaataattcctgctaccaacaacagagcttcaccaggaagttgagttttcaagatgccttgttgctttgaagaagggagtgatgtcaattctcttgttacattctccctttagcaacctgagtaagagactctctgccactgggctgcaaaaaaataaattacttgaatctccccttggcccaggctgaggtactatcttgtcctatacacttctacttggtcactttgctttcttcgttaatggaacatacagtagcatgttaagagggatttcatgtttttgtttttttaaagttaaaaattacatgatgcagagattcaggttttcctttaaataaacaaaacagcccagtca

SEQ ID NO: 202384 - DNA, 2076 bp, Homo sapiens
  Payload ID: 19921
  Gene Name: zinc finger protein 410
  Uniprot ID: Q86VK4
  ENST ID: ENST00000442160
  CDS Start-End: 195-1745
aattcgggaccgactgacggccggccggcttcccggaactggaaggttacattgattacccacctagtacaacatcttacgggaagagcatagtatttcctagaggaatatgaacataacaggaaggtatcattggctctgaattaaatttgaacttgtcccctgaatagctacaggttttggaagctgaatcaatgttatcagatgagttagaatccaaaccagagctcctggtacagtttgttcagaatacgtccatcccattgggacaggggcttgtagaatcagaagctaaagatattacttgcttgtccctccttcccgtgactgaagcctcagaatgcagtcggctaatgttaccagaacctgttccatggagagaagaggatggaaagtcaggctgcagtgacttgaatgatactacaaatcattctaactcctccaaggaggtcccttcctcagctgttttgagaagccttcgggtgaatgtgggtccagacggagaggagacgagagctcagactgtacagaaatccccggagtttttgtccacttcagagtcttctagcttgttgcaagatctacagccaagtgatagcacttcttttattcttcttaacctaacaagagcaggtctgggctcttcagctgagcacttagtgtttgtacaggatgaggcagaagattcagggaatgatttcctctccagtgagagcacagacagtagcattccatggttcctccgggttcaggagttggcccatgacagtttgattgctgctactcgtgcacaactggcaaagaatgcaaaaaccagcagcaatggagaaaatgtccaccttggttctggtgatgggcagtcaaaagattctgggccccttcctcaagtggaaaagaagctcaagtgtacagttgaaggttgtgaccggacatttgtatggccagctcactttaaataccacctcaagactcatcgaaatgaccgctccttcatctgtcctgcagaaggttgtgggaaaagcttctatgtgctgcagaggctgaaggtgcacatgaggacccacaatggagagaagccctttatgtgccatgagtctggctgtggtaagcagtttactacagctggaaacctgaagaaccaccggcgcatccacacaggagagaaacctttcctttgtgaagcccaaggatgtggccgttcctttgctgagtattctagcctccgaaaacatctggtggttcactcaggagagaagcctcatcagtgccaagtctgtgggaagaccttctctcagagtggaagcaggaatgtgcatatgagaaagcatcacctgcagctgggagcagctgggagtcaagagcaggagcaaactgctgagccactaatgggcagtagtttgcttgaagaggcttcagtacccagtaaaaacctggtgtctatgaattcccagcccagccttggtggagagtccttgaacctaccaaataccaattctatcctgggagttgatgatgaggtgcttgctgaaggatccccacgttccctgtcttcagtgcctgatgtgacacatcacctggtgaccatgcagtcagggaggcaatcatatgaagtttctgtcttaactgcagtaaatccacaagagagtctcgctccgttgcccaggctggagtgcagtggtgcgttctcggctcactgcaacctctgcctcccaggttcaagcgattctcctgcctcagcctcctgagtagctgctactacagttactaaaccaaggagatttaactgaaagacggacatgagcgtgggtgctgactcctggaagagcaactctatctgatctcaaaatgcgtatactgggaacaggatgccttagcccacaacagaaccagaatgaatctttgaaggcacaagactctgcttttgccactcttcctctttcctggtatagaagatggatgtaggagagcttcttttctaactaccatctgatcagacaaggaatgaagcaatgactgtgggctgggaaactgtacctacctctcttcccactgcaaatttctgggatagaccaaaag

SEQ ID NO: 202385 - DNA, 1722 bp, Homo sapiens
  Payload ID: 19921
  Gene Name: zinc finger protein 410
  Uniprot ID: Q86VK4
  ENST ID: ENST00000540593
  CDS Start-End: 449-1666
aggagtcccgaaggccgagagtgagtgagtgagtgggagcggggcggctgcggctcctcctgtccggggcggagccctgcgtcgcgggcctggggaggccccgccagcacccttgacgtctgggtcccgagcagtgcggcagccacacgacactgaggcgagcgagtgggtgtgtgcgtggggggtcagccaaacttcctgtcccgcgctcgagctgcttccggcgggagccggaagacgctgtgtgtggacggaattcgggaccgactgacggccggccggcttcccggaactggaaggttacattgattacccacctagtacaacatcttacgggaagagcatagtatttcctagaggaatatgaacataacaggaaggtatcattggctctgaattaaatttgaacttgtcccctgaatagctacaggttttggaagctgaatcaatgttatcagatgagttagaatccaaaccagagctcctggtacagtttgttcagaatacgtccatcccattgggacaggggcttgtagaatcagaagctaaagatattacttgcttgtccctccttcccgtgactgaagcctcagaatgcagtcggctaatgttaccaggtctgggctcttcagctgagcacttagtgtttgtacaggatgaggcagaagattcagggaatgatttcctctccagtgagagcacagacagtagcattccatggttcctccgggttcaggagttggcccatgacagtttgattgctgctactcgtgcacaactggcaaagaatgcaaaaaccagcagcaatggagaaaatgtccaccttggttctggtgatgggcagtcaaaagattctgggccccttcctcaagtggaaaagaagctcaagtgtacagttgaaggttgtgaccggacatttgtatggccagctcactttaaataccacctcaagactcatcgaaatgaccgctccttcatctgtcctgcagaaggttgtgggaaaagcttctatgtgctgcagaggctgaaggtgcacatgaggacccacaatggagagaagccctttatgtgccatgagtctggctgtggtaagcagtttactacagctggaaacctgaagaaccaccggcgcatccacacaggagagaaacctttcctttgtgaagcccaaggatgtggccgttcctttgctgagtattctagcctccgaaaacatctggtggttcactcaggagagaagcctcatcagtgccaagtctgtgggaagaccttctctcagagtggaagcaggaatgtgcatatgagaaagcatcacctgcagctgggagcagctgggagtcaagagcaggagcaaactgctgagccactaatgggcagtagtttgcttgaagaggcttcagtacccagtaaaaacctggtgtctatgaattcccagcccagccttggtggagagtccttgaacctaccaaataccaattctatcctgggagttgatgatgaggtgcttgctgaaggatccccacgttccctgtcttcagtgcctgatgtgacacatcacctggtgaccatgcagtcagggaggcaatcatatgaagtttctgtcttaactgcagtaaatccacaagagttactaaaccaaggagatttaactgaaagacggacatgagcgtgggtgctgactcctggaagagcaactctatctgatctcaaaatgcgtatact

SEQ ID NO: 202386 - DNA, 587 bp, Homo sapiens
  Payload ID: 19921
  Gene Name: zinc finger protein 410
  ENST ID: ENST00000557495
  CDS Start-End: 207-587
gtgtgtggacggaattcgggaccgactgacggccggccggcttcccggaactggaaggttacattgattacccacctagtacaacatcttacgggaagagcatagtatttcctagaggaatatgaacataacaggaaggtatcattggctctgaattaaatttgaacttgtcccctgaatagctacaggttttggaagctgaatcaatgttatcagatgagttagaatccaaaccagagtgttgtcttttctccccccagctcctggtacagtttgttcagaatacgtccatcccattgggacaggggcttgtagaatcagaagctaaagatattacttgcttgtccctccttcccgtgactgaagcctcagaatgcagtcggctaatgttaccagatgatactacaaatcattctaactcctccaaggaggtcccttcctcagctgttttgagaagccttcgggtgaatgtgggtccagacggagaggagacgagagctcagactgtacagaaatccccggagtttttgtccacttcagagtcttctagcttgttgcaagatctacagccaagtgatagcacttct

SEQ ID NO: 202387 - DNA, 888 bp, Homo sapiens
  Payload ID: 19921
  Gene Name: zinc finger protein 410
  ENST ID: ENST00000554582
  CDS Start-End: 265-555
atctggattttggacattgttaggtttgagatgctgttggatatacatgtggagatacctagcaagcagttagaaatgaaggtttggagttcagaagagatgactagagaaaaatgttacattgattacccacctagtacaacatcttacgggaagagcatagtatttcctagaggaatatgaacataacaggaaggtatcattggctctgaattaaatttgaacttgtcccctgaatagctacaggttttggaagctgaatcaatgttatcagatgagttagaatccaaaccagagctcctggtacagtttgttcagaatacgtccatcccattgggacaggggcttgtagaatcagaagctaaagatattacttgcttgtccctccttcccgtgactgaagcctcagaatgcagtcggctaatgttaccaggaggtcccttcctcagctgttttgagaagccttcgggtgaatgtgggtccagacggagaggagacgagagctcagactgtacagaaatccccggagtttttgtccacttcagagtcttctagcttgttgcaagatctacagccaagtgatagcacttcttttattcttcttaacctaacaagagcaggtctgggctcttcagctgagcacttagtgtttgtacaggatgaggcagaagattcagggaatgatttcctctccagtgagagcacagacagtagcattccatggttcctccgggttcaggagttggcccatgacagtttgattgctgctactcgtgcacaactggcaaagaatgcaaaaaccagcagcaatggagaaaatgtccaccttggttctggtgatgggcagtcaaaagattctgggccccttcctcaagtggaaaagaagct

SEQ ID NO: 202388 - DNA, 1232 bp, Homo sapiens
  Payload ID: 19921
  Gene Name: zinc finger protein 410
  ENST ID: ENST00000556179
  CDS Start-End: 903-1232
agaggtttttgtattttgcattcccagcaaaatacaatcagcaatgatgattgctgtaccatgtgtttgtcaattgtgaatttgttcctagcatttagaaattgggagattctacttaaaaatccttatttccagtgtcttaaaaaaaaatcagagaatctgccttaatctacccatggcaacagttggctagagctgaataacagctgccccttttctaggtactctctaggttactgcagcccccacttggccattttacttacttttgctacctatcagtctcctatagacatgagtttttgacccctgctctaagtatggttttctgggtaggtagaatggagacggagagtttgggacttgaagacatagaggacaatttagattattatgttgtaagagccaccagtgtgaatgttgatgaccctaaagagggtggcagggaatatgacaaggggatattaggaacacaggattgaaatccttgaggaaagcacatgtcctagaggtccatggaagactaactgaaaaagaaggcatattttttgtggttgccatggtcctataccaaagaggttttgtgaaggcagcattacagaaggtctggaaaggaccagcagctgggagcagggagtgtgctaaagccctcctggtgtactcttcctgccttcccccatatactgaagtttgagaggctgggaaggtgcggaatgggaaaaggagcagctgcttatgttcagtttaacattctctgggtttctccatctaggtcttgagttcattctcttcctgtccttttggcttccttgtttaacctggtccctgtttcaggagagaagcctcatcagtgccaagtctgtgggaagaccttctctcagagtggaagcaggaatgtgcatatgagaaagcatcacctgcagctgggagcagctgggagtcaagagcaggagcaaactgctgagccactaatgggcagtagtttgcttgaagaggcttcagtacccagtaaaaacctggtgtctatgaattcccagcccagccttggtggagagtccttgaacctaccaaataccaattctatcctgggagttgatgatgaggtgcttgctgaaggatccccacgttccctgtcttcagtgcctgatgtgacacatcacctggtgaccatgcagtcagggaggcaatcatatgaagtttctgtcttaactgcagtaaatccacaagaggta

SEQ ID NO: 202389 - DNA, 1311 bp, Homo sapiens
  Payload ID: 19921
  Gene Name: zinc finger protein 410
  ENST ID: ENST00000556797
  CDS Start-End: 635-1138
agagatacattctgagaaatatgatggtagttgatatcattattatgcgaacatggtagagtatacttacacaaacctgtatggtttagcctgctacactctaggctgtatggtataccttattgcccctaggctgcaaacctatacagcatgttactgtactgaatactgtaggcagttgaagcacagtggtaaacattgtgtatctaaacatatctaaacgtggaaaaagtacaataaaaataggatattacaatctcacaggaccatcatcctatatgtggtctgttaactgaaatgtcgttttgcagcacatgactttatataaatcagctgttctctagaacagagaacttgataaaataactttagatattatgttgtttagtttttgtttgaatatggatgagactagtgaacagtcttaatattatcttttggtaaattcaaaggtttagatacatttctaacaactcgtatttctcagtgttgtcttttctccccccagctcctggtacagtttgttcagaatacgtccatcccattgggacaggggcttgtagaatcagaagctaaagatattacttgcttgtccctccttcccgtgactgaagcctcagaatgcagtcggctaatgttaccagatgatactacaaatcattctaactcctccaaggaggtcccttcctcagctgttttgagaagccttcgggtgaatgtgggtccagacggagaggagacgagagctcagactgtacagaaatccccggagtttttgtccacttcagagtcttctagcttgttgcaagatctacagccaagtgatagcacttcttttattcttcttaacctaacaagagcaggtctgggctcttcagctgagcacttagtgtttgtacaggatgaggcagaagattcagggaatgatttcctctccagtgagagcacagacagtagcattccatggttcctccgggttcaggagttggcccatgacagtttgattgctgctactcgtgcacaactggcaaagaatgcaaaaaccagcagcaatggtgaggcccgtcggcattttccttgccactattctgtgcaaagagattttggtaatgcagtggctggtttgagttgtatataatttaaattattctattgatgagagcagaaggctagaaatctgtaaattgtttaaattttattttctataaaataacttggtcatgccagatttgtgttcaaaaccaactagtattctgaattctcaactttaaataatgtacagagccccttttaaagaaaaaataatataca

SEQ ID NO: 202390 - DNA, 537 bp, Homo sapiens
  Payload ID: 19921
  Gene Name: zinc finger protein 410
  ENST ID: ENST00000554797
  CDS Start-End: 327-537
ttttatgggttttgatgcctgttgagcttgttgtattttaaaagaagtgtttcggtttgaattctttatttgcttgcttgttgtgattttttttgtatatgtaaagaagtgtctttatgtacctgtgttttcccactgctcttaatgccccctctctcttttttacccctattctaggttacattgattacccacctagtacaacatcttacgggaagagcatagtatttcctagaggaatatgaacataacaggaaggtatcattggctctgaattaaatttgaacttgtcccctgaatagctacaggttttggaagctgaatcaatgttatcagatgagttagaatccaaaccagagctcctggtacagtttgttcagaatacgtccatcccattgggacaggggcttgtagaatcagaagctaaagatattacttgcttgtccctccttcccgtgactgaagcctcagaatgcagtcggctaatgttaccagatgatactacaaatcattctaactcctccaaggaggtccctt

SEQ ID NO: 202391 - DNA, 841 bp, Homo sapiens
  Payload ID: 19921
  Gene Name: zinc finger protein 410
  ENST ID: ENST00000556160
  CDS Start-End: 618-841
tggcgggcccgggagcggccagtctgaagccctgcggctttggcccttcccctcgcgggtttttaggggcgatgttcttgctcctttgcttggttttgggggtagggatataggaacagactgtcctgagaaagccagagtcagcgagtccccggggcgggggctcttggactgcacccgcagccggggcctgcctacggaccttggggccttatttctgaggcctttgtggtgtggggtagaggatgccaggaggccttgccctgaatgtttcagtccagagctaccctctcctttcataccacttactttctgggtttggaaaagggacagctgcctactcggctgggctgggtcgcccgtttctcctttgcctgtttgagatgctgttggatatacatgtggagatacctagcaagcagttagaaatgaaggtttggagttcagaagagatgactagagaaaaatgttacattgattacccacctagtacaacatcttacgggaagagcatagtatttcctagaggaatatgaacataacaggaaggtatcattggctctgaattaaatttgaacttgtcccctgaatagctacaggttttggaagctgaatcaatgttatcagatgagttagaatccaaaccagagctcctggtacagtttgttcagaatacgtccatcccattgggacaggggcttgtagaatcagaagctaaagatattacttgcttgtccctccttcccgtgactgaagcctcagaatgcagtcggctaatgttaccagatgatactacaaatcattctaactcctccaaggaggtcccttcctcagctgtttt

SEQ ID NO: 202392 - DNA, 663 bp, Homo sapiens
  Payload ID: 19921
  Gene Name: zinc finger protein 410
  ENST ID: ENST00000557214
  CDS Start-End: 1-508
gtgccaagtctgtgggaagaccttctctcagagtggaagcaggaatgtgcatatgagaaagcatcacctgcagctgggagcagctgggagtcaagagcaggagcaaactgctgagccactaatgggcagtagtttgcttgaagaggcttcagtacccagtaaaaacctggtgtctatgaattcccagcccagccttggtggagagtccttgaacctaccaaataccaattctatcctgggagttgatgatgaggtgcttgctgaaggatccccacgttccctgtcttcagtgcctgatgtgacacatcacctggtgaccatgcagtcagggaggcaatcatatgaagtttctgtcttaactgcagtaaatccacaagaggtggagtcttgctatgttgcccaggctggagtgcagtggcaccatctcggctcactgcaacctctacctcccgaattcaagcggttcttctgcctcagcctcctgagtagctgggaccacagttactaaaccaaggagatttaactgaaagacggacatgagcgtgggtgctgactcctggaagagcaactctatctgatctcaaaatgcgtatactgggaacaggatgccttagcccacaacagaaccagaatgaatctttgaaggcacaagactctgctttt

SEQ ID NO: 202393 - DNA, 769 bp, Homo sapiens
  Payload ID: 19921
  Gene Name: zinc finger protein 410
  ENST ID: ENST00000554316
  CDS Start-End: 488-769
atgttgcccatgctagtctcggaacacctgggctcaagcagtcctcccaccttggcttcccaaagtgcttgggattataggtgtgagcaccatgcctggccaagtttctgctgttaagtgcatacaaagataactggggaagatgaagatagatacctgattaatgatcactaggagtaaaatataggagctttattgtttgagcctaagtatctgagtagggtctttccctggattacaaatatgtgactctgttacaggagaaaatgtccaccttggttctggtgatgggcagtcaaaagattctgggccccttcctcaagtggaaaagaagctcaagtgtacagttgaaggttgtgaccggacatttgtatggccagctcactttaaataccacctcaagactcatcgaaatgaccgctccttcatctgtcctgcagaaggttgtgggaaaagcttctatgtgctgcagaggctgaaggtgcacatgaggacccacaatggagagaagccctttatgtgccatgagtctggctgtggtaagcagtttactacagctggaaacctgaagaaccaccggcgcatccacacaggagagaaacctttcctttgtgaagcccaaggatgtggccgttcctttgctgagtattctagcctccgaaaacatctggtggttcactcaggagagaagcctcatcagtgccaagtctgtgggaagaccttctctcagagtggaagcaggaatgtgcatatgagaaagcatcacctg

SEQ ID NO: 202394 - DNA, 2601 bp, Homo sapiens
  Payload ID: 19921
  Gene Name: zinc finger protein 410
  Uniprot ID: Q86VK4
  ENST ID: ENST00000555044
  CDS Start-End: 195-1631
aattcgggaccgactgacggccggccggcttcccggaactggaaggttacattgattacccacctagtacaacatcttacgggaagagcatagtatttcctagaggaatatgaacataacaggaaggtatcattggctctgaattaaatttgaacttgtcccctgaatagctacaggttttggaagctgaatcaatgttatcagatgagttagaatccaaaccagagctcctggtacagtttgttcagaatacgtccatcccattgggacaggggcttgtagaatcagaagctaaagatattacttgcttgtccctccttcccgtgactgaagcctcagaatgcagtcggctaatgttaccagatgatactacaaatcattctaactcctccaaggaggtcccttcctcagctgttttgagaagccttcgggtgaatgtgggtccagacggagaggagacgagagctcagactgtacagaaatccccggagtttttgtccacttcagagtcttctagcttgttgcaagatctacagccaagtgatagcacttcttttattcttcttaacctaacaagagcaggtctgggctcttcagctgagcacttagtgtttgtacaggatgaggcagaagattcagggaatgatttcctctccagtgagagcacagacagtagcattccatggttcctccgggttcaggagttggcccatgacagtttgattgctgctactcgtgcacaactggcaaagaatgcaaaaaccagcagcaatggagaaaatgtccaccttggttctggtgatgggcagtcaaaagattctgggccccttcctcaagtggaaaagaagctcaagtgtacagttgaaggttgtgaccggacatttgtatggccagctcactttaaataccacctcaagactcatcgaaatgaccgctccttcatctgtcctgcagaaggttgtgggaaaagcttctatgtgctgcagaggctgaaggtgcacatgaggacccacaatggagagaagccctttatgtgccatgagtctggctgtggtaagcagtttactacagctggaaacctgaagaaccaccggcgcatccacacaggagagaaacctttcctttgtgaagcccaaggatgtggccgttcctttgctgagtattctagcctccgaaaacatctggtggttcactcaggagagaagcctcatcagtgccaagtctgtgggaagaccttctctcagagtggaagcaggaatgtgcatatgagaaagcatcacctgcagctgggagcagctgggagtcaagagcaggagcaaactgctgagccactaatgggcagtagtttgcttgaagaggcttcagtacccagtaaaaacctggtgtctatgaattcccagcccagccttggtggagagtccttgaacctaccaaataccaattctatcctgggagttgatgatgaggtgcttgctgaaggatccccacgttccctgtcttcagtgcctgatgtgacacatcacctggtgaccatgcagtcagggaggcaatcatatgaagtttctgtcttaactgcagtaaatccacaagagttactaaaccaaggagatttaactgaaagacggacatgagcgtgggtgctgactcctggaagagcaactctatctgatctcaaaatgcgtatactgggaacaggatgccttagcccacaacagaaccagaatgaatctttgaaggcacaagactctgcttttgccactcttcctctttcctggtatagaagatggatgtaggagagcttcttttctaactaccatctgatcagacaaggaatgaagcaatgactgtgggctgggaaactgtacctacctctcttcccactgcaaatttctgggatagaccaaaagtgaatttgattatgtgttggctgaagttcttcattctgactgttgaggggaggttttcctttgaagagttttcatcccagactcagctgtcttttcacatggatgaaataattcctgctaccaacaacagagcttcaccaggaagttgagttttcaagatgccttgttgctttgaagaagggagtgatgtcaattctcttgttacattctccctttagcaacctgagtaagagactctctgccactgggctgcaaaaaaataaattacttgaatctccccttggcccaggctgaggtactatcttgtcctatacacttctacttggtcactttgctttcttcgttaatggaacatacagtagcatgttaagagggatttcatgtttttgtttttttaaagttaaaaattacatgatgcagagattcaggttttcctttaaataaacaaaacagcccagtcagttctttggctcttgttttatacaaaatttgttttcttagagattaagaatttaatctttccctttaaaatagtgtattgatttacccttaggattccataccagtaaaactgaaccgaggagtcttaggaaacaacaagaacatcttcatttcttaagcccaggtgatagttactctgtcaccaccaaaaaagacgcatctgagaaaatggcaataaaaacagatacttctg

SEQ ID NO: 202395 - DNA, 567 bp, Homo sapiens
  Payload ID: 19921
  Gene Name: zinc finger protein 410
  ENST ID: ENST00000555730
  CDS Start-End: 309-567
gtctgggtcccgagcagtgcggcagccacacgacactgaggcgagcgagtgggtgtgtgcgtggggggtcagccaaacttcctgtcccgcgctcgagctgcttccggcgggagccggaagacgctgtgtgtggacggaattcgggaccgactgacggccggccggcttcccggaactggaagctcctggtacagtttgttcagaatacgtccatcccattgggacaggggcttgtagaatcagaagctaaagatattacttgcttgtccctccttcccgtgactgaagcctcagaatgcagtcggctaatgttaccagatgatactacaaatcattctaactcctccaaggaggtcccttcctcagctgttttgagaagccttcgggtgaatgtgggtccagacggagaggagacgagagctcagactgtacagaaatccccggagtttttgtccacttcagagtcttctagcttgttgcaagatctacagccaagtgatagcacttcttttattcttcttaacctaacaagagcaggtctgggctcttcagctgagcacttagtgt

SEQ ID NO: 202396 - DNA, 1961 bp, Homo sapiens
  Payload ID: 19921
  Gene Name: zinc finger protein 410
  ENST ID: ENST00000556396
  CDS Start-End: 258-548
aaacttcctgtcccgcgctcgagctgcttccggcgggagccggaagacgctgtgtgtggacggaattcgggaccgactgacggccggccggcttcccggaactggaaggttacattgattacccacctagtacaacatcttacgggaagagcatagtatttcctagaggaatatgaacataacaggaaggtatcattggctctgaattaaatttgaacttgtcccctgaatagctacaggttttggaagctgaatcaatgttatcagatgagttagaatccaaaccagagctcctggtacagtttgttcagaatacgtccatcccattgggacaggggcttgtagaatcagaagctaaagatattacttgcttgtccctccttcccgtgactgaagcctcagaatgcagtcggctaatgttaccaggaggtcccttcctcagctgttttgagaagccttcgggtgaatgtgggtccagacggagaggagacgagagctcagactgtacagaaatccccggagtttttgtccacttcagagtcttctagcttgttgcaagatctacagccaagtgatagcacttcttttattcttcttaacctaacaagagcaggtctgggctcttcagctgagcacttagtgtttgtacaggatgaggcagaagattcagggaatgatttcctctccagtgagagcacagacagtagcattccatggttcctccgggttcaggagttggcccatgacagtttgattgctgctactcgtgcacaactggcaaagaatgcaaaaaccagcagcaatggagaaaatgtccaccttggttctggtgatgggcagtcaaaagattctgggccccttcctcaagtggaaaagaagctcaagtgtacagttgaaggttgtgaccggacatttgtatggccagctcactttaaataccacctcaagactcatcgaaatgaccgctccttcatctgtcctgcagaaggttgtgggaaaagcttctatgtgctgcagaggctgaaggtgcacatgaggacccacaatggagagaagccctttatgtgccatgagtctggctgtggtaagcagtttactacagctggaaacctgaagaaccaccggcgcatccacacaggagagaaacctttcctttgtgaagcccaaggatgtggccgttcctttgctgagtattctagcctccgaaaacatctggtggttcactcaggagagaagcctcatcagtgccaagtctgtgggaagaccttctctcagagtggaagcaggaatgtgcatatgagaaagcatcacctgcagctgggagcagctgggagtcaagagcaggagcaaactgctgagccactaatgggcagtagtttgcttgaagaggcttcagtacccagtaaaaacctggtgtctatgaattcccagcccagccttggtggagagtccttgaacctaccaaataccaattctatcctgggagttgatgatgaggtgcttgctgaaggatccccacgttccctgtcttcagtgcctgatgtgacacatcacctggtgaccatgcagtcagggaggcaatcatatgaagtttctgtcttaactgcagtaaatccacaagagttactaaaccaaggagatttaactgaaagacggacatgagcgtgggtgctgactcctggaagagcaactctatctgatctcaaaatgcgtatactgggaacaggatgccttagcccacaacagaaccagaatgaatctttgaaggcacaagactctgcttttgccactcttcctctttcctggtatagaagatggatgtaggagagcttcttttctaactaccatctgatcagacaaggaatgaagcaatgactgtgggctgggaaactgtacctacctctcttcccactgcaaatttctgggatagaccaaaagtgaatttgattatgtgttggctg

SEQ ID NO: 202397 - DNA, 595 bp, Homo sapiens
  Payload ID: 19921
  Gene Name: zinc finger protein 410
  ENST ID: ENST00000556659
  CDS Start-End: 219-595
gtgtgtggacggaattcgggaccgactgacggccggccggcttcccggaactggaaggtgagctccgaggttacattgattacccacctagtacaacatcttacgggaagagcatagtatttcctagaggaatatgaacataacaggaaggtatcattggctctgaattaaatttgaacttgtcccctgaatagctacaggttttggaagctgaatcaatgttatcagatgagttagaatccaaaccagagctcctggtacagtttgttcagaatacgtccatcccattgggacaggggcttgtagaatcagaagctaaagatattacttgcttgtccctccttcccgtgactgaagcctcagaatgcagtcggctaatgttaccagatgatactacaaatcattctaactcctccaaggaggtcccttcctcagctgttttgagaagccttcgggtgaatgtgggtccagacggagaggagacgagagctcagactgtacagaaatccccggagtttttgtccacttcagagtcttctagcttgttgcaagatctacagccaagtgatagcacttcttttattcttcttaacct

SEQ ID NO: 202398 - DNA, 571 bp, Homo sapiens
  Payload ID: 19921
  Gene Name: zinc finger protein 410
  ENST ID: ENST00000557363
  CDS Start-End: 184-571
gtgtgtggacggaattcgggaccgactgacggccggccggcttcccggaactggaagctcctggtacagtttgttcagaatacgtccatcccattgggacaggggcttgtagaatcagaagctaaagatattacttgcttgtccctccttcccgtgactgaagcctcagaatgcagtcggctaatgttaccagatgatactacaaatcattctaactcctccaaggaggtcccttcctcagctgttttgagaagccttcgggtgaatgtgggtccagacggagaggagacgagagctcagactgtacagaaatccccggagtttttgtccacttcagagtcttctagcttgttgcaagatctacagccaagtgatagcacttcttttattcttcttaacctaacaagagcaggtctgggctcttcagctgagcacttagtgtttgtacaggatgaggcagaagattcagggaatgatttcctctccagtgagagcacagacagtagcattccatggttcctccgggttcaggagttggcccatgacagtttgattgctgctactcgtgcac

SEQ ID NO: 202399 - DNA, 1551 bp, Homo sapiens
  Payload ID: 19921
  Gene Name: zinc finger protein 410
  Uniprot ID: Q86VK4
  ENST ID: ENST00000615736
  CDS Start-End: 1-1551
atgttatcagatgagttagaatccaaaccagagctcctggtacagtttgttcagaatacgtccatcccattgggacaggggcttgtagaatcagaagctaaagatattacttgcttgtccctccttcccgtgactgaagcctcagaatgcagtcggctaatgttaccagaacctgttccatggagagaagaggatggaaagtcaggctgcagtgacttgaatgatactacaaatcattctaactcctccaaggaggtcccttcctcagctgttttgagaagccttcgggtgaatgtgggtccagacggagaggagacgagagctcagactgtacagaaatccccggagtttttgtccacttcagagtcttctagcttgttgcaagatctacagccaagtgatagcacttcttttattcttcttaacctaacaagagcaggtctgggctcttcagctgagcacttagtgtttgtacaggatgaggcagaagattcagggaatgatttcctctccagtgagagcacagacagtagcattccatggttcctccgggttcaggagttggcccatgacagtttgattgctgctactcgtgcacaactggcaaagaatgcaaaaaccagcagcaatggagaaaatgtccaccttggttctggtgatgggcagtcaaaagattctgggccccttcctcaagtggaaaagaagctcaagtgtacagttgaaggttgtgaccggacatttgtatggccagctcactttaaataccacctcaagactcatcgaaatgaccgctccttcatctgtcctgcagaaggttgtgggaaaagcttctatgtgctgcagaggctgaaggtgcacatgaggacccacaatggagagaagccctttatgtgccatgagtctggctgtggtaagcagtttactacagctggaaacctgaagaaccaccggcgcatccacacaggagagaaacctttcctttgtgaagcccaaggatgtggccgttcctttgctgagtattctagcctccgaaaacatctggtggttcactcaggagagaagcctcatcagtgccaagtctgtgggaagaccttctctcagagtggaagcaggaatgtgcatatgagaaagcatcacctgcagctgggagcagctgggagtcaagagcaggagcaaactgctgagccactaatgggcagtagtttgcttgaagaggcttcagtacccagtaaaaacctggtgtctatgaattcccagcccagccttggtggagagtccttgaacctaccaaataccaattctatcctgggagttgatgatgaggtgcttgctgaaggatccccacgttccctgtcttcagtgcctgatgtgacacatcacctggtgaccatgcagtcagggaggcaatcatatgaagtttctgtcttaactgcagtaaatccacaagagagtctcgctccgttgcccaggctggagtgcagtggtgcgttctcggctcactgcaacctctgcctcccaggttcaagcgattctcctgcctcagcctcctga

SEQ ID NO: 202400 - DNA, 1178 bp, Homo sapiens
  Payload ID: 19922
  Gene Name: zinc finger protein 414
  Uniprot ID: Q96IQ9
  ENST ID: ENST00000255616
  CDS Start-End: 103-1041
atggcgctgacgtgagcgcgaactcgcactgcccagagggtggccgccgcctaagctgcagccgccggagccgcagaaacaagaggccgagccgtgtcgaagatggaggagaaaccctcagggcccatcccagacatgctggccactgcagagcccagctccagtgagaccgacaaggaggtgttgtccccggctgtgccagctgcagccccttcctcctccatgtcggaggagccaggccctgagcaggcagccacaccgccagtgtgggaacgtggaggggctggagggatgcagcagggctcctccccagccccagacagctgccagcctggccccggacccagccctggcctgaccagcatagtctccgggaccagcgaggacctgcggcctcccagacgacgcccacctccagggaagcaaatcccttgctccagccctggctgctgcctcagttttcccagcgtccgtgacctggcacagcatctgcgaacccactgcccgcccacacagtccctggaaggcaagctcttccgctgctcagccctgagctgcaccgagaccttccccagcatgcaggagctggtggctcacagcaaactgcactacaaacccaatcgctacttcaagtgtgagaactgcctcctgcgcttccgcacgcaccgctcgctcttcaagcacctgcatgtttgcgcggagcatgcgcagagcccagccccgccgccacccccggccctggaccgagagccgcccgcgccggagcgccccccggaggttgaccccgcatcagcgccgggcctgccgttcccgctgctggaacccttcacgacccccgcccctgcccccaccggaccgttcctgccctacttgaaccctgcgccctttggcctaagccccccgcgcctgcgccccttcctggccgctgcacccgggccgccggcttccagcgccgccgtctggaaaaagagccaaggtgctggcagcagcccccgaagaccccagggcggctccgacgcgccctcaggtgcgtgcaggtgaccaccagggaggggtggaggggctttctttcctgcgccctgcggggtctggtggataccaggaggcagcagtgctcatccccttcccagggggcacaaatgccaccgtcccgaaatacaggatttttgccttaaaaa

SEQ ID NO: 202401 - DNA, 2300 bp, Homo sapiens
  Payload ID: 19922
  Gene Name: zinc finger protein 414
  Uniprot ID: Q96IQ9
  ENST ID: ENST00000393927
  CDS Start-End: 115-1287
gagaggtggaaaatggcgctgacgtgagcgcgaactcgcactgcccagagggtggccgccgcctaagctgcagccgccggagccgcagaaacaagaggccgagccgtgtcgaagatggaggagaaaccctcagggcccatcccagacatgctggccactgcagagcccagctccagtgagaccgacaaggaggtgttgtccccggctgtgccagctgcagccccttcctcctccatgtcggaggagccaggccctgagcaggcagccacaccgccagtgtgggaacgtggaggggctggagggatgcagcagggctcctccccagccccagacagctgccagcctggccccggacccagccctggcctgaccagcatagtctccgggaccagcgaggacctgcggcctcccagacgacgcccacctccagggaagcaaatcccttgctccagccctggctgctgcctcagttttcccagcgtccgtgacctggcacagcatctgcgaacccactgcccgcccacacagtccctggaaggcaagctcttccgctgctcagccctgagctgcaccgagaccttccccagcatgcaggagctggtggctcacagcaaactgcactacaaacccaatcgctacttcaagtgtgagaactgcctcctgcgcttccgcacgcaccgctcgctcttcaagcacctgcatgtttgcgcggagcatgcgcagagcccagccccgccgccacccccggccctggaccgagagccgcccgcgccggagcgccccccggaggttgaccccgcatcagcgccgggcctgccgttcccgctgctggaacccttcacgacccccgcccctgcccccaccggaccgttcctgccctacttgaaccctgcgccctttggcctaagccccccgcgcctgcgccccttcctggccgctgcacccgggccgccggcttccagcgccgccgtctggaaaaagagccaaggtgctggcagcagcccccgaagaccccagggcggctccgacgcgccctcagggcacgcggccccgagccgcatcgtgtgggagcacacacgcggccgctactcgtgcatgcagtgcgccttctccacggcctcgcggcccgccatgaccctgcacctggaggaccaccgccccggcgcccccgcggcccccgcggccgggccgccgcgccccgacgcccccgcggatccggccccgcttgcacccaaggtgtcgccgctgctgtcagagggggagcttccagtgttctcgcagctctgaatcccgccgctttgggggtgggccatgggatgtgggtagttttgtcatttggagggggctgcagggaaggggggctggggtggacaataaagaaggcgccatgagccagcctatgctgtgttcccatcccttgtccatccaaagcatagtgggctcgagcccagcagtcatggattgatcacatcttgggaggaccacctgggtccacaggtgcaggcctcacagcccacctgtgtcctgtcttcccatcaccccaatcctgggacccaggtccccacctccagctgtggttgaggtccccagtacccactgtggcagcgttctcccttgtccagaaaccaaatgggatggggactctccagttttctttttttttttttttctttttttttttttcttttttgagacagtcttgctctgtctcccaggccggagtgcagtggcacaatctcctctcactgcaagctccacctcctgggttcacgccattctcctgcttcagcctcccaagtagctgggattacaggtgcccaccactatgcccggctaattttttgtatttttaatagagatggagtttcaccgcgttagccaggatggtctcgatctcctgacctcatgatccgcccgccttagactcccaaagtgctggaattacaggcgtgagccaccacgcccggtctccagttttcttttaagaagtcccggccgggcacagtggctcacgcctgtaatcccagcactttgggaggctggggcaggtggagcacctgaggtcaggagttcgagaccagcctgacttacatggtaaaaccccatctctactaaacacaaaaaattagccaggtgtggtggcgcacacctgtagtcccagctacttgggaggctgaggcaggagaatcacttgaacctgggaggtggaagttgcagtgagctgagattgtgctattgcactccagtctgggcaatacgagtggaactccatctcaaaaataaagaaaattaaaaagcaa

SEQ ID NO: 202402 - DNA, 579 bp, Homo sapiens
  Payload ID: 19922
  Gene Name: zinc finger protein 414
  ENST ID: ENST00000596772
  CDS Start-End: 1-361
aagccccccgcgcctgcgccccttcctggccgctgcacccgggccgccggcttccagcgccgccgtctggaaaaagagccaaggtgctggcagcagcccccgaagaccccagggcggctccgacgcgccctcagggcacgcggccccgagccgcatcgtgtgggagcacacacgcggccgctactcgtgcatgcagtgcgccttctccacggcctcgcggcccgccatgaccctgcacctggaggaccaccgccccggcgcccccgcggcccccgcggccgggccgccgcgccccgacgcccccgcgggtaaggccgaggaatgcgcgggtggagaggggggcgggggcccaaggcgctgaggctcaggcgcccccctcctctgccccacccagatccggccccgcttgcacccaaggtgtcgccgctgctgtcagagggggagcttccagtgttctcgcagctctgaatcccgccgctttgggggtgggccatgggatgtgggtagttttgtcatttggagggggctgcagggaaggggggctggggtggacaataaagaaggcgccatgagccagcc

SEQ ID NO: 202403 - DNA, 462 bp, Homo sapiens
  Payload ID: 19922
  Gene Name: zinc finger protein 414
  ENST ID: ENST00000594748
  CDS Start-End: 1-462
tgcactacaaacccaatcgctacttcaagtgtgagaactgcctcctgcgcttccgcacgcaccgctcgctcttcaagcacctgcatgtttgcgcggagcatgcgcagagcccagccccgccgccacccccggccctggaccgagagccgcccgcgccggagcgccccccggaggttgaccccgcatcagcgccgggcctgccgttcccgctgctggaacccttcacgacccccgcccctgcccccaccggaccgttcctgccctacttgaaccctgcgccctttggcctaagccccccgcgcctgcgccccttcctggccgctgcacccgggccgccggcttccagcgccgccgtctggaaaaagagccaaggtgctggcagcagcccccgaagaccccagggcggctccgacgcgccctcaggtgcgtgcagggcacgcggccccgagccgcatcgtgtgg

SEQ ID NO: 202404 - DNA, 418 bp, Homo sapiens
  Payload ID: 19922
  Gene Name: zinc finger protein 414
  ENST ID: ENST00000599379
  CDS Start-End: 108-245
ggaaaatggcgctgacgtgagcgcgaactcgcactgcccagagggtggccgccgcctaagctgcagccgccggagccgcagaaacaagaggccgagccgtgtcgaagatgggaagcaaatcccttgctccagccctggctgctgcctcagttttcccagcgtccgtgacctggcacagcatctgcgaacccactgcccgcccacacagtccctggaaggcaagctcttccgctgctcagccctgagctgcaccgagaccttccccagcatgcaggagctggtggctcacagcaaactgcactacaaacccaatcgctacttcaagtgtgagaactgcctcctgcgcttccgcacgcaccgctcgctcttcaagcacctgcatgtttgcgcggagcatgcgcagagcccagccccgccg

SEQ ID NO: 202405 - DNA, 512 bp, Homo sapiens
  Payload ID: 19922
  Gene Name: zinc finger protein 414
  ENST ID: ENST00000593661
  CDS Start-End: 1-512
atcgctacttcaagttcccacccgaagtggtcaggaagggtcgctgccacagttgtacaggagcggggaggtgtgagaactgcctcctgcgcttccgcacgcaccgctcgctcttcaagcacctgcatgtttgcgcggagcatgcgcagagcccagccccgccgccacccccggccctggaccgagagccgcccgcgccggagcgccccccggaggttgaccccgcatcagcgccgggcctgccgttcccgctgctggaacccttcacgacccccgcccctgcccccaccggaccgttcctgccctacttgaaccctgcgccctttggcctaagccccccgcgcctgcgccccttcctggccgctgcacccgggccgccggcttccagcgccgccgtctggaaaaagagccaaggtgctggcagcagcccccgaagaccccagggcggctccgacgcgccctcagggcacgcggccccgagccgcatcgtgtgggagcacacacgcggccgc

SEQ ID NO: 202406 - DNA, 2270 bp, Homo sapiens
  Payload ID: 19923
  Gene Name: zinc finger protein 415
  Uniprot ID: Q09FC8
  ENST ID: ENST00000243643
  CDS Start-End: 105-1772
aaacggatcgcgttgggtgaaggtgacggcgtcgagccattgacttccaaagactcctggcacatgaggaagaaacccagaagaggagagcaaaggagtcaggaatggcttttactcagttgacattcagggacgtggccatcgaattctctcaagatgagtggaaatgcctgaactctacacagaggactttatacagggatgtgatgttggagaactacaggaacctggtctccctggatctgtctcgtaactgtgtaatcaaggaactagcaccacaacaggaaggtaacccaggagaagtattccacacagtgacattggaacaacatgaaaaacatgacattgaagagttttgcttcagggaaatcaagaaaaaaatacacgactttgactgtcagtggagagatgatgaaagaaattgcaacaaagtgactacggccccaaaagaaaatcttacttgtaggagagaccaacgcgatagaagaggtataggaaacaagtctattaaacatcagcttggattaagctttctaccacatccccatgaactgcagcagtttcaagctgaagggaaaatttatgaatgtaaccatgttgagaagtctgtcaaccatggttcctcagtttcaccaccccaaataatttcttctaccatcaaaacccatgtttctaataaatatgggactgatttcatctgttcttcattactcacacaagaacagaaatcatgcattagggaaaaaccttacagatatattgagtgcgacaaagccttgaatcatggctcacacatgactgtacgtcaggtaagtcattctggagagaaaggatataaatgtgatctgtgtggcaaggtctttagtcaaaaatcaaaccttgcgcgtcattggagagttcatactggagagaaaccatacaaatgtaatgaatgtgacagaagtttcagtcgcaactcatgccttgcactacatcggagagttcacactggagagaaaccttacaaatgttatgagtgtgacaaggtcttcagtcgaaattcatgccttgcactacatcagaaaactcatattggagagaaaccttacacatgtaaagagtgtggcaaagcctttagtgtgaggtcaacacttaccaaccatcaggtaattcatagtggcaagaaaccttacaaatgcaatgaatgtggcaaggtgttcagtcagacttcaagccttgcaactcatcagagaattcacactggggagaaaccatacaagtgtaatgaatgtggtaaagtcttcagtcagacttcaagccttgcaaggcattggagaattcatactggagagaaaccttacaaatgcaatgaatgtggtaaggttttcagttacaattcacaccttgcgagtcatcggagagttcatactggagagaaaccttacaagtgtaatgagtgtgggaaagcctttagtgtgcattcgaacttaactacccatcaggtcatccatactggagagaagccttacaaatgtaatcaatgtggcaaaggcttcagtgtgcattcaagcctaactacccatcaggtcatccatactggagaaaaaccttacaaatgtaatgagtgtggcaaatcctttagtgtgcgcccaaacctcactagacatcagataatccatactggaaagaaaccttacaaatgtagtgattgtgggaagtcctttagtgtgcgcccaaacctcttcagacatcaaattatccatactaaggagaaaccttataaaagaaattaatatggcaaggtcttcagtcaaagtttaaatcctgtgagtcatcaaagaatttatatcagagagaaaccatacaagtataataaatgtggcaaggttttcagtcacaattcactcctacacagcatcagagaatttcattcttgagagaatccttacgagtacagcaaacccttcatcacaagttcaagcattcattgacatcagagtccatgctaaagagaaatcatatacacctaactgtgtggcagaggcttcatttaggtctcacaactcactagacatcaaaatgtgtaaacatctttgtatattttgtgcatgttgaagctattaaccaaggatcaaaactgtaacacatccaaggatttatgtgaggaataattcagtctagttgtgctgataaacttttcatattacacattgtagaacaaatgcaagcccaaatatgttaaaactcacacaacatgatatatattaaaggttgcaggatgtttgaagtca

SEQ ID NO: 202407 - DNA, 2402 bp, Homo sapiens
  Payload ID: 19923
  Gene Name: zinc finger protein 415
  Uniprot ID: Q09FC8
  ENST ID: ENST00000421033
  CDS Start-End: 238-1905
gcatgcgcagtttcctacaggcccggaaacggatcgcgttgggtgaaggtgacggcgtcgagcgtgagtgaccctctgtgtagattaaacctgcgctccctgtttcccatttccacagccgatgtccagggtcgatacggcccttaaaatccccgtacactccaccccagcattgacttccaaagactcctggcacatgaggaagaaacccagaagaggagagcaaaggagtcaggaatggcttttactcagttgacattcagggacgtggccatcgaattctctcaagatgagtggaaatgcctgaactctacacagaggactttatacagggatgtgatgttggagaactacaggaacctggtctccctggatctgtctcgtaactgtgtaatcaaggaactagcaccacaacaggaaggtaacccaggagaagtattccacacagtgacattggaacaacatgaaaaacatgacattgaagagttttgcttcagggaaatcaagaaaaaaatacacgactttgactgtcagtggagagatgatgaaagaaattgcaacaaagtgactacggccccaaaagaaaatcttacttgtaggagagaccaacgcgatagaagaggtataggaaacaagtctattaaacatcagcttggattaagctttctaccacatccccatgaactgcagcagtttcaagctgaagggaaaatttatgaatgtaaccatgttgagaagtctgtcaaccatggttcctcagtttcaccaccccaaataatttcttctaccatcaaaacccatgtttctaataaatatgggactgatttcatctgttcttcattactcacacaagaacagaaatcatgcattagggaaaaaccttacagatatattgagtgcgacaaagccttgaatcatggctcacacatgactgtacgtcaggtaagtcattctggagagaaaggatataaatgtgatctgtgtggcaaggtctttagtcaaaaatcaaaccttgcgcgtcattggagagttcatactggagagaaaccatacaaatgtaatgaatgtgacagaagtttcagtcgcaactcatgccttgcactacatcggagagttcacactggagagaaaccttacaaatgttatgagtgtgacaaggtcttcagtcgaaattcatgccttgcactacatcagaaaactcatattggagagaaaccttacacatgtaaagagtgtggcaaagcctttagtgtgaggtcaacacttaccaaccatcaggtaattcatagtggcaagaaaccttacaaatgcaatgaatgtggcaaggtgttcagtcagacttcaagccttgcaactcatcagagaattcacactggggagaaaccatacaagtgtaatgaatgtggtaaagtcttcagtcagacttcaagccttgcaaggcattggagaattcatactggagagaaaccttacaaatgcaatgaatgtggtaaggttttcagttacaattcacaccttgcgagtcatcggagagttcatactggagagaaaccttacaagtgtaatgagtgtgggaaagcctttagtgtgcattcgaacttaactacccatcaggtcatccatactggagagaagccttacaaatgtaatcaatgtggcaaaggcttcagtgtgcattcaagcctaactacccatcaggtcatccatactggagaaaaaccttacaaatgtaatgagtgtggcaaatcctttagtgtgcgcccaaacctcactagacatcagataatccatactggaaagaaaccttacaaatgtagtgattgtgggaagtcctttagtgtgcgcccaaacctcttcagacatcaaattatccatactaaggagaaaccttataaaagaaattaatatggcaaggtcttcagtcaaagtttaaatcctgtgagtcatcaaagaatttatatcagagagaaaccatacaagtataataaatgtggcaaggttttcagtcacaattcactcctacacagcatcagagaatttcattcttgagagaatccttacgagtacagcaaacccttcatcacaagttcaagcattcattgacatcagagtccatgctaaagagaaatcatatacacctaactgtgtggcagaggcttcatttaggtctcacaactcactagacatcaaaatgtgtaaacatctttgtatattttgtgcatgttgaagctattaaccaaggatcaaaactgtaacacatccaaggatttatgtgaggaataattcagtctagttgtgctgataaacttttcatattacacattgtagaacaaatgcaagcccaaatatgttaaaactcacacaacatgatatatattaaaggttgcaggatgtttgaagtc

SEQ ID NO: 202408 - DNA, 2496 bp, Homo sapiens
  Payload ID: 19923
  Gene Name: zinc finger protein 415
  Uniprot ID: Q09FC8
  ENST ID: ENST00000500065
  CDS Start-End: 335-2002
ggatcgcgttgggtgaaggtgacggcgtcgagcgtgagtgaccctctgtgtagattaaacctgcgctccctgtttcccatttccacagccgatgtccagggtcgatacggcccttaaaatccccgtacactccaccccaggtgggagacaatgccttggagctgcaaatcttctctgagtctgaagcatcctgcctgacgcgtttgctcacattgacccgtgccttccctcagtccttctcatctctactgagattccgtctcaccctgaccctgtgacatgaacttctgaagagtccactgggcatggtcctgggaagggctcacacccagacatggatggagacgggttgacattcagggacgtggccatcgaattctctcaagatgagtggaaatgcctgaactctacacagaggactttatacagggatgtgatgttggagaactacaggaacctggtctccctggatctgtctcgtaactgtgtaatcaaggaactagcaccacaacaggaaggtaacccaggagaagtattccacacagtgacattggaacaacatgaaaaacatgacattgaagagttttgcttcagggaaatcaagaaaaaaatacacgactttgactgtcagtggagagatgatgaaagaaattgcaacaaagtgactacggccccaaaagaaaatcttacttgtaggagagaccaacgcgatagaagaggtataggaaacaagtctattaaacatcagcttggattaagctttctaccacatccccatgaactgcagcagtttcaagctgaagggaaaatttatgaatgtaaccatgttgagaagtctgtcaaccatggttcctcagtttcaccaccccaaataatttcttctaccatcaaaacccatgtttctaataaatatgggactgatttcatctgttcttcattactcacacaagaacagaaatcatgcattagggaaaaaccttacagatatattgagtgcgacaaagccttgaatcatggctcacacatgactgtacgtcaggtaagtcattctggagagaaaggatataaatgtgatctgtgtggcaaggtctttagtcaaaaatcaaaccttgcgcgtcattggagagttcatactggagagaaaccatacaaatgtaatgaatgtgacagaagtttcagtcgcaactcatgccttgcactacatcggagagttcacactggagagaaaccttacaaatgttatgagtgtgacaaggtcttcagtcgaaattcatgccttgcactacatcagaaaactcatattggagagaaaccttacacatgtaaagagtgtggcaaagcctttagtgtgaggtcaacacttaccaaccatcaggtaattcatagtggcaagaaaccttacaaatgcaatgaatgtggcaaggtgttcagtcagacttcaagccttgcaactcatcagagaattcacactggggagaaaccatacaagtgtaatgaatgtggtaaagtcttcagtcagacttcaagccttgcaaggcattggagaattcatactggagagaaaccttacaaatgcaatgaatgtggtaaggttttcagttacaattcacaccttgcgagtcatcggagagttcatactggagagaaaccttacaagtgtaatgagtgtgggaaagcctttagtgtgcattcgaacttaactacccatcaggtcatccatactggagagaagccttacaaatgtaatcaatgtggcaaaggcttcagtgtgcattcaagcctaactacccatcaggtcatccatactggagaaaaaccttacaaatgtaatgagtgtggcaaatcctttagtgtgcgcccaaacctcactagacatcagataatccatactggaaagaaaccttacaaatgtagtgattgtgggaagtcctttagtgtgcgcccaaacctcttcagacatcaaattatccatactaaggagaaaccttataaaagaaattaatatggcaaggtcttcagtcaaagtttaaatcctgtgagtcatcaaagaatttatatcagagagaaaccatacaagtataataaatgtggcaaggttttcagtcacaattcactcctacacagcatcagagaatttcattcttgagagaatccttacgagtacagcaaacccttcatcacaagttcaagcattcattgacatcagagtccatgctaaagagaaatcatatacacctaactgtgtggcagaggcttcatttaggtctcacaactcactagacatcaaaatgtgtaaacatctttgtatattttgtgcatgttgaagctattaaccaaggatcaaaactgtaacacatccaaggatttatgtgaggaataattcagtctagttgtgctgataaacttttcatattacacattgtagaacaaatgcaagcccaaatatgttaaaactcacacaacatgatatatattaaaggttgcaggatgtttgaa

SEQ ID NO: 202409 - DNA, 2469 bp, Homo sapiens
  Payload ID: 19923
  Gene Name: zinc finger protein 415
  ENST ID: ENST00000597503
  CDS Start-End: 206-427
atcgcgttgggtgaaggtgacggcgtcgagcgtgagtgaccctctgtgtagattaaacctgcgctccctgtttcccatttccacagccgatgtccagggtcgatacggcccttaaaatccccgtacactccaccccagcattgacttccaaagactcctggcacatgaggaagaaacccagaagaggagagcaaaggagtcaggaatggcttttactcagttgacattcagggacgtggccatcgaattctctcaagatgagtggaaatgcctgaactctacacagaggactttatacagggatgtgatgttggagaactacaggaacctggtctccctgggctggagtgcaatggtgcaatctcggctcactgcaaccttcgcctcccggattcaaatgattctcctgcctcagcctcccgagtagctgggattacagatctgtctcgtaactgtgtaatcaaggaactagcaccacaacaggaaggtaacccaggagaagtattccacacagtgacattggaacaacatgaaaaacatgacattgaagagttttgcttcagggaaatcaagaaaaaaatacacgactttgactgtcagtggagagatgatgaaagaaattgcaacaaagtgactacggccccaaaagaaaatcttacttgtaggagagaccaacgcgatagaagaggtataggaaacaagtctattaaacatcagcttggattaagctttctaccacatccccatgaactgcagcagtttcaagctgaagggaaaatttatgaatgtaaccatgttgagaagtctgtcaaccatggttcctcagtttcaccaccccaaataatttcttctaccatcaaaacccatgtttctaataaatatgggactgatttcatctgttcttcattactcacacaagaacagaaatcatgcattagggaaaaaccttacagatatattgagtgcgacaaagccttgaatcatggctcacacatgactgtacgtcaggtaagtcattctggagagaaaggatataaatgtgatctgtgtggcaaggtctttagtcaaaaatcaaaccttgcgcgtcattggagagttcatactggagagaaaccatacaaatgtaatgaatgtgacagaagtttcagtcgcaactcatgccttgcactacatcggagagttcacactggagagaaaccttacaaatgttatgagtgtgacaaggtcttcagtcgaaattcatgccttgcactacatcagaaaactcatattggagagaaaccttacacatgtaaagagtgtggcaaagcctttagtgtgaggtcaacacttaccaaccatcaggtaattcatagtggcaagaaaccttacaaatgcaatgaatgtggcaaggtgttcagtcagacttcaagccttgcaactcatcagagaattcacactggggagaaaccatacaagtgtaatgaatgtggtaaagtcttcagtcagacttcaagccttgcaaggcattggagaattcatactggagagaaaccttacaaatgcaatgaatgtggtaaggttttcagttacaattcacaccttgcgagtcatcggagagttcatactggagagaaaccttacaagtgtaatgagtgtgggaaagcctttagtgtgcattcgaacttaactacccatcaggtcatccatactggagagaagccttacaaatgtaatcaatgtggcaaaggcttcagtgtgcattcaagcctaactacccatcaggtcatccatactggagaaaaaccttacaaatgtaatgagtgtggcaaatcctttagtgtgcgcccaaacctcactagacatcagataatccatactggaaagaaaccttacaaatgtagtgattgtgggaagtcctttagtgtgcgcccaaacctcttcagacatcaaattatccatactaaggagaaaccttataaaagaaattaatatggcaaggtcttcagtcaaagtttaaatcctgtgagtcatcaaagaatttatatcagagagaaaccatacaagtataataaatgtggcaaggttttcagtcacaattcactcctacacagcatcagagaatttcattcttgagagaatccttacgagtacagcaaacccttcatcacaagttcaagcattcattgacatcagagtccatgctaaagagaaatcatatacacctaactgtgtggcagaggcttcatttaggtctcacaactcactagacatcaaaatgtgtaaacatctttgtatattttgtgcatgttgaagctattaaccaaggatcaaaactgtaacacatccaaggatttatgtgaggaataattcagtctagttgtgctgataaacttttcatattacacattgtagaacaaatgcaagcccaaatatgttaaaactcacacaacatgatatatattaaaggttgcaggatgtttgaagtca

SEQ ID NO: 202410 - DNA, 563 bp, Homo sapiens
  Payload ID: 19923
  Gene Name: zinc finger protein 415
  ENST ID: ENST00000600574
  CDS Start-End: 220-447
aggcccggaaacggatcgcgttgggtgaaggtgacggcgtcgagcgtgagtgaccctctgtgtagattaaacctgcgctccctgtttcccatttccacagccgatgtccagggtcgatacggcccttaaaatccccgtacactccaccccagcattgacttccaaagactcctggcacatgaggaagaaacccagaagaggagagcaaaggagtcaggaatggcttttactcagttgacattcagggacgtggccatcgaattctctcaagatgagtggaaatgcctgaactctacacagaggactttatacagggatgtgatgttggagaactacaggaacctggtctccctgggtgaggataattttcttccagaagtcaaaatctgcccttggtatctttccattttcccttgtgtgcctcttgggagcccctgcattacctgactgagtttgaggccttgttgactctgaaatgaaaagctccataatgtgaactctggagtttaaccatcccctttttccagattttctgaccccttcatgatacaacagtggtggtt

SEQ ID NO: 202411 - DNA, 2461 bp, Homo sapiens
  Payload ID: 19923
  Gene Name: zinc finger protein 415
  ENST ID: ENST00000597748
  CDS Start-End: 217-438
tctgacctcatctcctgcctgtgtcctcctcgctccctctgctccagccaagcatgcgtccttcctgttcctgggccgagcttgctcctgcctcaaggccttcacgtgggctgtgcctctgctggaactcgctggcccctcagctgcagcattgacttccaaagactcctggcacatgaggaagaaacccagaagaggagagcaaaggagtcaggaatggcttttactcagttgacattcagggacgtggccatcgaattctctcaagatgagtggaaatgcctgaactctacacagaggactttatacagggatgtgatgttggagaactacaggaacctggtctccctgggctggagtgcaatggtgcaatctcggctcactgcaaccttcgcctcccggattcaaatgattctcctgcctcagcctcccgagtagctgggattacagatctgtctcgtaactgtgtaatcaaggaactagcaccacaacaggaaggtaacccaggagaagtattccacacagtgacattggaacaacatgaaaaacatgacattgaagagttttgcttcagggaaatcaagaaaaaaatacacgactttgactgtcagtggagagatgatgaaagaaattgcaacaaagtgactacggccccaaaagaaaatcttacttgtaggagagaccaacgcgatagaagaggtataggaaacaagtctattaaacatcagcttggattaagctttctaccacatccccatgaactgcagcagtttcaagctgaagggaaaatttatgaatgtaaccatgttgagaagtctgtcaaccatggttcctcagtttcaccaccccaaataatttcttctaccatcaaaacccatgtttctaataaatatgggactgatttcatctgttcttcattactcacacaagaacagaaatcatgcattagggaaaaaccttacagatatattgagtgcgacaaagccttgaatcatggctcacacatgactgtacgtcaggtaagtcattctggagagaaaggatataaatgtgatctgtgtggcaaggtctttagtcaaaaatcaaaccttgcgcgtcattggagagttcatactggagagaaaccatacaaatgtaatgaatgtgacagaagtttcagtcgcaactcatgccttgcactacatcggagagttcacactggagagaaaccttacaaatgttatgagtgtgacaaggtcttcagtcgaaattcatgccttgcactacatcagaaaactcatattggagagaaaccttacacatgtaaagagtgtggcaaagcctttagtgtgaggtcaacacttaccaaccatcaggtaattcatagtggcaagaaaccttacaaatgcaatgaatgtggcaaggtgttcagtcagacttcaagccttgcaactcatcagagaattcacactggggagaaaccatacaagtgtaatgaatgtggtaaagtcttcagtcagacttcaagccttgcaaggcattggagaattcatactggagagaaaccttacaaatgcaatgaatgtggtaaggttttcagttacaattcacaccttgcgagtcatcggagagttcatactggagagaaaccttacaagtgtaatgagtgtgggaaagcctttagtgtgcattcgaacttaactacccatcaggtcatccatactggagagaagccttacaaatgtaatcaatgtggcaaaggcttcagtgtgcattcaagcctaactacccatcaggtcatccatactggagaaaaaccttacaaatgtaatgagtgtggcaaatcctttagtgtgcgcccaaacctcactagacatcagataatccatactggaaagaaaccttacaaatgtagtgattgtgggaagtcctttagtgtgcgcccaaacctcttcagacatcaaattatccatactaaggagaaaccttataaaagaaattaatatggcaaggtcttcagtcaaagtttaaatcctgtgagtcatcaaagaatttatatcagagagaaaccatacaagtataataaatgtggcaaggttttcagtcacaattcactcctacacagcatcagagaatttcattcttgagagaatccttacgagtacagcaaacccttcatcacaagttcaagcattcattgacatcagagtccatgctaaagagaaatcatatacacctaactgtgtggcagaggcttcatttaggtctcacaactcactagacatcaaaatgtgtaaacatctttgtatattttgtgcatgttgaagctattaaccaaggatcaaaactgtaacacatccaaggatttatgtgaggaataattcagtctagttgtgctgataaacttttcatattacacattgtagaacaaatgcaagcccaaatatgttaaaactcacacaacatgatatatattaaaggt

SEQ ID NO: 202412 - DNA, 580 bp, Homo sapiens
  Payload ID: 19923
  Gene Name: zinc finger protein 415
  ENST ID: ENST00000595813
  CDS Start-End: 244-465
aggcccggaaacggatcgcgttgggtgaaggtgacggcgtcgagcaaaggtgggagacaatgccttggagctgcaaatcttctctgagtctgaagcatcctgcctgacgcgtttgctcacattgacccgtgccttccctcagtccttctcatctctactgagattccgtctcaccctgaccctgtgacatgaacttctgaagagtccactgggcatggtcctgggaagggctcacacccagacatggatggagacgggttgacattcagggacgtggccatcgaattctctcaagatgagtggaaatgcctgaactctacacagaggactttatacagggatgtgatgttggagaactacaggaacctggtctccctgggctggagtgcaatggtgcaatctcggctcactgcaaccttcgcctcccggattcaaatgattctcctgcctcagcctcccgagtagctgggattacagatctgtctcgtaactgtgtaatcaaggaactagcaccacaacaggaaggtaacccaggagaagtattccacacagtgacattggaacaacatgaaaaacatga

SEQ ID NO: 202413 - DNA, 589 bp, Homo sapiens
  Payload ID: 19923
  Gene Name: zinc finger protein 415
  ENST ID: ENST00000601110
  CDS Start-End: 272-589
ctacaggcccggaaacggatcgcgttgggtgaaggtgacggcgtcgagcgacctctctgacctcatctcctgcctgtgtcctcctcgctccctctgctccagccaagcatgcgtccttcctgttcctgggccgagcttgctcctgcctcaaggccttcacgtgggctgtgcctctgctggaactcgctggcccctcagctgcagcattgacttccaaagactcctggcacatgaggaagaaacccagaagaggagagcaaaggagtcaggaatggcttttactcagttgacattcagggacgtggccatcgaattctctcaagatgagtggaaatgcctgaactctacacagaggactttatacagggatgtgatgttggagaactacaggaacctggtctccctggatctgtctcgtaactgtgtaatcaaggaactagcaccacaacaggaaggtaacccaggagaagtattccacacagtgacattggaacaacatgaaaaacatgacattgaagagttttgcttcagggaaatcaagaaaaaaatacacgactttgactgtcagtggagagatgatgaaagaaat

SEQ ID NO: 202414 - DNA, 601 bp, Homo sapiens
  Payload ID: 19923
  Gene Name: zinc finger protein 415
  ENST ID: ENST00000599261
  CDS Start-End: 228-557
cgcgttgggtgaaggtgacggcgtcgagcaaaggtgggagacaatgccttggagctgcaaatcttctctgagtctgaagcatcctgcctgacgcgtttgctcacattgacccgtgccttccctcagtccttctcatctctactgagattccgtctcaccctgaccctgtgacatgaacttctgaagagtccactgggcatggtcctgggaagggctcacacccagacatggatggagacgggttgacattcagggacgtggccatcgaattctctcaagatgagtggaaatgcctgaactctacacagaggactttatacagggatgtgatgttggagaactacaggaacctggtctccctggagtattatcctatgtgggagcacaggaaagagccctggaccatagaaagccaagtacgagtagcaagaaaaccaaaagggtgggaatggatcaaaggtgtgaaaacaggctggagtgcaatggtgcaatctcggctcactgcaaccttcgcctcccggattcaaatgattctcctgcctcagcctcccgagtagctgggattacagatctgtctcgtaactgtgtaatcaaggaacta

SEQ ID NO: 202415 - DNA, 551 bp, Homo sapiens
  Payload ID: 19923
  Gene Name: zinc finger protein 415
  ENST ID: ENST00000595174
  CDS Start-End: 61-551
taattcagccacatctcctccttctcactcaactcagacctctcaggataacttggtgaaatgactccctctctcagcctcagtgagcccacctgtaacagagataagggactagaccagaaaacctcaatcattgacttccaaagactcctggcacatgaggaagaaacccagaagaggagagcaaaggagtcaggaatggcttttactcagttgacattcagggacgtggccatcgaattctctcaagatgagtggaaatgcctgaactctacacagaggactttatacagggatgtgatgttggagaactacaggaacctggtctccctggatctgtctcgtaactgtgtaatcaaggaactagcaccacaacaggaaggtaacccaggagaagtattccacacagtgacattggaacaacatgaaaaacatgacattgaagagttttgcttcagggaaatcaagaaaaaaatacacgactttgactgtcagtggagagatgatgaaagaaattgcaacaaagtgactacggccccaaaagaaaatct

SEQ ID NO: 202416 - DNA, 557 bp, Homo sapiens
  Payload ID: 19923
  Gene Name: zinc finger protein 415
  ENST ID: ENST00000597877
  CDS Start-End: 51-362
acatctcctccttctcactcaactcagacctctcaggataacttggtgaaatgactccctctctcagcctcagtgagcccacctgtaacagagataagggactagaccagaaaacctcaatgacctctctgacctcatctcctgcctgtgtcctcctcgctccctctgctccagccaagcatgcgtccttcctgttcctgggccgagcttgctcctgcctcaaggccttcacgtgggctgtgcctctgctggaactcgctggcccctcagctgcagcattgacttccaaagactcctggcacatgaggaagaaacccagaagaggagagcaaaggagtcaggaatggcttttactcagttgacattcagggacgtggccatcgaattctctcaagatgagtggaaatgcctgaactctacacagaggactttatacagggatgtgatgttggagaactacaggaacctggtctccctggatccatctgtgatagcctctcttcttatccaagcaaagggctgagattcttgaaaagccacagcacatcatgttccat

SEQ ID NO: 202417 - DNA, 2581 bp, Homo sapiens
  Payload ID: 19923
  Gene Name: zinc finger protein 415
  ENST ID: ENST00000600120
  CDS Start-End: 195-374
tgaaggtgacggcgtcgagcgtgagtgaccctctgtgtagattaaacctgcgctccctgtttcccatttccacagccgatgtccagggtcgatacggcccttaaaatccccgtacactccaccccagcattgacttccaaagactcctggcacatgaggaagaaacccagaagaggagagcaaaggagtcaggaatggcttttactcagttgacattcagggacgtggccatcgaattctctcaagatgagtggaaatgcctgaactctacacagaggactttatacagggatgtgatgttggagaactacaggaacctggtctccctggatccatctgtgatagcctctcttcttatccaagcaaagggctgagattcttgaaaagccacagcacatcatgttccattcattttataagcgggaaattctcttcctgaccagagtattatcctatgtgggagcacaggaaagagccctggaccatagaaagccaagtacgagtagcaagaaaaccaaaagggtgggaatggatcaaaggtgtgaaaacagatctgtctcgtaactgtgtaatcaaggaactagcaccacaacaggaaggtaacccaggagaagtattccacacagtgacattggaacaacatgaaaaacatgacattgaagagttttgcttcagggaaatcaagaaaaaaatacacgactttgactgtcagtggagagatgatgaaagaaattgcaacaaagtgactacggccccaaaagaaaatcttacttgtaggagagaccaacgcgatagaagaggtataggaaacaagtctattaaacatcagcttggattaagctttctaccacatccccatgaactgcagcagtttcaagctgaagggaaaatttatgaatgtaaccatgttgagaagtctgtcaaccatggttcctcagtttcaccaccccaaataatttcttctaccatcaaaacccatgtttctaataaatatgggactgatttcatctgttcttcattactcacacaagaacagaaatcatgcattagggaaaaaccttacagatatattgagtgcgacaaagccttgaatcatggctcacacatgactgtacgtcaggtaagtcattctggagagaaaggatataaatgtgatctgtgtggcaaggtctttagtcaaaaatcaaaccttgcgcgtcattggagagttcatactggagagaaaccatacaaatgtaatgaatgtgacagaagtttcagtcgcaactcatgccttgcactacatcggagagttcacactggagagaaaccttacaaatgttatgagtgtgacaaggtcttcagtcgaaattcatgccttgcactacatcagaaaactcatattggagagaaaccttacacatgtaaagagtgtggcaaagcctttagtgtgaggtcaacacttaccaaccatcaggtaattcatagtggcaagaaaccttacaaatgcaatgaatgtggcaaggtgttcagtcagacttcaagccttgcaactcatcagagaattcacactggggagaaaccatacaagtgtaatgaatgtggtaaagtcttcagtcagacttcaagccttgcaaggcattggagaattcatactggagagaaaccttacaaatgcaatgaatgtggtaaggttttcagttacaattcacaccttgcgagtcatcggagagttcatactggagagaaaccttacaagtgtaatgagtgtgggaaagcctttagtgtgcattcgaacttaactacccatcaggtcatccatactggagagaagccttacaaatgtaatcaatgtggcaaaggcttcagtgtgcattcaagcctaactacccatcaggtcatccatactggagaaaaaccttacaaatgtaatgagtgtggcaaatcctttagtgtgcgcccaaacctcactagacatcagataatccatactggaaagaaaccttacaaatgtagtgattgtgggaagtcctttagtgtgcgcccaaacctcttcagacatcaaattatccatactaaggagaaaccttataaaagaaattaatatggcaaggtcttcagtcaaagtttaaatcctgtgagtcatcaaagaatttatatcagagagaaaccatacaagtataataaatgtggcaaggttttcagtcacaattcactcctacacagcatcagagaatttcattcttgagagaatccttacgagtacagcaaacccttcatcacaagttcaagcattcattgacatcagagtccatgctaaagagaaatcatatacacctaactgtgtggcagaggcttcatttaggtctcacaactcactagacatcaaaatgtgtaaacatctttgtatattttgtgcatgttgaagctattaaccaaggatcaaaactgtaacacatccaaggatttatgtgaggaataattcagtctagttgtgctgataaacttttcatattacacattgtagaacaaatgcaagcccaaatatgttaaaactcacacaacatgatatatattaaaggttgcaggatgtttgaagtca

SEQ ID NO: 202418 - DNA, 571 bp, Homo sapiens
  Payload ID: 19923
  Gene Name: zinc finger protein 415
  ENST ID: ENST00000598024
  CDS Start-End: 117-296
ctacaggcccggaaacggatcgcgttgggtgaaggtgacggcgtcgagccattgacttccaaagactcctggcacatgaggaagaaacccagaagaggagagcaaaggagtcaggaatggcttttactcagttgacattcagggacgtggccatcgaattctctcaagatgagtggaaatgcctgaactctacacagaggactttatacagggatgtgatgttggagaactacaggaacctggtctccctggatccatctgtgatagcctctcttcttatccaagcaaagggctgagattcttgaaaagccacagcacatcatgttccattcattttataagcgggaaattctcttcctgaccagagtattatcctatgtgggagcacaggaaagagccctggaccatagaaagccaagtacgagtagcaagaaaaccaaaagggtgggaatggatcaaaggtgtgaaaacagatggagtttcgctcttattgcccaggctggagtgcaatggtgcaatctcggctcactgcaaccttcgcctcccggattcaaatgattctcctgcctca

SEQ ID NO: 202419 - DNA, 2479 bp, Homo sapiens
  Payload ID: 19923
  Gene Name: zinc finger protein 415
  ENST ID: ENST00000595193
  CDS Start-End: 108-437
cggaaacggatcgcgttgggtgaaggtgacggcgtcgagccattgacttccaaagactcctggcacatgaggaagaaacccagaagaggagagcaaaggagtcaggaatggcttttactcagttgacattcagggacgtggccatcgaattctctcaagatgagtggaaatgcctgaactctacacagaggactttatacagggatgtgatgttggagaactacaggaacctggtctccctggagtattatcctatgtgggagcacaggaaagagccctggaccatagaaagccaagtacgagtagcaagaaaaccaaaagggtgggaatggatcaaaggtgtgaaaacaggctggagtgcaatggtgcaatctcggctcactgcaaccttcgcctcccggattcaaatgattctcctgcctcagcctcccgagtagctgggattacagatctgtctcgtaactgtgtaatcaaggaactagcaccacaacaggaaggtaacccaggagaagtattccacacagtgacattggaacaacatgaaaaacatgacattgaagagttttgcttcagggaaatcaagaaaaaaatacacgactttgactgtcagtggagagatgatgaaagaaattgcaacaaagtgactacggccccaaaagaaaatcttacttgtaggagagaccaacgcgatagaagaggtataggaaacaagtctattaaacatcagcttggattaagctttctaccacatccccatgaactgcagcagtttcaagctgaagggaaaatttatgaatgtaaccatgttgagaagtctgtcaaccatggttcctcagtttcaccaccccaaataatttcttctaccatcaaaacccatgtttctaataaatatgggactgatttcatctgttcttcattactcacacaagaacagaaatcatgcattagggaaaaaccttacagatatattgagtgcgacaaagccttgaatcatggctcacacatgactgtacgtcaggtaagtcattctggagagaaaggatataaatgtgatctgtgtggcaaggtctttagtcaaaaatcaaaccttgcgcgtcattggagagttcatactggagagaaaccatacaaatgtaatgaatgtgacagaagtttcagtcgcaactcatgccttgcactacatcggagagttcacactggagagaaaccttacaaatgttatgagtgtgacaaggtcttcagtcgaaattcatgccttgcactacatcagaaaactcatattggagagaaaccttacacatgtaaagagtgtggcaaagcctttagtgtgaggtcaacacttaccaaccatcaggtaattcatagtggcaagaaaccttacaaatgcaatgaatgtggcaaggtgttcagtcagacttcaagccttgcaactcatcagagaattcacactggggagaaaccatacaagtgtaatgaatgtggtaaagtcttcagtcagacttcaagccttgcaaggcattggagaattcatactggagagaaaccttacaaatgcaatgaatgtggtaaggttttcagttacaattcacaccttgcgagtcatcggagagttcatactggagagaaaccttacaagtgtaatgagtgtgggaaagcctttagtgtgcattcgaacttaactacccatcaggtcatccatactggagagaagccttacaaatgtaatcaatgtggcaaaggcttcagtgtgcattcaagcctaactacccatcaggtcatccatactggagaaaaaccttacaaatgtaatgagtgtggcaaatcctttagtgtgcgcccaaacctcactagacatcagataatccatactggaaagaaaccttacaaatgtagtgattgtgggaagtcctttagtgtgcgcccaaacctcttcagacatcaaattatccatactaaggagaaaccttataaaagaaattaatatggcaaggtcttcagtcaaagtttaaatcctgtgagtcatcaaagaatttatatcagagagaaaccatacaagtataataaatgtggcaaggttttcagtcacaattcactcctacacagcatcagagaatttcattcttgagagaatccttacgagtacagcaaacccttcatcacaagttcaagcattcattgacatcagagtccatgctaaagagaaatcatatacacctaactgtgtggcagaggcttcatttaggtctcacaactcactagacatcaaaatgtgtaaacatctttgtatattttgtgcatgttgaagctattaaccaaggatcaaaactgtaacacatccaaggatttatgtgaggaataattcagtctagttgtgctgataaacttttcatattacacattgtagaacaaatgcaagcccaaatatgttaaaactcacacaacatgatatatattaaaggttgcaggatgtttgaagtca

SEQ ID NO: 202420 - DNA, 2630 bp, Homo sapiens
  Payload ID: 19923
  Gene Name: zinc finger protein 415
  ENST ID: ENST00000594011
  CDS Start-End: 260-589
aaacggatcgcgttgggtgaaggtgacggcgtcgagcgacctctctgacctcatctcctgcctgtgtcctcctcgctccctctgctccagccaagcatgcgtccttcctgttcctgggccgagcttgctcctgcctcaaggccttcacgtgggctgtgcctctgctggaactcgctggcccctcagctgcagcattgacttccaaagactcctggcacatgaggaagaaacccagaagaggagagcaaaggagtcaggaatggcttttactcagttgacattcagggacgtggccatcgaattctctcaagatgagtggaaatgcctgaactctacacagaggactttatacagggatgtgatgttggagaactacaggaacctggtctccctggagtattatcctatgtgggagcacaggaaagagccctggaccatagaaagccaagtacgagtagcaagaaaaccaaaagggtgggaatggatcaaaggtgtgaaaacaggctggagtgcaatggtgcaatctcggctcactgcaaccttcgcctcccggattcaaatgattctcctgcctcagcctcccgagtagctgggattacagatctgtctcgtaactgtgtaatcaaggaactagcaccacaacaggaaggtaacccaggagaagtattccacacagtgacattggaacaacatgaaaaacatgacattgaagagttttgcttcagggaaatcaagaaaaaaatacacgactttgactgtcagtggagagatgatgaaagaaattgcaacaaagtgactacggccccaaaagaaaatcttacttgtaggagagaccaacgcgatagaagaggtataggaaacaagtctattaaacatcagcttggattaagctttctaccacatccccatgaactgcagcagtttcaagctgaagggaaaatttatgaatgtaaccatgttgagaagtctgtcaaccatggttcctcagtttcaccaccccaaataatttcttctaccatcaaaacccatgtttctaataaatatgggactgatttcatctgttcttcattactcacacaagaacagaaatcatgcattagggaaaaaccttacagatatattgagtgcgacaaagccttgaatcatggctcacacatgactgtacgtcaggtaagtcattctggagagaaaggatataaatgtgatctgtgtggcaaggtctttagtcaaaaatcaaaccttgcgcgtcattggagagttcatactggagagaaaccatacaaatgtaatgaatgtgacagaagtttcagtcgcaactcatgccttgcactacatcggagagttcacactggagagaaaccttacaaatgttatgagtgtgacaaggtcttcagtcgaaattcatgccttgcactacatcagaaaactcatattggagagaaaccttacacatgtaaagagtgtggcaaagcctttagtgtgaggtcaacacttaccaaccatcaggtaattcatagtggcaagaaaccttacaaatgcaatgaatgtggcaaggtgttcagtcagacttcaagccttgcaactcatcagagaattcacactggggagaaaccatacaagtgtaatgaatgtggtaaagtcttcagtcagacttcaagccttgcaaggcattggagaattcatactggagagaaaccttacaaatgcaatgaatgtggtaaggttttcagttacaattcacaccttgcgagtcatcggagagttcatactggagagaaaccttacaagtgtaatgagtgtgggaaagcctttagtgtgcattcgaacttaactacccatcaggtcatccatactggagagaagccttacaaatgtaatcaatgtggcaaaggcttcagtgtgcattcaagcctaactacccatcaggtcatccatactggagaaaaaccttacaaatgtaatgagtgtggcaaatcctttagtgtgcgcccaaacctcactagacatcagataatccatactggaaagaaaccttacaaatgtagtgattgtgggaagtcctttagtgtgcgcccaaacctcttcagacatcaaattatccatactaaggagaaaccttataaaagaaattaatatggcaaggtcttcagtcaaagtttaaatcctgtgagtcatcaaagaatttatatcagagagaaaccatacaagtataataaatgtggcaaggttttcagtcacaattcactcctacacagcatcagagaatttcattcttgagagaatccttacgagtacagcaaacccttcatcacaagttcaagcattcattgacatcagagtccatgctaaagagaaatcatatacacctaactgtgtggcagaggcttcatttaggtctcacaactcactagacatcaaaatgtgtaaacatctttgtatattttgtgcatgttgaagctattaaccaaggatcaaaactgtaacacatccaaggatttatgtgaggaataattcagtctagttgtgctgataaacttttcatattacacattgtagaacaaatgcaagcccaaatatgttaaaactcacacaacatgatatatattaaaggttgcaggatgtttgaagtc

SEQ ID NO: 202421 - DNA, 2258 bp, Homo sapiens
  Payload ID: 19923
  Gene Name: zinc finger protein 415
  ENST ID: ENST00000598578
  CDS Start-End: 94-273
gttgggtgaaggtgacggcgtcgagccattgacttccaaagactcctggcacatgaggaagaaacccagaagaggagagcaaaggagtcaggaatggcttttactcagttgacattcagggacgtggccatcgaattctctcaagatgagtggaaatgcctgaactctacacagaggactttatacagggatgtgatgttggagaactacaggaacctggtctccctggatccatctgtgatagcctctcttcttatccaagcaaagggctgagattcttgaaaagccacagcacatcatgttccattcattttataagcgggaaattctcttcctgaccagagtattatcctatgtgggagcacaggaaagagccctggaccatagaaagccaagtacgagtagcaagaaaaccaaaagggtgggaatggatcaaaggtgtgaaaacagatctgtctcgtaactgtgtaatcaaggaactagcaccacaacaggaaggtaacccaggagaagtattccacacagtgacattggaacaacatgaaaaacatgacattgaagagttttgcttcagggaaatcaagaaaaaaatacacgactttgactgtcagtggagagatgatgaaagaaattgcaacaaagtgactacggccccaaaagaaaatcttacttgtaggagagaccaacgcgatagaagaggtataggaaacaagtctattaaacatcagcttggattaagctttctaccacatccccatgaactgcagcagtttcaagctgaagggaaaatttatgaatgtaaccatgttgagaagtctgtcaaccatggttcctcagtttcaccaccccaaataatttcttctaccatcaaaacccatgtttctaataaatatgggactgatttcatctgttcttcattactcacacaagaacagaaatcatgcattagggaaaaaccttacagatatattgagtgcgacaaagccttgaatcatggctcacacatgactgtacgtcaggtaagtcattctggagagaaaggatataaatgtgatctgtgtggcaaggtctttagtcaaaaatcaaaccttgcgcgtcattggagagttcatactggagagaaaccatacaaatgtaatgaatgtgacagaagtttcagtcgcaactcatgccttgcactacatcggagagttcacactggagagaaaccttacaaatgttatgagtgtgacaaggtcttcagtcgaaattcatgccttgcactacatcagaaaactcatattggagagaaaccttacacatgtaaagagtgtggcaaagcctttagtgtgaggtcaacacttaccaaccatcaggtaattcatagtggcaagaaaccttacaaatgcaatgaatgtggcaaggtgttcagtcagacttcaagccttgcaactcatcagagaattcacactggggagaaaccatacaagtgtaatgaatgtggtaaagtcttcagtcagacttcaagccttgcaaggcattggagaattcatactggagagaaaccttacaaatgcaatgaatgtggtaaggttttcagttacaattcacaccttgcgagtcatcggagagttcatactggagagaaaccttacaagtgtaatgagtgtgggaaagcctttagtgtgcattcgaacttaactacccatcaggtcatccatactggagagaagccttacaaatgtaatcaatgtggcaaaggcttcagtgtgcattcaagcctaactacccatcaggtcatccatactggagaaaaaccttacaaatgtaatgagtgtggcaaatcctttagtgtgcgcccaaacctcactagacatcagataatccatactggaaagaaaccttacaaatgtagtgattgtgggaagtcctttagtgtgcgcccaaacctcttcagacatcaaattatccatactaaggagaaaccttataaaagaaattaatatggcaaggtcttcagtcaaagtttaaatcctgtgagtcatcaaagaatttatatcagagagaaaccatacaagtataataaatgtggcaaggttttcagtcacaattcactcctacacagcatcagagaatttcattcttgagagaatccttacgagtacagcaaacccttcatcacaagttcaagcattcattgacatcagagtccatgctaaagagaaatcatatacacctaactgtgtggcagaggcttcatttaggtctcacaactcact

SEQ ID NO: 202422 - DNA, 561 bp, Homo sapiens
  Payload ID: 19923
  Gene Name: zinc finger protein 415
  ENST ID: ENST00000601215
  CDS Start-End: 17-337
aggataacttggtgaaatgactccctctctcagcctcagtgagcccacctgtaacagagataagggactagaccagaaaacctcaatgacctctctgacctcatctcctgcctgtgtcctcctcgctccctctgctccagccaagcatgcgtccttcctgttcctgggccgagcttgctcctgcctcaaggccttcacgtgggctgtgcctctgctggaactcgctggcccctcagctgcagcattgacttccaaagactcctggcacatgaggaagaaacccagaagaggagagcaaaggagtcaggaatggcttttactcagatctgtctcgtaactgtgtaatcaaggaactagcaccacaacaggaaggtaacccaggagaagtattccacacagtgacattggaacaacatgaaaaacatgacattgaagagttttgcttcagggaaatcaagaaaaaaatacacgactttgactgtcagtggagagatgatgaaagaaattgcaacaaagtgactacggccccaaaagaaaatcttacttgtaggagagaccaac

SEQ ID NO: 202423 - DNA, 2132 bp, Homo sapiens
  Payload ID: 19923
  Gene Name: zinc finger protein 415
  Uniprot ID: Q09FC8
  ENST ID: ENST00000601493
  CDS Start-End: 657-1634
tgaaggtgacggcgtcgagccattgacttccaaagactcctggcacatgaggaagaaacccagaagaggagagcaaaggagtcaggaatggcttttactcagatctgtctcgtaactgtgtaatcaaggaactagcaccacaacaggaaggtaacccaggagaagtattccacacagtgacattggaacaacatgaaaaacatgacattgaagagttttgcttcagggaaatcaagaaaaaaatacacgactttgactgtcagtggagagatgatgaaagaaattgcaacaaagtgactacggccccaaaagaaaatcttacttgtaggagagaccaacgcgatagaagaggtataggaaacaagtctattaaacatcagcttggattaagctttctaccacatccccatgaactgcagcagtttcaagctgaagggaaaatttatgaatgtaaccatgttgagaagtctgtcaaccatggttcctcagtttcaccaccccaaataatttcttctaccatcaaaacccatgtttctaataaatatgggactgatttcatctgttcttcattactcacacaagaacagaaatcatgcattagggaaaaaccttacagatatattgagtgcgacaaagccttgaatcatggctcacacatgactgtacgtcaggtaagtcattctggagagaaaggatataaatgtgatctgtgtggcaaggtctttagtcaaaaatcaaaccttgcgcgtcattggagagttcatactggagagaaaccatacaaatgtaatgaatgtgacagaagtttcagtcgcaactcatgccttgcactacatcggagagttcacactggagagaaaccttacaaatgttatgagtgtgacaaggtcttcagtcgaaattcatgccttgcactacatcagaaaactcatattggagagaaaccttacacatgtaaagagtgtggcaaagcctttagtgtgaggtcaacacttaccaaccatcaggtaattcatagtggcaagaaaccttacaaatgcaatgaatgtggcaaggtgttcagtcagacttcaagccttgcaactcatcagagaattcacactggggagaaaccatacaagtgtaatgaatgtggtaaagtcttcagtcagacttcaagccttgcaaggcattggagaattcatactggagagaaaccttacaaatgcaatgaatgtggtaaggttttcagttacaattcacaccttgcgagtcatcggagagttcatactggagagaaaccttacaagtgtaatgagtgtgggaaagcctttagtgtgcattcgaacttaactacccatcaggtcatccatactggagagaagccttacaaatgtaatcaatgtggcaaaggcttcagtgtgcattcaagcctaactacccatcaggtcatccatactggagaaaaaccttacaaatgtaatgagtgtggcaaatcctttagtgtgcgcccaaacctcactagacatcagataatccatactggaaagaaaccttacaaatgtagtgattgtgggaagtcctttagtgtgcgcccaaacctcttcagacatcaaattatccatactaaggagaaaccttataaaagaaattaatatggcaaggtcttcagtcaaagtttaaatcctgtgagtcatcaaagaatttatatcagagagaaaccatacaagtataataaatgtggcaaggttttcagtcacaattcactcctacacagcatcagagaatttcattcttgagagaatccttacgagtacagcaaacccttcatcacaagttcaagcattcattgacatcagagtccatgctaaagagaaatcatatacacctaactgtgtggcagaggcttcatttaggtctcacaactcactagacatcaaaatgtgtaaacatctttgtatattttgtgcatgttgaagctattaaccaaggatcaaaactgtaacacatccaaggatttatgtgaggaataattcagtctagttgtgctgataaacttttcatattacacattgtagaacaaatgcaagcccaaatatgttaaaactcacacaacatgatatatattaaaggttgcaggatgtttgaagtca

SEQ ID NO: 202424 - DNA, 504 bp, Homo sapiens
  Payload ID: 19923
  Gene Name: zinc finger protein 415
  ENST ID: ENST00000596051
  CDS Start-End: 435-504
aggcccggaaacggatcgcgttgggtgaaggtgacggcgtcgagcgtgtccaaaagtgacttcctgactccctagatgcattcccctgcagtcctgcacatctcagatgagcgggaccatgtatttcgtgggactttcaaatatataagattttacattgtgtgggagaaaaatgtttgacagcatctgccctgcctgatctgccctcccaggacctctctgacctcatctcctgcctgtgtcctcctcgctccctctgctccagccaagcatgcgtccttcctgttcctgggccgagcttgctcctgcctcaaggccttcacgtgggctgtgcctctgctggaactcgctggcccctcagctgcagcattgacttccaaagactcctggcacatgaggaagaaacccagaagaggagagcaaaggagtcaggaatggcttttactcagttgacattcagggacgtggccatcgaattctctcaagatgagtggaaatgcctga

SEQ ID NO: 202425 - DNA, 2561 bp, Homo sapiens
  Payload ID: 19924
  Gene Name: zinc finger protein 416
  Uniprot ID: Q9BWM5
  ENST ID: ENST00000196489
  CDS Start-End: 224-2008
ttgcatacggtaaggcgggacttccggcaccgctccgagatggtaattttggtggttctctacctcggcccacgccgcctgagttagaaacgctgcctccggcacagagcgggggtcgccccgctgcgcatcagccggtgggtcgctggcgctggtggcagccgtgcctgggttcccgccccgggtcgcccgccgctcccggccccgctccgctcacaatccgatggcggcggccgtgcttagggattcgacttcggttcccgtgactgcagaagctaaacttatgggctttacacagggctgtgtgacctttgaggacgtggccatttacttctcccaggaagaatgggggctccttgatgaggctcagaggctcctgtaccgcgatgtgatgctggagaactttgcacttataactgcgctggtttgttggcatgggatggaggatgaagagacacctgagcaaagtgtttctgtagaaggagtacctcaggtcaggactccagaggccagtccatccacccagaagattcaatcctgtgacatgtgtgtcccattcctgaccgacattttgcacctgaccgatttgcctgggcaggaactatacttgactggggcatgtgcggtctttcaccaggaccagaagcatcatagtgcagagaaacccttggaaagtgacatggacaaggcctcatttgtgcagtgctgcctgttccatgagtcaggaatgcctttcaccagcagtgaggttgggaaggacttcctagccccattgggcattcttcagccgcaagctattgctaactatgagaagccaaacaaaatcagcaaatgtgaggaggcctttcatgttggaataagtcattacaagtggagtcaatgcaggagagagtccagccacaaacacactttttttcaccctagagtctgcactggaaaaaggctttatgaatctagcaaatgtgggaaagcctgctgctgtgagtgctcccttgttcagctgcaaagagtccaccctggagaaaggccttatgagtgcagtgaatgtgggaaatcttttagccaaacctctcatctgaatgatcatcggagaatccacactggagaaaggccttatgtgtgtggtcagtgtgggaaatcatttagccaaagagccaccctcattaaacatcacagagttcacactggagaaaggccttacgagtgtggtgaatgtgggaaatcttttagccaaagttccaaccttattgaacattgcagaattcacactggagaaaggccttatgagtgtgatgaatgtggaaaagcctttgggtccaaatccactcttgttcgacaccagagaactcacacaggagaaaagccatatgagtgtggtgaatgtgggaaattattcagacaaagcttcagccttgttgtacaccagagaattcacactacagcaaggccttatgagtgtggccagtgtgggaaatcatttagcctaaagtgtggcctcattcagcaccagttaattcacagtggagctaggccctttgagtgtgatgagtgcggaaaatcctttagccaaagaaccaccctcaataaacaccacaaagttcacactgcagaaaggccttatgtatgtggggaatgtgggaaagcttttatgttcaaatctaaacttgttaggcaccagagaactcacactggagaaaggccttttgagtgcagtgaatgtgggaaattttttagacaaagctataccctcgttgaacaccagaaaattcacactggattaaggccttacgactgtggacagtgcgggaaatcctttatccaaaagtctagcctcattcaacaccaagtggttcacacaggagaaaggccatatgagtgtggcaaatgtgggaagtcctttacacaacactctggcctcattctccaccgaaaatctcacactgtggagaggcctcgtgacagcagcaaatgtggaaaaccctacagcccaagatctaacattgtttaactcttgaaactccaaacctgagaaaagccttagacctgcagggaatgtgccatgtctttcttcagtgttatggctatagagagcctttgtgaaggagccgtctgcctaaagttaaacctcatacttctagacctcccgatgggtcagactcccattagttccaggcatatgtgtcttgcaggagctcctttgcatgttctaaactgctggaggcctttgccagagttaaatcattagtcacccttgcatactaaggcgaggcagatacacctgtgttctcccaacccttggaggaaattccttgagcagtctgagcctttaaggggaattccttcccttttctgactgattacagcatacatctgaccagttttggccagaagggcccagcctgggttctgctggaagctgatgtggaaggcttcccttcatggaaattcttgttttcacacaacacttggtagtttttccagcctccaagtcaccacctagtaactggctgcctcacattgctctggtttgtgtggtaataaaggccttatttttaaatcta

SEQ ID NO: 202426 - DNA, 3597 bp, Homo sapiens
  Payload ID: 19925
  Gene Name: zinc finger protein 417
  Uniprot ID: Q8TAU3
  ENST ID: ENST00000312026
  CDS Start-End: 166-1893
cggtgacgcgggtgtttccccagtttgtggcccctgagtgctggggggggaccgcggtgactgaacctagaaggtggagaggaatcgtcctcggtgcccagaggcggctctgcagccccgtgacggcgaccactgctcccgggccgtgcttccccaagtagtccgatggcagcggctgcgccgaggcgcccgactcagcagggcactgtgacctttgaagatgtggctgtgaacttttcccaggaggagtggtgtcttcttagtgaggctcagaggtgcttgtaccgtgatgtgatgctagagaacctggctctcatatcctcgctgggttgttggtgtggatcaaaagatgaggaggcaccttgtaagcagagaatttctgtacaaagagagtctcagagcaggactcctagggcaggtgtttctcctaagaaggctcacccctgtgaaatgtgtggcctcatcttggaggatgtttttcactttgctgaccaccaggaaactcatcacaagcagaagctgaacaggagtggagcatgtggaaaaaacttggatgacactgcataccttcatcagcaccagaagcagcatattggagagaaattctacagaaagagtgtcagagaagcatcgtttgtaaagaaacgtaagctcagggtgtcacaggagccatttgtcttccgcgagtttgggaaggacgttctgcccagttcaggattgtgccaagaagcagctgctgtagagaagacagacagtgaaactatgcatggcccaccctttcaggagggaaaaactaattacagttgtggaaaacgcacaaaagccttcagcaccaaacactcagttattccacaccagaaacttttcactagagatggatgttatgtgtgcagtgattgtggaaaatcctttagcagatatgtcagcttcagtaatcatcagcgagatcacactgcaaaaggaccttatgattgtggagagtgtgggaaatcttatagtcgaaagagcagccttattcaacatcagcgagtccacactggaaagacagcttatccctgtgaggagtgcgggaaatcttttagtcagaagggcagccttattagccatcagcgtgttcacactggagaaaggccttatgagtgtagagaatatgggaaatcttttggtcaaaagggtaacctcattcaacatcagcaaggtcacactggagagagagcttatcactgtggggaatgtgggaaatcttttcgtcagaagttctgctttattaaccatcagcgtgttcacactggagaaaggccttacaagtgtggagaatgtggaaaatcttttggtcaaaagggcaacctcgttcaacatcagcgaggtcatactggagaaaggccctatgagtgcaaggaatgtgggaaatcatttaggtacagatcccacctcactgaacaccagagacttcacactggggaaagaccttacaattgtagggaatgtgggaaattatttaacaggaagtatcatcttctcgttcatgagagagttcacactggagaaaggccatatgcgtgtgaggtatgtgggaaattatttggtaataagaactgcgtgactatacatcagaggattcacactggagaaaggccgtatgaatgcaatgaatgtgggaaatcatttctttccagctctgcgcttcatgttcataaaagagttcattctggacaaaagccttataagtgcagtgaatgtggaaaatcctttgctgaatgttccagtctcattaaacacaggagaattcacactggagaaaggccttatgaatgtaccaaatgtggaaaaacatttcagcgaagctctaccctccttcatcatcagagttcacacaggagaaaggccttatgagtgcagtgaatatgggaaatcgtttgctgaaacatcccgtctcattaaacacaggagagttcatactggagaaaggccttatgagtgctgtcaatctgggaaacatcagaatgtctgctctccttggtcttaagagacttcgcattggaacggagtctcattctgtcacccaggctggagtgcagtggtgcaatcttggctcactgcaacttgggcctcccaggttcaagtgattctcctacctcagcctcccaaggagctgagattacgagtacaccacaccatgcccggccaaatacttggttttcagtaccacaagagctatgagctggttatccacttcatgtggaatcataagtgtccccaagtgacaatacgtatagattgctgggcagtgaaacagttaagatgtcaccgtagcttgctttctattcaacatctttctaagattaccttactatttcttttgttccaagtttgtatttcctcagagttctcacatatggaaaggatacacactttgtagaaacaagaactttatgttatccaagttctgggatagccatgagctccaattacctcagagctccgagtcctctactcagtacccgttgagatttatgtgttctgaggcttttgtcttctagctacttacttcattctccatgggtaacgtcattcatccacattaactaatttcctcactccaagctcttttctggagataatctccagtccctgtgcagacactgtcattgcactttctgctgaaatggtagtttcttgccagcaaggtgagattatggaatccagaatcttttttcaggggccacatgcccatttccccacttgcatgaatgtcgacactgtagccacagttttggccgtaaatgtgaatttggcaagtaaccactgttcccaaattgggaaatgtcccagtcagaagaagattatctgggacactgatactgacagggagatgggacattctgagggacccggaggcagggagccacctcctcagcttccctgagggctgcctagaatctctcttgtttcctctcactctgaattattcttcctctcatgactgaccaaacacatggaacctcacaaagtccattttaagagctttatcttgtgaagtgaagaacatgaagatagtttgaatcaaagttattgagtggacacttaatgtctttataacattttttacatatgtgtttgtgttttttggggagcataatttgcaaatggaatatctgttattttactaagatgcttcatggatacaagagttaaaacttcctgtcccatttagtgaaacaaaaggttaagaaatgtggataaagcttgtaagttagaaatggcaagataatcagctatatgaagaatctcagctgggtgttttggctcaggcctgtaatcccagcactttgggaggctgaggtgggtggcttacaaggtcaggagttcaagaccaccctggacaatatggtgaaaccctgtctctactaaaaatacaaaaattacccaagcatagtggtgggtgcctgtagtcccagctgcttgggaggctgaggcaggagaattcgttaaacctgggaggcataggttgcagtgagccgagattgcaccactgcactccagcctggtgacagagcgagactccgtctcaaaaaaaaaaaaaaaaaaaaaaaaaaa

SEQ ID NO: 202427 - DNA, 566 bp, Homo sapiens
  Payload ID: 19925
  Gene Name: zinc finger protein 417
  ENST ID: ENST00000599251
  CDS Start-End: 522-566
agacttccggggtctctagtagcggctgtgtatcggtgacgcgggtgtttccccagtttgtggcccctgagtgctggggggggaccgcggtgactgaacctagaaggtggagaggaatcgtcctcggtgcccagaggcggctctgcagccccgtgacggcgaccactgctcccgggccgtgcttccccaagtagtccgatggcagcggctgcgccgaggcgcccgactcagttataattttgcaaagacggtttcacctgtttctgacacccgtgggatgcggtggggagagcaacaagcacagggaggggcgcaggcaatggcctggagatggacggagccgggaggatggaacctgtctggaacaaagtgtgaggtggagctctccctggaagagtaagcaggccgagggctgtgcattcaagcagggcactgtgacctttgaagatgtggctgtgaacttttcccaggaggagtggtgtcttcttagtgaggctcagaggtgcttgtaccgtgatgtgatgctagagaacctggctctcatatcctcgctgggttgttggtgt

SEQ ID NO: 202428 - DNA, 583 bp, Homo sapiens
  Payload ID: 19925
  Gene Name: zinc finger protein 417
  ENST ID: ENST00000598526
  CDS Start-End: 430-583
gagacttccggggtctctagtagcggctgtgtatcggtgacgcgggtgtttccccagtttgtggcccctgagtgctggggggggaccgcggtgactgaacctagaaggtggagaggaatcgtcctcggtgcccagaggcggctctgcagccccgtgacggcgaccactgctcccgggccgtgcttccccaagtagtccgatggcagcggctgcgccgaggcgcccgactcagagtgaaaccatgaactgaattccttccctaagttaattcagcctatacccaggaatgaacaaggacagctgaaaggttggaagcaagacggagtcagtaagcagggcactgtgacctttgaagatgtggctgtgaacttttcccaggaggagtggtgtcttcttagtgaggctcagaggtgcttgtaccgtgatgtgatgctagagaacctggctctcatatcctcgctgggttgttggtgtggatcaaaagatgaggaggcaccttgtaagcagagaatttctgtacaaagagagtctcagagcaggactcctagggcaggtgtttctcctaagaaggctcacccctgtg

SEQ ID NO: 202429 - DNA, 550 bp, Homo sapiens
  Payload ID: 19925
  Gene Name: zinc finger protein 417
  ENST ID: ENST00000598629
  CDS Start-End: 487-550
tcggtgacgcgggtgtttccccagtttgtggcccctgagtgctggggggggaccgcggtgactgaacctagaaggtggagaggaatcgtcctcggtgcccagaggcggctctgcagccccgtgacggcgaccactgctcccgggccgtgcttccccaagtagtccgatggcagcggctgcgccgaggcgcccgactcagttataattttgcaaagacggtttcacctgtttctgacacccgtgggatgcggtggggagagcaacaagcacagggaggggcgcaggcaatggcctggagatggacggagccgggaggatggaacctgtctggaacaaagtgtgaggtggagctctccctggaagagtaagcaggccgagggctgtgcattcaagggcactgtgacctttgaagatgtggctgtgaacttttcccaggaggagtggtgtcttcttagtgaggctcagaggtgcttgtaccgtgatgtgatgctagagaacctggctctcatatcctcgctgggttgttggtgtggatcaaaagatgaggagg

SEQ ID NO: 202430 - DNA, 580 bp, Homo sapiens
  Payload ID: 19925
  Gene Name: zinc finger protein 417
  ENST ID: ENST00000597515
  CDS Start-End: 409-580
agtagcggctgtgtatcggtgacgcgggtgtttccccagtttgtggcccctgagtgctggggggggaccgcggtgactgaacctagaaggtggagaggaatcgtcctcggtgcccagaggcggctctgcagccccgtgacggcgaccactgctcccgggccgtgcttccccaagtagtccgatggcagcggctgcgccgaggcgcccgactcagagtgaaaccatgaactgaattccttccctaagttaattcagcctatacccaggaatgaacaaggacagctgaaaggttggaagcaagacggagtcagtaagggcactgtgacctttgaagatgtggctgtgaacttttcccaggaggagtggtgtcttcttagtgaggctcagaggtgcttgtaccgtgatgtgatgctagagaacctggctctcatatcctcgctgggttgttggtgtggatcaaaagatgaggaggcaccttgtaagcagagaatttctgtacaaagagagtctcagagcaggactcctagggcaggtgtttctcctaagaaggctcacccctgtgaaatgtgtggcctcatct

SEQ ID NO: 202431 - DNA, 1975 bp, Homo sapiens
  Payload ID: 19925
  Gene Name: zinc finger protein 417
  ENST ID: ENST00000595559
  CDS Start-End: 181-1905
gtagcggctgtgtatcggtgacgcgggtgtttccccagtttgtggcccctgagtgctggggggggaccgcggtgactgaacctagaaggtggagaggaatcgtcctcggtgcccagaggcggctctgcagccccgtgacggcgaccactgctcccgggccgtgcttccccaagtagtccgatggcagcggctgcgccgaggcgcccgactcagggcactgtgacctttgaagatgtggctgtgaacttttcccaggaggagtggtgtcttcttagtgaggctcagaggtgcttgtaccgtgatgtgatgctagagaacctggctctcatatcctcgctgggttgttggtgtggatcaaaagatgaggaggcaccttgtaagcagagaatttctgtacaaagagagtctcagagcaggactcctagggcaggtgtttctcctaagaaggctcacccctgtgaaatgtgtggcctcatcttggaggatgtttttcactttgctgaccaccaggaaactcatcacaagcagaagctgaacaggagtggagcatgtggaaaaaacttggatgacactgcataccttcatcagcaccagaagcagcatattggagagaaattctacagaaagagtgtcagagaagcatcgtttgtaaagaaacgtaagctcagggtgtcacaggagccatttgtcttccgcgagtttgggaaggacgttctgcccagttcaggattgtgccaagaagcagctgctgtagagaagacagacagtgaaactatgcatggcccaccctttcaggagggaaaaactaattacagttgtggaaaacgcacaaaagccttcagcaccaaacactcagttattccacaccagaaacttttcactagagatggatgttatgtgtgcagtgattgtggaaaatcctttagcagatatgtcagcttcagtaatcatcagcgagatcacactgcaaaaggaccttatgattgtggagagtgtgggaaatcttatagtcgaaagagcagccttattcaacatcagcgagtccacactggaaagacagcttatccctgtgaggagtgcgggaaatcttttagtcagaagggcagccttattagccatcagcgtgttcacactggagaaaggccttatgagtgtagagaatatgggaaatcttttggtcaaaagggtaacctcattcaacatcagcaaggtcacactggagagagagcttatcactgtggggaatgtgggaaatcttttcgtcagaagttctgctttattaaccatcagcgtgttcacactggagaaaggccttacaagtgtggagaatgtggaaaatcttttggtcaaaagggcaacctcgttcaacatcagcgaggtcatactggagaaaggccctatgagtgcaaggaatgtgggaaatcatttaggtacagatcccacctcactgaacaccagagacttcacactggggaaagaccttacaattgtagggaatgtgggaaattatttaacaggaagtatcatcttctcgttcatgagagagttcacactggagaaaggccatatgcgtgtgaggtatgtgggaaattatttggtaataagaactgcgtgactatacatcagaggattcacactggagaaaggccgtatgaatgcaatgaatgtgggaaatcatttctttccagctctgcgcttcatgttcataaaagagttcattctggacaaaagccttataagtgcagtgaatgtggaaaatcctttgctgaatgttccagtctcattaaacacaggagaattcacactggagaaaggccttatgaatgtaccaaatgtggaaaaacatttcagcgaagctctaccctccttcatcatcagagttcacacaggagaaaggccttatgagtgcagtgaatatgggaaatcgtttgctgaaacatcccgtctcattaaacacaggagagttcatactgga

SEQ ID NO: 202432 - DNA, 386 bp, Homo sapiens
  Payload ID: 19925
  Gene Name: zinc finger protein 417
  ENST ID: ENST00000594396
  CDS Start-End: 1-272
atgtggctgtgaacttttcccaggaggagtggtgtcttcttagtgaggctcagaggtgcttgtaccgtgatgtgatgctagagaacctggctctcatatcctcgctggattgtcctctgcatctgtgccagtttcctgatttgtccccatgttggagggtctgcctggataagccgtatctttttctgaggcctgcagcattaagatgggttaaggaatggaacgtttgtgcatcggcaaaagctgcagaaaccagtgcatccgccctttgattaagttaaaaggaccagggaggttagtatgtgctctcatatgagtaatatagaaaggggaatgtctttgttgtactgcttgttgtaaagaatgaaataaaagattaagttgtt

SEQ ID NO: 202433 - DNA, 3694 bp, Homo sapiens
  Payload ID: 19926
  Gene Name: zinc finger protein 418
  Uniprot ID: Q8TF45
  ENST ID: ENST00000396147
  CDS Start-End: 293-2323
ttttggttaatgttgggtgtgtttctgcggtttgtgaggtgagaggcgctggagctatgggtccgaaccgcggtgtctgaacccagaaggtgaagagtccttcttgctgcacagaggcagatcttaggccccgtaacggcgcccgccgctcccggcagtgctttccccgcgtactcgggatggcggcggccgcgctgaggctcccggctcaggcatcatctggctgcaaagaagagaacacactgtgtttgagggaggaggaaggaggatcagagtttaaactcctgccataatgcagggcactgtggcatttgaagatgtggctgtgaacttttcccaggaggagtggagtctccttagtgaggttcagagatgcctttaccatgacgtgatgctggagaactgggtacttatatcctccctgggttgttggtgtggatcagaagatgaggaggcaccttctaagaagagcatttctatacaaagagtgtctcaggtcagcactcctggggcaggtgtgtctcccaagaaggcccactcttgtgaaatgtgtggcgcgatcttgggagacattttgcacttggcagatcatcaggggacacatcacaagcagaaactgcacaggtgtgaggcatgggggaataaattgtatgatagttcaaaccgtccgcaccagaatcagtaccttggagagaaaccctatagaagcagtgttgaggaagcattgtttgtgaagaggtgtaagttccatgtgtcagaggagtcatctatcttcattcagagtggaaaggactttttgcccagctcaggattactgctgcaggaggccactcacactggggagaagtcaaacagcaaacctgagtgtgagtctccctttcagtggggagatactcattacagctgtggagaatgcatgaaacattctagcaccaaacacgtatttgttcaacagcagagacttccctctagagaggaatgttattgctgggaatgtgggaaatcctttagcaaatatgatagcgtcagtaatcatcagagagttcacactgggaaaagaccttatgaatgtggagaatgtgggaaatcttttagtcataagggcagccttgttcagcatcagcgagttcacactgggaaaagaccttatgaatgtggagaatgtgggaaatcttttagtcataagggcagccttgttcagcatcagcgagttcatactggagaaagaccttatgagtgtggagaatgtgggaaatcttttagtcaaaatggtactctcattaaacatcaacgagttcacactggagaaagaccttatgagtgtgaagaatgtgggaaatgttttactcagaagggcaatctcattcaacatcaacgaggtcacactagtgaaagaccttatgagtgtgaagaatgtggaaaatgttttagtcaaaagggcaccctaactgaacatcatcgagttcacactagagaacgaccttatgagtgtggagaatgtgggaaatcttttagtcgaaagggacaccttaggaaccatcagcgaggtcacactggagaaagaccttacgagtgtggagaatgtgggaaatcttttagtcgaaagggcaacctcattcagcatcagcgaagccacactggagaaaggccttatgagtgtagagagtgtaggaaattatttaggggcaagtcccacctcattgaacaccagagagttcacactggagaaaggccatatgaatgtaatgaatgtgggaaatcatttcaagacagctctgggtttcgtgttcatcagagagttcacactggagaaaaaccgtttgagtgtagtgaatgtgggaagtcatttcctcaaagctgttccctccttcgacatcggagagttcatactggagaaaggccttatgaatgtggagaatgtggaaagtcatttcatcagagctcttccctccttcgacatcagaaaactcacactgcagaaagaccttatgagtgcagagaatgtgggaaattcttctccagtctccttgaacacaggagagttcacactggagaaaggccttatgaatgcagggaatgtggaaaaacatttactcgaaggtctgcgcattttaaacatcagagacttcatactcgaggaaagccttacgagtgcagcgaatgtgggaaatcctttgctgaaaccttcagtcttactgaacacaggagagtacacactggagaaaggccttatgagtgcagtgaatgtggaaaatcatttcatcgaagctcttctctccttcgacatcagagagttcacacagaaagaagtccttacaagtgaaaagaaatttgggaaattctttagctaaacctctgtgcatcttcttgatcagagggttcttactggatcaggaccttatgagtgtgacaaacgtgggatattctttatgcagaagtcttgttttattacatacagaagagctcccactgcagaagggcctcttgagtgcgatgaatgtgagaaagccttctgccttctgtcattggataacagattgttctcataaggaaaacactgtacacgtacaggaaatattatttcttgtaaaacataacactggaggagatgccttatgacggagccatctgcctaaattgacataccttcagcatctgcataaactcaattatgttggagctgtgtggcatttttcaccctgccgggttcccttgccagacatgatgtcggttatctggcaaaagccattttatgtcggccacgaggcaggtgttcactgtgcatcattcattcaccccatgatgttctggaagtaaaccttggttgtctttcgttggccagaggaattgaatgtccgtctgtctgcccaggctggagtggcacgatctcagctcactgcagcctccacctccagggttcaagcgattctcctgcctcagcctcccggggatctcaagggcatttccctttgcccacctcaccttttcatatttggtaaactgtatgcatttgcctccagcccaagattataaatatgaactgattatgatctgcatgttctctctttgggttcaagcatttccttacagaagagccaccgtggaagtcatgggtaaatatgtgttgaattggtaactccctcttggagaatttcttgtgaattacacagcaataggggaactcatttaactggagacataatctcaatttgtaaagtgtggcccattttctaacatttttattttgcataccctcccctctcttctcgattgatgaaactaacaaagaggttaataaaagcccatctcgtcatgtacagggactcatgcctttaattccagtgttttgggagactaaggcaagaacatcctggaggccaggagttcgacactgtataacagatatatctgacagcagtaactcaagcacaccctaagaatgaccctgtggtctaagaagagtgttggttcagcgttccaaacgaagaaatccaggagtggccaacctggaggtttctgaacccctggcctgttccttggaatgaggccctttgttttgagctaggcggagggtgataagtgaaaatactatataaactgcatgcttctttcaaatgatagtggtttttttgtccagcctgccgctcctggactgccctgtatctaagtcctcaataaaccctatgtctcattt

SEQ ID NO: 202434 - DNA, 3547 bp, Homo sapiens
  Payload ID: 19926
  Gene Name: zinc finger protein 418
  ENST ID: ENST00000425570
  CDS Start-End: 465-2558
ctctggtagcgaccattttggttaatgttgggtgtgtttctgcggtttgtgaggtgagaggcgctggagctatgggtccgaaccgcggtgtctgaacccagaaggtgaagagtccttcttgctgcacagaggcagatcttaggccccgtaacggcgcccgccgctcccggcagtgctttccccgcgtactcgggatggcggcggccgcgctgaggctcccggctcaggcatcatctggctgcaaagaagagaacacactgtgtttgagggaggaggaaggaggatcagagtttaaactcctgccataatgcagaccattctccataacaagggagtgggatttaaatgactctaggtggacagaggaaagtcgtcattgtagaggggtcaccaagtgcaacacagaagtggaatagggccatggatatctaaagccccacctggttctgtggggatgtggagccatgcaagaaggccttcatagaatgacttgggactgcattgctattgggagccatgagaattctgtgcagggcactgtggcatttgaagatgtggctgtgaacttttcccaggaggagtggagtctccttagtgaggttcagagatgcctttaccatgacgtgatgctggagaactgggtacttatatcctccctgggttgttggtgtggatcagaagatgaggaggcaccttctaagaagagcatttctatacaaagagtgtctcaggtcagcactcctggggcaggtgtgtctcccaagaaggcccactcttgtgaaatgtgtggcgcgatcttgggagacattttgcacttggcagatcatcaggggacacatcacaagcagaaactgcacaggtgtgaggcatgggggaataaattgtatgatagttcaaaccgtccgcaccagaatcagtaccttggagagaaaccctatagaagcagtgttgaggaagcattgtttgtgaagaggtgtaagttccatgtgtcagaggagtcatctatcttcattcagagtggaaaggactttttgcccagctcaggattactgctgcaggaggccactcacactggggagaagtcaaacagcaaacctgagtgtgagtctccctttcagtggggagatactcattacagctgtggagaatgcatgaaacattctagcaccaaacacgtatttgttcaacagcagagacttccctctagagaggaatgttattgctgggaatgtgggaaatcctttagcaaatatgatagcgtcagtaatcatcagagagttcacactgggaaaagaccttatgaatgtggagaatgtgggaaatcttttagtcataagggcagccttgttcagcatcagcgagttcacactgggaaaagaccttatgaatgtggagaatgtgggaaatcttttagtcataagggcagccttgttcagcatcagcgagttcatactggagaaagaccttatgagtgtggagaatgtgggaaatcttttagtcaaaatggtactctcattaaacatcaacgagttcacactggagaaagaccttatgagtgtgaagaatgtgggaaatgttttactcagaagggcaatctcattcaacatcaacgaggtcacactagtgaaagaccttatgagtgtgaagaatgtggaaaatgttttagtcaaaagggcaccctaactgaacatcatcgagttcacactagagaacgaccttatgagtgtggagaatgtgggaaatcttttagtcgaaagggacaccttaggaaccatcagcgaggtcacactggagaaagaccttacgagtgtggagaatgtgggaaatcttttagtcgaaagggcaacctcattcagcatcagcgaagccacactggagaaaggccttatgagtgtagagagtgtaggaaattatttaggggcaagtcccacctcattgaacaccagagagttcacactggagaaaggccatatgaatgtaatgaatgtgggaaatcatttcaagacagctctgggtttcgtgttcatcagagagttcacactggagaaaaaccgtttgagtgtagtgaatgtgggaagtcatttcctcaaagctgttccctccttcgacatcggagagttcatactggagaaaggccttatgaatgtggagaatgtggaaagtcatttcatcagagctcttccctccttcgacatcagaaaactcacactgcagaaagaccttatgagtgcagagaatgtgggaaattcttctccagtctccttgaacacaggagagttcacactggagaaaggccttatgaatgcagggaatgtggaaaaacatttactcgaaggtctgcgcattttaaacatcagagacttcatactcgaggaaagccttacgagtgcagcgaatgtgggaaatcctttgctgaaaccttcagtcttactgaacacaggagagtacacactggagaaaggccttatgagtgcagtgaatgtggaaaatcatttcatcgaagctcttctctccttcgacatcagagagttcacacagaaagaagtccttacaagtgaaaagaaatttgggaaattctttagctaaacctctgtgcatcttcttgatcagagggttcttactggatcaggaccttatgagtgtgacaaacgtgggatattctttatgcagaagtcttgttttattacatacagaagagctcccactgcagaagggcctcttgagtgcgatgaatgtgagaaagccttctgccttctgtcattggataacagattgttctcataaggaaaacactgtacacgtacaggaaatattatttcttgtaaaacataacactggaggagatgccttatgacggagccatctgcctaaattgacataccttcagcatctgcataaactcaattatgttggagctgtgtggcatttttcaccctgccgggttcccttgccagacatgatgtcggttatctggcaaaagccattttatgtcggccacgaggcaggtgttcactgtgcatcattcattcaccccatgatgttctggaagtaaaccttggttgtctttcgttggccagaggaattgaatgtccgtctgtctgcccaggctggagtggcacgatctcagctcactgcagcctccacctccagggttcaagcgattctcctgcctcagcctcccggggatctcaagggcatttccctttgcccacctcaccttttcatatttggtaaactgtatgcatttgcctccagcccaagattataaatatgaactgattatgatctgcatgttctctctttgggttcaagcatttccttacagaagagccaccgtggaagtcatgggtaaatatgtgttgaattggtaactccctcttggagaatttcttgtgaattacacagcaataggggaactcatttaactggagacataatctcaatttgtaaagtgtggcccattttctaacatttttattttgcataccctcccctctcttctcgattgatgaaactaacaaagaggttaataaaagcccatctcgtc

SEQ ID NO: 202435 - DNA, 560 bp, Homo sapiens
  Payload ID: 19926
  Gene Name: zinc finger protein 418
  ENST ID: ENST00000595569
  CDS Start-End: 340-560
agcgaccattttggttaatgttgggtgtgtttctgcggtttgtgaggtcacctcatcctaacccgaatcctgaagcagcgagagagcggcgactgttcacaggcatcatctggctgcaaagaagagaacacactgtgtttgagggaggaggaaggaggatcagagtttaaactcctgccataatgcagaccattctccataacaagggagtgggatttaaatgactctaggtggacagaggaaagtcgtcattgtagaggggtcaccaagtgcaacacagaagtggaatagggccatggatatctaaagccccacctggttctgtggggatgtggagccatgcaagaaggccttcatagaatgacttgggactgcattgctattgggagccatgagaattctgtggaggagtggagtctccttagtgaggttcagagatgcctttaccatgacgtgatgctggagaactgggtacttatatcctccctgggttgttggtgtggatcagaagatgaggaggcaccttctaagaagagcatttctatacaaagagtgtctca

SEQ ID NO: 202436 - DNA, 2501 bp, Homo sapiens
  Payload ID: 19926
  Gene Name: zinc finger protein 418
  ENST ID: ENST00000599852
  CDS Start-End: 346-2121
ggtagcgaccattttggttaatgttgggtgtgtttctgcggtttgtgaggtgagaggcgctggagctatgggtccgaaccgcggtgtctgaacccagaaggtgaagagtccttcttgctgcacagaggcagatcttaggccccgtaacggcgcccgccgctcccggcagtgctttccccgcgtactcgggatggcggcggccgcgctgaggctcccggctcaggttgttggtgtggatcagaagatgaggaggcaccttctaagaagagcatttctatacaaagagtgtctcaggtcagcactcctggggcaggtgtgtctcccaagaaggcccactcttgtgaaatgtgtggcgcgatcttgggagacattttgcacttggcagatcatcaggggacacatcacaagcagaaactgcacaggtgtgaggcatgggggaataaattgtatgatagttcaaaccgtccgcaccagaatcagtaccttggagagaaaccctatagaagcagtgttgaggaagcattgtttgtgaagaggtgtaagttccatgtgtcagaggagtcatctatcttcattcagagtggaaaggactttttgcccagctcaggattactgctgcaggaggccactcacactggggagaagtcaaacagcaaacctgagtgtgagtctccctttcagtggggagatactcattacagctgtggagaatgcatgaaacattctagcaccaaacacgtatttgttcaacagcagagacttccctctagagaggaatgttattgctgggaatgtgggaaatcctttagcaaatatgatagcgtcagtaatcatcagagagttcacactgggaaaagaccttatgaatgtggagaatgtgggaaatcttttagtcataagggcagccttgttcagcatcagcgagttcacactgggaaaagaccttatgaatgtggagaatgtgggaaatcttttagtcataagggcagccttgttcagcatcagcgagttcatactggagaaagaccttatgagtgtggagaatgtgggaaatcttttagtcaaaatggtactctcattaaacatcaacgagttcacactggagaaagaccttatgagtgtgaagaatgtgggaaatgttttactcagaagggcaatctcattcaacatcaacgaggtcacactagtgaaagaccttatgagtgtgaagaatgtggaaaatgttttagtcaaaagggcaccctaactgaacatcatcgagttcacactagagaacgaccttatgagtgtggagaatgtgggaaatcttttagtcgaaagggacaccttaggaaccatcagcgaggtcacactggagaaagaccttacgagtgtggagaatgtgggaaatcttttagtcgaaagggcaacctcattcagcatcagcgaagccacactggagaaaggccttatgagtgtagagagtgtaggaaattatttaggggcaagtcccacctcattgaacaccagagagttcacactggagaaaggccatatgaatgtaatgaatgtgggaaatcatttcaagacagctctgggtttcgtgttcatcagagagttcacactggagaaaaaccgtttgagtgtagtgaatgtgggaagtcatttcctcaaagctgttccctccttcgacatcggagagttcatactggagaaaggccttatgaatgtggagaatgtggaaagtcatttcatcagagctcttccctccttcgacatcagaaaactcacactgcagaaagaccttatgagtgcagagaatgtgggaaattcttctccagtctccttgaacacaggagagttcacactggagaaaggccttatgaatgcagggaatgtggaaaaacatttactcgaaggtctgcgcattttaaacatcagagacttcatactcgaggaaagccttacgagtgcagcgaatgtgggaaatcctttgctgaaaccttcagtcttactgaacacaggagagtacacactggagaaaggccttatgagtgcagtgaatgtggaaaatcatttcatcgaagctcttctctccttcgacatcagagagttcacacagaaagaagtccttacaagtgaaaagaaatttgggaaattctttagctaaacctctgtgcatcttcttgatcagagggttcttactggatcaggaccttatgagtgtgacaaacgtgggatattctttatgcagaagtcttgttttattacatacagaagagctcccactgcagaagggcctcttgagtgcgatgaatgtgagaaagccttctgccttctgtcattggataacagattgttctcataaggaaaacactgtacacgtacaggaaatattatttcttgtaaaacataacactggaggagatgccttatgacggagccatctgcctaaattgacataccttcagcatctgcataaactcaattatgttggagctgtgtggcatttttcaccctgc

SEQ ID NO: 202437 - DNA, 540 bp, Homo sapiens
  Payload ID: 19926
  Gene Name: zinc finger protein 418
  ENST ID: ENST00000601593
  CDS Start-End: 245-540
agcgttctctggtagcgaccattttggttaatgttgggtgtgtttctgcggtttgtgaggtcacctcatcctaacccgaatcctgaagcagcgagagagcggcgactgttcacaggtctgcagcccggacccggcgtcgggacactgaggcgttcgcgggagaggcatcatctggctgcaaagaagagaacacactgtgtttgagggaggaggaaggaggatcagagtttaaactcctgccataatgcagcagggcactgtggcatttgaagatgtggctgtgaacttttcccaggaggagtggagtctccttagtgaggttcagagatgcctttaccatgacgtgatgctggagaactgggtacttatatcctccctgggttgttggtgtggatcagaagatgaggaggcaccttctaagaagagcatttctatacaaagagtgtctcaggtcagcactcctggggcaggtgtgtctcccaagaaggcccactcttgtgaaatgtgtggcgcgatcttgggagacattttgcacttggc

SEQ ID NO: 202438 - DNA, 597 bp, Homo sapiens
  Payload ID: 19926
  Gene Name: zinc finger protein 418
  ENST ID: ENST00000600989
  CDS Start-End: 97-483
gaggctcccggctcaggcatcatctggctgcaaagaagagaacacactgtgtttgagggaggaggaaggaggatcagagtttaaactcctgccataatgcagggcactgtggcatttgaagatgtggctgtgaacttttcccaggaggagtggagtctccttagtgaggttcagagatgcctttaccatgacgtgatgctggagaactgggtacttatatcctccctgggttgttggtgtggatcagaagatgaggaggcaccttctaagaagagcatttctatacaaagagtgtctcagaatgtccgtctgtctgcccaggctggagtggcacgatctcagctcactgcagcctccacctccagggttcaagcgattctcctgcctcagcctcccggggatctcaagggcatttccctttgcccacctcaccttttcatatttggtaaactgtatgcatttgcctccagcccaagattataaatatgaactgattatgatctgcatgttctctctttgggttcaagcatttccttacagaagagccaccgtggaagtcatgggtaaatatgtgttgaattggtaactccctcttgg

SEQ ID NO: 202439 - DNA, 3543 bp, Homo sapiens
  Payload ID: 19926
  Gene Name: zinc finger protein 418
  Uniprot ID: Q8TF45
  ENST ID: ENST00000595830
  CDS Start-End: 142-2172
tcggtggggaggcaagagggcggcgaggaggtgatgttaccacagtcccatttgtctgcaggcatcatctggctgcaaagaagagaacacactgtgtttgagggaggaggaaggaggatcagagtttaaactcctgccataatgcagggcactgtggcatttgaagatgtggctgtgaacttttcccaggaggagtggagtctccttagtgaggttcagagatgcctttaccatgacgtgatgctggagaactgggtacttatatcctccctgggttgttggtgtggatcagaagatgaggaggcaccttctaagaagagcatttctatacaaagagtgtctcaggtcagcactcctggggcaggtgtgtctcccaagaaggcccactcttgtgaaatgtgtggcgcgatcttgggagacattttgcacttggcagatcatcaggggacacatcacaagcagaaactgcacaggtgtgaggcatgggggaataaattgtatgatagttcaaaccgtccgcaccagaatcagtaccttggagagaaaccctatagaagcagtgttgaggaagcattgtttgtgaagaggtgtaagttccatgtgtcagaggagtcatctatcttcattcagagtggaaaggactttttgcccagctcaggattactgctgcaggaggccactcacactggggagaagtcaaacagcaaacctgagtgtgagtctccctttcagtggggagatactcattacagctgtggagaatgcatgaaacattctagcaccaaacacgtatttgttcaacagcagagacttccctctagagaggaatgttattgctgggaatgtgggaaatcctttagcaaatatgatagcgtcagtaatcatcagagagttcacactgggaaaagaccttatgaatgtggagaatgtgggaaatcttttagtcataagggcagccttgttcagcatcagcgagttcacactgggaaaagaccttatgaatgtggagaatgtgggaaatcttttagtcataagggcagccttgttcagcatcagcgagttcatactggagaaagaccttatgagtgtggagaatgtgggaaatcttttagtcaaaatggtactctcattaaacatcaacgagttcacactggagaaagaccttatgagtgtgaagaatgtgggaaatgttttactcagaagggcaatctcattcaacatcaacgaggtcacactagtgaaagaccttatgagtgtgaagaatgtggaaaatgttttagtcaaaagggcaccctaactgaacatcatcgagttcacactagagaacgaccttatgagtgtggagaatgtgggaaatcttttagtcgaaagggacaccttaggaaccatcagcgaggtcacactggagaaagaccttacgagtgtggagaatgtgggaaatcttttagtcgaaagggcaacctcattcagcatcagcgaagccacactggagaaaggccttatgagtgtagagagtgtaggaaattatttaggggcaagtcccacctcattgaacaccagagagttcacactggagaaaggccatatgaatgtaatgaatgtgggaaatcatttcaagacagctctgggtttcgtgttcatcagagagttcacactggagaaaaaccgtttgagtgtagtgaatgtgggaagtcatttcctcaaagctgttccctccttcgacatcggagagttcatactggagaaaggccttatgaatgtggagaatgtggaaagtcatttcatcagagctcttccctccttcgacatcagaaaactcacactgcagaaagaccttatgagtgcagagaatgtgggaaattcttctccagtctccttgaacacaggagagttcacactggagaaaggccttatgaatgcagggaatgtggaaaaacatttactcgaaggtctgcgcattttaaacatcagagacttcatactcgaggaaagccttacgagtgcagcgaatgtgggaaatcctttgctgaaaccttcagtcttactgaacacaggagagtacacactggagaaaggccttatgagtgcagtgaatgtggaaaatcatttcatcgaagctcttctctccttcgacatcagagagttcacacagaaagaagtccttacaagtgaaaagaaatttgggaaattctttagctaaacctctgtgcatcttcttgatcagagggttcttactggatcaggaccttatgagtgtgacaaacgtgggatattctttatgcagaagtcttgttttattacatacagaagagctcccactgcagaagggcctcttgagtgcgatgaatgtgagaaagccttctgccttctgtcattggataacagattgttctcataaggaaaacactgtacacgtacaggaaatattatttcttgtaaaacataacactggaggagatgccttatgacggagccatctgcctaaattgacataccttcagcatctgcataaactcaattatgttggagctgtgtggcatttttcaccctgccgggttcccttgccagacatgatgtcggttatctggcaaaagccattttatgtcggccacgaggcaggtgttcactgtgcatcattcattcaccccatgatgttctggaagtaaaccttggttgtctttcgttggccagaggaattgaatgtccgtctgtctgcccaggctggagtggcacgatctcagctcactgcagcctccacctccagggttcaagcgattctcctgcctcagcctcccggggatctcaagggcatttccctttgcccacctcaccttttcatatttggtaaactgtatgcatttgcctccagcccaagattataaatatgaactgattatgatctgcatgttctctctttgggttcaagcatttccttacagaagagccaccgtggaagtcatgggtaaatatgtgttgaattggtaactccctcttggagaatttcttgtgaattacacagcaataggggaactcatttaactggagacataatctcaatttgtaaagtgtggcccattttctaacatttttattttgcataccctcccctctcttctcgattgatgaaactaacaaagaggttaataaaagcccatctcgtcatgtacagggactcatgcctttaattccagtgttttgggagactaaggcaagaacatcctggaggccaggagttcgacactgtataacagatatatctgacagcagtaactcaagcacaccctaagaatgaccctgtggtctaagaagagtgttggttcagcgttccaaacgaagaaatccaggagtggccaacctggaggtttctgaacccctggcctgttccttggaatgaggccctttgttttgagctaggcggagggtgataagtgaaaatactatataaactgcatgcttctttcaaatgatagtggtttttttgtccagcctgccgctcctggactgccctgtatctaagtcctcaataaaccctatgtctcattt

SEQ ID NO: 202440 - DNA, 543 bp, Homo sapiens
  Payload ID: 19926
  Gene Name: zinc finger protein 418
  ENST ID: ENST00000593296
  CDS Start-End: 265-543
aaggaacccacagagggaattagagggtgttccattccctcactggccttattccccattcacatgttctctagcttgtgatgtcctgggactcttacttgccattttttcagtcctttgatctgagaacactggagaaaccctaaacccagaatcctaagtccatgacacaggatgtatggaggcatcatctggctgcaaagaagagaacacactgtgtttgagggaggaggaaggaggatcagagtttaaactcctgccataatgcagcagggcactgtggcatttgaagatgtggctgtgaacttttcccaggaggagtggagtctccttagtgaggttcagagatgcctttaccatgacgtgatgctggagaactgggtacttatatcctccctgggttgttggtgtggatcagaagatgaggaggcaccttctaagaagagcatttctatacaaagagtgtctcaggtcagcactcctggggcaggtgtgtctcccaagaaggcccactcttgtgaaatgtgtggcgcgatcttggga

SEQ ID NO: 202441 - DNA, 2212 bp, Homo sapiens
  Payload ID: 19926
  Gene Name: zinc finger protein 418
  Uniprot ID: Q8TF45
  ENST ID: ENST00000616958
  CDS Start-End: 84-2114
caggcatcatctggctgcaaagaagagaacacactgtgtttgagggaggaggaaggaggatcagagtttaaactcctgccataatgcagggcactgtggcatttgaagatgtggctgtgaacttttcccaggaggagtggagtctccttagtgaggttcagagatgcctttaccatgacgtgatgctggagaactgggtacttatatcctccctgggttgttggtgtggatcagaagatgaggaggcaccttctaagaagagcatttctatacaaagagtgtctcaggtcagcactcctggggcaggtgtgtctcccaagaaggcccactcttgtgaaatgtgtggcgcgatcttgggagacattttgcacttggcagatcatcaggggacacatcacaagcagaaactgcacaggtgtgaggcatgggggaataaattgtatgatagttcaaaccgtccgcaccagaatcagtaccttggagagaaaccctatagaagcagtgttgaggaagcattgtttgtgaagaggtgtaagttccatgtgtcagaggagtcatctatcttcattcagagtggaaaggactttttgcccagctcaggattactgctgcaggaggccactcacactggggagaagtcaaacagcaaacctgagtgtgagtctccctttcagtggggagatactcattacagctgtggagaatgcatgaaacattctagcaccaaacacgtatttgttcaacagcagagacttccctctagagaggaatgttattgctgggaatgtgggaaatcctttagcaaatatgatagcgtcagtaatcatcagagagttcacactgggaaaagaccttatgaatgtggagaatgtgggaaatcttttagtcataagggcagccttgttcagcatcagcgagttcacactgggaaaagaccttatgaatgtggagaatgtgggaaatcttttagtcataagggcagccttgttcagcatcagcgagttcatactggagaaagaccttatgagtgtggagaatgtgggaaatcttttagtcaaaatggtactctcattaaacatcaacgagttcacactggagaaagaccttatgagtgtgaagaatgtgggaaatgttttactcagaagggcaatctcattcaacatcaacgaggtcacactagtgaaagaccttatgagtgtgaagaatgtggaaaatgttttagtcaaaagggcaccctaactgaacatcatcgagttcacactagagaacgaccttatgagtgtggagaatgtgggaaatcttttagtcgaaagggacaccttaggaaccatcagcgaggtcacactggagaaagaccttacgagtgtggagaatgtgggaaatcttttagtcgaaagggcaacctcattcagcatcagcgaagccacactggagaaaggccttatgagtgtagagagtgtaggaaattatttaggggcaagtcccacctcattgaacaccagagagttcacactggagaaaggccatatgaatgtaatgaatgtgggaaatcatttcaagacagctctgggtttcgtgttcatcagagagttcacactggagaaaaaccgtttgagtgtagtgaatgtgggaagtcatttcctcaaagctgttccctccttcgacatcggagagttcatactggagaaaggccttatgaatgtggagaatgtggaaagtcatttcatcagagctcttccctccttcgacatcagaaaactcacactgcagaaagaccttatgagtgcagagaatgtgggaaattcttctccagtctccttgaacacaggagagttcacactggagaaaggccttatgaatgcagggaatgtggaaaaacatttactcgaaggtctgcgcattttaaacatcagagacttcatactcgaggaaagccttacgagtgcagcgaatgtgggaaatcctttgctgaaaccttcagtcttactgaacacaggagagtacacactggagaaaggccttatgagtgcagtgaatgtggaaaatcatttcatcgaagctcttctctccttcgacatcagagagttcacacagaaagaagtccttacaagtgaaaagaaatttgggaaattctttagctaaacctctgtgcatcttcttgatcagagggttcttactggatcaggaccttatgagtgtgacaaacgtggga

SEQ ID NO: 202442 - DNA, 2309 bp, Homo sapiens
  Payload ID: 19927
  Gene Name: zinc finger protein 419
  Uniprot ID: Q96HQ0
  ENST ID: ENST00000221735
  CDS Start-End: 187-1719
gactcaggtgaactaacctgcgagaagctggttgtgcgctgaggcgaccagcgccggaaggcacggtggcgactcacgctgttctcgccgctcagaggcgggtctgaggctcggtggcggcgcccagggtggcccgggccctttcctcggtcattgtctcccctccagctctactcacaggctccgatggcggcggccgccctgagggaccccgctcaggttcctgtggctgcagacttgcttacagaccatgaggagggctatgtgacctttgaggatgtggctgtctacttctcccaggaggaatggagattgcttgatgacgctcagaggctcctctaccgcaatgtgatgctggagaactttacacttctggcctctctgggacttgcatcttccaagacccatgaaataacccagctggagtcatgggaggagcccttcatgcctgcttgggaagttgtgacttcagccataccgagaggttgttggcatggagccgaggctgaggaggctcctgagcagattgcttctgtaggactgctcagttcaaacattcagcaacaccagaagcagcactgtggagagaaacccttaaaaagacaagagggcagggtcccagttttgaggagttgcaaagttcacctatcagagaagtccttgcaaagcagggaggttgggaaggccctcctgatcagctcaggtgttctcaagcaccaggtgactcacacaggagagaagtcacataggagctccaaaagtagggaggcctttcatgctggaaaaaggcattacaaatgcagtgaatgtgggaaagcctttggtcagaaatatttacttgttcagcaccagagactacatgctgggaaaaagacgtatgaatgcagtgaatgtgggaagttatttagagatatgtccaacctttttatacaccaaatagttcacactggagaaaggccttacgggtgtagtaactgtggaaaatcctttagccgtaatgctcacctcattgaacaccagagagttcacactggagaaaagccttttacatgcagtgaatgtggaaaagctttcaggcataattccacacttgttcagcatcacaaaatccacactggagtaaggccttatgagtgcagtgaatgtggaaaattgtttagtttcaactccagcctcatgaaacatcagagaattcacactggagaaagaccttataagtgcagtgaatgtggaaaattctatagccacaagtccaaccttatcaaacattggcgtgttcatactggagaaaggccttacaagtgcagcgactgtgggaaattttttacccaatgctcaagcctcatgcaacatcaaaaagttcacactggagaaaagccttttaagtgcaatgaatgtgggagattctttagagagaattccaccctagttagacatcagagggttcacactggagcaaagccttatgagtgcagggaatgtgggaaattttttagccaaagctcaaccctcatgcaacatcgaaaagttcacattggagaaaagccttttaagtgcaatgaatgtgggagattgtttagagagaattccagccttgttaaacatcagagggttcacactggagcaaagccttatgagtgcagggaatgtgggaagttttttcgccacaactccagtctttttaaacatcgaaggattcacactggagaaatgcagtgattgtgtgaaatcctttagccagcgtttcaacctcattcaacaccagaaagttcacagtggaaaaaatcttgaaggtaacagatggaaatccgttagccacacctccagtctcattcaacactggacagtttacaatgtggacaatgtagtgaatatggaaaaaggtttcagccaaaggcctaaccctattcaacaccagaaagtttacactggagaaaggccttagggtgacaggttatgtactgtctctgaatcaatatgacctcacttaaaacagaaactctgaggatggcctttatgagggagctggcaattgaacatcattcatctaaatatgcacactggaggcaagatgagaattcctgacagattgtccttcctgagaagacagccctctgccttggagctccagagagagggagccctgtattcttggctgtacccgtcgaatggagttttgatctcgctgagtttggagttgggggaggaaaggagtggtcttggttcaaatgtgactcacttttgctgttcttgtgaatgttagatcttctttaataaatatttatttcccatacacccttatgaccatt

SEQ ID NO: 202443 - DNA, 3654 bp, Homo sapiens
  Payload ID: 19927
  Gene Name: zinc finger protein 419
  Uniprot ID: Q96HQ0
  ENST ID: ENST00000347466
  CDS Start-End: 211-1647
gtctcgtttggtattcactttcgcgactcaggtgaactaacctgcgagaagctggttgtgcgctgaggcgaccagcgccggaaggcacggtggcgactcacgctgttctcgccgctcagaggcgggtctgaggctcggtggcggcgcccagggtggcccgggccctttcctcggtcattgtctcccctccagctctactcacaggctccgatggcggcggccgccctgagggaccccgctcaggttcctgtggctgcagacttgcttacagaccatgaggagcagggctatgtgacctttgaggatgtggctgtctacttctcccaggaggaatggagattgcttgatgacgctcagaggctcctctaccgcaatgtgatgctggagaactttacacttctggcctctctgggttgttggcatggagccgaggctgaggaggctcctgagcagattgcttctgtaggactgctcagttcaaacattcagcaacaccagaagcagcactgtggagagaaacccttaaaaagacaagagggcagggtcccagttttgaggagttgcaaagttcacctatcagagaagtccttgcaaagcagggaggttgggaaggccctcctgatcagctcaggtgttctcaagcaccaggtgactcacacaggagagaagtcacataggagctccaaaagtagggaggcctttcatgctggaaaaaggcattacaaatgcagtgaatgtgggaaagcctttggtcagaaatatttacttgttcagcaccagagactacatgctgggaaaaagacgtatgaatgcagtgaatgtgggaagttatttagagatatgtccaacctttttatacaccaaatagttcacactggagaaaggccttacgggtgtagtaactgtggaaaatcctttagccgtaatgctcacctcattgaacaccagagagttcacactggagaaaagccttttacatgcagtgaatgtggaaaagctttcaggcataattccacacttgttcagcatcacaaaatccacactggagtaaggccttatgagtgcagtgaatgtggaaaattgtttagtttcaactccagcctcatgaaacatcagagaattcacactggagaaagaccttataagtgcagtgaatgtggaaaattctatagccacaagtccaaccttatcaaacattggcgtgttcatactggagaaaggccttacaagtgcagcgactgtgggaaattttttacccaatgctcaagcctcatgcaacatcaaaaagttcacactggagaaaagccttttaagtgcaatgaatgtgggagattctttagagagaattccaccctagttagacatcagagggttcacactggagcaaagccttatgagtgcagggaatgtgggaaattttttagccaaagctcaaccctcatgcaacatcgaaaagttcacattggagaaaagccttttaagtgcaatgaatgtgggagattgtttagagagaattccagccttgttaaacatcagagggttcacactggagcaaagccttatgagtgcagggaatgtgggaagttttttcgccacaactccagtctttttaaacatcgaaggattcacactggagaaatgcagtgattgtgtgaaatcctttagccagcgtttcaacctcattcaacaccagaaagttcacagtggaaaaaatcttgaaggtaacagatggaaatccgttagccacacctccagtctcattcaacactggacagtttacaatgtggacaatgtagtgaatatggaaaaaggtttcagccaaaggcctaaccctattcaacaccagaaagtttacactggagaaaggccttagggtgacaggttatgtactgtctctgaatcaatatgacctcacttaaaacagaaactctgaggatggcctttatgagggagctggcaattgaacatcattcatctaaatatgcacactggaggcaagatgagaattcctgacagattgtccttcctgagaagacagccctctgccttggagctccagagagagggagccctgtattcttggctgtacccgtcgaatggagttttgatctcgctgagtttggagttgggggaggaaaggagtggtcttggttcaaatgtgactcacttttgctgttcttgtgaatgttagatcttctttaataaatatttatttcccatacacccttatgaccatttccagagactgaattgtgtttttataattttcacccttttggctgtgtaacaggtctgcaaagctcctcattcagttattctgtaagttgatccaaatgtttcaaattttaagaacttgccaaattgtgttctaaatggttagcatttcatatttcctcctggaatatattagattttccatttcttcacattactgacagtttatatgtgtagaagtcataggccattcattttagccatgttactaagtgtgaagtagtatttcattgtagttcttaatttgtatttttccgatgactcagttttgagcattttttaatgtgtttacttgtcacccatatatcttctttagtcaaatgtattttttgcctgttttttaaaacatttggttggttacaagttcttaatatttctggagacaaattccttatttgatataagcattgtcaatattttctcatggtccatggcttttgttttcttttcttttttaaaatttagagatgaggtcgtgctatgttgcacagactagtctctaactcctggcctcaagtgatcatcctgcctcagcctcccaaagtgctgggattacaggcatgagccaccatgcttggccttgttttcagttcttaacagtatctttcctagagcagattgtcttaattttatggagcccaatttatccatttgttattttattcattgtgcatttggtgttgcatcctcttactataccatatctttgcctataaataaaagccttgactgagtgcggtggctcacgcctgtaatcccaacactttgggaggccaaggcgggtggatcacgaggtcaggagattgagaccatcctggctaacacagtgaaactccctctcaactaaaaatacaaaaaattagctgggcgtggtggcggctgcctgtagttccagctatcctggaggctgaggcaggagaatggtgtgagcccgggaggcggagcttgcagtgagccgagattgcgccactgcactccagcctggggcacaaagccagactctgtctcaaaaaaaaaaaaaaaaaaaaaaaaaaaaaaaaaaaaaaaaaaaagccttatgtgagtatgctactgtaatcttatgaatctttttaaatatccaacttctgaaatatttgtaggtttaactacaaataaataattcaatatatagataaatgtgtacatattccctatctttactgagagcctagcaagccatggcattccagtagttttgagcacatttaatacccagttattggtttatatcattttttaataaaaggaaccagaactccttagagaagaggctgttttcaagttgtggcagaaaaggtacaacatgatttgaggaaatactgcattggaaaataaataaatgttcacagaataatgttg

SEQ ID NO: 202444 - DNA, 1569 bp, Homo sapiens
  Payload ID: 19927
  Gene Name: zinc finger protein 419
  ENST ID: ENST00000354197
  CDS Start-End: 241-1569
gtgcgacacgcaatgggcgggacttccggcgtctcgtttggtattcactttcgcgactcaggtgaactaacctgcgagaagctggttgtgcgctgaggcgaccagcgccggaaggcacggtggcgactcacgctgttctcgccgctcagaggcgggtctgaggctcggtggcggcgcccagggtggcccgggccctttcctcggtcattgtctcccctccagctctactcacaggctccgatggcggcggccgccctgagggaccccgctcagcagggctatgtgacctttgaggatgtggctgtctacttctcccaggaggaatggagattgcttgatgacgctcagaggctcctctaccgcaatgtgatgctggagaactttacacttctggcctctctgggacttgcatcttccaagacccatgaaataacccagctggagtcatgggaggagcccttcatgcctgcttgggaagttgtgacttcagccataccgagaggttgttggcatggagccgaggctgaggaggctcctgagcagattgcttctgtaggactgctcagttcaaacattcagcaacaccagaagcagcactgtggagagaaacccttaaaaagacaagagggcagggtcccagttttgaggagttgcaaagttcacctatcagagaagtccttgcaaagcagggaggttgggaaggccctcctgatcagctcaggtgttctcaagcaccaggtgactcacacaggagagaagtcacataggagctccaaaagtagggaggcctttcatgctggaaaaaggcattacaaatgcagtgaatgtgggaaagcctttggtcagaaatatttacttgttcagcaccagagactacatgctgggaaaaagacgtatgaatgcagtgaatgtgggaagttatttagagatatgtccaacctttttatacaccaaatagttcacactggagaaaggccttacgggtgtagtaactgtggaaaatcctttagccgtaatgctcacctcattgaacaccagagagttcacactggagaaaagccttttacatgcagtgaatgtggaaaagctttcaggcataattccacacttgttcagcatcacaaaatccacactggagtaaggccttatgagtgcagtgaatgtggaaaattgtttagtttcaactccagcctcatgaaacatcagagaattcacactggagaaagaccttataagtgcagtgaatgtggaaaattctatagccacaagtccaaccttatcaaacattggcgtgttcatactggagaaaggccttacaagtgcagcgactgtgggaaattttttacccaatgctcaagcctcatgcaacatcaaaaagttcacactggagaaaagccttttaagtgcaatgaatgtgggagattctttagagagaattccagccttgttaaacatcagagggttcacactggagcaaagccttatgagtgcagggaatgtgggaagttttttcgccacaactccagtctttttaaacatcgaaggattcacactggagaaatgcagtga

SEQ ID NO: 202445 - DNA, 2323 bp, Homo sapiens
  Payload ID: 19927
  Gene Name: zinc finger protein 419
  Uniprot ID: Q96HQ0
  ENST ID: ENST00000424930
  CDS Start-End: 230-1765
aatgggcgggacttccggcgtctcgtttggtattcactttcgcgactcaggtgaactaacctgcgagaagctggttgtgcgctgaggcgaccagcgccggaaggcacggtggcgactcacgctgttctcgccgctcagaggcgggtctgaggctcggtggcggcgcccagggtggcccgggccctttcctcggtcattgtctcccctccagctctactcacaggctccgatggcggcggccgccctgagggaccccgctcaggttcctgtggctgcagacttgcttacagaccatgaggagcagggctatgtgacctttgaggatgtggctgtctacttctcccaggaggaatggagattgcttgatgacgctcagaggctcctctaccgcaatgtgatgctggagaactttacacttctggcctctctgggacttgcatcttccaagacccatgaaataacccagctggagtcatgggaggagcccttcatgcctgcttgggaagttgtgacttcagccataccgagaggttgttggcatggagccgaggctgaggaggctcctgagcagattgcttctgtaggactgctcagttcaaacattcagcaacaccagaagcagcactgtggagagaaacccttaaaaagacaagagggcagggtcccagttttgaggagttgcaaagttcacctatcagagaagtccttgcaaagcagggaggttgggaaggccctcctgatcagctcaggtgttctcaagcaccaggtgactcacacaggagagaagtcacataggagctccaaaagtagggaggcctttcatgctggaaaaaggcattacaaatgcagtgaatgtgggaaagcctttggtcagaaatatttacttgttcagcaccagagactacatgctgggaaaaagacgtatgaatgcagtgaatgtgggaagttatttagagatatgtccaacctttttatacaccaaatagttcacactggagaaaggccttacgggtgtagtaactgtggaaaatcctttagccgtaatgctcacctcattgaacaccagagagttcacactggagaaaagccttttacatgcagtgaatgtggaaaagctttcaggcataattccacacttgttcagcatcacaaaatccacactggagtaaggccttatgagtgcagtgaatgtggaaaattgtttagtttcaactccagcctcatgaaacatcagagaattcacactggagaaagaccttataagtgcagtgaatgtggaaaattctatagccacaagtccaaccttatcaaacattggcgtgttcatactggagaaaggccttacaagtgcagcgactgtgggaaattttttacccaatgctcaagcctcatgcaacatcaaaaagttcacactggagaaaagccttttaagtgcaatgaatgtgggagattctttagagagaattccaccctagttagacatcagagggttcacactggagcaaagccttatgagtgcagggaatgtgggaaattttttagccaaagctcaaccctcatgcaacatcgaaaagttcacattggagaaaagccttttaagtgcaatgaatgtgggagattgtttagagagaattccagccttgttaaacatcagagggttcacactggagcaaagccttatgagtgcagggaatgtgggaagttttttcgccacaactccagtctttttaaacatcgaaggattcacactggagaaatgcagtgattgtgtgaaatcctttagccagcgtttcaacctcattcaacaccagaaagttcacagtggaaaaaatcttgaaggtaacagatggaaatccgttagccacacctccagtctcattcaacactggacagtttacaatgtggacaatgtagtgaatatggaaaaaggtttcagccaaaggcctaaccctattcaacaccagaaagtttacactggagaaaggccttagggtgacaggttatgtactgtctctgaatcaatatgacctcacttaaaacagaaactctgaggatggcctttatgagggagctggcaattgaacatcattcatctaaatatgcacactggaggcaagatgagaattcctgacagattgtccttcctgagaagacagccctctgccttggagctccagagagagggagccctgtattcttggctgtacccgtcgaatggagttttgatctcgctgagtttggagttgggggaggaaaggagtggtcttggttcaaatgtgactcacttttgctgttcttgtgaatgttagatcttctttaataa

SEQ ID NO: 202446 - DNA, 2319 bp, Homo sapiens
  Payload ID: 19927
  Gene Name: zinc finger protein 419
  Uniprot ID: Q96HQ0
  ENST ID: ENST00000426954
  CDS Start-End: 241-1737
gtgcgacacgcaatgggcgggacttccggcgtctcgtttggtattcactttcgcgactcaggtgaactaacctgcgagaagctggttgtgcgctgaggcgaccagcgccggaaggcacggtggcgactcacgctgttctcgccgctcagaggcgggtctgaggctcggtggcggcgcccagggtggcccgggccctttcctcggtcattgtctcccctccagctctactcacaggctccgatggcggcggccgccctgagggaccccgctcagcagggctatgtgacctttgaggatgtggctgtctacttctcccaggaggaatggagattgcttgatgacgctcagaggctcctctaccgcaatgtgatgctggagaactttacacttctggcctctctgggacttgcatcttccaagacccatgaaataacccagctggagtcatgggaggagcccttcatgcctgcttgggaagttgtgacttcagccataccgagaggttgttggcatggagccgaggctgaggaggctcctgagcagattgcttctgtaggactgctcagttcaaacattcagcaacaccagaagcagcactgtggagagaaacccttaaaaagacaagagggcagggtcccagttttgaggagttgcaaagttcacctatcagagaagtccttgcaaagcagggaggttgggaaggccctcctgatcagctcaggtgttctcaagcaccaggtgactcacacaggagagaagtcacataggagctccaaaagtagggaggcctttcatgctggaaaaaggcattacaaatgcagtgaatgtgggaaagcctttggtcagaaatatttacttgttcagcaccagagactacatgctgggaaaaagacgtatgaatgcagtgaatgtgggaagttatttagagatatgtccaacctttttatacaccaaatagttcacactggagaaaggccttacgggtgtagtaactgtggaaaatcctttagccgtaatgctcacctcattgaacaccagagagttcacactggagaaaagccttttacatgcagtgaatgtggaaaagctttcaggcataattccacacttgttcagcatcacaaaatccacactggagtaaggccttatgagtgcagtgaatgtggaaaattgtttagtttcaactccagcctcatgaaacatcagagaattcacactggagaaagaccttataagtgcagtgaatgtggaaaattctatagccacaagtccaaccttatcaaacattggcgtgttcatactggagaaaggccttacaagtgcagcgactgtgggaaattttttacccaatgctcaagcctcatgcaacatcaaaaagttcacactggagaaaagccttttaagtgcaatgaatgtgggagattctttagagagaattccaccctagttagacatcagagggttcacactggagcaaagccttatgagtgcagggaatgtgggaaattttttagccaaagctcaaccctcatgcaacatcgaaaagttcacattggagaaaagccttttaagtgcaatgaatgtgggagattgtttagagagaattccagccttgttaaacatcagagggttcacactggagcaaagccttatgagtgcagggaatgtgggaagttttttcgccacaactccagtctttttaaacatcgaaggattcacactggagaaatgcagtgattgtgtgaaatcctttagccagcgtttcaacctcattcaacaccagaaagttcacagtggaaaaaatcttgaaggtaacagatggaaatccgttagccacacctccagtctcattcaacactggacagtttacaatgtggacaatgtagtgaatatggaaaaaggtttcagccaaaggcctaaccctattcaacaccagaaagtttacactggagaaaggccttagggtgacaggttatgtactgtctctgaatcaatatgacctcacttaaaacagaaactctgaggatggcctttatgagggagctggcaattgaacatcattcatctaaatatgcacactggaggcaagatgagaattcctgacagattgtccttcctgagaagacagccctctgccttggagctccagagagagggagccctgtattcttggctgtacccgtcgaatggagttttgatctcgctgagtttggagttgggggaggaaaggagtggtcttggttcaaatgtgactcacttttgctgttcttgtgaatgttagatcttctttaataaatatttatttcccatacaccctta

SEQ ID NO: 202447 - DNA, 2186 bp, Homo sapiens
  Payload ID: 19927
  Gene Name: zinc finger protein 419
  Uniprot ID: Q96HQ0
  ENST ID: ENST00000415379
  CDS Start-End: 202-1596
ggtattcactttcgcgactcaggtgaactaacctgcgagaagctggttgtgcgctgaggcgaccagcgccggaaggcacggtggcgactcacgctgttctcgccgctcagaggcgggtctgaggctcggtggcggcgcccagggtggcccgggccctttcctcggtcattgtctcccctccagctctactcacaggctccgatggcggcggccgccctgagggaccccgctcagggctatgtgacctttgaggatgtggctgtctacttctcccaggaggaatggagattgcttgatgacgctcagaggctcctctaccgcaatgtgatgctggagaactttacacttctggcctctctgggttgttggcatggagccgaggctgaggaggctcctgagcagattgcttctgtaggactgctcagttcaaacattcagcaacaccagaagcagcactgtggagagaaacccttaaaaagacaagagggcagggtcccagttttgaggagttgcaaagttcacctatcagagaagtccttgcaaagcagggaggttgggaaggccctcctgatcagctcaggtgttctcaagcaccaggtgactcacacaggagagaagtcacataggagctccaaaagtagggaggcctttcatgctggaaaaaggcattacaaatgcagtgaatgtgggaaagcctttggtcagaaatatttacttgttcagcaccagagactacatgctgggaaaaagacgtatgaatgcagtgaatgtgggaagttatttagagatatgtccaacctttttatacaccaaatagttcacactggagaaaggccttacgggtgtagtaactgtggaaaatcctttagccgtaatgctcacctcattgaacaccagagagttcacactggagaaaagccttttacatgcagtgaatgtggaaaagctttcaggcataattccacacttgttcagcatcacaaaatccacactggagtaaggccttatgagtgcagtgaatgtggaaaattgtttagtttcaactccagcctcatgaaacatcagagaattcacactggagaaagaccttataagtgcagtgaatgtggaaaattctatagccacaagtccaaccttatcaaacattggcgtgttcatactggagaaaggccttacaagtgcagcgactgtgggaaattttttacccaatgctcaagcctcatgcaacatcaaaaagttcacactggagaaaagccttttaagtgcaatgaatgtgggagattctttagagagaattccaccctagttagacatcagagggttcacactggagcaaagccttatgagtgcagggaatgtgggaaattttttagccaaagctcaaccctcatgcaacatcgaaaagttcacattggagaaaagccttttaagtgcaatgaatgtgggagattgtttagagagaattccagccttgttaaacatcagagggttcacactggagcaaagccttatgagtgcagggaatgtgggaagttttttcgccacaactccagtctttttaaacatcgaaggattcacactggagaaatgcagtgattgtgtgaaatcctttagccagcgtttcaacctcattcaacaccagaaagttcacagtggaaaaaatcttgaaggtaacagatggaaatccgttagccacacctccagtctcattcaacactggacagtttacaatgtggacaatgtagtgaatatggaaaaaggtttcagccaaaggcctaaccctattcaacaccagaaagtttacactggagaaaggccttagggtgacaggttatgtactgtctctgaatcaatatgacctcacttaaaacagaaactctgaggatggcctttatgagggagctggcaattgaacatcattcatctaaatatgcacactggaggcaagatgagaattcctgacagattgtccttcctgagaagacagccctctgccttggagctccagagagagggagccctgtattcttggctgtacccgtcgaatggagttttgatctcgctgagtttggagttgggggaggaaaggagtggtcttggttcaaatgtgactcacttttgctgttcttgtgaatgttagatcttctttaataaatatttatttcccatacacccttatgaccatt

SEQ ID NO: 202448 - DNA, 1857 bp, Homo sapiens
  Payload ID: 19927
  Gene Name: zinc finger protein 419
  Uniprot ID: Q96HQ0
  ENST ID: ENST00000442920
  CDS Start-End: 234-1727
acgcaatgggcgggacttccggcgtctcgtttggtattcactttcgcgactcaggtgaactaacctgcgagaagctggttgtgcgctgaggcgaccagcgccggaaggcacggtggcgactcacgctgttctcgccgctcagaggcgggtctgaggctcggtggcggcgcccagggtggcccgggccctttcctcggtcattgtctcccctccagctctactcacaggctccgatggcggcggccgccctgagggaccccgctcagggctatgtgacctttgaggatgtggctgtctacttctcccaggaggaatggagattgcttgatgacgctcagaggctcctctaccgcaatgtgatgctggagaactttacacttctggcctctctgggacttgcatcttccaagacccatgaaataacccagctggagtcatgggaggagcccttcatgcctgcttgggaagttgtgacttcagccataccgagaggttgttggcatggagccgaggctgaggaggctcctgagcagattgcttctgtaggactgctcagttcaaacattcagcaacaccagaagcagcactgtggagagaaacccttaaaaagacaagagggcagggtcccagttttgaggagttgcaaagttcacctatcagagaagtccttgcaaagcagggaggttgggaaggccctcctgatcagctcaggtgttctcaagcaccaggtgactcacacaggagagaagtcacataggagctccaaaagtagggaggcctttcatgctggaaaaaggcattacaaatgcagtgaatgtgggaaagcctttggtcagaaatatttacttgttcagcaccagagactacatgctgggaaaaagacgtatgaatgcagtgaatgtgggaagttatttagagatatgtccaacctttttatacaccaaatagttcacactggagaaaggccttacgggtgtagtaactgtggaaaatcctttagccgtaatgctcacctcattgaacaccagagagttcacactggagaaaagccttttacatgcagtgaatgtggaaaagctttcaggcataattccacacttgttcagcatcacaaaatccacactggagtaaggccttatgagtgcagtgaatgtggaaaattgtttagtttcaactccagcctcatgaaacatcagagaattcacactggagaaagaccttataagtgcagtgaatgtggaaaattctatagccacaagtccaaccttatcaaacattggcgtgttcatactggagaaaggccttacaagtgcagcgactgtgggaaattttttacccaatgctcaagcctcatgcaacatcaaaaagttcacactggagaaaagccttttaagtgcaatgaatgtgggagattctttagagagaattccaccctagttagacatcagagggttcacactggagcaaagccttatgagtgcagggaatgtgggaaattttttagccaaagctcaaccctcatgcaacatcgaaaagttcacattggagaaaagccttttaagtgcaatgaatgtgggagattgtttagagagaattccagccttgttaaacatcagagggttcacactggagcaaagccttatgagtgcagggaatgtgggaagttttttcgccacaactccagtctttttaaacatcgaaggattcacactggagaaatgcagtgattgtgtgaaatcctttagccagcgtttcaacctcattcaacaccagaaagttcacagtggaaaaaatcttgaaggtaacagatggaaatccgttagccacacctccagtctcattcaacactggacagtt

SEQ ID NO: 202449 - DNA, 746 bp, Homo sapiens
  Payload ID: 19927
  Gene Name: zinc finger protein 419
  ENST ID: ENST00000518999
  CDS Start-End: 181-513
ggtgaactaacctgcgagaagctggttgtgcgctgaggcgaccagcgccggaaggcacggtggcgactcacgctgttctcgccgctcagaggcgggtctgaggctcggtggcggcgcccagggtggcccgggccctttcctcggtcattgtctcccctccagctctactcacaggctccgatggcggcggccgccctgagggaccccgctcaggttcctgtggctgcagacttgcttacagaccatgaggagcagggctatgtgacctttgaggatgtggctgtctacttctcccaggaggaatggagattgcttgatgacgctcagaggctcctctaccgcaatgtgatgctggagaactttacacttctggcctctctgggacttgcatcttccaagacccatgaaataacccagctggagtcatgggaggagcccttcatgcctgcttgggaagttgtgacttcagccataccgagaggtagttggtgggtggagctcagggaggtgtgaactcagggatggattcatatcataccagtaggcccagatattttgataccaaggcaaggggttgtcgctgatttctatcttttcttccttagtcacccatttatatctattctgatgtttgacctagggccattccccacctctctgtcctccatgtttcacccagtcatcagcagaacccttcagcagtggctttcactgaatgtgtggtgaggtggatgcttatccttgca

SEQ ID NO: 202450 - DNA, 577 bp, Homo sapiens
  Payload ID: 19927
  Gene Name: zinc finger protein 419
  ENST ID: ENST00000523882
  CDS Start-End: 234-577
acgcaatgggcgggacttccggcgtctcgtttggtattcactttcgcgactcaggtgaactaacctgcgagaagctggttgtgcgctgaggcgaccagcgccggaaggcacggtggcgactcacgctgttctcgccgctcagaggcgggtctgaggctcggtggcggcgcccagggtggcccgggccctttcctcggtcattgtctcccctccagctctactcacaggctccgatggcggcggccgccctgagggaccccgctcaggttcctgtggctgcagacttgcttacagaccatgaggagcagggctatgtgacctttgaggatgtggctgtctacttctcccaggaggaatggagattgcttgatgacgctcagaggctcctctaccgcaatgtgatgctggagaactttacacttctggcctctctgggtaaggttctcacaccccaccccagcatcctgagctgggctcggcttttcctccttttcctagggagaggtctgttcttcccaaagctgaactgtgggcactcattccttctccagtatcctgaagtagctattgtaatagg

SEQ ID NO: 202451 - DNA, 572 bp, Homo sapiens
  Payload ID: 19927
  Gene Name: zinc finger protein 419
  ENST ID: ENST00000523312
  CDS Start-End: 232-572
gcaatgggcgggacttccggcgtctcgtttggtattcactttcgcgactcaggtgaactaacctgcgagaagctggttgtgcgctgaggcgaccagcgccggaaggcacggtggcgactcacgctgttctcgccgctcagaggcgggtctgaggctcggtggcggcgcccagggtggcccgggccctttcctcggtcattgtctcccctccagctctactcacaggctccgatggcggcggccgccctgagggaccccgctcagggctatgtgacctttgaggatgtggctgtctacttctcccaggaggaatggagattgcttgatgacgctcagaggctcctctaccgcaatgtgatgctggagaactttacacttctggcctctctgggtaaggttctcacaccccaccccagcatcctgagctgggctcggcttttcctccttttcctagggagaggtctgttcttcccaaagctgaactgtgggcactcattccttctccagtatcctgaagtagctattgtaataggcctgggctgtgtatactaccaccttctctccccaagctg

SEQ ID NO: 202452 - DNA, 561 bp, Homo sapiens
  Payload ID: 19927
  Gene Name: zinc finger protein 419
  ENST ID: ENST00000521754
  CDS Start-End: 199-561
attcactttcgcgactcaggtgaactaacctgcgagaagctggttgtgcgctgaggcgaccagcgccggaaggcacggtggcgactcacgctgttctcgccgctcagaggcgggtctgaggctcggtggcggcgcccagggtggcccgggccctttcctcggtcattgtctcccctccagctctactcacaggctccgatggcggcggccgccctgagggaccccgctcagcagggctatgtgacctttgaggatgtggctgtctacttctcccaggaggaatggagattgcttgatgacgctcagaggctcctctaccgcaatgtgatgctggagaactttacacttctggcctctctgggttgttggcatggagccgaggctgaggaggctcctgagcagattgcttctgtaggactgctcagttcaaacattcagcaacaccagaagcagcactgtggagagaaacccttaaaaagacaagagggcagggtcccagttttgaggagttgcaaagttcacctatcagagaagtccttgcaaagcagggaggttgggaag

SEQ ID NO: 202453 - DNA, 568 bp, Homo sapiens
  Payload ID: 19927
  Gene Name: zinc finger protein 419
  ENST ID: ENST00000520540
  CDS Start-End: 234-527
acgcaatgggcgggacttccggcgtctcgtttggtattcactttcgcgactcaggtgaactaacctgcgagaagctggttgtgcgctgaggcgaccagcgccggaaggcacggtggcgactcacgctgttctcgccgctcagaggcgggtctgaggctcggtggcggcgcccagggtggcccgggccctttcctcggtcattgtctcccctccagctctactcacaggctccgatggcggcggccgccctgagggaccccgctcagcagggctatgtgacctttgaggatgtggctgtctacttctcccaggaggaatggagattgcttgatgacgctcagaggctcctctaccgcaatgtgatgctggagaactttacacttctggcctctctgggacttgcatcttccaagacccatgaaataacccagctggagtcatgggaggagcccttcatgcctgcttgggaagttgtgacttcagccataccgagaggtagttggtgggtggagctcagggaggtgtgaactcagggatggattcatatcataccagtaggcccagatat

SEQ ID NO: 202454 - DNA, 462 bp, Homo sapiens
  Payload ID: 19927
  Gene Name: zinc finger protein 419
  ENST ID: ENST00000523138
  CDS Start-End: 202-462
ggtattcactttcgcgactcaggtgaactaacctgcgagaagctggttgtgcgctgaggcgaccagcgccggaaggcacggtggcgactcacgctgttctcgccgctcagaggcgggtctgaggctcggtggcggcgcccagggtggcccgggccctttcctcggtcattgtctcccctccagctctactcacaggctccgatggcggcggccgccctgagggaccccgctcaggttcctgtggctgcagacttgcttacagaccatgaggagggctatgtgacctttgaggatgtggctgtctacttctcccaggaggaatggagattgcttgatgacgctcagaggctcctctaccgcaatgtgatgctggagaactttacacttctggcctctctgggtaaggttctcacaccccaccccagcatcctgagctgggctcggcttttcctccttttccta

SEQ ID NO: 202455 - DNA, 690 bp, Homo sapiens
  Payload ID: 19927
  Gene Name: zinc finger protein 419
  ENST ID: ENST00000521137
  CDS Start-End: 171-690
cctgcgagaagctggttgtgcgctgaggcgaccagcgccggaaggcacggtggcgactcacgctgttctcgccgctcagaggcgggtctgaggctcggtggcggcgcccagggtggcccgggccctttcctcggtcattgtctcccctccagctctactcacaggctccgatggcggcggccgccctgagggaccccgctcaggttcctgtggctgcagacttgcttacagaccatgaggagggctatgtgacctttgaggatgtggctgtctacttctcccaggaggaatggagattgcttgatgacgctcagaggctcctctaccgcaatgtgatgctggagaactttacacttctggcctctctgggttgttggcatggagccgaggctgaggaggctcctgagcagattgcttctgtaggactgctcagttcaaacattcagcaacaccagaagcagcactgtggagagaaacccttaaaaagacaagagggcagggtcccagttttgaggagttgcaaagttcacctatcagagaagtccttgcaaagcagggaggttgggaaggccctcctgatcagctcaggtgttctcaagcaccaggtgactcacacaggagagaagtcacataggagctccaaaagtagggaggcctttcatgctggaaaaaggcattacaaatgcagtg

SEQ ID NO: 202456 - DNA, 567 bp, Homo sapiens
  Payload ID: 19927
  Gene Name: zinc finger protein 419
  ENST ID: ENST00000519310
  CDS Start-End: 418-567
acgcaatgggcgggacttccggcgtctcgtttggtattcactttcgcgactcaggtgaactaacctgcgagaagctggttgtgcgctgaggcgaccagcgccggaaggcacggtggcgactcacgctgttctcgccgctcagaggcgggtctgaggctcggtggcggcgcccagggtggcccgggccctttcctcggtcattgtctcccctccagctctactcacaggctccgatggcggcggccgccctgagggaccccgctcagtcttgattttccataggttcctgtggctgcagacttgcttacagaccatgaggagcagggctatgtgacctttgaggatgtggctgtctacttctcccaggaggaatggagattgcttgatgacgctcagaggctcctctaccgcaatgtgatgctggagaactttacacttctggcctctctgggttgttggcatggagccgaggctgaggaggctcctgagcagattgcttctgtaggactgctcagttcaaacattcagcaacaccagaagcagcactgtggagagaaacccttaaaa

SEQ ID NO: 202457 - DNA, 1281 bp, Homo sapiens
  Payload ID: 19927
  Gene Name: zinc finger protein 419
  ENST ID: ENST00000618093
  CDS Start-End: 1-1281
cagggctatgtgacctttgaggatgtggctgtctacttctcccaggaggaatggagattgcttgatgacgctcagaggctcctctaccgcaatgtgatgctggagaactttacacttctggcctctctgggtaaggttctcacaccccaccccagcatcctgagctgggctcggcttttcctccttttcctagggagaggtctgttcttcccaaagctgaactttgtgacttcagccataccgagaggtagttgggccattccccacctctctgtcctccatgtttcacccagtcatcagcagaacccttcagcagtggctttcactgaatgtgtgcagattgcttctgtaggactgctcagttcaaacattcagcaacaccagaagcagcactgtggagagaaacccttaaaaagacaagagggcagggtcccagttttgaggagttgcaaagttcacctatcagagaagtccttgcaaagcagggaggttgggaaggccctcctgatcagctcaggtgttctcaagcaccaggtgactcacacaggagagaagtcacataggagctccaaaagtagggaggcctttcatgctggaaaaaggcattacaaatgcagtgaatgtgggaaagcctttggtcagaaatatttacttgttcagcaccagagactacatgctgggaaaaagacgccttacgggtgtagtaactgtggaaaatcctttagccgtaatgctcacctcattgaacaccagagagttcacactggagaaaagccttttacatgcagtgaatgtggaaaagctttcaggcataattccacacttgttcagcatcacaaaatccacactggagtaaggccttatgagtgcagtgaatgtggaaaattgtttagtttcaactccagcctcatgaaacatcagagaattcacactggagaaagaccttataagtgcagtgaatgtggaaaattctatagccacaagtccaaccttatcaaacattggcgtgttcatactggagaaaggccttacaagtgcagcgactgtgggaaattttttacccaatgctcaagcctcatgcaacatcaaaaagttcacactggagaaaagccttttaagtgcaatgaatgtgggagattctttagagagaattccaccctagttagacatcagagggttcacactggagcaaagccttatgagtgcagggaatgtgggaaattttttagccaaagctcaaccctcatgcaacatcgaaaagttcacattggagaaaagcct

SEQ ID NO: 202458 - DNA, 1945 bp, Homo sapiens
  Payload ID: 19928
  Gene Name: zinc finger protein 420
  Uniprot ID: Q8TAQ5
  ENST ID: ENST00000304239
  CDS Start-End: 261-1871
gatttggaggcctcgcgtggggagagggccgcgtctgtggaggagcttggctccgcacctgctgggctggcgaacccgaaattgggcttggaacccgggagccagatcttggaccctgaactgcacctctgtcaagagcccagaggagaaagaatggctgtttcagtagcaatgtccaagctctgcattctccagactctgtgctttcctaagataggaacccagaagaggactgatcatttcttgcagctctaaaaaccatggctcggaaattagtgatgttcagggatgttgccattgacttctctcaggaagagtgggaatgcctggactctgctcagagagatttgtatagagatgtgatgttggagaactatagcaacttggtatcactagacttgccttcaaggtgtgcaagtaaggacttatctccagaaaagaacacttatgaaacagaattatcccaatgggaaatgagtgacagacttgaaaactgtgatcttgaagagtccaattccagggattatttggaagccaaaggcaagatggagaagcaacaagaaaatcagaaggaatatttcaggcaagggatgatcatatatgacaaaatgtccattttcaaccagcatacttacttatctcaacattcaagatgtcattctactgagaaaccctataaatgtaaggaatgtgggaaagccttcagacgagcctcacacctaacacaacatcaaagtattcatactggtgaaaaaccctatgaatgtaagcaatgcgggaaggcctttagtcgtgattcacaactcagtcttcatcagagacttcatactggtgagaaaccctatgcatgtaaggaatgtgggaaggcctttactcaaagctcacaacttattttacatcatagaattcatactggtgaaaaaccatataaatgtgaagaatgtgggaaagcctttattcgtagctcacaacttacccgacatcaaaaagttcatactggtgagaaaccttatgaatgtaaagaatgtgggaaggcctttactcagaattcacaacttacactacaccagagacttcatactggtgaaaagctctatgaatgtaaagaatgtaggaaggtctttactcagctctcacaacttattctgcataagagaattcataccggtgagaaaccctatgaatgtaaggaatgtggaaaagcttttatttgtggctcacagctttctcaacatcagaaaattcataatggggaaaaaccatatgaatgtaaggaatgtggaagggcctttattcggggctcactactgatgcaacatcagaggattcatactggtgaaaaaccctataaatgtgaagaatgtgggaaggcctttatccgtggctcacaacttactcaacaccagagaattcacaccaatgaaaagccctatgaatgtaaggaatgtggaaagatgtttagtcatggctcacaacttactcaacatcagagaatacacactggtgagaaaccctatcaatgtaaggaatgtggaaaagcgtttaatcgtggctcactccttacacgacaccagaggattcatactggtgagaaaccctatgaatgtaaagaatgtggaaaaacctttagtcgtggctcagaacttactcaacatgagcgaattcacacagccttccttgcaggtcaacaagatagaagtgatatttatatgagtaggagatttacgaaatccatttttcctgtctttttttccgtgcctacaatgtggacatctaagctggagctccgttactctcatggggactttgagaatggtatctgggtgttatggatcatggagcagaaatacagaaggagtctgcaaccctgatgactttgtggaacagccatactagctctggtctgcttgcctcctgtttctctttaaataaaattaaacatctt

SEQ ID NO: 202459 - DNA, 3535 bp, Homo sapiens
  Payload ID: 19928
  Gene Name: zinc finger protein 420
  Uniprot ID: Q8TAQ5
  ENST ID: ENST00000337995
  CDS Start-End: 216-2282
cttggctccgcacctgctgggctggcgaacccgaaattgggcttggaacccgggagccagatcttggaccctgaactgcacctctgtcaagagcccagaggagaaagaatggctgtttcagtagcaatgtccaagctctgcattctccagactctgtgctttcctaagataggaacccagaagaggactgatcatttcttgcagctctaaaaaccatggctcggaaattagtgatgttcagggatgttgccattgacttctctcaggaagagtgggaatgcctggactctgctcagagagatttgtatagagatgtgatgttggagaactatagcaacttggtatcactagacttgccttcaaggtgtgcaagtaaggacttatctccagaaaagaacacttatgaaacagaattatcccaatgggaaatgagtgacagacttgaaaactgtgatcttgaagagtccaattccagggattatttggaagccaaaggcaagatggagaagcaacaagaaaatcagaaggaatatttcaggcaagggatgatcatatatgacaaaatgtccattttcaaccagcatacttacttatctcaacattcaagatgtcattctactgagaaaccctataaatgtaaggaatgtgggaaagccttcagacgagcctcacacctaacacaacatcaaagtattcatactggtgaaaaaccctatgaatgtaagcaatgcgggaaggcctttagtcgtgattcacaactcagtcttcatcagagacttcatactggtgagaaaccctatgcatgtaaggaatgtgggaaggcctttactcaaagctcacaacttattttacatcatagaattcatactggtgaaaaaccatataaatgtgaagaatgtgggaaagcctttattcgtagctcacaacttacccgacatcaaaaagttcatactggtgagaaaccttatgaatgtaaagaatgtgggaaggcctttactcagaattcacaacttacactacaccagagacttcatactggtgaaaagctctatgaatgtaaagaatgtaggaaggtctttactcagctctcacaacttattctgcataagagaattcataccggtgagaaaccctatgaatgtaaggaatgtggaaaagcttttatttgtggctcacagctttctcaacatcagaaaattcataatggggaaaaaccatatgaatgtaaggaatgtggaagggcctttattcggggctcactactgatgcaacatcagaggattcatactggtgaaaaaccctataaatgtgaagaatgtgggaaggcctttatccgtggctcacaacttactcaacaccagagaattcacaccaatgaaaagccctatgaatgtaaggaatgtggaaagatgtttagtcatggctcacaacttactcaacatcagagaatacacactggtgagaaaccctatcaatgtaaggaatgtggaaaagcgtttaatcgtggctcactccttacacgacaccagaggattcatactggtgagaaaccctatgaatgtaaagaatgtggaaaaacctttagtcgtggctcagaacttactcaacatgagcgaattcacacaggtgagaaaccctatgaatgtaaggaatgtgggaaatcttttattcgtggttcccagcttactcaacatcagagaatccatactggtgagaaaccttatgaatgtaaagaatgtagaatggcctttactcagagttcacatctttcccaacatcaaagacttcacactggtgagaaaccctatgtgtgtaatgaatgtggaaaggcctttgcgcgtggcttactacttatacaacatcagagaattcatactggtgagaaaccatatcaatgtaaggaatgtgggaaagcctttattcgtggttcacagttgactcaacatcagcgaattcacactggagaaaaaccctatgaatgcaaggagtgtggcaaggcctttagtcatggctctcagcttactctacatcagagaatccatactggtgagaagccctatgaatgcagagaatgtagaaaggcctttactcagagttcacatctttctcggcatcagagaattcatactggtgagaaaccatatcaatgtaaggaatgtgggaaggcctttactcgtggttcacagctaactcaacatcagagaattcatatcagtgagaaatcttttgaatataaggaatgtgggattgactttagtcatggctcacaagtttacatgtgaattgtctgattatttgagatcactatgaagaggttctctggttgttagcagcaaagaattctcacaaatgtgaatatgggcgcacatttgcctcataaagcacagcatcagataatttatgtgagagaaaatggtagtgtcattcatatagaaaaacatcattactggaaacctattaaacattagcaaattggagaatagttttaatatagtaaatgtaggaagccctttagccatattgaaaacaaatatctttttcaacgttatcttagctctactagttgatctttttgttatatgtatcatgatacttaacctctaccttggtttaatcattttaagatagacctaagtatattacctttattgtaagattcttggaagtattatgtaagttattacatgtaaaagctcttagaatggtgccttgaacgtagcataccacaaatattagctaccattttcactagtgttattttagagaatttgcatgagaggagagtacttatgagtataatgaatattgagaaatcttttatcaacacatccaagatgacttggttggggggcactgtatgccataatgaatgtgagaaagctgtcatttaaatctcatccattattgctataagaggaaattcatactgttaaaaaaaaaaaaacccagtggatataatcagtgtattattaaaaaaaaaaaaacccagtggatgtaatcagtgtattattgagcacagctgttagagaagtgggacaaggtgtgaagtgatttttaacgaagtctaagatccaaagtctaataaatctaggaattttttaaaaacttgaatgtattgcttttgaagtaaacaaaataactgatattacagactattttgcaatgaaaaatgatgagagtttgtgatacagactgcttttttcctaccctatatctattttctcttttttagtaacaaatttctgggctgaaaatctcagccttccttgcaggtcaacaagatagaagtgatatttatatgagtaggagatttacgaaatccatttttcctgtctttttttccgtgcctacaatgtggacatctaagctggagctccgttactctcatggggactttgagaatggtatctgggtgttatggatcatggagcagaaatacagaaggagtctgcaaccctgatgactttgtggaacagccatactagctctggtctgcttgcctcctgtttctctttaaataaaattaaacatctta

SEQ ID NO: 202460 - DNA, 537 bp, Homo sapiens
  Payload ID: 19928
  Gene Name: zinc finger protein 420
  ENST ID: ENST00000589461
  CDS Start-End: 278-433
tttccgttagtttgcgagatttggaggcctcgcgtggggagagggccgcgtctgtggaggagcttggctccgcacctgctgggctggcgaacccgaaattgggcttggaacccgggagccagatcttggaccctgaactgcacctctgtcaagagcccagaggagaaagaatggctgtttcagtagcaatgtccaagctctgcattctccagactctgtgctttcctaagataggaacccagaagaggactgatcatttcttgcagctctaaaaaccatggctcggaaattagtgatgttcagggatgttgccattgacttctctcaggaagagtgggaatgcctggactctgctcagagagatttgtatagagatgtgatgttggagaactatagcaacttggtatcactagcacatcaaatatcaacgtaatgaataacagtctgaaaacttatctctaactggttgaagagcttgacctacgaaagtctgacaaatagttggactattaagcattccctgagacttgccttcaa

SEQ ID NO: 202461 - DNA, 612 bp, Homo sapiens
  Payload ID: 19928
  Gene Name: zinc finger protein 420
  ENST ID: ENST00000587029
  CDS Start-End: 349-612
aaaccagtccctgaggcttgggaaagcaggagccctccgcggcagtgcgtcggtgtcgaggctccgaggctccggcctcacctctccaggaggtcgacagaacgacaggacgttctccgaatgccaggagtcgcagagggcagagcaggatgaagaaaccacaggcggagtctaggggaagcagtacggcgtccctgcctcaggcctgcccggacggtgtgcggagcccagaggagaaagaatggctgtttcagtagcaatgtccaagctctgcattctccagactctgtgctttcctaagataggaacccagaagaggactgatcatttcttgcagctctaaaaaccatggctcggaaattagtgatgttcagggatgttgccattgacttctctcaggaagagtgggaatgcctggactctgctcagagagatttgtatagagatgtgatgttggagaactatagcaacttggtatcactagacttgccttcaaggtgtgcaagtaaggacttatctccagaaaagaacacttatgaaacagaattatcccaatgggaaatgagtgacagacttgaaaactgtgatcttgaagagtccaattccagggat

SEQ ID NO: 202462 - DNA, 571 bp, Homo sapiens
  Payload ID: 19928
  Gene Name: zinc finger protein 420
  ENST ID: ENST00000587082
  CDS Start-End: 263-406
gagatttggaggcctcgcgtggggagagggccgcgtctgtggaggagcttggctccgcacctgctgggctggcgaacccgaaattgggcttggaacccgggagccagatcttggaccctgaactgcacctctgtcaagagcccagaggagaaagaatggctgtttcagtagcaatgtccaagctctgcattctccagactctgtgctttcctaagataggaacccagaagaggactgatcatttcttgcagctctaaaaaccatggctcggaaattagtgatgttcagggatgttgccattgacttctctcaggaagagtgggaatgcctggactctgctcagagagatttgtatagagatgtgatgttggagaactatagcaacttggtatcactagcactctgaagatattattccactgtcctctggcttctattgttgctcttgagaagtctgccatctgtttcattgttattccttttcacatcaaatatcaacgtaatgaataacagtctgaaaacttatctctaactggttgaagagcttgacctacgaaagtctgacaaatag

SEQ ID NO: 202463 - DNA, 695 bp, Homo sapiens
  Payload ID: 19928
  Gene Name: zinc finger protein 420
  ENST ID: ENST00000589245
  CDS Start-End: 206-695
ctcgcgtggggagagggccgcgtctgtggaggagcttggctccgcacctgctgggctggcgaacccgaaattgggcttggaacccgggagccagatcttggaccctgaactgcacctctgtcaagctctgcattctccagactctgtgctttcctaagataggaacccagaagaggactgatcatttcttgcagctctaaaaaccatggctcggaaattagtgatgttcagggatgttgccattgacttctctcaggaagagtgggaatgcctggactctgctcagagagatttgtatagagatgtgatgttggagaactatagcaacttggtatcactagacttgccttcaaggtgtgcaagtaaggacttatctccagaaaagaacacttatgaaacagaattatcccaatgggaaatgagtgacagacttgaaaactgtgatcttgaagagtccaattccagggattatttggaagccaaaggcaagatggagaagcaacaagaaaatcagaaggaatatttcaggcaagggatgatcatatatgacaaaatgtccattttcaaccagcatacttacttatctcaacattcaagatgtcattctactgagaaaccctataaatgtaaggaatgtgggaaagccttcagacgagcctcacacctaacacaacatcaaagtattcatactggtg

SEQ ID NO: 202464 - DNA, 541 bp, Homo sapiens
  Payload ID: 19928
  Gene Name: zinc finger protein 420
  ENST ID: ENST00000590332
  CDS Start-End: 304-541
agaaaccagtccctgaggcttgggaaagcaggagccctccgcggcagtgcgtcggtgtcgaggctccgaggctccggcctcacctctccaggaggtcgacagaacgacaggacgttctccgaatgccaggagtcgcagagggcagagcaggatgaagaaaccacaggcggagtctaggggaagcagtacggcgtccctgcctcaggcctgcccggacggtgtgcggacttgccttcaaggtgtgcaagtaaggacttatctccagaaaagaacacttatgaaacagaattatcccaatgggaaatgagtgacagacttgaaaactgtgatcttgaagagtccaattccagggattatttggaagccaaaggcaagatggagaagcaacaagaaaatcagaaggaatatttcaggcaagggatgatcatatatgacaaaatgtccattttcaaccagcatacttacttatctcaacattcaagatgtcattctactgagaaaccctataaatgtaaggaatgtgggaaagccttcagacgag

SEQ ID NO: 202465 - DNA, 403 bp, Homo sapiens
  Payload ID: 19928
  Gene Name: zinc finger protein 420
  ENST ID: ENST00000585862
  CDS Start-End: 1-268
atgtaaggaatgtggaaagatgtttagtcatggctcacaacttactcaacatcagagaatacacactggtgagaaaccctatcaatgtaaggaatgtggaaaagcgtttaatcgtggctcactccttacacgacaccagaggattcatactggtgagaaaccctatgaatgtaaagaatgtggaaaaacctttagtcgtggctcagaacttactcaacatgagcgaattcacacagctggagctccgttactctcatggggactttgagaatggtatctgggtgttatggatcatggagcagaaatacagaaggagtctgcaaccctgatgactttgtggaacagccatactagctctggtctgcttgcctcctgtttctctttaaataaaattaaacatctt

SEQ ID NO: 202466 - DNA, 4578 bp, Homo sapiens
  Payload ID: 19929
  Gene Name: zinc finger protein 423
  Uniprot ID: Q2M1K9
  ENST ID: ENST00000262383
  CDS Start-End: 54-3908
gaaaacttcctggagaaggatggattttaccctgtaaaagaagaaagacatggatgcataagaagagggttgaagagggggaggcctcagacttctcgctggcctgggattcctccgtgacagcagcaggaggcctagaaggagagccagagtgcgatcagaaaaccagccgtgcgctggaagacaggaacagcgtgacaagtcaagaggagagaaatgaggatgatgaagacatggaggatgaatcaatttacacctgcgatcactgtcagcaggacttcgagtctctggcagacctgacggaccaccgggcccaccgctgtcctggagatggtgatgacgacccacaactctcctgggtggcctcgtctccctccagcaaggatgttgcgtcacccacgcagatgatcggagatggttgtgacctcggcctcggcgaggaggaagggggcacgggcctgccatacccttgccagttctgcgacaagtccttcatccgcttgagctacttgaagaggcacgagcagatccacagcgacaagctgccgttcaagtgcacctactgcagccgcctcttcaagcacaagaggagccgtgaccggcacatcaagctgcatacgggcgacaagaagtatcactgccacgagtgcgaggcagccttctcccgcagcgaccacctcaagatccacctgaagacccacagctccagcaagcccttcaagtgcactgtgtgcaagcgcggcttctcctccaccagctcgctgcagagccacatgcaggcccacaaaaagaacaaggagcatctggccaagtcggagaaggaagccaagaaggacgacttcatgtgcgactactgcgaggacaccttcagccagacggaggagctggagaagcacgtgctcacccgccacccgcagctgtccgagaaggcggacctgcagtgcattcactgccctgaggtcttcgtcgacgagaacacactgctcgcccatatccaccaagcccacgccaaccagaaacacaagtgccccatgtgccctgagcagttctcctcagtggaaggtgtctactgccacctggacagccaccggcagcccgactccagcaaccacagtgtcagtcccgaccctgtactgggcagcgtggcctccatgagcagcgccacacccgactccagcgcctctgtggagcgtggctccaccccggactccaccttgaagccgctgcgggggcagaagaagatgcgggatgacgggcagggctggaccaaggtggtctatagctgcccctattgttccaagcgggactttaacagcctggccgtgctggagatccacctgaagaccatccacgcggacaagccccagcagagccacacatgtcagatctgcctggactccatgcccaccctctacaacctcaacgagcacgttcgcaagctgcacaagaaccatgcctaccctgtgatgcagtttggcaacatctctgccttccactgcaactactgccccgagatgttcgccgacatcaatagcctgcaggagcacatccgcgtctcccactgcggccccaacgccaacccctctgacggtaataatgctttcttctgcaaccagtgctccatgggtttccttactgagtcctccctcaccgagcacatccagcaggcccactgcagtgtgggcagtgccaaactagagtctccggtggtgcagcccacgcagtccttcatggaggtctattcctgcccctactgcaccaactcccccatctttggctccatcctgaaactcaccaagcacatcaaggagaaccacaagaacattccactggcccacagcaagaagtccaaggccgagcagagcccagtctcgtccgatgtggaggtgtcttccccgaagcggcagcggctctcagcaagcgccaactccatctccaatggggagtatccttgcaatcaatgcgacctcaagttctccaactttgagagcttccagacccacctgaagctgcacctggagctgctgctgcggaagcaagcgtgcccccagtgcaaagaggactttgactcccaggagtccctcctgcagcacctgacagtgcattacatgaccacgtcgacccactatgtgtgcgagagctgcgacaagcaattttcctcggtggatgacctgcagaagcacctgctggacatgcacacctttgtgttgtaccactgcaccctgtgtcaggaggtcttcgactccaaggtgtccatccaggtgcacctggcggtgaagcacagcaatgagaagaagatgtaccgctgcacggcctgcaactgggacttccgcaaggaggctgacctgcaggtgcacgtcaaacacagccacctgggcaacccggccaaggctcacaagtgcatcttctgtggggagaccttcagcaccgaggtggagctgcagtgccacatcaccacacacagcaagaagtataactgtaagttctgcagcaaggccttccacgccatcatcctgctggagaagcacctgcgggagaagcactgtgtgtttgatgctgcgaccgagaacggcacggccaatggggtacccccaatggccaccaagaaagctgagcctgctgacctgcagggcatgctgcttaagaaccctgaggcacctaacagccatgaggccagcgaggatgacgtggacgcgtcggagcccatgtacggctgtgacatctgtggggcggcctacaccatggaggtgctgctgcagaatcaccggctgcgggaccacaatatccggccgggcgaggatgatggctcacgcaagaaggctgagtttatcaagggcagtcacaagtgcaacgtttgttcacggactttcttctcggagaacgggctacgggagcacctgcagacgcaccggggccctgccaagcactacatgtgtcccatctgtggtgagcgcttcccttcgctgctgacgctcaccgaacacaaggtgacccacagcaagagcctggacacgggcacctgtcgcatctgcaagatgcccctgcagagcgaggaggagtttattgagcactgccagatgcaccctgacctgcgcaactcactcacgggcttccgctgtgtggtctgcatgcagacagtcacttccacgcttgagctcaagatccatggcaccttccacatgcagaagctggcgggcagctcagcggcgtcctcccccaatggccaggggctgcagaagctctacaagtgcgccctgtgcctcaaggagttccgcagcaagcaggacctggtgaagcttgacgtcaatgggctgccctacggcctctgcgccggctgcatggcccgcagcgccaacggacaggtgggtggcctggccccgcccgagcccgccgaccggccctgtgccggcctccgttgccccgagtgcagtgtcaagtttgagagtgccgaagacctggagagccacatgcaggtggaccaccgtgacctcacgccggagaccagtgggccccggaaaggcacccagacatcgccagtgccccggaaaaagacataccagtgcatcaagtgccagatgaccttcgagaacgagagagagatccaaatccacgttgccaaccacatgattgaggaaggcatcaaccacgagtgtaagctgtgcaaccagatgttcgactccccggccaagctcctctgtcacctcattgagcacagcttcgagggcatgggcggcaccttcaaatgccccgtgtgtttcacagtcttcgtccaggccaacaagttgcagcagcacatctttgccgtgcacgggcaggaggacaagatctacgactgctcacagtgccctcagaagttcttcttccagaccgagctgcagaaccacacgatgagccagcacgcacagtgagggatcgctcaacaggacacctctccgcagaaggcttgccggagacgccgtggggagggccatttgaacattacatccaatcaaagtgtcatttgcaacccagatgtaaaactctaatgatttggccatgaggcgctgctattataagcagctggaaatgaatattaatggcagagattaaaagtattccatgctcagtattttttattgtcctgctacagctagtgtgcttttagactttccgccgcagactacatttctagagttagagaaacctgctttttaaggctattgtcctttgttccttcatgtattatattgatagtttttaaaaaagaattagtgtgattttttttctttgcttcttttttttctttcttgtttttcttcccccccaccccccacccccttcggttaactactttttaattgcaattctaggtaattgtgcatcgtgatgtgattgcttggctattgtctgaatatttccttttaattttttaattaaagactaatgctttgattggatttgccagttcaccggacagtgattaaaactatgtaatgaatataatcggtttcagtgcaactggatggtctgcttttaaatgtgacttaatctgactgcagtaactagtacagttcaataaagggaatccatgcgattagc

SEQ ID NO: 202467 - DNA, 4201 bp, Homo sapiens
  Payload ID: 19929
  Gene Name: zinc finger protein 423
  ENST ID: ENST00000535559
  CDS Start-End: 210-3713
accagtgggccggtgggaagcgcctctccagccctcgcctgccctgccgccgggtgctgggaacccgggctcaggttctggccctcttggcatcggccagtttgccctgggacgccctggtgagcagggggaaagatggtgatgacgacccacaactctcctgggtggcctcgtctccctccagcaaggatgttgcgtcacccacgcagatgatcggagatggttgtgacctcggcctcggcgaggaggaagggggcacgggcctgccatacccttgccagttctgcgacaagtccttcatccgcttgagctacttgaagaggcacgagcagatccacagcgacaagctgccgttcaagtgcacctactgcagccgcctcttcaagcacaagaggagccgtgaccggcacatcaagctgcatacgggcgacaagaagtatcactgccacgagtgcgaggcagccttctcccgcagcgaccacctcaagatccacctgaagacccacagctccagcaagcccttcaagtgcactgtgtgcaagcgcggcttctcctccaccagctcgctgcagagccacatgcaggcccacaaaaagaacaaggagcatctggccaagtcggagaaggaagccaagaaggacgacttcatgtgcgactactgcgaggacaccttcagccagacggaggagctggagaagcacgtgctcacccgccacccgcagctgtccgagaaggcggacctgcagtgcattcactgccctgaggtcttcgtcgacgagaacacactgctcgcccatatccaccaagcccacgccaaccagaaacacaagtgccccatgtgccctgagcagttctcctcagtggaaggtgtctactgccacctggacagccaccggcagcccgactccagcaaccacagtgtcagtcccgaccctgtactgggcagcgtggcctccatgagcagcgccacacccgactccagcgcctctgtggagcgtggctccaccccggactccaccttgaagccgctgcgggggcagaagaagatgcgggatgacgggcagggctggaccaaggtggtctatagctgcccctattgttccaagcgggactttaacagcctggccgtgctggagatccacctgaagaccatccacgcggacaagccccagcagagccacacatgtcagatctgcctggactccatgcccaccctctacaacctcaacgagcacgttcgcaagctgcacaagaaccatgcctaccctgtgatgcagtttggcaacatctctgccttccactgcaactactgccccgagatgttcgccgacatcaatagcctgcaggagcacatccgcgtctcccactgcggccccaacgccaacccctctgacggtaataatgctttcttctgcaaccagtgctccatgggtttccttactgagtcctccctcaccgagcacatccagcaggcccactgcagtgtgggcagtgccaaactagagtctccggtggtgcagcccacgcagtccttcatggaggtctattcctgcccctactgcaccaactcccccatctttggctccatcctgaaactcaccaagcacatcaaggagaaccacaagaacattccactggcccacagcaagaagtccaaggccgagcagagcccagtctcgtccgatgtggaggtgtcttccccgaagcggcagcggctctcagcaagcgccaactccatctccaatggggagtatccttgcaatcaatgcgacctcaagttctccaactttgagagcttccagacccacctgaagctgcacctggagctgctgctgcggaagcaagcgtgcccccagtgcaaagaggactttgactcccaggagtccctcctgcagcacctgacagtgcattacatgaccacgtcgacccactatgtgtgcgagagctgcgacaagcaattttcctcggtggatgacctgcagaagcacctgctggacatgcacacctttgtgttgtaccactgcaccctgtgtcaggaggtcttcgactccaaggtgtccatccaggtgcacctggcggtgaagcacagcaatgagaagaagatgtaccgctgcacggcctgcaactgggacttccgcaaggaggctgacctgcaggtgcacgtcaaacacagccacctgggcaacccggccaaggctcacaagtgcatcttctgtggggagaccttcagcaccgaggtggagctgcagtgccacatcaccacacacagcaagaagtataactgtaagttctgcagcaaggccttccacgccatcatcctgctggagaagcacctgcgggagaagcactgtgtgtttgatgctgcgaccgagaacggcacggccaatggggtacccccaatggccaccaagaaagctgagcctgctgacctgcagggcatgctgcttaagaaccctgaggcacctaacagccatgaggccagcgaggatgacgtggacgcgtcggagcccatgtacggctgtgacatctgtggggcggcctacaccatggaggtgctgctgcagaatcaccggctgcgggaccacaatatccggccgggcgaggatgatggctcacgcaagaaggctgagtttatcaagggcagtcacaagtgcaacgtttgttcacggactttcttctcggagaacgggctacgggagcacctgcagacgcaccggggccctgccaagcactacatgtgtcccatctgtggtgagcgcttcccttcgctgctgacgctcaccgaacacaaggtgacccacagcaagagcctggacacgggcacctgtcgcatctgcaagatgcccctgcagagcgaggaggagtttattgagcactgccagatgcaccctgacctgcgcaactcactcacgggcttccgctgtgtggtctgcatgcagacagtcacttccacgcttgagctcaagatccatggcaccttccacatgcagaagctggcgggcagctcagcggcgtcctcccccaatggccaggggctgcagaagctctacaagtgcgccctgtgcctcaaggagttccgcagcaagcaggacctggtgaagcttgacgtcaatgggctgccctacggcctctgcgccggctgcatggcccgcagcgccaacggacaggtgggtggcctggccccgcccgagcccgccgaccggccctgtgccggcctccgttgccccgagtgcagtgtcaagtttgagagtgccgaagacctggagagccacatgcaggtggaccaccgtgacctcacgccggagaccagtgggccccggaaaggcacccagacatcgccagtgccccggaaaaagacataccagtgcatcaagtgccagatgaccttcgagaacgagagagagatccaaatccacgttgccaaccacatgattgaggaaggcatcaaccacgagtgtaagctgtgcaaccagatgttcgactccccggccaagctcctctgtcacctcattgagcacagcttcgagggcatgggcggcaccttcaaatgccccgtgtgtttcacagtcttcgtccaggccaacaagttgcagcagcacatctttgccgtgcacgggcaggaggacaagatctacgactgctcacagtgccctcagaagttcttcttccagaccgagctgcagaaccacacgatgagccagcacgcacagtgagggatcgctcaacaggacacctctccgcagaaggcttgccggagacgccgtggggagggccatttgaacattacatccaatcaaagtgtcatttgcaacccagatgtaaaactctaatgatttggccatgaggcgctgctattataagcagctggaaatgaatattaatggcagagattaaaagtattccatgctcagtattttttattgtcctgctacagctagtgtgcttttagactttccgccgcagactacatttctagagttagagaaacctgctttttaaggctattgtcctttgttccttcatgtattatattgatagtttttaaaaaagaattagtgtgattttttttctttgcttcttttttttctttcttgtttttcttcccccccaccccccacccccttcggttaactactttttaattgcaattctaggtaattgtgcatcgtgatgtgattgcttggctattgtctgaatattt

SEQ ID NO: 202468 - DNA, 4017 bp, Homo sapiens
  Payload ID: 19929
  Gene Name: zinc finger protein 423
  ENST ID: ENST00000567169
  CDS Start-End: 190-3693
atccttcccgtctgccgagcccgtcatgtgaggcccccgggggagaaggtgctggtgctctgggagggtgttccaggaggccccttgagctgggctggggagctgggcttcagagatggtgatgacgacccacaactctcctgggtggcctcgtctccctccagcaaggatgttgcgtcacccacgcagatgatcggagatggttgtgacctcggcctcggcgaggaggaagggggcacgggcctgccatacccttgccagttctgcgacaagtccttcatccgcttgagctacttgaagaggcacgagcagatccacagcgacaagctgccgttcaagtgcacctactgcagccgcctcttcaagcacaagaggagccgtgaccggcacatcaagctgcatacgggcgacaagaagtatcactgccacgagtgcgaggcagccttctcccgcagcgaccacctcaagatccacctgaagacccacagctccagcaagcccttcaagtgcactgtgtgcaagcgcggcttctcctccaccagctcgctgcagagccacatgcaggcccacaaaaagaacaaggagcatctggccaagtcggagaaggaagccaagaaggacgacttcatgtgcgactactgcgaggacaccttcagccagacggaggagctggagaagcacgtgctcacccgccacccgcagctgtccgagaaggcggacctgcagtgcattcactgccctgaggtcttcgtcgacgagaacacactgctcgcccatatccaccaagcccacgccaaccagaaacacaagtgccccatgtgccctgagcagttctcctcagtggaaggtgtctactgccacctggacagccaccggcagcccgactccagcaaccacagtgtcagtcccgaccctgtactgggcagcgtggcctccatgagcagcgccacacccgactccagcgcctctgtggagcgtggctccaccccggactccaccttgaagccgctgcgggggcagaagaagatgcgggatgacgggcagggctggaccaaggtggtctatagctgcccctattgttccaagcgggactttaacagcctggccgtgctggagatccacctgaagaccatccacgcggacaagccccagcagagccacacatgtcagatctgcctggactccatgcccaccctctacaacctcaacgagcacgttcgcaagctgcacaagaaccatgcctaccctgtgatgcagtttggcaacatctctgccttccactgcaactactgccccgagatgttcgccgacatcaatagcctgcaggagcacatccgcgtctcccactgcggccccaacgccaacccctctgacggtaataatgctttcttctgcaaccagtgctccatgggtttccttactgagtcctccctcaccgagcacatccagcaggcccactgcagtgtgggcagtgccaaactagagtctccggtggtgcagcccacgcagtccttcatggaggtctattcctgcccctactgcaccaactcccccatctttggctccatcctgaaactcaccaagcacatcaaggagaaccacaagaacattccactggcccacagcaagaagtccaaggccgagcagagcccagtctcgtccgatgtggaggtgtcttccccgaagcggcagcggctctcagcaagcgccaactccatctccaatggggagtatccttgcaatcaatgcgacctcaagttctccaactttgagagcttccagacccacctgaagctgcacctggagctgctgctgcggaagcaagcgtgcccccagtgcaaagaggactttgactcccaggagtccctcctgcagcacctgacagtgcattacatgaccacgtcgacccactatgtgtgcgagagctgcgacaagcaattttcctcggtggatgacctgcagaagcacctgctggacatgcacacctttgtgttgtaccactgcaccctgtgtcaggaggtcttcgactccaaggtgtccatccaggtgcacctggcggtgaagcacagcaatgagaagaagatgtaccgctgcacggcctgcaactgggacttccgcaaggaggctgacctgcaggtgcacgtcaaacacagccacctgggcaacccggccaaggctcacaagtgcatcttctgtggggagaccttcagcaccgaggtggagctgcagtgccacatcaccacacacagcaagaagtataactgtaagttctgcagcaaggccttccacgccatcatcctgctggagaagcacctgcgggagaagcactgtgtgtttgatgctgcgaccgagaacggcacggccaatggggtacccccaatggccaccaagaaagctgagcctgctgacctgcagggcatgctgcttaagaaccctgaggcacctaacagccatgaggccagcgaggatgacgtggacgcgtcggagcccatgtacggctgtgacatctgtggggcggcctacaccatggaggtgctgctgcagaatcaccggctgcgggaccacaatatccggccgggcgaggatgatggctcacgcaagaaggctgagtttatcaagggcagtcacaagtgcaacgtttgttcacggactttcttctcggagaacgggctacgggagcacctgcagacgcaccggggccctgccaagcactacatgtgtcccatctgtggtgagcgcttcccttcgctgctgacgctcaccgaacacaaggtgacccacagcaagagcctggacacgggcacctgtcgcatctgcaagatgcccctgcagagcgaggaggagtttattgagcactgccagatgcaccctgacctgcgcaactcactcacgggcttccgctgtgtggtctgcatgcagacagtcacttccacgcttgagctcaagatccatggcaccttccacatgcagaagctggcgggcagctcagcggcgtcctcccccaatggccaggggctgcagaagctctacaagtgcgccctgtgcctcaaggagttccgcagcaagcaggacctggtgaagcttgacgtcaatgggctgccctacggcctctgcgccggctgcatggcccgcagcgccaacggacaggtgggtggcctggccccgcccgagcccgccgaccggccctgtgccggcctccgttgccccgagtgcagtgtcaagtttgagagtgccgaagacctggagagccacatgcaggtggaccaccgtgacctcacgccggagaccagtgggccccggaaaggcacccagacatcgccagtgccccggaaaaagacataccagtgcatcaagtgccagatgaccttcgagaacgagagagagatccaaatccacgttgccaaccacatgattgaggaaggcatcaaccacgagtgtaagctgtgcaaccagatgttcgactccccggccaagctcctctgtcacctcattgagcacagcttcgagggcatgggcggcaccttcaaatgccccgtgtgtttcacagtcttcgtccaggccaacaagttgcagcagcacatctttgccgtgcacgggcaggaggacaagatctacgactgctcacagtgccctcagaagttcttcttccagaccgagctgcagaaccacacgatgagccagcacgcacagtgagggatcgctcaacaggacacctctccgcagaaggcttgccggagacgccgtggggagggccatttgaacattacatccaatcaaagtgtcatttgcaacccagatgtaaaactctaatgatttggccatgaggcgctgctattataagcagctggaaatgaatattaatggcagagattaaaagtattccatgctcagtattttttattgtcctgctacagctagtgtgcttttagactttccgccgcagactacatttctagagttagagaaacctgctttttaaggctattgtcctttgttccttcatgtattatattgata

SEQ ID NO: 202469 - DNA, 7907 bp, Homo sapiens
  Payload ID: 19929
  Gene Name: zinc finger protein 423
  Uniprot ID: Q2M1K9
  ENST ID: ENST00000561648
  CDS Start-End: 302-4156
gaagaaaatcaaaccctccggaatgtccccctgaagaggaccactgttgcagcggggaccctcctttcaggcatcctcattttatcatgtccctttgctttcttccccagtggccttttcaaaggtcagagagaaatgcttagtcaaacccctacttgagtatcacaggtgactaattttgggatcgaagattaaggaggttttgttgcgtccttaaagaacttggaattggagtccaggtagttttggaaaacttcctggagaaggatggattttaccctgtaaaagaagaaagacatggatgcataagaagagggttgaagagggggaggcctcagacttctcgctggcctgggattcctccgtgacagcagcaggaggcctagaaggagagccagagtgcgatcagaaaaccagccgtgcgctggaagacaggaacagcgtgacaagtcaagaggagagaaatgaggatgatgaagacatggaggatgaatcaatttacacctgcgatcactgtcagcaggacttcgagtctctggcagacctgacggaccaccgggcccaccgctgtcctggagatggtgatgacgacccacaactctcctgggtggcctcgtctccctccagcaaggatgttgcgtcacccacgcagatgatcggagatggttgtgacctcggcctcggcgaggaggaagggggcacgggcctgccatacccttgccagttctgcgacaagtccttcatccgcttgagctacttgaagaggcacgagcagatccacagcgacaagctgccgttcaagtgcacctactgcagccgcctcttcaagcacaagaggagccgtgaccggcacatcaagctgcatacgggcgacaagaagtatcactgccacgagtgcgaggcagccttctcccgcagcgaccacctcaagatccacctgaagacccacagctccagcaagcccttcaagtgcactgtgtgcaagcgcggcttctcctccaccagctcgctgcagagccacatgcaggcccacaaaaagaacaaggagcatctggccaagtcggagaaggaagccaagaaggacgacttcatgtgcgactactgcgaggacaccttcagccagacggaggagctggagaagcacgtgctcacccgccacccgcagctgtccgagaaggcggacctgcagtgcattcactgccctgaggtcttcgtcgacgagaacacactgctcgcccatatccaccaagcccacgccaaccagaaacacaagtgccccatgtgccctgagcagttctcctcagtggaaggtgtctactgccacctggacagccaccggcagcccgactccagcaaccacagtgtcagtcccgaccctgtactgggcagcgtggcctccatgagcagcgccacacccgactccagcgcctctgtggagcgtggctccaccccggactccaccttgaagccgctgcgggggcagaagaagatgcgggatgacgggcagggctggaccaaggtggtctatagctgcccctattgttccaagcgggactttaacagcctggccgtgctggagatccacctgaagaccatccacgcggacaagccccagcagagccacacatgtcagatctgcctggactccatgcccaccctctacaacctcaacgagcacgttcgcaagctgcacaagaaccatgcctaccctgtgatgcagtttggcaacatctctgccttccactgcaactactgccccgagatgttcgccgacatcaatagcctgcaggagcacatccgcgtctcccactgcggccccaacgccaacccctctgacggtaataatgctttcttctgcaaccagtgctccatgggtttccttactgagtcctccctcaccgagcacatccagcaggcccactgcagtgtgggcagtgccaaactagagtctccggtggtgcagcccacgcagtccttcatggaggtctattcctgcccctactgcaccaactcccccatctttggctccatcctgaaactcaccaagcacatcaaggagaaccacaagaacattccactggcccacagcaagaagtccaaggccgagcagagcccagtctcgtccgatgtggaggtgtcttccccgaagcggcagcggctctcagcaagcgccaactccatctccaatggggagtatccttgcaatcaatgcgacctcaagttctccaactttgagagcttccagacccacctgaagctgcacctggagctgctgctgcggaagcaagcgtgcccccagtgcaaagaggactttgactcccaggagtccctcctgcagcacctgacagtgcattacatgaccacgtcgacccactatgtgtgcgagagctgcgacaagcaattttcctcggtggatgacctgcagaagcacctgctggacatgcacacctttgtgttgtaccactgcaccctgtgtcaggaggtcttcgactccaaggtgtccatccaggtgcacctggcggtgaagcacagcaatgagaagaagatgtaccgctgcacggcctgcaactgggacttccgcaaggaggctgacctgcaggtgcacgtcaaacacagccacctgggcaacccggccaaggctcacaagtgcatcttctgtggggagaccttcagcaccgaggtggagctgcagtgccacatcaccacacacagcaagaagtataactgtaagttctgcagcaaggccttccacgccatcatcctgctggagaagcacctgcgggagaagcactgtgtgtttgatgctgcgaccgagaacggcacggccaatggggtacccccaatggccaccaagaaagctgagcctgctgacctgcagggcatgctgcttaagaaccctgaggcacctaacagccatgaggccagcgaggatgacgtggacgcgtcggagcccatgtacggctgtgacatctgtggggcggcctacaccatggaggtgctgctgcagaatcaccggctgcgggaccacaatatccggccgggcgaggatgatggctcacgcaagaaggctgagtttatcaagggcagtcacaagtgcaacgtttgttcacggactttcttctcggagaacgggctacgggagcacctgcagacgcaccggggccctgccaagcactacatgtgtcccatctgtggtgagcgcttcccttcgctgctgacgctcaccgaacacaaggtgacccacagcaagagcctggacacgggcacctgtcgcatctgcaagatgcccctgcagagcgaggaggagtttattgagcactgccagatgcaccctgacctgcgcaactcactcacgggcttccgctgtgtggtctgcatgcagacagtcacttccacgcttgagctcaagatccatggcaccttccacatgcagaagctggcgggcagctcagcggcgtcctcccccaatggccaggggctgcagaagctctacaagtgcgccctgtgcctcaaggagttccgcagcaagcaggacctggtgaagcttgacgtcaatgggctgccctacggcctctgcgccggctgcatggcccgcagcgccaacggacaggtgggtggcctggccccgcccgagcccgccgaccggccctgtgccggcctccgttgccccgagtgcagtgtcaagtttgagagtgccgaagacctggagagccacatgcaggtggaccaccgtgacctcacgccggagaccagtgggccccggaaaggcacccagacatcgccagtgccccggaaaaagacataccagtgcatcaagtgccagatgaccttcgagaacgagagagagatccaaatccacgttgccaaccacatgattgaggaaggcatcaaccacgagtgtaagctgtgcaaccagatgttcgactccccggccaagctcctctgtcacctcattgagcacagcttcgagggcatgggcggcaccttcaaatgccccgtgtgtttcacagtcttcgtccaggccaacaagttgcagcagcacatctttgccgtgcacgggcaggaggacaagatctacgactgctcacagtgccctcagaagttcttcttccagaccgagctgcagaaccacacgatgagccagcacgcacagtgagggatcgctcaacaggacacctctccgcagaaggcttgccggagacgccgtggggagggccatttgaacattacatccaatcaaagtgtcatttgcaacccagatgtaaaactctaatgatttggccatgaggcgctgctattataagcagctggaaatgaatattaatggcagagattaaaagtattccatgctcagtattttttattgtcctgctacagctagtgtgcttttagactttccgccgcagactacatttctagagttagagaaacctgctttttaaggctattgtcctttgttccttcatgtattatattgatagtttttaaaaaagaattagtgtgattttttttctttgcttcttttttttctttcttgtttttcttcccccccaccccccacccccttcggttaactactttttaattgcaattctaggtaattgtgcatcgtgatgtgattgcttggctattgtctgaatatttccttttaattttttaattaaagactaatgctttgattggatttgccagttcaccggacagtgattaaaactatgtaatgaatataatcggtttcagtgcaactggatggtctgcttttaaatgtgacttaatctgactgcagtaactagtacagttcaataaagggaatccatgcgattagcatccggctgcctggttctctcctccccagcctagggccgcgtggggggctgtcagctcctgtaaggtgtgttcccctacaagttcctgtgggcttgcacacgcccttggggacctgcacacaatagaccctgctccccttggaaaagaatcgtagtaacctaatgcatgcagactggacaggctggcagtggccacaggagtcaaagcagaagaccccttaatgatggaataccctgatcttcccactcttggatggggaaacagaggcccaagggtaacgtgcagctttcccaaggccacgcagcaggttggtcaccatgctgattgtgaagtcttcttggctttcccttcagggttggctttcccctttgttggatacaggcaggcaagtgggtagcccttcccttgccaggactccaggtggcacttgggttctgaggcacggagatgtgtgactggggactgcagagcagagccaggtaggagccgcaggttcccagtcatagagatcagtaggatgtgagagcattgagactggtggcgggggccaggtctggagtgaggcaggcaggggcctggggtacattatttcagggggcactcgctctcagggcccccctacacctgcaagtgctgggaatgggtgtcctcttgcattttacactctaggcaccttgcttatttcacctactcctggccctgctggcctcccagggcccacccagcagccttggtctccaggcctcctccatgttacctcccacacctccatcatgctggtgctcagctgacttgccaatcagaggccagaacttgcacggggaaacccttccttgctaacttttcacaaggggcaaggaaattggttattaccctctgcagagcggaaatgaaacaggcagacagattgcacctaattataatgtaatactaagtcacgggtgtggaatttggagcaattatacccatcatcttctagaagactcccatatcaaggggcttctggtgacctataagagttcccctttctttctgtcacctcatgtaatgttctcacgcgggtggggctttcagtttttcaaaaggcatcttacatatgtgaatcatagagcagaccctgccagtagtgggctgttgcctcctggaaactgaaggctgtgaatgccaattttcagcctcctggagacctggcagttttgggggaagaccccagggtagacaccagtgttcctctaagtgtgcccacccgtggactggggcttggggcctggggctggggctatgtctgagtgaggctgccacacatccacagccaggcctaccttttgggcagtgctgggactgtcgatgggaccagtatgtcccggggcctgccacatctccgtctcagggccctctccagctctggatttatcccaaaccccatggagcccaggtgagccctcagtaactaccaatagaagattcgatttgacggttggtggcgtagggctaaattagtcactgcccccattaaaaatacagcggggggtttaagagcttttcacgccatgtgggaatcagcagcgaagccggctgatgccttgggtaaggagagaggcggcctaggggaccgtgaggtaatgaggtttatggcggtgacaaggcagccagggaaccccaccgactcccccctcaccccggccgcattgttctccggctggctctgtccctgctgctacggctgagagcccctcgtgactttgtgtggggagggggctggcagtggggaccctgaggcccttcctgggactggcattctttaccatcaggtggtattagggttggggagcagtgtagggttataaacctgtgcctcggagaactcactaaccccttccagaggaaaggtctggagctgggatgagacacttgcctttcaactgtgaggggccttagagggtctctgggaggcttgtatgaagtgatgcctgacaaagggctgcacacagagacctgtaagcagcatggtcatcaatgatggtgccaggcatcctgcaggagggcaccttttcagccaggagggcgcgatggaatcagcctctcatttggatttggctttggggagtgggcgaggtgactgaaagcctaaggttcattgctgctgtatttagatgtacaaattgtcagtttctagcggctctctgggcagaggaattttgcccaggctgggaaatggaccaggacccttgggccacaggcccctgtcatggaacacctgcccagagtgcccagaagcaggcaggtaagggtttcagtctcagtggagaaactgtcatgggagaaatcttctcgagttccccagccttaaagaacgctccttttaaattcacagttgtgtaatattgaacttttcacctgtttttcttccctcctaaggtgtgtgttcctagggatggaacctgtacctataaatattcagtaaataggaccaaaactcaaatccatcccttcctctactcatccattcagcaagtatttactgagctgcccccaggtgccaggcactgcacagggcactggggataaggagatgaccagcagatgtggtccctggcctcatggaggccacagtggcacaggcaagcatgccagtaaatgcatagccacacctggtcatgagtgccgtgatggcaaagccagaagctgccagggattaatggagggacccgtgtatgagacacaggggtgcattaaggaaggccttgctgaggcaggggcttgagacctgaagaaataagggaggtgggcagtccaagagcagtgggaagagaacactgcaaatgcagaagccgtgagctggaaacgagccagaagtacccttagagagctgtattcctatggagtttcaattctaggtggcttaaaacaatcccagagaagttcagaatcttgtccaagatcataccattcaggatagacttgcgactataacttgggtgcctcaccttccagcctggggtgtctgactccattgttaattttattataacaatcatgatgacaacgatgaataaagtgaaattgtactgtacaggaaa

SEQ ID NO: 202470 - DNA, 4911 bp, Homo sapiens
  Payload ID: 19929
  Gene Name: zinc finger protein 423
  Uniprot ID: Q2M1K9
  ENST ID: ENST00000563137
  CDS Start-End: 566-4240
ttttttttttttttttttttttgcataactcggctcggccgagtggcctccggactccccgcgccgctgggaccgccgcttggatcgggagccccggactgccgcattgcaacaggcagggccccggcgcgccccccgggcctccccccgccttcgagcggcctcggccggcccgggctgcccccccaagggaggccgccccggacctgcggtccgctccccacagccgccaaccgggctgcaaaaaaaaaagtttccaagagacaggcggaggagaagggggagaagggctgcccggagcggcggggggcggcggggggagccggctgcggagggcgacggagcgcccggagccccggacatgtccaggcggaagcaggcgaagccgcgctcggtgaaagttgaagagggggaggcctcagacttctcgctggcctgggattcctccgtgacagcagcaggaggcctagaaggagagccagagtgcgatcagaaaaccagccgtgcgctggaagacaggaacagcgtgacaagtcaagaggagagaaatgaggatgatgaagacatggaggatgaatcaatttacacctgcgatcactgtcagcaggacttcgagtctctggcagacctgacggaccaccgggcccaccgctgtcctggagatggtgatgacgacccacaactctcctgggtggcctcgtctccctccagcaaggatgttgcgtcacccacgcagatgatcggagatggttgtgacctcggcctcggcgaggaggaagggggcacgggcctgccatacccttgccagttctgcgacaagtccttcatccgcttgagctacttgaagaggcacgagcagatccacagcgacaagctgccgttcaagtgcacctactgcagccgcctcttcaagcacaagaggagccgtgaccggcacatcaagctgcatacgggcgacaagaagtatcactgccacgagtgcgaggcagccttctcccgcagcgaccacctcaagatccacctgaagacccacagctccagcaagcccttcaagtgcactgtgtgcaagcgcggcttctcctccaccagctcgctgcagagccacatgcaggcccacaaaaagaacaaggagcatctggccaagtcggagaaggaagccaagaaggacgacttcatgtgcgactactgcgaggacaccttcagccagacggaggagctggagaagcacgtgctcacccgccacccgcagctgtccgagaaggcggacctgcagtgcattcactgccctgaggtcttcgtcgacgagaacacactgctcgcccatatccaccaagcccacgccaaccagaaacacaagtgccccatgtgccctgagcagttctcctcagtggaaggtgtctactgccacctggacagccaccggcagcccgactccagcaaccacagtgtcagtcccgaccctgtactgggcagcgtggcctccatgagcagcgccacacccgactccagcgcctctgtggagcgtggctccaccccggactccaccttgaagccgctgcgggggcagaagaagatgcgggatgacgggcagggctggaccaaggtggtctatagctgcccctattgttccaagcgggactttaacagcctggccgtgctggagatccacctgaagaccatccacgcggacaagccccagcagagccacacatgtcagatctgcctggactccatgcccaccctctacaacctcaacgagcacgttcgcaagctgcacaagaaccatgcctaccctgtgatgcagtttggcaacatctctgccttccactgcaactactgccccgagatgttcgccgacatcaatagcctgcaggagcacatccgcgtctcccactgcggccccaacgccaacccctctgacggtaataatgctttcttctgcaaccagtgctccatgggtttccttactgagtcctccctcaccgagcacatccagcaggcccactgcagtgtgggcagtgccaaactagagtctccggtggtgcagcccacgcagtccttcatggaggtctattcctgcccctactgcaccaactcccccatctttggctccatcctgaaactcaccaagcacatcaaggagaaccacaagaacattccactggcccacagcaagaagtccaaggccgagcagagcccagtctcgtccgatgtggaggtgtcttccccgaagcggcagcggctctcagcaagcgccaactccatctccaatggggagtatccttgcaatcaatgcgacctcaagttctccaactttgagagcttccagacccacctgaagctgcacctggagctgctgctgcggaagcaagcgtgcccccagtgcaaagaggactttgactcccaggagtccctcctgcagcacctgacagtgcattacatgaccacgtcgacccactatgtgtgcgagagctgcgacaagcaattttcctcggtggatgacctgcagaagcacctgctggacatgcacacctttgtgttgtaccactgcaccctgtgtcaggaggtcttcgactccaaggtgtccatccaggtgcacctggcggtgaagcacagcaatgagaagaagatgtaccgctgcacggcctgcaactgggacttccgcaaggaggctgacctgcaggtgcacgtcaaacacagccacctgggcaacccggccaaggctcacaagtgcatcttctgtggggagaccttcagcaccgaggtggagctgcagtgccacatcaccacacacagcaagaagtataactgtaagttctgcagcaaggccttccacgccatcatcctgctggagaagcacctgcgggagaagcactgtgtgtttgatgctgcgaccgagaacggcacggccaatggggtacccccaatggccaccaagaaagctgagcctgctgacctgcagggcatgctgcttaagaaccctgaggcacctaacagccatgaggccagcgaggatgacgtggacgcgtcggagcccatgtacggctgtgacatctgtggggcggcctacaccatggaggtgctgctgcagaatcaccggctgcgggaccacaatatccggccgggcgaggatgatggctcacgcaagaaggctgagtttatcaagggcagtcacaagtgcaacgtttgttcacggactttcttctcggagaacgggctacgggagcacctgcagacgcaccggggccctgccaagcactacatgtgtcccatctgtggtgagcgcttcccttcgctgctgacgctcaccgaacacaaggtgacccacagcaagagcctggacacgggcacctgtcgcatctgcaagatgcccctgcagagcgaggaggagtttattgagcactgccagatgcaccctgacctgcgcaactcactcacgggcttccgctgtgtggtctgcatgcagacagtcacttccacgcttgagctcaagatccatggcaccttccacatgcagaagctggcgggcagctcagcggcgtcctcccccaatggccaggggctgcagaagctctacaagtgcgccctgtgcctcaaggagttccgcagcaagcaggacctggtgaagcttgacgtcaatgggctgccctacggcctctgcgccggctgcatggcccgcagcgccaacggacaggtgggtggcctggccccgcccgagcccgccgaccggccctgtgccggcctccgttgccccgagtgcagtgtcaagtttgagagtgccgaagacctggagagccacatgcaggtggaccaccgtgacctcacgccggagaccagtgggccccggaaaggcacccagacatcgccagtgccccggaaaaagacataccagtgcatcaagtgccagatgaccttcgagaacgagagagagatccaaatccacgttgccaaccacatgattgaggaaggcatcaaccacgagtgtaagctgtgcaaccagatgttcgactccccggccaagctcctctgtcacctcattgagcacagcttcgagggcatgggcggcaccttcaaatgccccgtgtgtttcacagtcttcgtccaggccaacaagttgcagcagcacatctttgccgtgcacgggcaggaggacaagatctacgactgctcacagtgccctcagaagttcttcttccagaccgagctgcagaaccacacgatgagccagcacgcacagtgagggatcgctcaacaggacacctctccgcagaaggcttgccggagacgccgtggggagggccatttgaacattacatccaatcaaagtgtcatttgcaacccagatgtaaaactctaatgatttggccatgaggcgctgctattataagcagctggaaatgaatattaatggcagagattaaaagtattccatgctcagtattttttattgtcctgctacagctagtgtgcttttagactttccgccgcagactacatttctagagttagagaaacctgctttttaaggctattgtcctttgttccttcatgtattatattgatagtttttaaaaaagaattagtgtgattttttttctttgcttcttttttttctttcttgtttttcttcccccccaccccccacccccttcggttaactactttttaattgcaattctaggtaattgtgcatcgtgatgtgattgcttggctattgtctgaatatttccttttaattttttaattaaagactaatgctttgattggatttgccagttcaccggacagtgattaaaactatgtaatgaatataatcggtttcagtgcaactggatggtctgcttttaaatgtgacttaatctgactgcagtaactagtacagttcaataaagggaatccatgcgattagca

SEQ ID NO: 202471 - DNA, 4018 bp, Homo sapiens
  Payload ID: 19929
  Gene Name: zinc finger protein 423
  Uniprot ID: Q2M1K9
  ENST ID: ENST00000562520
  CDS Start-End: 344-4018
ttttcccaagtcagaacccttcccgggcctgcccggagaccagagtctcagccggttcaggagctgcgggggacgcgcggcgccccctggcggctgggtaaaacctcgcagaaagtagcagctggtttatttcttctgacaactgcgcggggagggggtgctcctgcaaggtctcagggttgaagagggggaggcctcagacttctcgctggcctgggattcctccgtgacagcagcaggaggcctagaaggagagccagagtgcgatcagaaaaccagccgtgcgctggaagacaggaacagcgtgacaagtcaagaggagagaaatgaggatgatgaagacatggaggatgaatcaatttacacctgcgatcactgtcagcaggacttcgagtctctggcagacctgacggaccaccgggcccaccgctgtcctggagatggtgatgacgacccacaactctcctgggtggcctcgtctccctccagcaaggatgttgcgtcacccacgcagatgatcggagatggttgtgacctcggcctcggcgaggaggaagggggcacgggcctgccatacccttgccagttctgcgacaagtccttcatccgcttgagctacttgaagaggcacgagcagatccacagcgacaagctgccgttcaagtgcacctactgcagccgcctcttcaagcacaagaggagccgtgaccggcacatcaagctgcatacgggcgacaagaagtatcactgccacgagtgcgaggcagccttctcccgcagcgaccacctcaagatccacctgaagacccacagctccagcaagcccttcaagtgcactgtgtgcaagcgcggcttctcctccaccagctcgctgcagagccacatgcaggcccacaaaaagaacaaggagcatctggccaagtcggagaaggaagccaagaaggacgacttcatgtgcgactactgcgaggacaccttcagccagacggaggagctggagaagcacgtgctcacccgccacccgcagctgtccgagaaggcggacctgcagtgcattcactgccctgaggtcttcgtcgacgagaacacactgctcgcccatatccaccaagcccacgccaaccagaaacacaagtgccccatgtgccctgagcagttctcctcagtggaaggtgtctactgccacctggacagccaccggcagcccgactccagcaaccacagtgtcagtcccgaccctgtactgggcagcgtggcctccatgagcagcgccacacccgactccagcgcctctgtggagcgtggctccaccccggactccaccttgaagccgctgcgggggcagaagaagatgcgggatgacgggcagggctggaccaaggtggtctatagctgcccctattgttccaagcgggactttaacagcctggccgtgctggagatccacctgaagaccatccacgcggacaagccccagcagagccacacatgtcagatctgcctggactccatgcccaccctctacaacctcaacgagcacgttcgcaagctgcacaagaaccatgcctaccctgtgatgcagtttggcaacatctctgccttccactgcaactactgccccgagatgttcgccgacatcaatagcctgcaggagcacatccgcgtctcccactgcggccccaacgccaacccctctgacggtaataatgctttcttctgcaaccagtgctccatgggtttccttactgagtcctccctcaccgagcacatccagcaggcccactgcagtgtgggcagtgccaaactagagtctccggtggtgcagcccacgcagtccttcatggaggtctattcctgcccctactgcaccaactcccccatctttggctccatcctgaaactcaccaagcacatcaaggagaaccacaagaacattccactggcccacagcaagaagtccaaggccgagcagagcccagtctcgtccgatgtggaggtgtcttccccgaagcggcagcggctctcagcaagcgccaactccatctccaatggggagtatccttgcaatcaatgcgacctcaagttctccaactttgagagcttccagacccacctgaagctgcacctggagctgctgctgcggaagcaagcgtgcccccagtgcaaagaggactttgactcccaggagtccctcctgcagcacctgacagtgcattacatgaccacgtcgacccactatgtgtgcgagagctgcgacaagcaattttcctcggtggatgacctgcagaagcacctgctggacatgcacacctttgtgttgtaccactgcaccctgtgtcaggaggtcttcgactccaaggtgtccatccaggtgcacctggcggtgaagcacagcaatgagaagaagatgtaccgctgcacggcctgcaactgggacttccgcaaggaggctgacctgcaggtgcacgtcaaacacagccacctgggcaacccggccaaggctcacaagtgcatcttctgtggggagaccttcagcaccgaggtggagctgcagtgccacatcaccacacacagcaagaagtataactgtaagttctgcagcaaggccttccacgccatcatcctgctggagaagcacctgcgggagaagcactgtgtgtttgatgctgcgaccgagaacggcacggccaatggggtacccccaatggccaccaagaaagctgagcctgctgacctgcagggcatgctgcttaagaaccctgaggcacctaacagccatgaggccagcgaggatgacgtggacgcgtcggagcccatgtacggctgtgacatctgtggggcggcctacaccatggaggtgctgctgcagaatcaccggctgcgggaccacaatatccggccgggcgaggatgatggctcacgcaagaaggctgagtttatcaagggcagtcacaagtgcaacgtttgttcacggactttcttctcggagaacgggctacgggagcacctgcagacgcaccggggccctgccaagcactacatgtgtcccatctgtggtgagcgcttcccttcgctgctgacgctcaccgaacacaaggtgacccacagcaagagcctggacacgggcacctgtcgcatctgcaagatgcccctgcagagcgaggaggagtttattgagcactgccagatgcaccctgacctgcgcaactcactcacgggcttccgctgtgtggtctgcatgcagacagtcacttccacgcttgagctcaagatccatggcaccttccacatgcagaagctggcgggcagctcagcggcgtcctcccccaatggccaggggctgcagaagctctacaagtgcgccctgtgcctcaaggagttccgcagcaagcaggacctggtgaagcttgacgtcaatgggctgccctacggcctctgcgccggctgcatggcccgcagcgccaacggacaggtgggtggcctggccccgcccgagcccgccgaccggccctgtgccggcctccgttgccccgagtgcagtgtcaagtttgagagtgccgaagacctggagagccacatgcaggtggaccaccgtgacctcacgccggagaccagtgggccccggaaaggcacccagacatcgccagtgccccggaaaaagacataccagtgcatcaagtgccagatgaccttcgagaacgagagagagatccaaatccacgttgccaaccacatgattgaggaaggcatcaaccacgagtgtaagctgtgcaaccagatgttcgactccccggccaagctcctctgtcacctcattgagcacagcttcgagggcatgggcggcaccttcaaatgccccgtgtgtttcacagtcttcgtccaggccaacaagttgcagcagcacatctttgccgtgcacgggcaggaggacaagatctacgactgctcacagtgccctcagaagttcttcttccagaccgagctgcagaaccacacgatgagccagcacgcacagtga

SEQ ID NO: 202472 - DNA, 4514 bp, Homo sapiens
  Payload ID: 19929
  Gene Name: zinc finger protein 423
  Uniprot ID: Q2M1K9
  ENST ID: ENST00000562871
  CDS Start-End: 170-3844
cacagggggcctcagaaatcgtcaggtggtgactggagctgagaggtggccactctgttaccatggaggcctagaaggagagccagagtgcgatcagaaaaccagccgtgcgctggaagacaggaacagcgtgacaagtcaagaggagagaaatgaggatgatgaagacatggaggatgaatcaatttacacctgcgatcactgtcagcaggacttcgagtctctggcagacctgacggaccaccgggcccaccgctgtcctggagatggtgatgacgacccacaactctcctgggtggcctcgtctccctccagcaaggatgttgcgtcacccacgcagatgatcggagatggttgtgacctcggcctcggcgaggaggaagggggcacgggcctgccatacccttgccagttctgcgacaagtccttcatccgcttgagctacttgaagaggcacgagcagatccacagcgacaagctgccgttcaagtgcacctactgcagccgcctcttcaagcacaagaggagccgtgaccggcacatcaagctgcatacgggcgacaagaagtatcactgccacgagtgcgaggcagccttctcccgcagcgaccacctcaagatccacctgaagacccacagctccagcaagcccttcaagtgcactgtgtgcaagcgcggcttctcctccaccagctcgctgcagagccacatgcaggcccacaaaaagaacaaggagcatctggccaagtcggagaaggaagccaagaaggacgacttcatgtgcgactactgcgaggacaccttcagccagacggaggagctggagaagcacgtgctcacccgccacccgcagctgtccgagaaggcggacctgcagtgcattcactgccctgaggtcttcgtcgacgagaacacactgctcgcccatatccaccaagcccacgccaaccagaaacacaagtgccccatgtgccctgagcagttctcctcagtggaaggtgtctactgccacctggacagccaccggcagcccgactccagcaaccacagtgtcagtcccgaccctgtactgggcagcgtggcctccatgagcagcgccacacccgactccagcgcctctgtggagcgtggctccaccccggactccaccttgaagccgctgcgggggcagaagaagatgcgggatgacgggcagggctggaccaaggtggtctatagctgcccctattgttccaagcgggactttaacagcctggccgtgctggagatccacctgaagaccatccacgcggacaagccccagcagagccacacatgtcagatctgcctggactccatgcccaccctctacaacctcaacgagcacgttcgcaagctgcacaagaaccatgcctaccctgtgatgcagtttggcaacatctctgccttccactgcaactactgccccgagatgttcgccgacatcaatagcctgcaggagcacatccgcgtctcccactgcggccccaacgccaacccctctgacggtaataatgctttcttctgcaaccagtgctccatgggtttccttactgagtcctccctcaccgagcacatccagcaggcccactgcagtgtgggcagtgccaaactagagtctccggtggtgcagcccacgcagtccttcatggaggtctattcctgcccctactgcaccaactcccccatctttggctccatcctgaaactcaccaagcacatcaaggagaaccacaagaacattccactggcccacagcaagaagtccaaggccgagcagagcccagtctcgtccgatgtggaggtgtcttccccgaagcggcagcggctctcagcaagcgccaactccatctccaatggggagtatccttgcaatcaatgcgacctcaagttctccaactttgagagcttccagacccacctgaagctgcacctggagctgctgctgcggaagcaagcgtgcccccagtgcaaagaggactttgactcccaggagtccctcctgcagcacctgacagtgcattacatgaccacgtcgacccactatgtgtgcgagagctgcgacaagcaattttcctcggtggatgacctgcagaagcacctgctggacatgcacacctttgtgttgtaccactgcaccctgtgtcaggaggtcttcgactccaaggtgtccatccaggtgcacctggcggtgaagcacagcaatgagaagaagatgtaccgctgcacggcctgcaactgggacttccgcaaggaggctgacctgcaggtgcacgtcaaacacagccacctgggcaacccggccaaggctcacaagtgcatcttctgtggggagaccttcagcaccgaggtggagctgcagtgccacatcaccacacacagcaagaagtataactgtaagttctgcagcaaggccttccacgccatcatcctgctggagaagcacctgcgggagaagcactgtgtgtttgatgctgcgaccgagaacggcacggccaatggggtacccccaatggccaccaagaaagctgagcctgctgacctgcagggcatgctgcttaagaaccctgaggcacctaacagccatgaggccagcgaggatgacgtggacgcgtcggagcccatgtacggctgtgacatctgtggggcggcctacaccatggaggtgctgctgcagaatcaccggctgcgggaccacaatatccggccgggcgaggatgatggctcacgcaagaaggctgagtttatcaagggcagtcacaagtgcaacgtttgttcacggactttcttctcggagaacgggctacgggagcacctgcagacgcaccggggccctgccaagcactacatgtgtcccatctgtggtgagcgcttcccttcgctgctgacgctcaccgaacacaaggtgacccacagcaagagcctggacacgggcacctgtcgcatctgcaagatgcccctgcagagcgaggaggagtttattgagcactgccagatgcaccctgacctgcgcaactcactcacgggcttccgctgtgtggtctgcatgcagacagtcacttccacgcttgagctcaagatccatggcaccttccacatgcagaagctggcgggcagctcagcggcgtcctcccccaatggccaggggctgcagaagctctacaagtgcgccctgtgcctcaaggagttccgcagcaagcaggacctggtgaagcttgacgtcaatgggctgccctacggcctctgcgccggctgcatggcccgcagcgccaacggacaggtgggtggcctggccccgcccgagcccgccgaccggccctgtgccggcctccgttgccccgagtgcagtgtcaagtttgagagtgccgaagacctggagagccacatgcaggtggaccaccgtgacctcacgccggagaccagtgggccccggaaaggcacccagacatcgccagtgccccggaaaaagacataccagtgcatcaagtgccagatgaccttcgagaacgagagagagatccaaatccacgttgccaaccacatgattgaggaaggcatcaaccacgagtgtaagctgtgcaaccagatgttcgactccccggccaagctcctctgtcacctcattgagcacagcttcgagggcatgggcggcaccttcaaatgccccgtgtgtttcacagtcttcgtccaggccaacaagttgcagcagcacatctttgccgtgcacgggcaggaggacaagatctacgactgctcacagtgccctcagaagttcttcttccagaccgagctgcagaaccacacgatgagccagcacgcacagtgagggatcgctcaacaggacacctctccgcagaaggcttgccggagacgccgtggggagggccatttgaacattacatccaatcaaagtgtcatttgcaacccagatgtaaaactctaatgatttggccatgaggcgctgctattataagcagctggaaatgaatattaatggcagagattaaaagtattccatgctcagtattttttattgtcctgctacagctagtgtgcttttagactttccgccgcagactacatttctagagttagagaaacctgctttttaaggctattgtcctttgttccttcatgtattatattgatagtttttaaaaaagaattagtgtgattttttttctttgcttcttttttttctttcttgtttttcttcccccccaccccccacccccttcggttaactactttttaattgcaattctaggtaattgtgcatcgtgatgtgattgcttggctattgtctgaatatttccttttaattttttaattaaagactaatgctttgattggatttgccagttcaccggacagtgattaaaactatgtaatgaatataatcggtttcagtgcaactggatggtctgcttttaaatgtgacttaatctgactgcagtaactagtacagttcaataaagggaatccatgcgattagc

SEQ ID NO: 202473 - DNA, 456 bp, Homo sapiens
  Payload ID: 19929
  Gene Name: zinc finger protein 423
  ENST ID: ENST00000568094
  CDS Start-End: 1-308
ttgaagagggggaggcctcagacttctcgctggcctgggattcctccgtgacagcagcaggaggcctagaaggagagccagagtgcgatcagaaaaccagccgtgcgctggaagacaggaacagcgtgacaagtcaagaggagagaaatgaggatgatgaagacatggaggatgaatcaatttacacctgcgatcactgtcagcaggacttcgagtctctggcagacctgacggaccaccgggcccaccgctgtcctggaggtaatgcaaaacagccccaggactctgacaggtggttacacgggtaattggacatagcaacagcttgaagcctcaagtgagattaaagaattaataatgtaattttacagttaatgtcattttattgtggtgtcttgggtaccctgtatccgccttttaaatacaattaaaaataaaagcaacagctttccggca

SEQ ID NO: 202474 - DNA, 3220 bp, Homo sapiens
  Payload ID: 19930
  Gene Name: zinc finger protein 425
  Uniprot ID: Q6IV72
  ENST ID: ENST00000378061
  CDS Start-End: 134-2392
gcgccgagtcccagcatgcaccgcgcccggccggctctgcctttgggggccagcagggctgtacctgggagttgggttggggcggagcggaggggaggccgtgccaggcagggccggttcgtgcggaaccgccatggccgagccggcttcggtaactgtgacatttgatgatgtggccttatatttttcggaacaagagtgggagatcctggagaagtggcagaagcaaatgtataagcaagagatgaagaccaattacgagacccttgattccctggggtatgctttttccaagccagatttgatcacatggatggaacaagggagaatgctattaatcagcgaacagggatgcttagataaaacaagaaggacaactagccctcctactgatgaacagttgaacatgaagaatactggaaagttgctatgttttgatgacgaaggaactcccaggacaaaagaagaggattgccgtttaaatggtcctcaaaaacaggacttgtgtgctgccttacgagggaaagagagaaagattttattagctcaaacagccaccttccagtctccaagtctccgagaaacagagattctaaataaaaaagtcagcatcacagcatatgatccagacaagaaagacctgcggcataagcctcgggagaccccagggcgcttagaaattcccacagggccaagatgctattcctgctatgtctgtaggaaagtcttccaagtaaggagggatttgctaaagcacaaacggagccactccaagagccagctctgcagatacccaaagtacaaaaactcgtccagagggaagtccgaactcaggcggacgcagaggctcctgtgtcagaagaagcggttccagtgcagtgagtgtgagaagagctacttcctgaagggcagcctcgtcactcatcaggttgtccacaccggccagcggccctacccatgccctgagtgcgacaagaccttccggtacagggccaacctgaagaagcacctgtgtctacaccgcggggagcggccgttctgctgcggggagtgcggccgggccttcgtgcagcagtgcgagctcacggagcacttgcggctgcacagcggagagaagcccttccagtgtccgcagtgtgaccggtgcttccgcctgaagaggggcatgaaggtccatctgacccagcacagcgggaagaggcccttccactgtcccgagtgtggccggagcttctcccggaaggctgccctgaagacccaccagaggacgcacagcgaggaaaagccgttttcttgtggtgaatgtggcaggaaattcatctacaagattaagctggacgagcacatcagagttcacacgggagagaagcccttttcgtgtcccgagtgtaacaaaagtttccgcctcaagagaagcctgaaagcccacgggctgcagcacattgggaagcggcccttccagtgcccggagtgcagcaggggcttcttctggaggaacgccatgcgcgcccaccagcgcctgcacagcgagcaaaagcccttcccctgcgccgagtgcggcaagcgcttcacgcggccttccaagctcgcctgccacaccagagtccacgacaggcagaaggagtttccctgcggcgagtgcaaaaagaccttttctcagcagtcgcggctcacgcagcacctgaaggtccacaccacggaaaagccgttctcctgcgccgagtgcggccgcagtttccgccgacgcgcgcatctcacagagcacacgaggcttcacagtggcgaggagcccttccagtgtcccgagtgcgacaagagcttctcctggaaggcctccatgaagttccaccagcggatgcacagggacgagaagcccttcgcgtgcggtgagtgtgacaagacctacacgcatcagtctcagctcaccgagcacctgaggctgcacagtggagagaagccctaccagtgtcctgaatgcgagaagactttccgcctcaagggaaacctgaaaagccacctgctgcagcacagtggccaaaagccattctcttgtgtgatgtgcggcaaaagtttcactcaacagtaccggctcacagaacacattcgagtccacagcggggagaagcccttccagtgtccggagtgtgacaagagctactgcatcaggggcagcttgaaggtccacttgtataagcacagtggagagaggcccttccagtgtcccgagtgtggcaaaggcttcctccagaagagaagcctgaaggcccatctgtgccttcacagtggggagaggcctttttcttgtgatgagtgtggaaggagcttcacgtacgtgggggcgctcaagacccacattgcagtgcatgccaaagagaagccctccagcctctaggtcaggccatgcagcagtcacgcagtcggctttcaggaggtgccagcagctctgttggctcaagttgaggcaggttgaaggattcacagggtaagatcgggcacagtggctcccgcctgtaatcccattactttgggaggcccaggtgggaggatcgcttgagcccagaagtttgagaccagcctaggcaacattgcaagactccatctctacaaaaaatataaaagtcagccaggcgttgtggtgcatgcttgtggtcccagctactttgggaggttgaggcaggaggatcgcttgagcccaggaggcagaggctgcagtgagccatgctcacaccactgcactccagcctgggtgacagagcaagatcttgtctcaaaaaagaaaaaaaatcacaaaatactggctacagacacactggacaggtgtgtggtctgcagaactctatggctccttgacaaaagttccaaataatccatagacagtcaaagagacatctccctcaataatcgtcataggaaagacgtgccagttgtggaggaaacattcacactgatctgctagtccaacgatctcttcagtgtcatccaataatcccttcattaaattcagaaactacagcctgagtgaagaaatgttacagccaggaacatattcctcagtcagcttttccattaccaggccattttacttaaatctgtattaaagtcttcagttttctctcatagtggattttcattttctctcagatggtgagagggcttctgtttcttggaatgtttccatattgctaaaaataaatgtcttccactatctcatttgttaaaa

SEQ ID NO: 202475 - DNA, 541 bp, Homo sapiens
  Payload ID: 19930
  Gene Name: zinc finger protein 425
  ENST ID: ENST00000483014
  CDS Start-End: 94-541
ctttgggggccagcagggctgtacctgggagttgggttggggcggagcggaggggaggccgtgccaggcagggccggttcgtgcggaaccgccatggccgagccggcttcggtaagaagggccggtggaggatgcaggctctgtcgaaactcgggtccctgtcgcagctggattggggtaactgtgacatttgatgatgtggccttatatttttcggaacaagagtgggagatcctggagaagtggcagaagcaaatgtataagcaagagatgaagaccaattacgagacccttgattccctggggtatgctttttccaagccagatttgatcacatggatggaacaagggagaatgctattaatcagcgaacagggatgcttagataaaacaagaaggacaactagccctcctactgatgaacagttgaacatgaagaatactggaaagttgctatgttttgatgacgaaggaactcccaggacaaaagaagaggattgccgtttaaatggtcctcaaaaacaggacttgtgtgctgcct

SEQ ID NO: 202476 - DNA, 7085 bp, Homo sapiens
  Payload ID: 19931
  Gene Name: zinc finger protein 426
  Uniprot ID: Q9BUY5
  ENST ID: ENST00000253115
  CDS Start-End: 265-1929
gtgagcgcctgagagtctttttgcctttcagagttaaggcctcactggcctgggaaaataattgctgccttttgcatccgcgttggctccgtccccaggatcttcccggttcagggacctggcgatttctgagtgttccggaatcccaataaccctgtttaaagaggaatggagattgccactgtccatttagattaatgaggtgtcctgaagtgatggtgacatcaatgaaaggagggttctgacacgttctcacctcgcgggatggcagctgctgatttgtcccatggacattatctttctggggacccagtttgccttcatgaagaaaagacaccagcaggaagaatagtggctgactgcctaacagattgttatcaggattcagtgacctttgacgatgtggctgtggacttcacccaggaggagtggactttactggactcaactcagagaagcctctacagtgacgtgatgctggagaactacaagaacctggccacagtaggaggtcagatcatcaaacccagtctaatctcttggttggaacaagaagagtcaaggacagttcagggaggagttctccaaggatgggaaatgcgacttgaaacccagtggtctatacttcagcaggactttttgaggggtcagacatccattgggatacaattggaaggaaaacacaatggaagggaactctgtgactgtgagcaatgtggagaagtcttcagtgaacactcatgccttaagacgcacgtgagaactcaaagtacagggaacactcatgactgtaatcagtatggaaaagatttccttaccctgtgtgagaaaacctctactggtgagaaactttctgagtttaatcagagtgaaaaaatcttcagcctgacaccaaatattgtataccagagaactagcacacaagaaaagtcatttgaatgtagtcactgtggaaaatccttcattaatgagtcataccttcaggcacatatgagaactcacaatggagaaaaactctacgaatggaggaattatgggccaggttttattgactctacaagcctttctgtgcttatagaaaccctcaatgcaaaaaagccctacaaatgtaaggaatgtggaaaaggctatagatacccagcctacctcagtattcacatgcgaacccacactggggagaaaccatatgaatgtaaggaatgtgggaaagccttcaattattccaactcatttcagatacatggaagaactcacactggagagaaaccctatgtatgtaaggaatgtgggaaagccttcactcagtactcgggccttagtatgcatgtacgatctcacagtggagacaagccctatgaatgtaaggaatgtgggaaatccttccttacatcctcacgccttattcaacatataagaactcacactggagagaagccttttgtatgtgttgaatgtgggaaagcctttgcagtttcctcaaatcttagtggacatttgagaactcacactgaagagaaggcctgtgagtgtaagatatgtgggaaagtatttgggtatccctcatgtcttaataatcacatgcgaacgcacagtgcccagaaaccatacacctgtaaggaatgtgggaaggcttttaactattccacccaccttaaaattcacatgcgaatccacactggagaaaaaccctatgagtgtaaacaatgtggaaaggccttcagtcattccagttcatttcaaatacatgaaaggactcacactggagagaaaccctatgaatgcaaggagtgtgggaaagccttcacgtgttccagttcctttagaattcatgaaaaaactcacacagaagagaaaccctataaatgtcagcaatgcgggaaagcttacagtcatccccgttcacttcgaagacatgaacaaattcactagtgagaaactgtccatgtaataaatgtgggaaagctctcatttgttccagttcactttaaagacatgaatgaactcactctggagagaagaagctgcatgaaaattacttaattcctgtaatcccagcattttgagaggctgaggtgggtggatcacttgaggtcaggagtttgagaccaccctggccaacatggtgaaaccttgtctctactgaaaatacaaaaaatttagccaggtgtggtgggcacctgtaatcccagctacttgggaggctgaggcaagtgaatcacttgaacccaggaagcagaggttgcagtgagcagagatcatgccactgcactccagcctgggcgatggagtgagactccatctcaaaaaaaaaaaaaaaagaaaattatttgattaaattgagtctgttagagtacatccctaatccaatatgattggtgtccctataagaagagaaagacacaactgagacaacaaatagaagatgatgtgaagtcatcagatgatggccatctgcaagccaaagacagagcactgggacagatccttctatcaaagccaccaaccctgctggcaccttcatcttgggcttccagaactttgaacaaataaaattctcttgtttgagccacccagtctgtggtattttgttgtggtggctctagcaagtgaatacagtaagcaataagcaaaaacgtttatagattgtccaaaagccttaatattcacatgcaaagccacactggagagaaactatatgaatgtaagacgtgggagagccttcattgagtcttcagtcctttctacatacaggagaaatcacataggagagaaattgtatgaatgtaaggagcatgaaaaagcctgtgaatgttcactatattttaatattcacatgcaagttgtctggtcgtagaccatgtgaaaatagaggagaaaaaaggaaagaaagtttcttttactgtgaacgcaaggaatgtgaccccatacaccatactggaacttggagtggactgaaatcccattaggattgtggaaaagcttacattaatgttttctaccttctagaaggtgtaagaagtcgaactggagagaagccttttacctgtaatgcatgtaggaagccttacattaattccacagaattttttttacacatgtaaaattacctcagaaccctgggaaggtaaggaatatggtataacctttaaatatttcacatgccataataagtacatgaattctgataatactgtaccgtttcttgagtagtgttagtaccttatactatcaaaataatcctaaatcctccctctcagaccttccatcattactatatttcacttttatgcctataaacacacacaaattagcatatgtaatctaatacattgtagctatttttcagaagttatcagatcaattaagtattagaaaaataaacatttttattttaccttcacttcttccttctatgctcaaagttggatgtaattcttatacttgatcctcaatacttaaagcatttccccccctctggcttctatgaaaattttttgttatctttgatattctgttatttttaaatgatatgcctaggtataggtttttggtgctcgtccttcttggtgtttgcttagcctcctggatttgcgttttggtgtctgagttaattttgagaaattctgtcattgtttccctttttttttctttccatctggtatttcctttatatgtaggatacatcttttgtagttatcccacagttcttatatcttgtttttttattcttctctttgcttttcaggtgtggatgtttctgctgatatattctcaagctctttagttggctgtttcttggccaataataagcctaccaaagacattcttcatttctgttacactgtcttcaatttctagcatttctttgtggttcttagaatttccatctctgtgtttacactgcctgtctgttcttggatgctgtctgctttatccagtagaacccatggcatatcaatcataattgttttaaattcccagtctgataatttcagcaatcctgctatatctggttctggttcttactctttctctttaaactaacttttgccttttagtatgcttgtaatttttccttagctggacatggcatactggataagaggaaatgctgtaagcaggcctctagtaatcatgataagctgtggggagaggggcagcattctattgtccagggattagatgtcagtcttgcagtgagtctgtgcttctgcactgtgaacttcagtttttcccaccctttagttgggtcaggatgtatagagttggctggagttggatatttcccttcctccaggtcactgaagctctgactaaaactccaggtgtggtggcttatgcctgtaataccagcactttgggaggccaaggcaggtggatcacctgaggttgggagttcatgaccagcctgaattgcttgaatccaggaggtggaggtcacagtgagccgagattgtgatactgcactccagcctgggaaacagtgagacactgtctcaaaaaaataaataaataaataaaaggctaggcgcagtggctcaaccctgtaatcccagcactttgggaggcagaggtgggtggatcatgaggtcaggagatcgagaccatcctggccaacatggtgaaaccccgtctctactaaaaatacaaaaaaattagctgggtgtggtggcgggcacctgtagtcccagctacttgggaggctgaggcaggagaatggtgtgaacccaggaggtggagcttgcagtgagccgagatcacgccactgcactccagcctgggtgacagagtgagactctgtctcaaaacaacaacaacaacaacaacaacaaaaacccatcatcaatgctcagcctttcttaaacatgaactcatggtggacagagccctatgaatgtaaggaatatagagaagccatcactagttactcaaaccttattgaatgtgtgaaaatttactctggagagatgccctttcagcataagaaatgttgaaaaggatttatataatccttcctttttatttttatttttatttttatttttatttttattttttttgagacggagtctcgctctgtcgcccaggctggagtgcagtggtgcgatctcggctcactgcaagctccgcctcccgggttcacgccattctcctgcctcagcctcccgagtagctgggactacaggcgcccgctaccacgcccggctaattttttgtatttttagtagagacggggtttcactgtgttagccaggatggtctcgatctcctgacctcgtgatccgcccgcctcggcctcccaaagtgctgggattacaggcgtgagccaccgcgcccagccaatccttcctttttaatatccacatacaaactcactgaagaaaaaccctgaaaatgtaaagcaatgttgaaaaacctagttatttaaattcatttcaagtatatgaactcacatggtaaagaaaccctgtgaatataagtagtatgataaattcttgaatttttttttttttttttttttttttttgaggcagagttttgctcttgttgcccaggctggagtgcaatggctcaatcttggctcactacaacctctatcacccaggttcaagtgattattctgcctcagcctcccaagtagctgggattacaggcatgtaccaccatgcccagctaattttgtatttttagtgaaggcagggattctccatgttgatcaggctggtctcgaactcctgacctccagtgatctgcctggtttgacctcccaaagtgctgagattacaggcatgagccatcacgcccagccagttcttcaattcttacagtccctttccatgtcattaaagaactcacactggagagaaatcttatcaatgttagaattgtggtaaagctctctgttgttcccatttacatgaaagatgtgaacagtcacattgtagaaaaatgctgtgagagttgggaatctggaaccacttctttattatctcaggtcataatgaacttgtaagaattcacagtggcaggaaaccctatgtaaatggaaaatatgggaaaggcttcatttaatccataggactgataccacaaaactcccactaggagaaaacctatgtttatacggaatgtgggaaaatcttcacttatttctcaagccttaaagtgtatgtcaggattcccagtggagagaagccatattgatgtaaggaatgtgggaaagcccttgcctgccacttagtccttgataaacattttagaacacaaactggagagaaactatgaattcaaggattgtgggaaaacccttttatgttccacaagctttaatattcatatgcaatgtatgctggagaataacttgatgactataataagtggaatggcctaggtcagggatccccaaacccctgggccatggactggtactggtctgtggcctgctaggatccagggtgcacagcaggaggtgaatgtaggatgagcaaacattactgcctgagctcaactttctgtcagatcagcagtggcattagattctcataggagcatgaactttattgtgaactgcacatgcaagggatctaggttgcacactccttatgagaatctaatgcctgatgatctgaactggaacagtttaatccccaactccagtccgtgggaaaaatgtcttccacgaaactggtccctggtgccaaaaagttaggggaccactgatttagattatgtcacatgtcccatccactcattaacattaaggctttcatccctgggacctcaagataatggtggtatttagagatgtggttttttaaagaggtgattttaaaatgaggcagttagaatggggccctcattcaatatgactggtttccttataagaagtgaaagagataccagggtagcaggcacagaattttatgtgaagtgaccggaaatggttaccttcaaggcaaagagagattcctggaggagatccttcttttaaggctcattatagaggaaatcatccttatctacactttgatcctggacttccagcctcaaaaattatgagcaaataaatttctgttgtttaagcc

SEQ ID NO: 202477 - DNA, 2375 bp, Homo sapiens
  Payload ID: 19931
  Gene Name: zinc finger protein 426
  Uniprot ID: Q9BUY5
  ENST ID: ENST00000535489
  CDS Start-End: 338-2002
ttgtttgtttacttatttttatttttgtttctttagagatagggtcttgctatgttgcccaggctggtctcaaacttctaggctgaagcagtcctcccaccctggcctcccaaaatgctgggattacaggcatgagctactgccccagccggtgtatatgtttgatggctgatgattaagtactgcttgttgattattgattaataccaacaggaatcccaataaccctgtttaaagaggaatggagattgccactgtccatttagattaatgaggtgtcctgaagtgatggtgacatcaatgaaaggagggttctgacacgttctcacctcgcgggatggcagctgctgatttgtcccatggacattatctttctggggacccagtttgccttcatgaagaaaagacaccagcaggaagaatagtggctgactgcctaacagattgttatcaggattcagtgacctttgacgatgtggctgtggacttcacccaggaggagtggactttactggactcaactcagagaagcctctacagtgacgtgatgctggagaactacaagaacctggccacagtaggaggtcagatcatcaaacccagtctaatctcttggttggaacaagaagagtcaaggacagttcagggaggagttctccaaggatgggaaatgcgacttgaaacccagtggtctatacttcagcaggactttttgaggggtcagacatccattgggatacaattggaaggaaaacacaatggaagggaactctgtgactgtgagcaatgtggagaagtcttcagtgaacactcatgccttaagacgcacgtgagaactcaaagtacagggaacactcatgactgtaatcagtatggaaaagatttccttaccctgtgtgagaaaacctctactggtgagaaactttctgagtttaatcagagtgaaaaaatcttcagcctgacaccaaatattgtataccagagaactagcacacaagaaaagtcatttgaatgtagtcactgtggaaaatccttcattaatgagtcataccttcaggcacatatgagaactcacaatggagaaaaactctacgaatggaggaattatgggccaggttttattgactctacaagcctttctgtgcttatagaaaccctcaatgcaaaaaagccctacaaatgtaaggaatgtggaaaaggctatagatacccagcctacctcagtattcacatgcgaacccacactggggagaaaccatatgaatgtaaggaatgtgggaaagccttcaattattccaactcatttcagatacatggaagaactcacactggagagaaaccctatgtatgtaaggaatgtgggaaagccttcactcagtactcgggccttagtatgcatgtacgatctcacagtggagacaagccctatgaatgtaaggaatgtgggaaatccttccttacatcctcacgccttattcaacatataagaactcacactggagagaagccttttgtatgtgttgaatgtgggaaagcctttgcagtttcctcaaatcttagtggacatttgagaactcacactgaagagaaggcctgtgagtgtaagatatgtgggaaagtatttgggtatccctcatgtcttaataatcacatgcgaacgcacagtgcccagaaaccatacacctgtaaggaatgtgggaaggcttttaactattccacccaccttaaaattcacatgcgaatccacactggagaaaaaccctatgagtgtaaacaatgtggaaaggccttcagtcattccagttcatttcaaatacatgaaaggactcacactggagagaaaccctatgaatgcaaggagtgtgggaaagccttcacgtgttccagttcctttagaattcatgaaaaaactcacacagaagagaaaccctataaatgtcagcaatgcgggaaagcttacagtcatccccgttcacttcgaagacatgaacaaattcactagtgagaaactgtccatgtaataaatgtgggaaagctctcatttgttccagttcactttaaagacatgaatgaactcactctggagagaagaagctgcatgaaaattacttaattcctgtaatcccagcattttgagaggctgaggtgggtggatcacttgaggtcaggagtttgagaccaccctggccaacatggtgaaaccttgtctctactgaaaatacaaaaaatttagccaggtgtggtgggcacctgtaatcccagctacttgggaggctgaggcaagtgaatcacttgaacccaggaagcagaggttgcagtgagcagagatcatgccactgcactccagcctgggcgatggagtgagactccatctc

SEQ ID NO: 202478 - DNA, 919 bp, Homo sapiens
  Payload ID: 19931
  Gene Name: zinc finger protein 426
  ENST ID: ENST00000589289
  CDS Start-End: 255-611
ccaaaggcctccaaagcagcgtttgtgaatttttttccggcaggaaaataattgctgccttttgcatccgcgttggctccgtccccaggatcttcccggttcagggacctggcgatttctgagtgttccggaatcccaataaccctgtttaaagaggaatggagattgccactgtccatttagattaatgaggtgtcctgaagtgatggtgacatcaatgaaaggagggttctgacacgttctcacctcgcgggatggcagctgctgatttgtcccatggacattatctttctggggacccagtttgccttcatgaagaaaagacaccagcaggaagaatagtggctgactgcctaacagattgttatcaggattcagtgacctttgacgatgtggctgtggacttcacccaggaggagtggactttactggactcaactcagagaagcctctacagtgacgtgatgctggagaactacaagaacctggccacagtaggaggtcagatcatcaaacccagtctaatctcttggttggaacaagaagagtcaaggacagttcagggaggagttctccaaggaaggaaaacacaatggaagggaactctgtgactgtgagcaatgtggagaagtcttcagtgaacactcatgccttaagacgcacgtgagaactcaaagtacagggaacactcatgactgtaatcagtatggaaaagatttccttaccctgtgtgagaaaacctctactggtgagaaactttctgagtttaatcagagtgaaaaaatcttcagcctgacaccaaatattgtataccagagaactagcacacaagaaaagtcatttgaatgtagtcactgtggaaaatccttcattaatgagtcataccttcaggcacatatgagaactcacaatggagaaa

SEQ ID NO: 202479 - DNA, 2402 bp, Homo sapiens
  Payload ID: 19931
  Gene Name: zinc finger protein 426
  ENST ID: ENST00000593003
  CDS Start-End: 479-2029
ggcctcactggcctgggtgagttccgaggagatgaactggttttggggtgaaggacgggtttggcccggacgttagagaggcctggcccgctctgctcgtgtctgctgggcccgctagcgtccgctcggaccgtcgctcctcgggaggagtcgggtttatagttacggtgtccgcagggtgttttcatctgtgcgcccctctccaaaggcctccaaagcagcgtttgtgaatttttttccggcaggaaaataattgctgccttttgcatccgcgttggctccgtccccaggatcttcccggttcagggacctggcgatttctgagtgttccggaatcccaataaccctgtttaaagaggaatggagattgccactgtccatttagattaatgaggtgtcctgaagtgatggtgacatcaatgaaaggagggttctgacacgttctcacctcgcgggatggcagctgctgatttgtcccatggattcagtgacctttgacgatgtggctgtggacttcacccaggaggagtggactttactggactcaactcagagaagcctctacagtgacgtgatgctggagaactacaagaacctggccacagtaggaggtcagatcatcaaacccagtctaatctcttggttggaacaagaagagtcaaggacagttcagggaggagttctccaaggatgggaaatgcgacttgaaacccagtggtctatacttcagcaggactttttgaggggtcagacatccattgggatacaattggaaggaaaacacaatggaagggaactctgtgactgtgagcaatgtggagaagtcttcagtgaacactcatgccttaagacgcacgtgagaactcaaagtacagggaacactcatgactgtaatcagtatggaaaagatttccttaccctgtgtgagaaaacctctactggtgagaaactttctgagtttaatcagagtgaaaaaatcttcagcctgacaccaaatattgtataccagagaactagcacacaagaaaagtcatttgaatgtagtcactgtggaaaatccttcattaatgagtcataccttcaggcacatatgagaactcacaatggagaaaaactctacgaatggaggaattatgggccaggttttattgactctacaagcctttctgtgcttatagaaaccctcaatgcaaaaaagccctacaaatgtaaggaatgtggaaaaggctatagatacccagcctacctcagtattcacatgcgaacccacactggggagaaaccatatgaatgtaaggaatgtgggaaagccttcaattattccaactcatttcagatacatggaagaactcacactggagagaaaccctatgtatgtaaggaatgtgggaaagccttcactcagtactcgggccttagtatgcatgtacgatctcacagtggagacaagccctatgaatgtaaggaatgtgggaaatccttccttacatcctcacgccttattcaacatataagaactcacactggagagaagccttttgtatgtgttgaatgtgggaaagcctttgcagtttcctcaaatcttagtggacatttgagaactcacactgaagagaaggcctgtgagtgtaagatatgtgggaaagtatttgggtatccctcatgtcttaataatcacatgcgaacgcacagtgcccagaaaccatacacctgtaaggaatgtgggaaggcttttaactattccacccaccttaaaattcacatgcgaatccacactggagaaaaaccctatgagtgtaaacaatgtggaaaggccttcagtcattccagttcatttcaaatacatgaaaggactcacactggagagaaaccctatgaatgcaaggagtgtgggaaagccttcacgtgttccagttcctttagaattcatgaaaaaactcacacagaagagaaaccctataaatgtcagcaatgcgggaaagcttacagtcatccccgttcacttcgaagacatgaacaaattcactagtgagaaactgtccatgtaataaatgtgggaaagctctcatttgttccagttcactttaaagacatgaatgaactcactctggagagaagaagctgcatgaaaattacttaattcctgtaatcccagcattttgagaggctgaggtgggtggatcacttgaggtcaggagtttgagaccaccctggccaacatggtgaaaccttgtctctactgaaaatacaaaaaatttagccaggtgtggtgggcacctgtaatcccagctacttgggaggctgaggcaagtgaatcacttgaacccaggaagcagaggttgcagtgagcagagatcatgccactgcactccagcctgggcgatggagtgagactccatctc

SEQ ID NO: 202480 - DNA, 1412 bp, Homo sapiens
  Payload ID: 19932
  Gene Name: zinc finger protein 428
  Uniprot ID: Q96B54
  ENST ID: ENST00000300811
  CDS Start-End: 448-1014
cagttttgtaaggcgcgttcctgccccgcacacgcacgcgcgaacccttcagcttcttgttcctttgggccgcgggctgtaccaagtaaacccaggcagcgaggggcaaagcacggcgccccccgcgcgggtctcgtcgacggcccgacgcgcatagcccctcttcccacagcgctacaggactagtccgtctcgccgcgcaagcgccctaggctcttcacgccccctgcgcgctgtcctaccctacttgcgacgcaggcgcagaggctgggcgtgcagccgccgccgcagagccggagcgggggccgccggcgccgcatccctctctacctgccaacatcctgtattagagaacttgtggccggaggtgtggctgtggagagctggccggggagggacgctgctcagctgctgctctgctcctgtctcctgtcccctcccccggtcatgacagagacccgtgagccagctgagactgggggctacgccagcttggaagaagatgatgaagacctttccccaggccccgagcattcctctgattcagaatacactctctcagagccggactccgaagaggaagaagatgaggaggaggaggaagaggagaccactgacgatcctgaatatgatcctggctacaaggtgaagcagcgccttggcgggggccgtggtggcccatcccgccgggccccccgtgcagcccagcccccggcccagccttgccagctctgtggccgctcaccccttggggaggccccaccgggaaccccaccctgccggctctgctgccctgctacagccccccaggaagcaccagcccctgaaggcagggccctcggggaggaagaggaggaaccacctcgggctggggagggccgaccagctgggcgggaggaggaggaggaagaggaggaggagggaacctaccactgtacggaatgtgaggattccttcgacaacctgggggagctgcacgggcacttcatgctgcatgcccggggtgaggtgtaggcagagcccccatacggggagcttggcagaaggggtggggtgggaggagggggctgaggaaattggggttgtgacagtggtcatgggggatggggtactgccggtctgtgttgtcttagaagtagatgtgtgatggccagaataaaagccaaaatctgtatctgtgtgtgttggttcagagtgtgtgtgtgtgtgtgtgtattcccgcccgtgtgtgtgtttgtgtgtgtgtgtgtgtgtgtgtattccccctgggctccttcttggggaaccttggggtcttttgggaaagataacatttactgcgtgcttgtattcgatgaggtttccatgtatttacttacagaccccataatgtaaaggctctaataatagaattttgtttctcactcacaaaa

SEQ ID NO: 202481 - DNA, 827 bp, Homo sapiens
  Payload ID: 19932
  Gene Name: zinc finger protein 428
  ENST ID: ENST00000598676
  CDS Start-End: 173-827
gcagccgccgccgcagagccggagcgggggccgccggcgccgcatccctctctacctgccaacatcctgtattagagaacttgtggccggaggtgtggctgtggagagctggccggggagggacgctgctcagctgctgctctgctcctgtctcctgtcccctcccccggtcatgacagagacccgtgagccagctgagactgggggctacgccagcttggaagaagatgatgaagacctttccccaggctggaagggagtggcgcaatcatggctcaaatgcagcctggaactcctcggctcaagtgatcctcccgcctcagcctcccgagaagctggtactacaggccccgagcattcctctgattcagaatacactctctcagagccggactccgaagaggaagaagatgaggaggaggaggaagaggagaccactgacgatcctgaatatgatcctggctacaaggtgaagcagcgccttggcgggggccgtggtggcccatcccgccgggccccccgtgcagcccagcccccggcccagccttgccagctctgtggccgctcaccccttggggaggccccaccgggaaccccaccctgccggctctgctgccctgctacagccccccaggaagcaccagcccctgaaggcagggccctcggggaggaagaggaggaaccacctcgggctggggagggccgaccagctgggcgggaggaggaggaggaagaggaggaggagggaacctaccactgtacggaatgtgaggattccttcgacaacctgggggagctgcacgggcacttcatgctgcatgcccggg

SEQ ID NO: 202482 - DNA, 2233 bp, Homo sapiens
  Payload ID: 19933
  Gene Name: zinc finger protein 429
  Uniprot ID: Q86V71
  ENST ID: ENST00000358491
  CDS Start-End: 209-2233
aaacattatccaatcaggcacgcagctggagcgacaggacggtttccggaatatggcggggcgtttggctcttgctgcagccagagctccaggtctcgtcttcatttctgtgtcctttgttcttagaggcccagcctgtgtggccctgtgacccgcagatattgggagatacacagctaagactccaggaccccctggaagcctagaaatgggaccattgacatttacagatgtggccatagaattctctctggaggagtggcagtgcctggacacagcacaacagaacttatatagaaatgtgatgttagagaactacagaaacttggtcttcctgggtattgctgtttctaagccagacctaatcacttgtctagagaaagaaaaagaaccctgcaagatgaagcgacatgaaatggtggatgaacccccagttgtgtgttctcattttgctgaagacttttggccagagcaagacataaaagattctttccaaaaagtgacactgaggagatatgataaacgtggacatgagaacttacaattaagaaaaggctataaaactgtaggtgattgtaagctatacaaaggaggttataatggacttaaccaatgtttgacacttacccagagcaaaatgtatcactgtgatatatatgtaaaagtcttttatgcattttcaaatgcagatagatacaagacaagacatactggaaagaaacctttccagtgtaaaaaatgtggcaaatcattttgcatgctttcacaactaactcaacataagaaaattcatattagagagaatacctacagatgtaaagaatttggcaatgcctttaatcagtcctcagcccttactaaccataagagaatttatgttggtgagaaacactacagatgtgaagaatgtggcaaagcatttaaccactactcaacccttactaaccataagagaattcatactggagagaaaccctacaaatgtaaagaatgtggcaaagcctttagcaggtactcaacccttactacccataagagaattcattctggagagaagccctacaaatgtgatgaatgtggcaaaacctttagcatatcctcaacctttactaaacataagataattcatactgaagagaaaccctacaaatgtaaagaatgtggcaaagcctttaaccggtcctcaacccttactagccataagagaatacatactggtgagaaaccctacaaatgtgaagaatgtggcaaagcctttaactggtcttcaactcttactaaacataaggtaattcatactggagagaagccctacaaatgtgaagaatgtggcaaagcttttaaccagtcttcaagacttactcgacataaaaaaattcatactggagaggaaccctacaaatttgaaaaatgtggcagagtttttacctgttcctcaacacttactcaagacaagaaaattcatactggagagaaaccctacaattgtgaagaatgtggcaaagtttttacctattcctctacacttactagacataagagaattcatactgaagagaaaccctataaatgtaacgaatgtggcaaagcttttaaccggtcctcacaccttactagccataggagaattcatactggagagaaaccctacaaatgtgaagaatgtggcaaagcctttaagcagtcctcaaaccttaacagtcataaaaaaattcatagtggagagaaaccctacaaatgtgaagaatgtggcaaagcttttatcctgtcctcaagacttactcaacataagaaaattcatactggagagaaaccttacaaatgtgaagaatgtggcaaagcttttaaccggtcctcaagacttactcaacataagaaaattcatactggagagaaaccctacaaatgtaaacaatgtgacaaagcttttacccactcctcaaaccttagtagtcataagaaaattcatagtggagagaaaccctacaaatgtgaagaatgtggcaaagcttttaatcggtcctcaagacttactcaacataagaaaattcatactagagagaaaccttacaaatgtgaagaatgtgccaaagcttttacccggtcttcaagacttactcaacataagaaaattcataggatgggtgtggtggctcatgcctgtaatcccagcactttgggaggcagaggtgggcggatcacgaggtcaggagatcgagaccgtcctggctaa

SEQ ID NO: 202483 - DNA, 1484 bp, Homo sapiens
  Payload ID: 19933
  Gene Name: zinc finger protein 429
  ENST ID: ENST00000594385
  CDS Start-End: 1-281
atggagtttcgctcttgttgcccaggctggagtgcagtggcacgatctctgctcactacaacttccccctaccgggttcaagcgattctcctgcctcagcttcctcagtagttgggattacaggtctgttgcagcttgctagaggtccactccagaccctgttcacctgggaatcacaaatagaggctgtagaatggcaaaaattgcttcctgctccttcctctggaagcttcatcacagaggggcaccagcctgatgccaaccggagctctcctgtatgaggtttctatcgacccctgttgggaagtctctcccagtcaggaggcacaggggtcagggaccaacgtgaggaggcagtctgtcccttagcagagctgacgtgctgtgctgggagaatccctcttgtcagggtcacctgctctcttcagagccagcagtcaggaaggattaaatctatggaagctgtgcccacagcaaccccttcccccaggtgctctgtcccagggagatggggattttgtctgtaagcccctgactggggctgtctcctttccatccgagatgccctgcccagcgaggaggaatctagagaagcagtctggccatattttggcagcccacaaatcctcccagcctccttagcactagaaaactgcctactaaagcctcagtaatgggggatgcccctccccccaccaagctcgatcatcccaactcaacttcagactgctgtgctgtcagtgagaatttcaagccagtggttcttagcttgctgagcttcatgggattgggacctgctgagcgagaccacgtggctccctggcttcagcccctttctaggggagtaaagggttctgtcttgctggggttccagatgccactgtggtacaaaacaaacaaacaacaacaacaaagcaaaactcctgcagctagcttggtgtctgcccaaatagccacccagttttgtgcttgaaacccagggctgtgctggtgtaggcacaccagggaatcccctgatctgcagattgcaaaaatcatggggaaaggatagtaacctggccgggtagcacagttcctcacggcttcccttggctgggggagggaggtcccccagctccttgcacttcgtgggtgaagcgatgccccaccctgcttctgctcgccctccatgggttgtacccactgcctaaccagtcccagttggatgaactgggtacctcagttggaaatgcagaaatcacctgtcttctgcatgggtctcgctgggagctgcagactggaaatgtttatttggccctcttgaccctgtcccccaaatcatcttttatttttatttcatccaaatagctgctatcttttttttgtacatctttgcctaaattataataagaacaacgatctaaatttgcatagcaagtggaccctatatttggaatttaaagagtttctggcaaaatttagattaaattggctaattaataaca

SEQ ID NO: 202484 - DNA, 1043 bp, Homo sapiens
  Payload ID: 19933
  Gene Name: zinc finger protein 429
  ENST ID: ENST00000597078
  CDS Start-End: 169-537
ggtttccggaatatggcggggcgtttggctcttgctgcagccagagctccaggtctcgtcttcatttctgtgtcctttgttcttagaggcccagcctgtgtggccctgtgacccgcagatattgggagatacacagctaagactccaggaccccctggaagcctagaaatgggaccattgacatttacagatgtggccatagaattctctctggaggagtggcagtgcctggacacagcacaacagaacttatatagaaatgtgatgttagagaactacagaaacttggtcttcctgggtattgctgtttctaagccagacctaatcacttgtctagagaaagaaaaagaaccctgcaagatgaagcgacatgaaatggtggatgaacccccagatggagtttcgctcttgttgcccaggctggagtgcagtggcacgatctctgctcactacaacttccccctaccgggttcaagcgattctcctgcctcagcttcctcagtagttgggattacaggttggggaacttctggataatatccacatcactttcaggtctgttgcagcttgctagaggtccactccagaccctgttcacctgggaatcacaaatagaggctgtagaatggcaaaaattgcttcctgctccttcctctggaagcttcatcacagaggggcaccagcctgatgccaaccggagctctcctgtatgaggtttctatcgacccctgttgggaagtctctcccagtcaggaggcacaggggtcagggaccaacgtgaggaggcagtctgtcccttagcagagctgacgtgctgtgctgggagaatccctcttgtcagggtcacctgctctcttcagagccagcagtcaggaaggattaaatctatggaagctgtgcccacagcaaccccttcccccaggtgctctgtcccagggagatggggattttgtctgtaagcccctgactggggctgtctcctttccatccgagatgccctgcccagcgaggaggaatctagagaagcagtctggccatatttt

SEQ ID NO: 202485 - DNA, 1889 bp, Homo sapiens
  Payload ID: 19933
  Gene Name: zinc finger protein 429
  ENST ID: ENST00000618549
  CDS Start-End: 112-1869
gtcttcatttctgtgtcctttgttcttagaggcccagcctgtgtggccctgtgacccgcagatattgggagatacacagctaagactccaggaccccctggaagcctagaaatgggaccattgacatttacagatgtggccatagaattctctctggaggagtggcagtgcctggacacagcacaacagaacttatatagaaatgtgatgttagagaactacagaaacttggtcttcctgggtattgctgtttctaagccagacctaatcacttgtctagagaaagaaaaagaaccctgcaagatgaagcgacatgaaatggtggatgaacccccagttgtgtgttctcattttgctgaagacttttggccagagcaagacataaaagattctttccaaaaagtgacactgaggagatatgataaacgtggacatgagaacttacaattaagaaaaggctataaaactgtaggtgattgtaagctatacaaaggaggttataatggacttaaccaatgtttgacacttacccagagcaaaatgtatcactgtgatatatatgtaaaagtcttttatgcattttcaaatgcagatagatacaagacaagacatactggaaagaaacctttccagtgtaaaaaatgtggcaaatcattttgcatgctttcacaactaactcaacataagaaaattcatattagagagaatacctacagatgtaaagaatttggcaatgcctttaatcagtcctcagcccttactaaccataagagaatttatgttggtgagaaacactacagatgtgaagaatgtggcaaagcatttaaccactactcaacccttactaaccataagagaattcattctggagagaagccctacaaatgtgatgaatgtggcaaaacctttagcatatcctcaacctttactaaacataagataattcatactgaagagaaaccctacaaatgtaaagaatgtggcaaagcctttaaccggcctcaacccttactagccataatacatactggtgagaaaccctacaaatgtgaagaatgtgcaaagcctttaactggtcttcaactcactaaacataaggtaattcatactggagagaagccctacaaatgtgaagaatgtggcaaagcttttaaccagtcttcaagacttactcgacataaaaaaattcatactggagaggaaccctacaaatttgaaaaatgtggcagagtttttacctgttcctcaacacttactcaagacaagaaaattcatactggagagaaaccctacaattgtgaagaatgtggcaaagtttttacctattcctctacacttactagacataagagaattcatactgaagagaaaccctataaatgtaacgaatgtggcaaagcttttaaccggtcctcacaccttactagccataggagaattcatactggagagaaaccctacaaatgtgaagaatgtggcaaagcctttaagcagtcctcaaaccttaacagtcataaaaaaattcatagtggagagaaaccctacaaatgtgaagaatgtggcaaagcttttatcctgtcctcaagacttactcaacataagaaaattcatactggagagaaaccttacaaatgtgaagaatgtggcaaagcttttaaccggtcctcaagacttactcaacataagaaaattcatactggagagaaaccctacaaatgtaaacaatgtgacaaagcttttacccactcctcaaaccttagtagtcataagaaaattcatagtggagagaaaccctacaaatgtgaagaatgtggcaaagcttttaatcggtcctcaagacttactcaacataagaaagaaaattcatagagagaaaccttacaaatgtg

SEQ ID NO: 202486 - DNA, 2881 bp, Homo sapiens
  Payload ID: 19934
  Gene Name: zinc finger protein 43
  Uniprot ID: P17038
  ENST ID: ENST00000354959
  CDS Start-End: 171-2600
ggcttccgggatgtggcggggcctttgtctctggctgcagttggagctctgcgtctcgtcttcgttcttctgtgtcctctgctgctagaggtccagcctctgtggctctgtgacctgcgggtattgggggatccacagctaagacgccaggaccccccggaagcctagaaatgggaccattgacatttatggatgtggccatagaattctgtctggaggagtggcaatgcctggacattgcacagcagaatttatataggaatgtgatgttagagaactacagaaacctggtcttcctgggtattgctgtctctaagccagacctgatcacctgtctggagcaagaaaaagagccttgggagcctatgaggagacatgaaatggtagccaaacccccagttatgtgttctcattttacccaagacttttggccagagcagcatataaaagatcctttccaaaaagcgacactgagaagatataaaaactgtgaacataaaaatgtacatttaaaaaaagaccataaaagtgtggatgagtgtaaggtgcacagaggaggttataatggatttaaccaatgtttgccagctacccagagcaaaatatttctatttgataaatgtgtgaaagcctttcataaattttcaaattcaaacagacataagataagccatactgaaaaaaaacttttcaaatgcaaagaatgtggcaaatcattttgcatgcttccacatctagctcaacataaaataattcataccagagtgaatttctgcaaatgtgaaaaatgtggaaaagcttttaactgcccttcaatcatcactaaacataagagaattaatactggagagaaaccctacacatgtgaagaatgtggcaaagtctttaattggtcctcacgccttactacacataaaaaaaattatactagatacaaactctacaaatgtgaagaatgtggcaaagcttttaacaagtcctcaatccttactacccataagataattcgcactggagagaaattctacaaatgtaaagaatgtgccaaagcttttaaccaatcctcaaaccttactgaacataagaaaattcatcctggagagaaaccttacaaatgtgaagaatgtggcaaagcctttaactggccctcaactcttactaaacataagagaattcatactggagagaaaccctacacatgtgaagaatgtggcaaagcctttaaccagttctcaaaccttactacacataagagaatccatactgcagagaaattctataaatgtacagaatgtggtgaagcttttagccggtcctcaaaccttactaaacataagaaaattcatactgaaaagaaaccctacaaatgtgaagaatgtggcaaagcttttaagtggtcctcaaagcttactgaacataagttaactcatactggagagaaaccctacaaatgtgaagaatgtggcaaagcctttaactggccctcaacccttactaaacataacagaattcatactggagagaaaccctacaaatgtgaagtatgtggcaaagcctttaaccagttctcaaaccttactacacataagagaattcatactgcagaaaaaccgtacaaatgtgaagaatgtggcaaagcttttagccggtcctcaaaccttactaaacataagaaaattcacattgaaaagaaaccctacaaatgtgaagaatgtggcaaagcttttaagtggtcctcaaagcttactgaacataagataactcatactggagagaaaccctacaaatgtgaagaatgtggcaaagcttttaaccatttctcaatccttaccaaacataagaggattcatactggagagaaaccctacaagtgtgaagaatgtggcaaagcttttacccaatcctcaaaccttactacacataagaaaattcatactggagagaaattctacaaatgtgaagaatgtggcaaagcttttacccaatcttcaaaccttactacacataaaaaaattcatactggaggaaaaccctacaaatgtgaagaatgtggcaaagcttttaaccagttctcaactcttactaaacataagataattcacactgaggagaaaccctacaaatgtgaagaatgtggcaaagcctttaagtggtcctcaacccttactaaacataagataattcatactggagagaaaccctacaaatgtgaagaatgtggcaaagcttttaaactgtcctcaaccctttctacacataagattattcatactggagagaaaccctacaaatgtgaaaaatgtggcaaagcttttaaccgatcctcaaaccttattgaacataagaaaattcatactggagagcaaccctacaaatgtgaagaatgtggcaaagcatttaactattcctcacaccttaatacacataagagaattcatactaaagagcaaccctacaaatgtaaagaatgtggcaaagctttcaaccaatattcaaaccttactacacataacaaaattcatactggagagaaactctacaaacctgaagatgtgacagtgattttgacaacacctcaaactttttcaaacataaaataaattatactggtgagaaattctagaaatgtaaagaatgtgataaaggctttacatggttgtcacacttgattgtaggtaagataatttacattggagtaaacttctacaagtgtgaagaatgtggcaaaacttttaattaatgctcgtaccttattgcacaggaaagaatttttacttggaaaaaggtatatacacaaagaatgtggaaaagccattaatatgtgctcatatcttactcaacatcagagagtctgtacttaataaaaccattatagatgcaa

SEQ ID NO: 202487 - DNA, 5249 bp, Homo sapiens
  Payload ID: 19934
  Gene Name: zinc finger protein 43
  ENST ID: ENST00000357491
  CDS Start-End: 135-2591
tttgtctccagctcccgctagaccttgggacccgcctctgcttttccgcgttctccaactcgggaatccccggtgactttgtcgcagcctccgttaccctgtgatctgcaagtcctgggagacgcacagctaagatgcccggacatcctggaagctgggaaatgggaccattgacatttatggatgtggccatagaattctgtctggaggagtggcaatgcctggacattgcacagcagaatttatataggaatgtgatgttagagaactacagaaacctggtcttcctgggtattgctgtctctaagccagacctgatcacctgtctggagcaagaaaaagagccttgggagcctatgaggagacatgaaatggtagccaaacccccagttatgtgttctcattttacccaagacttttggccagagcagcatataaaagatcctttccaaaaagcgacactgagaagatataaaaactgtgaacataaaaatgtacatttaaaaaaagaccataaaagtgtggatgagtgtaaggtgcacagaggaggttataatggatttaaccaatgtttgccagctacccagagcaaaatatttctatttgataaatgtgtgaaagcctttcataaattttcaaattcaaacagacataagataagccatactgaaaaaaaacttttcaaatgcaaagaatgtggcaaatcattttgcatgcttccacatctagctcaacataaaataattcataccagagtgaatttctgcaaatgtgaaaaatgtggaaaagcttttaactgcccttcaatcatcactaaacataagagaattaatactggagagaaaccctacacatgtgaagaatgtggcaaagtctttaattggtcctcacgccttactacacataaaaaaaattatactagatacaaactctacaaatgtgaagaatgtggcaaagcttttaacaagtcctcaatccttactacccataagataattcgcactggagagaaattctacaaatgtaaagaatgtgccaaagcttttaaccaatcctcaaaccttactgaacataagaaaattcatcctggagagaaaccttacaaatgtgaagaatgtggcaaagcctttaactggccctcaactcttactaaacataagagaattcatactggagagaaaccctacacatgtgaagaatgtggcaaagcctttaaccagttctcaaaccttactacacataagagaatccatactgcagagaaattctataaatgtacagaatgtggtgaagcttttagccggtcctcaaaccttactaaacataagaaaattcatactgaaaagaaaccctacaaatgtgaagaatgtggcaaagcttttaagtggtcctcaaagcttactgaacataagttaactcatactggagagaaaccctacaaatgtgaagaatgtggcaaagcctttaactggccctcaacccttactaaacataacagaattcatactggagagaaaccctacaaatgtgaagtatgtggcaaagcctttaaccagttctcaaaccttactacacataagagaattcatactgcagaaaaaccgtacaaatgtgaagaatgtggcaaagcttttagccggtcctcaaaccttactaaacataagaaaattcacattgaaaagaaaccctacaaatgtgaagaatgtggcaaagcttttaagtggtcctcaaagcttactgaacataagataactcatactggagagaaaccctacaaatgtgaagaatgtggcaaagcttttaaccatttctcaatccttaccaaacataagaggattcatactggagagaaaccctacaagtgtgaagaatgtggcaaagcttttacccaatcctcaaaccttactacacataagaaaattcatactggagagaaattctacaaatgtgaagaatgtggcaaagcttttacccaatcttcaaaccttactacacataaaaaaattcatactggaggaaaaccctacaaatgtgaagaatgtggcaaagcttttaaccagttctcaactcttactaaacataagataattcacactgaggagaaaccctacaaatgtgaagaatgtggcaaagcctttaagtggtcctcaacccttactaaacataagataattcatactggagagaaaccctacaaatgtgaagaatgtggcaaagcttttaaactgtcctcaaccctttctacacataagattattcatactggagagaaaccctacaaatgtgaaaaatgtggcaaagcttttaaccgatcctcaaaccttattgaacataagaaaattcatactggagagcaaccctacaaatgtgaagaatgtggcaaagcatttaactattcctcacaccttaatacacataagagaattcatactaaagagcaaccctacaaatgtaaagaatgtggcaaagctttcaaccaatattcaaaccttactacacataacaaaattcatactggagagaaactctacaaacctgaagatgtgacagtgattttgacaacacctcaaactttttcaaacataaaataaattatactggtgagaaattctagaaatgtaaagaatgtgataaaggctttacatggttgtcacacttgattgtaggtaagataatttacattggagtaaacttctacaagtgtgaagaatgtggcaaaacttttaattaatgctcgtaccttattgcacaggaaagaatttttacttggaaaaaggtatatacacaaagaatgtggaaaagccattaatatgtgctcatatcttactcaacatcagagagtctgtacttaataaaaccattatagatgcaactagtgtcaaaagatctttcagaaaataaaagcctttaaagtgaagaagataattcattctgaagacaaacattacaaatattaagagggttgtagtaccattacttgcatcacagatcttattgtacacattttgtactaaagaaaaccctgaagcagttgctcaaatactgttcaacatcagaaaatttatattggaaaaaacccctggaaaatgtaataaatttgtaaaaacagttttgaaaaactacagcttataaaacatgagggtctataatgcttggttgatagtacaaagtttattcaacatcagggaatttatattggagaaaaaccctacaaatgtaatcagtttggaaaaacatttttaaaaaaaccacagcatagaaaacaccacagggttcatactaaaatatgtttttgcagatgcagtaaaaatgaaaaaaatttaatccgaaattaagtttatgtaaatatctgagaattcacagtagaaatatctaaggcgcggacacttcagacattacactaaatcagtgctaagtacagaaaacaacacaaaataaaacttggtggataaattatttgtatataacattaaaagaagtagaagattttcagttataattacaattaaagtatacttttatcttgaaaaaattactgatttttaaattagtgaataatgatgtaattaaactctcaaataactttatgctcttttttcattcctgctatattcacatgtgaaagcatgtgaccaattgttgctgcaccaaagatatgagagattcttttattaggtgggcattatttaaaacattttttatggaacagtaaggatattaaagtgtaagatgcagccaggcatggtggctcatgcctataatcccagcactttgggaggctgaggccggtggatcacctgaggtcaggagtttgagaccagcctgaccaacatggtgaaaccctgtctttactaaaaatacaaaaatttaccaggcacctataatcccagctacttcaaaggctgaagcaggagaatcacttgaacctggaaagtggaggtctcagtgagccgaaatcataccattgcactccaacctgggcaacaaaagtcaaactccatctcaaaaagaaaaaaaaaaaaaaaaaagatgcgtgatgaaaatgtaactggagaggctctttgtggttaacttataaaggagtgatgcaggagataggttttcagagtaatattcttctgcattatagtgacaaaagttttttattttagttaaaattggttaaattagtaagtcattttacttattgtaattttatgtaattaaatgtacatttttaaatttttagattacatgtaaatataacttttaaaaaaatgtgttaagaccattgtacattcaatgaagcattattatgcttctaactttaacctatttcaccttactcaagagtgtatgtaaaagatggtaacaatatactatttggtaacataatggactaacatttctattaatctatttcaccagtggctttcaactgcaaataagttaaagaatatttttctataggttaaatattcttttttgtcttatttaaacttactgttcttaatttctgtgggtacatagtatgattttaattaccttattttattctttgtgctattcataattttttttgtttgtttggtttttttttttgagacagagtcttgctctcgcccaggctggagtgcagtggcgcgatcttggctcactgcaagctccgcctcccaggttcactccattctcctgcctcagcctcccaagtagctgggaccacaggcgcccactacttgtttgggtttttttttggagatggagtctcgctctgtcacccaggctggagtacagtggcatgatcttggctcactgcaacccccacctccccggttcaagtgattctcctgcctcagcctcccgaatagctgggattacaggcgtccaccatcacaccaggctaatttttgtatttttagtagagatggagtttcaccatgttggccaggatggtctcgatcttctgacctcatgatctgcctgcctcggcctcccagagttctgggaccacaggcatgagccactgcacctggccaaatgtgtatatatttatgcaatatataacatgttttgatacaggcatataatatgtattagtcacatcaggataaagtatctattaccttcagcatttatcctttgtattacaagccaattctacacttcattattttaatgtacaattaaattgttattgactacagggtcattttaattataaaaattatatagaagtataaataaagtccatacattcctgagtcatgaat

SEQ ID NO: 202488 - DNA, 580 bp, Homo sapiens
  Payload ID: 19934
  Gene Name: zinc finger protein 43
  ENST ID: ENST00000599906
  CDS Start-End: 218-580
cctttgtctctggctgcagttggagctctgcgtctcgtcttcgttcttctgtgtcctctgctgctagaggtccagcctctgtggctctgtgacctgcgggtattgggggatccacagctaagacgccaggaccccccggaagcctagaaatggtattgctgtctctaagccagacctgatcacctgtctggagcaagaaaaagagccttgggagcctatgaggagacatgaaatggtagccaaacccccagttatgtgttctcattttacccaagacttttggccagagcagcatataaaagatcctttccaaaaagcgacactgagaagatataaaaactgtgaacataaaaatgtacatttaaaaaaagaccataaaagtgtggatgagtgtaaggtgcacagaggaggttataatggatttaaccaatgtttgccagctacccagagcaaaatatttctatttgataaatgtgtgaaagcctttcataaattttcaaattcaaacagacataagataagccatactgaaaaaaaacttttcaaatgcaaagaatgtggcaaatcattttgcatgctt

SEQ ID NO: 202489 - DNA, 5584 bp, Homo sapiens
  Payload ID: 19934
  Gene Name: zinc finger protein 43
  Uniprot ID: P17038
  ENST ID: ENST00000594012
  CDS Start-End: 516-2927
tctccaactcgggaatccccggtgactttgtcgcagcctccgttaccctgtgatctgcaagtcctgggagacgcacagctaagatgcccggacatcctggaagctgggaaatgacagacccaacatacaggaggtgttgaccctcatacctggaacctggacatgtgtggaatttctaatctcattcctggactttcctgcaggtgatgtgactcttcttcagcctgcaccctgccaaaagaggattgtgatgtatcactggacccagcacctagatgacgtaactctcatcttttgcctggaccttgcatattttgggtgtgattgtgacacatacctctgctcagaatgtgagcgatttgactctcctgcctgggcccagtacacagatgggattgtgacatatcgctggacccagcatgtagatcatgtgaccctatactcttgccttggtgctgtcgcagagggcattgtgacatatcactggtccctgcacccagggaccattgacatttatggatgtggccatagaattctgtctggaggagtggcaatgcctggacattgcacagcagaatttatataggaatgtgatgttagagaactacagaaacctggtcttcctgggtattgctgtctctaagccagacctgatcacctgtctggagcaagaaaaagagccttgggagcctatgaggagacatgaaatggtagccaaacccccagttatgtgttctcattttacccaagacttttggccagagcagcatataaaagatcctttccaaaaagcgacactgagaagatataaaaactgtgaacataaaaatgtacatttaaaaaaagaccataaaagtgtggatgagtgtaaggtgcacagaggaggttataatggatttaaccaatgtttgccagctacccagagcaaaatatttctatttgataaatgtgtgaaagcctttcataaattttcaaattcaaacagacataagataagccatactgaaaaaaaacttttcaaatgcaaagaatgtggcaaatcattttgcatgcttccacatctagctcaacataaaataattcataccagagtgaatttctgcaaatgtgaaaaatgtggaaaagcttttaactgcccttcaatcatcactaaacataagagaattaatactggagagaaaccctacacatgtgaagaatgtggcaaagtctttaattggtcctcacgccttactacacataaaaaaaattatactagatacaaactctacaaatgtgaagaatgtggcaaagcttttaacaagtcctcaatccttactacccataagataattcgcactggagagaaattctacaaatgtaaagaatgtgccaaagcttttaaccaatcctcaaaccttactgaacataagaaaattcatcctggagagaaaccttacaaatgtgaagaatgtggcaaagcctttaactggccctcaactcttactaaacataagagaattcatactggagagaaaccctacacatgtgaagaatgtggcaaagcctttaaccagttctcaaaccttactacacataagagaatccatactgcagagaaattctataaatgtacagaatgtggtgaagcttttagccggtcctcaaaccttactaaacataagaaaattcatactgaaaagaaaccctacaaatgtgaagaatgtggcaaagcttttaagtggtcctcaaagcttactgaacataagttaactcatactggagagaaaccctacaaatgtgaagaatgtggcaaagcctttaactggccctcaacccttactaaacataacagaattcatactggagagaaaccctacaaatgtgaagtatgtggcaaagcctttaaccagttctcaaaccttactacacataagagaattcatactgcagaaaaaccgtacaaatgtgaagaatgtggcaaagcttttagccggtcctcaaaccttactaaacataagaaaattcacattgaaaagaaaccctacaaatgtgaagaatgtggcaaagcttttaagtggtcctcaaagcttactgaacataagataactcatactggagagaaaccctacaaatgtgaagaatgtggcaaagcttttaaccatttctcaatccttaccaaacataagaggattcatactggagagaaaccctacaagtgtgaagaatgtggcaaagcttttacccaatcctcaaaccttactacacataagaaaattcatactggagagaaattctacaaatgtgaagaatgtggcaaagcttttacccaatcttcaaaccttactacacataaaaaaattcatactggaggaaaaccctacaaatgtgaagaatgtggcaaagcttttaaccagttctcaactcttactaaacataagataattcacactgaggagaaaccctacaaatgtgaagaatgtggcaaagcctttaagtggtcctcaacccttactaaacataagataattcatactggagagaaaccctacaaatgtgaagaatgtggcaaagcttttaaactgtcctcaaccctttctacacataagattattcatactggagagaaaccctacaaatgtgaaaaatgtggcaaagcttttaaccgatcctcaaaccttattgaacataagaaaattcatactggagagcaaccctacaaatgtgaagaatgtggcaaagcatttaactattcctcacaccttaatacacataagagaattcatactaaagagcaaccctacaaatgtaaagaatgtggcaaagctttcaaccaatattcaaaccttactacacataacaaaattcatactggagagaaactctacaaacctgaagatgtgacagtgattttgacaacacctcaaactttttcaaacataaaataaattatactggtgagaaattctagaaatgtaaagaatgtgataaaggctttacatggttgtcacacttgattgtaggtaagataatttacattggagtaaacttctacaagtgtgaagaatgtggcaaaacttttaattaatgctcgtaccttattgcacaggaaagaatttttacttggaaaaaggtatatacacaaagaatgtggaaaagccattaatatgtgctcatatcttactcaacatcagagagtctgtacttaataaaaccattatagatgcaactagtgtcaaaagatctttcagaaaataaaagcctttaaagtgaagaagataattcattctgaagacaaacattacaaatattaagagggttgtagtaccattacttgcatcacagatcttattgtacacattttgtactaaagaaaaccctgaagcagttgctcaaatactgttcaacatcagaaaatttatattggaaaaaacccctggaaaatgtaataaatttgtaaaaacagttttgaaaaactacagcttataaaacatgagggtctataatgcttggttgatagtacaaagtttattcaacatcagggaatttatattggagaaaaaccctacaaatgtaatcagtttggaaaaacatttttaaaaaaaccacagcatagaaaacaccacagggttcatactaaaatatgtttttgcagatgcagtaaaaatgaaaaaaatttaatccgaaattaagtttatgtaaatatctgagaattcacagtagaaatatctaaggcgcggacacttcagacattacactaaatcagtgctaagtacagaaaacaacacaaaataaaacttggtggataaattatttgtatataacattaaaagaagtagaagattttcagttataattacaattaaagtatacttttatcttgaaaaaattactgatttttaaattagtgaataatgatgtaattaaactctcaaataactttatgctcttttttcattcctgctatattcacatgtgaaagcatgtgaccaattgttgctgcaccaaagatatgagagattcttttattaggtgggcattatttaaaacattttttatggaacagtaaggatattaaagtgtaagatgcagccaggcatggtggctcatgcctataatcccagcactttgggaggctgaggccggtggatcacctgaggtcaggagtttgagaccagcctgaccaacatggtgaaaccctgtctttactaaaaatacaaaaatttaccaggcacctataatcccagctacttcaaaggctgaagcaggagaatcacttgaacctggaaagtggaggtctcagtgagccgaaatcataccattgcactccaacctgggcaacaaaagtcaaactccatctcaaaaagaaaaaaaaaaaaaaaaaagatgcgtgatgaaaatgtaactggagaggctctttgtggttaacttataaaggagtgatgcaggagataggttttcagagtaatattcttctgcattatagtgacaaaagttttttattttagttaaaattggttaaattagtaagtcattttacttattgtaattttatgtaattaaatgtacatttttaaatttttagattacatgtaaatataacttttaaaaaaatgtgttaagaccattgtacattcaatgaagcattattatgcttctaactttaacctatttcaccttactcaagagtgtatgtaaaagatggtaacaatatactatttggtaacataatggactaacatttctattaatctatttcaccagtggctttcaactgcaaataagttaaagaatatttttctataggttaaatattcttttttgtcttatttaaacttactgttcttaatttctgtgggtacatagtatgattttaattaccttattttattctttgtgctattcataattttttttgtttgtttggtttttttttttgagacagagtcttgctctcgcccaggctggagtgcagtggcgcgatcttggctcactgcaagctccgcctcccaggttcactccattctcctgcctcagcctcccaagtagctgggaccacaggcgcccactacttgtttgggtttttttttggagatggagtctcgctctgtcacccaggctggagtacagtggcatgatcttggctcactgcaacccccacctccccggttcaagtgattctcctgcctcagcctcccgaatagctgggattacaggcgtccaccatcacaccaggctaatttttgtatttttagtagagatggagtttcaccatgttggccaggatggtctcgatcttctgacctcatgatctgcctgcctcggcctcccagagttctgggaccacaggcatgagccactgcacctggccaaatgtgtatatatttatgcaatatataacatgttttgatacaggcatataatatgtattagtcacatcaggataaagtatctattaccttcagcatttatcctttgtattacaagccaattctacacttcattattttaatgtacaattaaattgttattgactacagggtcattttaattataaaaattatatagaagtataaataaagtccatacattcctgagtcatgaa

SEQ ID NO: 202490 - DNA, 3399 bp, Homo sapiens
  Payload ID: 19934
  Gene Name: zinc finger protein 43
  Uniprot ID: P17038
  ENST ID: ENST00000595461
  CDS Start-End: 662-3073
cttttccgcgttctccaactcgggaatccccggtgactttgtcgcagcctccgttaccctgtgatctgcaagtcctgggagacgcacagctaagatgcccggacatcctggaagctgggaaatggtgggttggttactctcagaccaagattcagtacacatgtgaggctgtgactgcactgaaaagcacagtccgcagacaaaattgtggctctcttgcaataccgtcaaccattgagattgtgactcacgtacttagacagacccaacatacaggaggtgttgaccctcatacctggaacctggacatgtgtggaatttctaatctcattcctggactttcctgcaggtgatgtgactcttcttcagcctgcaccctgccaaaagaggattgtgatgtatcactggacccagcacctagatgacgtaactctcatcttttgcctggaccttgcatattttgggtgtgattgtgacacatacctctgctcagaatgtgagcgatttgactctcctgcctgggcccagtacacagatgggattgtgacatatcgctggacccagcatgtagatcatgtgaccctatactcttgccttggtgctgtcgcagagggcattgtgacatatcactggtccctgcacccagggaccattgacatttatggatgtggccatagaattctgtctggaggagtggcaatgcctggacattgcacagcagaatttatataggaatgtgatgttagagaactacagaaacctggtcttcctgggtattgctgtctctaagccagacctgatcacctgtctggagcaagaaaaagagccttgggagcctatgaggagacatgaaatggtagccaaacccccagttatgtgttctcattttacccaagacttttggccagagcagcatataaaagatcctttccaaaaagcgacactgagaagatataaaaactgtgaacataaaaatgtacatttaaaaaaagaccataaaagtgtggatgagtgtaaggtgcacagaggaggttataatggatttaaccaatgtttgccagctacccagagcaaaatatttctatttgataaatgtgtgaaagcctttcataaattttcaaattcaaacagacataagataagccatactgaaaaaaaacttttcaaatgcaaagaatgtggcaaatcattttgcatgcttccacatctagctcaacataaaataattcataccagagtgaatttctgcaaatgtgaaaaatgtggaaaagcttttaactgcccttcaatcatcactaaacataagagaattaatactggagagaaaccctacacatgtgaagaatgtggcaaagtctttaattggtcctcacgccttactacacataaaaaaaattatactagatacaaactctacaaatgtgaagaatgtggcaaagcttttaacaagtcctcaatccttactacccataagataattcgcactggagagaaattctacaaatgtaaagaatgtgccaaagcttttaaccaatcctcaaaccttactgaacataagaaaattcatcctggagagaaaccttacaaatgtgaagaatgtggcaaagcctttaactggccctcaactcttactaaacataagagaattcatactggagagaaaccctacacatgtgaagaatgtggcaaagcctttaaccagttctcaaaccttactacacataagagaatccatactgcagagaaattctataaatgtacagaatgtggtgaagcttttagccggtcctcaaaccttactaaacataagaaaattcatactgaaaagaaaccctacaaatgtgaagaatgtggcaaagcttttaagtggtcctcaaagcttactgaacataagttaactcatactggagagaaaccctacaaatgtgaagaatgtggcaaagcctttaactggccctcaacccttactaaacataacagaattcatactggagagaaaccctacaaatgtgaagtatgtggcaaagcctttaaccagttctcaaaccttactacacataagagaattcatactgcagaaaaaccgtacaaatgtgaagaatgtggcaaagcttttagccggtcctcaaaccttactaaacataagaaaattcacattgaaaagaaaccctacaaatgtgaagaatgtggcaaagcttttaagtggtcctcaaagcttactgaacataagataactcatactggagagaaaccctacaaatgtgaagaatgtggcaaagcttttaaccatttctcaatccttaccaaacataagaggattcatactggagagaaaccctacaagtgtgaagaatgtggcaaagcttttacccaatcctcaaaccttactacacataagaaaattcatactggagagaaattctacaaatgtgaagaatgtggcaaagcttttacccaatcttcaaaccttactacacataaaaaaattcatactggaggaaaaccctacaaatgtgaagaatgtggcaaagcttttaaccagttctcaactcttactaaacataagataattcacactgaggagaaaccctacaaatgtgaagaatgtggcaaagcctttaagtggtcctcaacccttactaaacataagataattcatactggagagaaaccctacaaatgtgaagaatgtggcaaagcttttaaactgtcctcaaccctttctacacataagattattcatactggagagaaaccctacaaatgtgaaaaatgtggcaaagcttttaaccgatcctcaaaccttattgaacataagaaaattcatactggagagcaaccctacaaatgtgaagaatgtggcaaagcatttaactattcctcacaccttaatacacataagagaattcatactaaagagcaaccctacaaatgtaaagaatgtggcaaagctttcaaccaatattcaaaccttactacacataacaaaattcatactggagagaaactctacaaacctgaagatgtgacagtgattttgacaacacctcaaactttttcaaacataaaataaattatactggtgagaaattctagaaatgtaaagaatgtgataaaggctttacatggttgtcacacttgattgtaggtaagataatttacattggagtaaacttctacaagtgtgaagaatgtggcaaaacttttaattaatgctcgtaccttattgcacaggaaagaatttttacttggaaaaaggtatatacacaaagaatgtggaaaagccattaatatgtgctcatatcttactcaacatcagagagtctgtacttaataaaaccattatagatgcaactagtgtcaaaagatctttcagaaaataaaagcctttaaagtgaa

SEQ ID NO: 202491 - DNA, 3004 bp, Homo sapiens
  Payload ID: 19934
  Gene Name: zinc finger protein 43
  Uniprot ID: P17038
  ENST ID: ENST00000598381
  CDS Start-End: 339-2750
gtgatctgcaagtcctgggagacgcacagctaagatgcccggacatcctggaagctgggaaatggtgatgtgactcttcttcagcctgcaccctgccaaaagaggattgtgatgtatcactggacccagcacctagatgacgtgtgattgtgacacatacctctgctcagaatgtgagcgatttgactctcctgcctgggcccagtacacagatgggattgtgacatatcgctggacccagcatgtagatcatgtgaccctatactcttgccttggtgctgtcgcagagggcattgtgacatatcactggtccctgcacccagggaccattgacatttatggatgtggccatagaattctgtctggaggagtggcaatgcctggacattgcacagcagaatttatataggaatgtgatgttagagaactacagaaacctggtcttcctgggtattgctgtctctaagccagacctgatcacctgtctggagcaagaaaaagagccttgggagcctatgaggagacatgaaatggtagccaaacccccagttatgtgttctcattttacccaagacttttggccagagcagcatataaaagatcctttccaaaaagcgacactgagaagatataaaaactgtgaacataaaaatgtacatttaaaaaaagaccataaaagtgtggatgagtgtaaggtgcacagaggaggttataatggatttaaccaatgtttgccagctacccagagcaaaatatttctatttgataaatgtgtgaaagcctttcataaattttcaaattcaaacagacataagataagccatactgaaaaaaaacttttcaaatgcaaagaatgtggcaaatcattttgcatgcttccacatctagctcaacataaaataattcataccagagtgaatttctgcaaatgtgaaaaatgtggaaaagcttttaactgcccttcaatcatcactaaacataagagaattaatactggagagaaaccctacacatgtgaagaatgtggcaaagtctttaattggtcctcacgccttactacacataaaaaaaattatactagatacaaactctacaaatgtgaagaatgtggcaaagcttttaacaagtcctcaatccttactacccataagataattcgcactggagagaaattctacaaatgtaaagaatgtgccaaagcttttaaccaatcctcaaaccttactgaacataagaaaattcatcctggagagaaaccttacaaatgtgaagaatgtggcaaagcctttaactggccctcaactcttactaaacataagagaattcatactggagagaaaccctacacatgtgaagaatgtggcaaagcctttaaccagttctcaaaccttactacacataagagaatccatactgcagagaaattctataaatgtacagaatgtggtgaagcttttagccggtcctcaaaccttactaaacataagaaaattcatactgaaaagaaaccctacaaatgtgaagaatgtggcaaagcttttaagtggtcctcaaagcttactgaacataagttaactcatactggagagaaaccctacaaatgtgaagaatgtggcaaagcctttaactggccctcaacccttactaaacataacagaattcatactggagagaaaccctacaaatgtgaagtatgtggcaaagcctttaaccagttctcaaaccttactacacataagagaattcatactgcagaaaaaccgtacaaatgtgaagaatgtggcaaagcttttagccggtcctcaaaccttactaaacataagaaaattcacattgaaaagaaaccctacaaatgtgaagaatgtggcaaagcttttaagtggtcctcaaagcttactgaacataagataactcatactggagagaaaccctacaaatgtgaagaatgtggcaaagcttttaaccatttctcaatccttaccaaacataagaggattcatactggagagaaaccctacaagtgtgaagaatgtggcaaagcttttacccaatcctcaaaccttactacacataagaaaattcatactggagagaaattctacaaatgtgaagaatgtggcaaagcttttacccaatcttcaaaccttactacacataaaaaaattcatactggaggaaaaccctacaaatgtgaagaatgtggcaaagcttttaaccagttctcaactcttactaaacataagataattcacactgaggagaaaccctacaaatgtgaagaatgtggcaaagcctttaagtggtcctcaacccttactaaacataagataattcatactggagagaaaccctacaaatgtgaagaatgtggcaaagcttttaaactgtcctcaaccctttctacacataagattattcatactggagagaaaccctacaaatgtgaaaaatgtggcaaagcttttaaccgatcctcaaaccttattgaacataagaaaattcatactggagagcaaccctacaaatgtgaagaatgtggcaaagcatttaactattcctcacaccttaatacacataagagaattcatactaaagagcaaccctacaaatgtaaagaatgtggcaaagctttcaaccaatattcaaaccttactacacataacaaaattcatactggagagaaactctacaaacctgaagatgtgacagtgattttgacaacacctcaaactttttcaaacataaaataaattatactggtgagaaattctagaaatgtaaagaatgtgataaaggctttacatggttgtcacacttgattgtaggtaagataatttacattggagtaaacttctacaagtgtgaagaatgtggcaaaacttttaattaatgctcgtaccttattgcacaggaaagaatttttacttggaaaaaggtatatacacaaagaatgtggaaaagccattaatatgtgctcatatcttactcaacatcagagagtctg

SEQ ID NO: 202492 - DNA, 447 bp, Homo sapiens
  Payload ID: 19934
  Gene Name: zinc finger protein 43
  ENST ID: ENST00000596899
  CDS Start-End: 287-447
acccaatcagacgcgcagttggagagggggccgtggcttccggcttttggcggggcctttgtctccagctcccgctagaccttgggacccgcctctgcttttccgcgttctccaactcgggaatccccggtgactttgtcgcagcctccgttaccctgtgatctgcaagtcctgggagacgcacagctaagatgcccggacatcctggaagctgggaaatggtattgctgtctctaagccagacctgatcacctgtctggagcaagaaaaagagccttgggagcctatgaggagacatgaaatggtagccaaacccccagttatgtgttctcattttacccaagacttttggccagagcagcatataaaagatcctttccaaaaagcgacactgagaagatataaaaactgtgaacataaaaatgtacatttaaaaaaagaccataa

SEQ ID NO: 202493 - DNA, 474 bp, Homo sapiens
  Payload ID: 19934
  Gene Name: zinc finger protein 43
  ENST ID: ENST00000593551
  CDS Start-End: 294-474
tccttgctggatcctgcttgcaggaagcattataatctatctgcatccatcacccaagtaatgtgactctctttctaccaggttgctgcttacagaaagaattgttacctatcactgggccagcacctagctgttgtgatgcttctttttctacctacattcagctcacaatgtagattttgacatactgctgggctaaacaccaaaaatgaagttacgtttttcctcagcactttcctcatcaggcattgtgacatattgtttggcccagaactaagggaccattgacatttatggatgtggccatagaattctgtctggaggagtggcaatgcctggacattgcacagcagaatttatataggaatgtgatgttagagaactacagaaacctggtcttcctgggtattgctgtctctaagccagacctgatcacctgtctggagcaagaaaaagagccttgggagcctatga

SEQ ID NO: 202494 - DNA, 560 bp, Homo sapiens
  Payload ID: 19934
  Gene Name: zinc finger protein 43
  ENST ID: ENST00000598288
  CDS Start-End: 306-560
aacagagaagattacgacaaatttctaagtgcagtgtatcttgtttatcttgtgctgacctcctatctcatcctgtgactaagaatgcctaacctggggaggcagccaaatatgcaggttcactgagccagactaaattgtattcagttgaatgcttatcaaggactcaagaatccagacttttatctcttatttacttatgacctggaagccctcacctcaagttgtcctgcattactggatcaaaccaagaaagagagagaggaaggaggaggtggagaaggaaaaagggaccattgacatttatggatgtggccatagaattctgtctggaggagtggcaatgcctggacattgcacagcagaatttatataggaatgtgatgttagagaactacagaaacctggtcttcctgggtattgctgtctctaagccagacctgatcacctgtctggagcaagaaaaagagccttgggagcctatgaggagacatgaaatggtagccaaacccccaggaggcattgtctctctattgaatgttttctttgatgtacagtaa

SEQ ID NO: 202495 - DNA, 1680 bp, Homo sapiens
  Payload ID: 19934
  Gene Name: zinc finger protein 43
  ENST ID: ENST00000623648
  CDS Start-End: 1-1426
tcatactggagagaaaccctacacatgtgaagaatgtggcaaagcctttaaccagttctcaaaccttactacacataagagaatccatactgcagagaaattctataaatgtacagaatgtggtgaagcttttagccggtcctcaaaccttactaaacataagaaaattcatactgaaaagaaaccctacaaatgtgaagaatgtggcaaagcttttaagtggtcctcaaagcttactgaacataagttaactcatactggagagaaaccctacaaatgtgaagaatgtggcaaagcctttaactggccctcaacccttactaaacataacagaattcatactggagagaaaccctacaaatgtgaagtatgtggcaaagcctttaaccagttctcaaaccttactacacataagagaattcatactgcagaaaaaccgtacaaatgtgaagaatgtggcaaagcttttagccggtcctcaaaccttactaaacataagaaaattcacattgaaaagaaaccctacaaatgtgaagaatgtggcaaagcttttaagtggtcctcaaagcttactgaacataagataactcatactggagagaaaccctacaaatgtgaagaatgtggcaaagcttttaaccatttctcaatccttaccaaacataagaggattcatactggagagaaaccctacaagtgtgaagaatgtggcaaagcttttacccaatcctcaaaccttactacacataagaaaattcatactggagagaaattctacaaatgtgaagaatgtggcaaagcttttacccaatcttcaaaccttactacacataaaaaaattcatactggaggaaaaccctacaaatgtgaagaatgtggcaaagcttttaaccagttctcaactcttactaaacataagataattcacactgaggagaaaccctacaaatgtgaagaatgtggcaaagcctttaagtggtcctcaacccttactaaacataagataattcatactggagagaaaccctacaaatgtgaagaatgtggcaaagcttttaaactgtcctcaaccctttctacacataagattattcatactggagagaaaccctacaaatgtgaaaaatgtggcaaagcttttaaccgatcctcaaaccttattgaacataagaaaattcatactggagagcaaccctacaaatgtgaagaatgtggcaaagcatttaactattcctcacaccttaatacacataagagaattcatactaaagagcaaccctacaaatgtaaagaatgtggcaaagctttcaaccaatattcaaaccttactacacataacaaaattcatactggagagaaactctacaaacctgaagatgtgacagtgattttgacaacacctcaaactttttcaaacataaaataaattatactggtgagaaattctagaaatgtaaagaatgtgataaaggctttacatggttgtcacacttgattgtaggtaagataatttacattggagtaaacttctacaagtgtgaagaatgtggcaaaacttttaattaatgctcgtaccttattgcacaggaaagaatttttacttggaaaaaggtatatacacaaagaatgtggaaaagccattaatatgtgctcatatcttactcaacatcagagagtctg

SEQ ID NO: 202496 - DNA, 1707 bp, Homo sapiens
  Payload ID: 19934
  Gene Name: zinc finger protein 43
  ENST ID: ENST00000624732
  CDS Start-End: 1-1426
tcatactggagagaaaccctacacatgtgaagaatgtggcaaagcctttaaccagttctcaaaccttactacacataagagaatccatactgcagagaaattctataaatgtacagaatgtggtgaagcttttagccggtcctcaaaccttactaaacataagaaaattcatactgaaaagaaaccctacaaatgtgaagaatgtggcaaagcttttaagtggtcctcaaagcttactgaacataagttaactcatactggagagaaaccctacaaatgtgaagaatgtggcaaagcctttaactggccctcaacccttactaaacataacagaattcatactggagagaaaccctacaaatgtgaagtatgtggcaaagcctttaaccagttctcaaaccttactacacataagagaattcatactgcagaaaaaccgtacaaatgtgaagaatgtggcaaagcttttagccggtcctcaaaccttactaaacataagaaaattcacattgaaaagaaaccctacaaatgtgaagaatgtggcaaagcttttaagtggtcctcaaagcttactgaacataagataactcatactggagagaaaccctacaaatgtgaagaatgtggcaaagcttttaaccatttctcaatccttaccaaacataagaggattcatactggagagaaaccctacaagtgtgaagaatgtggcaaagcttttacccaatcctcaaaccttactacacataagaaaattcatactggagagaaattctacaaatgtgaagaatgtggcaaagcttttacccaatcttcaaaccttactacacataaaaaaattcatactggaggaaaaccctacaaatgtgaagaatgtggcaaagcttttaaccagttctcaactcttactaaacataagataattcacactgaggagaaaccctacaaatgtgaagaatgtggcaaagcctttaagtggtcctcaacccttactaaacataagataattcatactggagagaaaccctacaaatgtgaagaatgtggcaaagcttttaaactgtcctcaaccctttctacacataagattattcatactggagagaaaccctacaaatgtgaaaaatgtggcaaagcttttaaccgatcctcaaaccttattgaacataagaaaattcatactggagagcaaccctacaaatgtgaagaatgtggcaaagcatttaactattcctcacaccttaatacacataagagaattcatactaaagagcaaccctacaaatgtaaagaatgtggcaaagctttcaaccaatattcaaaccttactacacataacaaaattcatactggagagaaactctacaaacctgaagatgtgacagtgattttgacaacacctcaaactttttcaaacataaaataaattatactggtgagaaattctagaaatgtaaagaatgtgataaaggctttacatggttgtcacacttgattgtaggtaagataatttacattggagtaaacttctacaagtgtgaagaatgtggcaaaacttttaattaatgctcgtaccttattgcacaggaaagaatttttacttggaaaaaggtatatacacaaagaatgtggaaaagccattaatatgtgctcatatcttactcaacatcagagagtctgtacttaataaaaccattatagatgcaa

SEQ ID NO: 202497 - DNA, 4083 bp, Homo sapiens
  Payload ID: 19934
  Gene Name: zinc finger protein 43
  ENST ID: ENST00000624335
  CDS Start-End: 1-1426
tcatactggagagaaaccctacacatgtgaagaatgtggcaaagcctttaaccagttctcaaaccttactacacataagagaatccatactgcagagaaattctataaatgtacagaatgtggtgaagcttttagccggtcctcaaaccttactaaacataagaaaattcatactgaaaagaaaccctacaaatgtgaagaatgtggcaaagcttttaagtggtcctcaaagcttactgaacataagttaactcatactggagagaaaccctacaaatgtgaagaatgtggcaaagcctttaactggccctcaacccttactaaacataacagaattcatactggagagaaaccctacaaatgtgaagtatgtggcaaagcctttaaccagttctcaaaccttactacacataagagaattcatactgcagaaaaaccgtacaaatgtgaagaatgtggcaaagcttttagccggtcctcaaaccttactaaacataagaaaattcacattgaaaagaaaccctacaaatgtgaagaatgtggcaaagcttttaagtggtcctcaaagcttactgaacataagataactcatactggagagaaaccctacaaatgtgaagaatgtggcaaagcttttaaccatttctcaatccttaccaaacataagaggattcatactggagagaaaccctacaagtgtgaagaatgtggcaaagcttttacccaatcctcaaaccttactacacataagaaaattcatactggagagaaattctacaaatgtgaagaatgtggcaaagcttttacccaatcttcaaaccttactacacataaaaaaattcatactggaggaaaaccctacaaatgtgaagaatgtggcaaagcttttaaccagttctcaactcttactaaacataagataattcacactgaggagaaaccctacaaatgtgaagaatgtggcaaagcctttaagtggtcctcaacccttactaaacataagataattcatactggagagaaaccctacaaatgtgaagaatgtggcaaagcttttaaactgtcctcaaccctttctacacataagattattcatactggagagaaaccctacaaatgtgaaaaatgtggcaaagcttttaaccgatcctcaaaccttattgaacataagaaaattcatactggagagcaaccctacaaatgtgaagaatgtggcaaagcatttaactattcctcacaccttaatacacataagagaattcatactaaagagcaaccctacaaatgtaaagaatgtggcaaagctttcaaccaatattcaaaccttactacacataacaaaattcatactggagagaaactctacaaacctgaagatgtgacagtgattttgacaacacctcaaactttttcaaacataaaataaattatactggtgagaaattctagaaatgtaaagaatgtgataaaggctttacatggttgtcacacttgattgtaggtaagataatttacattggagtaaacttctacaagtgtgaagaatgtggcaaaacttttaattaatgctcgtaccttattgcacaggaaagaatttttacttggaaaaaggtatatacacaaagaatgtggaaaagccattaatatgtgctcatatcttactcaacatcagagagtctgtacttaataaaaccattatagatgcaactagtgtcaaaagatctttcagaaaataaaagcctttaaagtgaagaagataattcattctgaagacaaacattacaaatattaagagggttgtagtaccattacttgcatcacagatcttattgtacacattttgtactaaagaaaaccctgaagcagttgctcaaatactgttcaacatcagaaaatttatattggaaaaaacccctggaaaatgtaataaatttgtaaaaacagttttgaaaaactacagcttataaaacatgagggtctataatgcttggttgatagtacaaagtttattcaacatcagggaatttatattggagaaaaaccctacaaatgtaatcagtttggaaaaacatttttaaaaaaaccacagcatagaaaacaccacagggttcatactaaaatatgtttttgcagatgcagtaaaaatgaaaaaaatttaatccgaaattaagtttatgtaaatatctgagaattcacagtagaaatatctaaggcgcggacacttcagacattacactaaatcagtgctaagtacagaaaacaacacaaaataaaacttggtggataaattatttgtatataacattaaaagaagtagaagattttcagttataattacaattaaagtatacttttatcttgaaaaaattactgatttttaaattagtgaataatgatgtaattaaactctcaaataactttatgctcttttttcattcctgctatattcacatgtgaaagcatgtgaccaattgttgctgcaccaaagatatgagagattcttttattaggtgggcattatttaaaacattttttatggaacagtaaggatattaaagtgtaagatgcagccaggcatggtggctcatgcctataatcccagcactttgggaggctgaggccggtggatcacctgaggtcaggagtttgagaccagcctgaccaacatggtgaaaccctgtctttactaaaaatacaaaaatttaccaggcacctataatcccagctacttcaaaggctgaagcaggagaatcacttgaacctggaaagtggaggtctcagtgagccgaaatcataccattgcactccaacctgggcaacaaaagtcaaactccatctcaaaaagaaaaaaaaaaaaaaaaaagatgcgtgatgaaaatgtaactggagaggctctttgtggttaacttataaaggagtgatgcaggagataggttttcagagtaatattcttctgcattatagtgacaaaagttttttattttagttaaaattggttaaattagtaagtcattttacttattgtaattttatgtaattaaatgtacatttttaaatttttagattacatgtaaatataacttttaaaaaaatgtgttaagaccattgtacattcaatgaagcattattatgcttctaactttaacctatttcaccttactcaagagtgtatgtaaaagatggtaacaatatactatttggtaacataatggactaacatttctattaatctatttcaccagtggctttcaactgcaaataagttaaagaatatttttctataggttaaatattcttttttgtcttatttaaacttactgttcttaatttctgtgggtacatagtatgattttaattaccttattttattctttgtgctattcataattttttttgtttgtttggtttttttttttgagacagagtcttgctctcgcccaggctggagtgcagtggcgcgatcttggctcactgcaagctccgcctcccaggttcactccattctcctgcctcagcctcccaagtagctgggaccacaggcgcccactacttgtttgggtttttttttggagatggagtctcgctctgtcacccaggctggagtacagtggcatgatcttggctcactgcaacccccacctccccggttcaagtgattctcctgcctcagcctcccgaatagctgggattacaggcgtccaccatcacaccaggctaatttttgtatttttagtagagatggagtttcaccatgttggccaggatggtctcgatcttctgacctcatgatctgcctgcctcggcctcccagagttctgggaccacaggcatgagccactgcacctggccaaatgtgtatatatttatgcaatatataacatgttttgatacaggcatataatatgtattagtcacatcaggataaagtatctattaccttcagcatttatcctttgtattacaagccaattctacacttcattattttaatgtacaattaaattgttattgactacagggtcattttaattataaaaattatatagaagtataaataaagtccatacattcctgagtcatgaa

SEQ ID NO: 202498 - DNA, 1752 bp, Homo sapiens
  Payload ID: 19934
  Gene Name: zinc finger protein 43
  ENST ID: ENST00000623359
  CDS Start-End: 1-1426
tcatactggagagaaaccctacacatgtgaagaatgtggcaaagcctttaaccagttctcaaaccttactacacataagagaatccatactgcagagaaattctataaatgtacagaatgtggtgaagcttttagccggtcctcaaaccttactaaacataagaaaattcatactgaaaagaaaccctacaaatgtgaagaatgtggcaaagcttttaagtggtcctcaaagcttactgaacataagttaactcatactggagagaaaccctacaaatgtgaagaatgtggcaaagcctttaactggccctcaacccttactaaacataacagaattcatactggagagaaaccctacaaatgtgaagtatgtggcaaagcctttaaccagttctcaaaccttactacacataagagaattcatactgcagaaaaaccgtacaaatgtgaagaatgtggcaaagcttttagccggtcctcaaaccttactaaacataagaaaattcacattgaaaagaaaccctacaaatgtgaagaatgtggcaaagcttttaagtggtcctcaaagcttactgaacataagataactcatactggagagaaaccctacaaatgtgaagaatgtggcaaagcttttaaccatttctcaatccttaccaaacataagaggattcatactggagagaaaccctacaagtgtgaagaatgtggcaaagcttttacccaatcctcaaaccttactacacataagaaaattcatactggagagaaattctacaaatgtgaagaatgtggcaaagcttttacccaatcttcaaaccttactacacataaaaaaattcatactggaggaaaaccctacaaatgtgaagaatgtggcaaagcttttaaccagttctcaactcttactaaacataagataattcacactgaggagaaaccctacaaatgtgaagaatgtggcaaagcctttaagtggtcctcaacccttactaaacataagataattcatactggagagaaaccctacaaatgtgaagaatgtggcaaagcttttaaactgtcctcaaccctttctacacataagattattcatactggagagaaaccctacaaatgtgaaaaatgtggcaaagcttttaaccgatcctcaaaccttattgaacataagaaaattcatactggagagcaaccctacaaatgtgaagaatgtggcaaagcatttaactattcctcacaccttaatacacataagagaattcatactaaagagcaaccctacaaatgtaaagaatgtggcaaagctttcaaccaatattcaaaccttactacacataacaaaattcatactggagagaaactctacaaacctgaagatgtgacagtgattttgacaacacctcaaactttttcaaacataaaataaattatactggtgagaaattctagaaatgtaaagaatgtgataaaggctttacatggttgtcacacttgattgtaggtaagataatttacattggagtaaacttctacaagtgtgaagaatgtggcaaaacttttaattaatgctcgtaccttattgcacaggaaagaatttttacttggaaaaaggtatatacacaaagaatgtggaaaagccattaatatgtgctcatatcttactcaacatcagagagtctgtacttaataaaaccattatagatgcaactagtgtcaaaagatctttcagaaaataaaagcctttaaagtgaa

SEQ ID NO: 202499 - DNA, 3923 bp, Homo sapiens
  Payload ID: 19935
  Gene Name: zinc finger protein 430
  Uniprot ID: Q9H8G1
  ENST ID: ENST00000261560
  CDS Start-End: 182-1894
agcggacagggcggcttccgggtttggcggggcctttgtccctcgctgtggcctgagctccaggtctcgtcttcagcgctctgtgtcctctgctcctagaggtccaggctctgtggccctgtgacccgcaggtattgggagatctacagctaagacgccaggaacccctggaagcctagaaatggagaacctgaagtctggagtgtatcctctcaaggaagcaagtggatgccctggggctgacaggaatcttctggtgtactctttttatgaaaaggggccattgacatttagggatgtggccatagaattttctctggaggagtggcaatgcctggacactgctcagcaggatttgtatagaaaagtgatgttagagaactacagaaacctggtcttcttggcaggtattgctgtttctaagccagacctgatcacctgtctagagcaaggaaaagagccctggaatatgaagagacatgcgatggtagatcaacccccagttacatattctcattttgcccaagacctttggccagagcagggcataaaagattctttccaagaagtcatattgagaagatatggaaaatgtggacatgaagatttacagttaagaacaggctgtaaaagtgtggatgagtgtaatctgcacaaagaatgttatgatgaactaaaccagtgtttgacaactacccagagtgaaatatttcaatatgataaatatgtgaatgtcttttataaattttcaaatccaaatatacaaaagataagacatactggaaagaagcctttcaaatgtaaaaaatgtgacaaatcgttttgcatgcttttacacctaactcaacataaaagaattcatattagggaaaattcttaccaatgtgaagaatgtggtaaagtctttaactggttctcaacccttactagacacagaagaattcatactggagagaaaccctacaaatgtgaacaatgtggcaaagcttttaagcagtcctcaacccttactacacataagataattcatactggagagaaaccctacagatgtgaagaatgtggcaaaacctttaaccggtcctcacaccttactacacataaaagaattcatactggagagaaaccctacagatgtgaagaatgtggcagagcttttaaccggtcctcacaccttactacacataagattattcatactggagagaaaccctacaaatgtgaagaatgtggcaaagcttttaaccaatcctcaacccttactacacataagataattcatgctggagagaaaccttacaaatgtgaagaatgtggcaaagctttttaccgattctcataccttactaaacataagataattcatactggagagaaattctacaaatgtgaagaatgtggcaaaggctttaattggtcctcgacccttactaaacataaaagaattcatactggagagaaaccctacaaatgtgaacaatgtggcaaagcttttaatgagtcctcaaaccttactgcacataagataattcatactggagagaaaccctacaaatgtgaagaatgtggcaaagcctttaaccggtccccaaaacttactgcacataaggtaattcattctggagagaaaccctacaaatgtgaagaatgtggcaaagcttttaaccaattctcaaaccttactaaacataagataactcatattggagatacatcttacaaatacctagaatgtgataaagcctttagccagtcttcaactcttactaaacataaggtaattcatactggagagaaaccctacaactgtgaagaatacggcaaagctttcaaccagtcctcaaaccttattgaacaaagtaattcatactggagagaaaccctacaaatgtgaagattgtggcaaagcctctaacccgtcctgaattcttactaaacataagaacattcatactgaagaggaaccctatgagtgtgaagaatatggcaaagccttcaacaagtcctcaattcttaccagacataagataattctggctgggtgcggtggctcacacctgtaatcccagcactttgggaggctgagacgggtgaattacatgaggttgggagttcgagaccagcctgaccaacatggtgaaatcctgtctctactaaaaatacaaaattagccatgcgtagtggtgcatgcctgtaatcccagctactcgggaggctgaggcaggagaattgcttgaacccgggaggcagaggttgaagtgagctgagatcgcgccattgcactccagcctgggcaacaagagtggcactccatctcagaaaaaaaaaaaaaagataattcatactgaaaagaaactctacaaacttgaaagatgtgacagtgcttttgacaacacctaaaacttttaaacataaaaaatcatactggtgagaaatcctagaaatgtaaagaatgtgacaaggcctttaaatggttgtcacacttcattataggtaagatagttcatactgaagaaaacttctacaagtgtgaacagtgtggcaaaacttttaatgaatgctcacaccttattgcacaggagagcatttatacttgaaaaaaattgtacaaatataaagaccatgaaaaagccattaatatctattcacatcttaccactggagagttcatacttaataaaaggaatataagtgcaattactgtcaaaagatctttcagaaaatataaacctttaaagcgaagaaggtatttattttgaagatgaacactacaaatgtgaagagggttgtagtacctttatttgtatcacagattttattgtacacattttgtactagaagaaaactctgaagtagttgctcaaactttgttcaacatcagggaatttatattgaagaaaaactttgcaaatttaataaattttaaaaaacactttttcaaaaagtacagcttagaagacaccagagttcatactaaaatatatttttgcagatgcagtaaaaatgaaaatatttaatccaaaattaagtctatgtaaatatcagagaatttactgtagaaatatataaggcactgagacttcagatattatactaaatcagagtgctgagtatagaaaataaaactgaagttggggccaggtgcagtggctcacacctgtaatccagcactttgggaggccgagaagggtggatcacctgaggtcaggagtttgagaccagcctgactaacatggagaaaacacggctctactaaaaatacaaaattagccagctgtggtggtgtatgcctgtaatcacagctactcgagaggctgaggcaggagaattgcttgaacccgggaggtggagagtgcagtgaactgaaattgcgccattgcactccagcctgggcaacaagagtgaaactccatttcaaaaaaaaaaaaaaaaaaacaactaaagttggtagaaaaattatttgtatataactttaaaaggagtagaagggctttttgcagagttattacgtttgaagtatactttatttcttgaaaaaattacagattttttgtaaataatgatgtaattcaactctcaaaatatttcctactgtttctttattccagttgtattcacatgtgaaagcatgtgatcagttattgctgcattaaaaacatgagtcttttttattaggtggccattatttatgatcttttctatgaaagagtaaggacattaaaatgtaagatgcatgatgaaaaattaagtgaagaggctctttatggttaatttatattgaataatgcattaggtaggtgttcagagtaatattttgcgttgtgagaacatttttaattttatttaaaattaaatgaaaataaattagtatattattgtactaattgtacttttgtataataaaatccagtgtattttaaaaa

SEQ ID NO: 202500 - DNA, 3021 bp, Homo sapiens
  Payload ID: 19935
  Gene Name: zinc finger protein 430
  ENST ID: ENST00000595401
  CDS Start-End: 85-411
agaggtccaggctctgtggccctgtgacccgcaggtattgggagatctacagctaagacgccaggaacccctggaagcctagaaatggagaacctgaagtctggagtgtatcctctcaaggaagcaagtggatgccctggggctgacaggaatcttctggtgtactctttttatgaaaaggggccattgacatttagggatgtggccatagaattttctctggaggagtggcaatgcctggacactgctcagcaggatttgtatagaaaagtgatgttagagaactacagaaacctggtcttcttgggtattgctgtttctaagccagacctgatcacctgtctagagcaaggaaaagagccctggaatatgaagagacatgcgatggtagatcaacccccaggtaggtgagagtgaacacaacagacgacatgaatgagaggtccaaaaaagaagaaagccaatgcttaaaatgttatttgagaatctgtgttccaaagcaaatattttctgggaagcctgagtttttttttttaattttgccctcgcatagggtcatcttctgtcttatgcttttaaattcaaggattctttccccttggtgatctcccttcaagtttgctatcagaaccaaagtcctcttcatggcatgcgagactcacaatctgactgcttttccattgttttgggggacacacaaatatctacatgattttgagaaactctatgttaaactattttcttttcttttttctttctttttttttttttttgagactgagtttcatgctcgttgcccaggctaaagtgcaatggcacgatctaggctcactgcaacctctgcctcctggattcaagcaattctcctgcctcagcctcctgagtaggtggaattacaggcacctgccaccatgcccagttaattttttgtatttttagtagagacagggtttcaccatgttgggcaggctggtctcaaactcctgacctcaagtgatccacccgccttggcctcccaaagtactaggattacaggtgtgagccactgcacctggccaaactattttcttagttctctttttgcatcatgtctgaaatgtgtaatagtagtggtttctgttccactgttttttgttgttgttgttaacttttctgcacactccattctgttcttattactatattctcgaaatatagtttgaaattataaagcatcatgtctttctactttgttctttttcctcacgattgctttggctatttgaagtttattgttgtttcttgtaaattttagaattgtattttccattactgtgaagaaaaatgccactgaaattttgatagggaatttattgaatctatagattacttagataataggacactttaacaatatttattttttcaatctgtagacatgcaatatttttaaatttgtgtcttctctaatttcttttattaataacatatctttcgttgtaaagattttttacttccttgttctcagaaatttatcattttaatgctattttaaattgttttctttctctgttaaagtgtatggaacaataacttcatacttgtgtgttaattttatgttttgctaatttactgagtgtattaattcagacaaatttcaatgtagtgttcatggttttttatatataaaatcatatgatccacaaacagcaactttttacttgtgttcaatttcagtggctttttaaaaatgtttttgactcattattctgccacatacttccagtgctatgttaaaatagaagcattgacaatgggcacaatgtagttttgcattagtgtctgtgaatttgaaggagcaaacaactcctcaagcttctataaactggtttcagtaggtaaagatctttttctgtcatgtctccagggtcatagaatgctctctgggtttgtagtggagagggggtgtagcttggtcacaaggctgctgggtctgcactagggtccacctttagttggcttgttacaggggcttgggtagtggtaattcccattttatttttggacagactgaatatccttcaacactttgatctgtagagcagacaatagggcaggtttctgcagtcaggttcatatataatggtccttatatcaggatgtgaatgagtatggcgtttattgagtaccggagaggattactgtagttatgcagacaaattcttttttaatggtatatcagtgttgcacagcagattttatgagtaaatatgtcacttactattactgcgcagtttcatatcagtgttttgttagtgtaggtttcttaacattgagttattgtgtttttttgtttcacttttgtattataattttagacagtttgcaattcggtttatctcttataattaagagataaatcagccatatgtctgtcacaattagatatatatgtgtgtgtgtgtttatctataaatatgaccccaatattggttatggcttatcttgtatatattctttcttagccaattttcagtggttgttttatctcacctaagtgagtagtcatggaaatattttcaccatctcttattttcaccatgtgtttaatgatgatgtttctctcacctttgtgtgagagaaacacttttgtaatttgaaggtaatttttgaaaagatttataaatctgtatttttttcagtttttcctttagaaaaattaattgttgtaaaaacacataatatttaccatcttaaatctatttaggtgtaccttttagggccagacatggtggtggctcacatctgtaatccaggattatttgagctcaaaagtttgagaccaacctgggaaacatatggagagtccctctctacaaaatgttttttaaaaatagccaggcatagtgttgtgcatctgtggttcaggctacttgcaagactgaggtgggagggttacttgagcctcagagtttgaggccgaagtgagccataattgtaccactgcactccagctttttgacagagtgagactgtgtctcc

SEQ ID NO: 202501 - DNA, 476 bp, Homo sapiens
  Payload ID: 19935
  Gene Name: zinc finger protein 430
  ENST ID: ENST00000597922
  CDS Start-End: 1-220
ccttactaaacataagataactcatattggagatacatcttacaaatacctagaatgtgataaagcctttagccagtcttcaactcttactaaacataagaacattcatactgaagaggaaccctatgagtgtgaagaatatggcaaagccttcaacaagtcctcaattcttaccagacataagataattctggctgggtgcggtggctcacacctgtaatcccagcactttgggaggctgagacgggtgaattacatgaggttgggagttcgagaccagcctgaccaacatggtgaaatcctgtctctactaaaaatacaaaattagccatgcgtagtggtgcatgcctgtaatcccagctactcgggaggctgaggcaggagaattgcttgaacccgggaggcagaggttgaagtgagctgagatcgcgccattgcactccagcctgggcaacaagagtggcactccatctcag

SEQ ID NO: 202502 - DNA, 595 bp, Homo sapiens
  Payload ID: 19935
  Gene Name: zinc finger protein 430
  ENST ID: ENST00000599548
  CDS Start-End: 168-509
cttccgggtttggcggggcctttgtccctcgctgtggcctgagctccaggtctcgtcttcagcgctctgtgtcctctgctcctagaggtccaggctctgtggccctgtgacccgcaggtattgggagatctacagctaagacgccaggaacccctggaagcctagaaatggagaacctgaagtctggagtgtatcctctcaaggaagcaagtggatgccctggggctgacaggaatcttctggtgtactctttttatgaaaaggggccattgacatttagggatgtggccatagaattttctctggaggagtggcaatgcctggacactgctcagcaggatttgtatagaaaagtgatgttagagaactacagaaacctggtcttcttggcaggtattgctgtttctaagccagacctgatcacctgtctagagcaaggaaaagagccctggaatatgaagagacatgcgatggtagatcaacccccaggctggagtgcaatggcatgatcttggctcgctgaaacttccgccttccaggttcaagtgattctcctgcctcagcctcccgagtagctgggattacaggcaggtac

SEQ ID NO: 202503 - DNA, 536 bp, Homo sapiens
  Payload ID: 19935
  Gene Name: zinc finger protein 430
  ENST ID: ENST00000594110
  CDS Start-End: 152-536
ggcctttgtccctcgctgtggcctgagctccaggtctcgtcttcagcgctctgtgtcctctgctcctagaggtccaggctctgtggccctgtgacccgcaggtattgggagatctacagctaagacgccaggaacccctggaagcctagaaatggagaacctgaagtctggagtgtatcctctcaaggaagcaagtggatgccctggggctgacaggaatcttctggtgtactctttttatgaaaaggggccattgacatttagggatgtggccatagaattttctctggaggagtggcaatgcctggacactgctcagcaggatttgtatagaaaagtgatgttagagaactacagaaacctggtcttcttggcaggtattgctgtttctaagccagacctgatcacctgtctagagcaaggaaaagagccctggaatatgaagagacatgcgatggtagatcaacccccagagtctgtgtttctcagactggatcttggactcctggtctcaagagatctgactgccttggctt

SEQ ID NO: 202504 - DNA, 503 bp, Homo sapiens
  Payload ID: 19935
  Gene Name: zinc finger protein 430
  ENST ID: ENST00000619540
  CDS Start-End: 182-503
agcggacagggcggcttccgggtttggcggggcctttgtccctcgctgtggcctgagctccaggtctcgtcttcagcgctctgtgtcctctgctcctagaggtccaggctctgtggccctgtgacccgcaggtattgggagatctacagctaagacgccaggaacccctggaagcctagaaatggagaacctgaagtctggagtgtatcctctcaaggaagcaagtggatgccctggggctgacaggaatcttctggtgtactctttttatgaaaaggggccattgacatttagggatgtggccatagaattttctctggaggagtggcaatgcctggacactgctcagcaggatttgtatagaaaagtgatgttagagaactacagaaacctggtcttcttggcaggtattgctgtttctaagccagacctgatcacctgtctagagcaaggaaaagagccctggaatatgaagagacatgcgatggtagatcaacccccag

SEQ ID NO: 202505 - DNA, 489 bp, Homo sapiens
  Payload ID: 19935
  Gene Name: zinc finger protein 430
  ENST ID: ENST00000624457
  CDS Start-End: 168-489
cttccgggtttggcggggcctttgtccctcgctgtggcctgagctccaggtctcgtcttcagcgctctgtgtcctctgctcctagaggtccaggctctgtggccctgtgacccgcaggtattgggagatctacagctaagacgccaggaacccctggaagcctagaaatggagaacctgaagtctggagtgtatcctctcaaggaagcaagtggatgccctggggctgacaggaatcttctggtgtactctttttatgaaaaggggccattgacatttagggatgtggccatagaattttctctggaggagtggcaatgcctggacactgctcagcaggatttgtatagaaaagtgatgttagagaactacagaaacctggtcttcttggcaggtattgctgtttctaagccagacctgatcacctgtctagagcaaggaaaagagccctggaatatgaagagacatgcgatggtagatcaacccccag

SEQ ID NO: 202506 - DNA, 3021 bp, Homo sapiens; identical to SEQ ID NO: 202500
  Payload ID: 19935
  Gene Name: zinc finger protein 430
  ENST ID: ENST00000625163
  CDS Start-End: 85-411

SEQ ID NO: 202507 - DNA, 473 bp, Homo sapiens
  Payload ID: 19935
  Gene Name: zinc finger protein 430
  ENST ID: ENST00000623534
  CDS Start-End: 152-473
ggcctttgtccctcgctgtggcctgagctccaggtctcgtcttcagcgctctgtgtcctctgctcctagaggtccaggctctgtggccctgtgacccgcaggtattgggagatctacagctaagacgccaggaacccctggaagcctagaaatggagaacctgaagtctggagtgtatcctctcaaggaagcaagtggatgccctggggctgacaggaatcttctggtgtactctttttatgaaaaggggccattgacatttagggatgtggccatagaattttctctggaggagtggcaatgcctggacactgctcagcaggatttgtatagaaaagtgatgttagagaactacagaaacctggtcttcttggcaggtattgctgtttctaagccagacctgatcacctgtctagagcaaggaaaagagccctggaatatgaagagacatgcgatggtagatcaacccccag

SEQ ID NO: 202508 - DNA, 324 bp, Homo sapiens
  Payload ID: 19935
  Gene Name: zinc finger protein 430
  ENST ID: ENST00000627644
  CDS Start-End: 1-324
gagaacctgaagtctggagtgtatcctctcaaggaagcaagtggatgccctggggctgacaggaatcttctggtgtactctttttatgaaaaggggccattgacatttagggatgtggccatagaattttctctggaggagtggcaatgcctggacactgctcagcaggatttgtatagaaaagtgatgttagagaactacagaaacctggtcttcttgggtattgctgtttctaagccagacctgatcacctgtctagagcaaggaaaagagccctggaatatgaagagacatgcgatggtagatcaacccccaggtaggtga

SEQ ID NO: 202509 - DNA, 13894 bp, Homo sapiens
  Payload ID: 19936
  Gene Name: zinc finger protein 431
  Uniprot ID: Q8TF32
  ENST ID: ENST00000311048
  CDS Start-End: 145-1875
gtctctcgccgcagcctgagctccaggtctccccttcgctgctctgtgtcctctgctcctagaggcccaacatctgtggccctgtgacctgcaggtattgggagacccacagctaagacaccgggaccccctgaaagcctagaaatggacgacttgaaatatggagtgtatcctctcaaggaagcaagtggatgccctggggctgagaggaatcttctagtttactcttattttgaaaaggagacattgacatttagggatgtggccatagaattctctctggaggagtgggaatgcctgaaccctgctcagcagaatttatatatgaatgtgatgttagaaaactacaaaaacctggtcttcttgggtgttgctgtctctaagcaagacccagtcacctgtctggagcaagaaaaagagccctggaatatgaagagacatgagatggtggatgaacccccagctatgtgttcttattttaccaaagacctttggccagagcaagacataaaagattcttttcaacaagtaatactgagaagatatggcaaatgtgaacatgagaatttacagttaagaaaaggctccgcaagtgtagatgagtataaggtgcacaaagaaggttataatgagctaaaccagtgtttgacaactacccagagcaaaatatttccatgtgataaatatgtgaaagtctttcataaatttttaaatgcaaatagacataagacaagacatactggaaagaaacctttcaaatgtaaaaaatgtggcaaatcattttgcatgcttttacacctaagtcaacataaaagaattcatattagagagaattcttaccaatgtgaagaatgtggcaaagcttttaaatggttctcaacccttactagacacaagagaattcatactggagagaaacccttcaaatgtgaagaatgtggcaaagcttttaagcagtcctcaacccttactacacataagataattcatactggggagaaaccatatagatgtgaagaatgtggcaaagccttcaaccggtcctcacaccttactacacataagataattcatactggagagaagccctacaaatgtgaagaatgtggcaaagcttttaaccagtcttcaacccttagtacacataagttcattcatgctggagagaaaccctacaaatgtgaggaatgtgacaaagcttttaatcgattctcataccttactaaacataagataattcatactggagaaaaatcttacaaatgtgaagaatgtggcaaaggctttaattggtcctcaacccttactaaacataaaagaattcatactggagagaaaccctacaaatgtgaagtgtgtggcaaagcctttaatgagtcctcaaaccttactacacataagatgattcatactggagagaaaccctacaaatgtgaagaatgtggcaaagcttttaaccggtccccacaacttactgcacataagataattcatactggagagaaaccttacaaatgtgaagaatgtggcaaagcttttagccagtcatcaatccttactacacataagagaattcacactggagagaaaccctacaaatgtgaagaatgtggcaaagcttttaaccgatcctcaaatcttactaaacataagataattcatacaggagagaaatcttacaaatgtgaagaatgtggtaaagcctttaaccaatcctcaactcttactaaacataggaaaattcatactagacagaaaccctacaactgtgaagaatgtgacaatacatttaaccagtcctcaaaccttattaaacaaaataattcatactggagagaaactctacaaatgtcaagaatgtgggaaagcctttaagcagtcctcaactcttactaagcattaaatattggccgggtgcggtggcttatgcaaaatggctcccagcattttgggaggctgaggtgggtggatcacaaggtcaagagatcgagaccatcctggccaacatggtgaaaccctgtctctactaaaaatacaaaaattatctgggtgtggtggcacgtgcctgtattcccatctactcgggaggcttaggcaggataatcacttgaacctgggaggtggaagttgcagtgagccaagattgtaccactgcactccagtttggcaacagagtgagactccgtctcaaaaaaaatttatactgtacaaaaaccccacaagtgtgaaaaacatggcaaagcctttaagaagccctcaattcttaacagacataagataatttatactggagagaaactctacaaatcagaaagatgtgactacttttgacaacgcctcaaacttttctaaccataaaagtaattatactggtgagaaatcctagaaatctgaagagtgagataaagcctttaaatggttgtcacacttcattgtaggtaagataattcatactggagaaaacgcctacatgtgtgaacaatatggcaaaacttaatgctcacactttattgctaggaaagcatttatacttgagataaattatacaaatataaagactgtgaaaaagccatcattatctgctcacattttactcaacacagagagttcctgcttaataaaagcattataagtgcaattactgtcaaaagatctttcagaaaatataagcttttttagtgaagagtatttattttgaagttgaacatcacaaatataaaaagggttgtagtgcctttacttgtatcacagatctttttgtagacattttcttctagaggaaaactctgaagcagttgatcaaactttgttcaacatcagggaatttatattgaaaaattgtgcaaatataataaatttggaaaaacaatttttcaaaaactacagcttagaaatcaacagttatactagaatatattttttccagatgcagtaaaagtaaaatatttaatccataattaagtctatgcaaatatcagagaatttatggtagaaatatataaggtactgacacttcagatatactaaatcagagtgctaagtatagaaaatctgaaactaaagttggtagaaaagttatttgtatagaactttaagaggatcagaaggttttttgcagagttataattacattcaaagtatactttatttcttgaaaaatattacagattttttgaaaattgaataatgtcatcattcaactctgaaattatttcctgttgtttcttcattcctattggattcacatgtgaaagcatggggttaattgttgctacatcaaagagagagattcttttgtttgtttgttcgtttgttttttgagactgagtttcactctttcgcccaggctggagtgcattggcatgatctcagctcactacaacctctgccttctggtttcaagcaactcttctgcctcagcatcccaagtagctgggataacaggtgccagccaccatgcccagctaatttgtgtatttctagtagagatggggtttcaccatattggccaagctggtcttgaactcctgacctcatgtgatccgcccgcctcagcctcccaaagtgctgggattacaggcttgagccaccacgcccagcctgtagcatattttaataggagaatacaatatataatagtagcagggttaagtaaggcatccatcatctgtagcatttctcctttgttttacaaacaatccaattctacactttaaaaaaaaatttttaaatgtacaattaaatttttatttaccacagtgttatttttatcgtcataataaaaattatatacgagtataaatgaaattcatttctaaattcttaataaatattttctcatgccaggtgtggtggctcacgtctgtaatcccagcactttgacaggctgagcgagggagtggatcttgaggtcagcagttcgagaccagcatggccaatatggagaaatcccgtctctactaaaaatacaaaaattagccaggcgtggtggcatgtgcctgtaatcccagctactcaggaggctgaggcaggagaatcgcttgaacctgggaggtggaggttgcaatgagccaagatcaccccactgcactccagcctgggcaacagagcgagactccatctcaaaaagtaaaatatattttcaaattttctatatatttttctttgaacatgtggcctgtctgcctgcaaacatatacagacttttagttttgattcatatagagttaaatacatgttagtctaaagacaaatcttaggtgtaagaaaattatggagttaagtatgtgtgtgtgagtatgagtttgtacatattttcagaaggaaagaatgatacgggaacaaaaatcattttaatatggtgactactataaaactaaaaacctaaaaaatgctgaaagcaaatgtatactttttggtttgtattgaatttattactgtacagtctatgacttagagttctgaatcttcccaagcaaattctctgtatatacttgcctggtactcatgctagacccatactttttttgtttcttacattttttttgttttatattttatgaagtattcattatgtgagctggtctgcgattataagaatttttatgaaatttagtgcacacaaaataatctttagatgtaattccaaaagtagtgtattaagttacattttatttagttagagcactccattttgttcttttaagaggagaacaatatataggttttctttagtgatttgttcctttcactttttataattgacataagcatatttattgagtcaatttgttcagctaagtactagggaggcttcattagtcatgaggatgtttttatatataaatgtagcaaacatatattacagttttcactgtgtaatagattatccataataattcataaatattcctgctgaagttagtttgtaacttcaagtcaaagatgaaaaatatcaatggtgaagattgattgttcatatagagaggacattttttttccagactgtaaaactgaatcttgttgaatttaaagagaaattctggcagaggcagatgaatcacctgaggtcaggagtttgagaccagcctgatgaatatggtgaaacccagtctctactaaaactacaaaaatagccaggcatggtggtgggtgcctgtaatcccactcgggaggctgagtcaggagaattgcttgaacccggaggtgaagattggagtaagccaagattgtgccgttgcactacagcctgggcgacagagcgagactccatataaaaaaaaaaaaaaaaaaaaaagagctgggcgtggtggctcacgcctgtaatcccagcactttgggaggccaaggtgggcgaatcacttgaggtcgggagtttgagaccaggtgaccaacatggagaaactccatctctactaaaaaatacaaaattagcccggtgtggtggcgcatgcctgtaatcccagctactcgggagactgaggcaggagaatcgcttgaacacgacaggtggaggttgcagtgtggcgagattgcaccattgcactccagtctgggcgacaagagggaaactccatctgaaaaaaaagagaaattcttttattttctacttctcttcagatttgtcttatgcattttccaactatgtatgcatcacagctattctttttctgagttatagctacagttttcttactgttgtcttcatgccatttcatttcacatggtactttgtagattttgatgaggaagttggtatttttagtgcacacaaaaattggttttaactgtagagtttgcttatcagaacagttaaaaggcagccaggtgtggctcacgcctgtaatcccagcactgagataggccaaggagggtggatcacttgaggtcaggagtttgagaccagcctgaccaacatggtgaaaccctgtgtctactaaaaatacaaatttagccacgcgtggtgacgcacgcctgtaatcccagctactcggaaggccgagggagcagaatcgcttgaacctgggaggtagaggttgcggtgagccgagactgggccactgcacttcagcctgggcaacaagagcgaaattctgtctaaaaaaaaaaaaaaaagataaaaggtgcaatactgtccacaggtaagataattaaattagtcagctttgtttttaaaagaaaaatcttactagattcttatacaaagtgtggcaaatataaaacttgcttgaaaatacagaaattaaatttttaagagagttaatggtaagtaaacaattttaaagttaattttctatgatatacttacagcacaacttatatttccatgcagaatcttttatttttaagtgtgagtgttaaaggttacaaaataatgaaatgacttcagtggatttaaaattttgaaaaataatgtcttttctatattgattttacaatttggagaaatttttcactcattttttatatattttttagtgggagaggtttagtctacagtttttatttttagtcaccaaactgtagccaactcttgggtcattttctctgaaaaacatttggagatcatgacagcgtttggattaaaacatttctgttactttgcatgcaaactagtttactgtgttcacagagtggccagtcatgggaccataagcaacacctgctctttgagtgtctttcataccgttaccatcagcaccagaaactccaggtgccccaagcttaaagtaaaaatcctaaagtacgttggctcctcccatgcaatgtgctgggtccaaaccatgctgttaaatatcagaagtttctatggttatgattaaaaaattaaatgacaataatagccccaaaactatatatttttgatactatttaaccaagattatcacaaagacacagtatttgacacattgttattcttctatgttttataaatattttaatgtgacaggtagaatctgtactttttctgtagaacgtaatattttgaagtatatatatagttaaattattatttctaggtaattaataatttatctcacattggtcagacatgatggctcatgcttgtaatcccagcaatttgggaggccgaggcaggcagatcacatgaggtcaggagttcgggaccagcctggcgaccatggggaaaccctgtctctactaaaaatacaaaataagcagcgtgtggtgacacatgcctgtaatccagctaccctggaggctaaggcaggaaaatggctcaaatctgggaggtggttgttgcagggagccgagattgcaccactgcactccagactgggggacagagtgactatcaaaaaaaaaaaaaactttacctcatatggtgaacatttttgttttgagaccacatgacactgtcatcatttttcaaaaatccaaatacattattatgaactatagtcaccatgttgtgcaataaatctcttgaacttatttcttccatttgactataattatgtattatttcacaaacatgtttccagccttccatttcttataaataacttgcatctgatggtcaccattttactctctacatcaatgggattaagttttttggaatccatgtgtaagtgaaattatgagacactaatctttctgtgccttgcttatcccaactaatacaatgtcctccaacttcatccatgtgattgagaataatagtttttgttttttttttaaggccaggagtggtggctcacacctgtaatcccagctctgggaggccaaggccagtggattgcttgagcccaggagtttgagaccagcctggacaacgtggaaaaaccccatctctactaaaaatacaaaaacaacaaaacaaaaacaaaaaacacctcagctgggtgtggtggtgcaggcctgtaatctcagctactccagaggctgaggcatgagaatcccttgaaccacagatgcagaggttgcagtgaactgagatcatgccactgcactccatcctgggcaacagagtgagactcggtctcaagagggaaaataaggcatttttctcatttaaataataaatagtattccattatgtatatcaaccacattgtctttatttactcattagatgttgaactgtttattctgtattttggctattgtgaaacaagtgctgcaaacagaagtgcaaatgtttctttattcttattttgttttggatatatacccagtagtgcgattgctgtattacctggtagtttttttgataaatctgtattttgtttttcgtaatggctatcctcatttacgttcacaccaacagtgtgcaaggattccgttttcttcacatctttaccaacacttttttctttttcttttaataagagttattctaacaggaatgagttgatatagggattttttttttggcttgtctttttgtgataatagtcaacattgagcatttaaaaatatatccgttggacatatgtatgacttttcttgaaaaatatttatttcagctatttccttttttttttttttctttttgagatggagttttgttcttgttgcccaggctggagtgcaatggcacaatctcggctcactgcaacccttgcctcccggatcaagtgattgtcctgcctcagcctctcaagtagctgggattacaggcaaatgccactgcgcccagctaattttgtatttttagtagagacggggtttttctatattggtcaggctggtctcgaacttctgacctctggtgcccacctcagcctcccaaagtgctgagattacaggcatgagccaccgcgtccggcctattatttttaataattttttattgttgtcattttaaatacacttttgatattaacctcttgtcacatgtataatttgcaaattttttctcccatgttctagttgtcacattctgttgattgtatcagattttgtccagcagctttttaatttgaagtgatctgacttatttttccttttgtgtcctgggatgtttaggttaaatcaaaaaacttgcggccaggcgcagtggctcacacctgtaatcccagcactttgggaggccgaggcaggtggatcacgaggtcagaagttcgagaccagcctgaccaacatggtgaaatcctgtctctactaaaaatacaaatattagccgggcgtggttgcacgtgtctataatctcagctactcaggaggctgaggcaggggaacggcttaaacccagaggcggaggttgtagtgagccaaggtcatgccactgcactccagccttggcaacagaatgaaactctgtctcaaaaaaaaaaaaaaatttgctgcccagaacaatgttatagggcttttgctctatattttggcagtagtagtttcagagtgtcaggccttacatttaagtactaatttatttcgagtttatttttacatatggtgtgagatgagggtctcaatttttatctctgcatgtggatataaagttttcttaattgaagattctgttctttccctttaaagtcacctgtatttaaaatcaactgtaaatacatggatatatttctgctgtttttttcttctgctccattgacctatgtctctgtttttattcaagtaccatactgttggttaccatagctatgtagtgtatttcaaagttagtcacttcttttgtcttgattgctttggctattcagggtcttttgtgataccatatgaattttagatatacttttaaaacttttctatgaagtatatcacgtatttcgatagaggttgcattatacctgtaggtcattttgtgtaatacaaatattaatgtcagttcatgaatagtccatttatgtattaatttctatttagaatgtaaggcgtttcaactttttggttaaatttatttcaaactatagttattgtagatgtaattgtttttgaatttcattttgggatagttattaatgtagagaaatgctgtgactttttgatggtgcttttgtattttgaaagtttaataaattttgtttatttatttatttattttgagatggagtctcggtctgtcacgcaggctcgagtgcagtggcacgatcttggctcactgcaacctctgcctccctggctgaagcggttctcctgcctcagcttcctaagtagctgaaactacaggcgcctcctactacacccagctaatttttttatttctatagagatggggtttccctacgttggccagactggtcttgaactcctgaccttgtgatccgcccacctcggcctcccaaagtgctggaattacaggcaggagtcactgcaccttgcctgtttataatttttaagatttactaaggtcttaggcttttttatacttcagattatgtatagggataaaagaaaattatacaggaataattccttttcctcaatttggatgcctttgatttttttctctaatttctttgtcttggatatttagtaccatgtttagtaagtctgactagagtgggcatccttgccttgttctagctcttagagtaaaagcttacaacatatccctgtttagtatgttgttagcagtttttttggttatatatggcatttattggctgaagtgcatttgttctatacctaattttttcagcgatttatcataagggaatgtcaaattctgtcaaacttctattgtgcatccatttttttctctttgcactctgcatatatttaagttttagagatgtgaaatcacaactaattctgcatacatacaaaaaaagtcagagactactatgaacatctctatgcctgcaaaatagaaaatttggagaaaataaataaactcctggaaacatacaactttccaggattaaaccaggaaggaacagaactcttgaacagggcaaaaatgtataaaatatataatgaaattgaattaataatttaaaaaacctaccaactataaggagccctggattatataaaatcacagccgaattttaacacatatacagagatgagctggtattacttctactgaatgtattactgaatgtattccaaaaaatccaggtggagttccaccctaactcattatataaaatctgtatcgctgcacgaggtggctcacgcctgtaatcccagcactttggaaggccgaggtgggcgggtcacctgaggtcgggagtttgagaccagcctgcccaacgtggtgaaaccccatctctgctaaaatacaaaattagccaggcgtggtggcatatgtctgtaatcccagctactcgggaggctgaggcaggaaaatcgcttgaacccgggaggtggaggttgcagtgagccgagatcgcgccattgcactccagcctaggcaatgagtgaaactccatctcaaaataaattaattaataaaataaaaacctgtgtcatcttgataccgaagtctagtgaagacaacaacaacaaaactataggccaatattttgggtgaacattgaaacaaaaatcctccatgaaataatagcaagctgagttcacaggcaaatcaaaaagttattttgccacacttgtgaactttatatcacatgtgcaaggatgtttcatcatatacaagtcaataagtgtgtttcaccatacaattaaaagcaaaaatttatatgattaacacaatagatgcagaaaaagcattcaagaaaatccagtattcatttatgaaaatattctctaagcaatgatgaaacatacctcacaataataagagccatctatgacaaatcctcagctaacatactgaacagacaaaaggggcatgcatttctcattagaaaaaaaataagactatctaaacaattctatttaacatagttctggaagtgctggataaatctaacaaaatgaaaaaataaatggcatccaaataggaaaagaagaagtgaaattaccttcactcatgatataattctctacctagaaaactttaaggattttaccaaaagactcctaaggttaaaaatgacttcagcaaagtctcaggatacaaaattgatatacaaaaatgaatagcattgccttacaccaataacattcaagctgagaacaaaatcaagaacagttttctttacaatagccataaacaaaaaataatatacttagaaatacatcaaaccagggaggtaaaatatctctacaagaactagaaaacattactgaaagtaatcagagacaattcaaataaaaaagctttctatgctcatggatttgaagaatgaatagaaaatgtctatgctgcctagagcagcctacaaaataagtttttgtttttttatcaaaatgtcgattactttttttttttttttgagacagtgttgctctgtggcctaggctggagtgcagtggtgcgatcttggctcactgtaacctccacctcctgggttcaagtgagtctcctacctcagcctcccaagtagctgggattacaggtgcccaccagcacacctggctaatttttatgtttttagtagagatcgagttttgctgtgttggccaggctggtctcaaactcccggcgtcccaaagtgctgggattacaggtgcgacccaccatgcctggcccaaccccatattatttctggtaacaaagcacagaaacatgatttctcgaattttgctaggattttaatttacaaaagaaaggtgaatgccattaaaaggtgtttaatacactcccaccagaaacaagaggcaaggcaggccctgggggcctcacaaaggcggtcttatgcaagggtgagaaagcagagttatcagggaggtgggactattgctttatgaacgtgatgattggaagcaaaaacgtggggctttttcctattgaatacaaagtaaaataatgaatgctggtgtcagtggttgggaataacaacatttgcaggctcatgagagctgcctgacaaaaagcgtgtaaacaacagtgattgctcctgtggccctgtgattcagcaggtttatggagcagttaagaatcgcagatgtcaaatggccaacacagaatctaacgacatgcttaatacaaattattattagtagaaatgctgaattgcttcatttctgcaatttctgctgcttcttaagatgcttttaatgaataaaatctgccttaaaatttgatacctggtaacttctctctgtgagttttgaattggctgatgtaaccaaaatgccagctcttgccatctaactaccattaaaaggaacttctaaagctccgaagtggtcaacagtttcacttccaacttttttaaaagatacacaattttctaaaaaatttttctttatgggcgattgaatagttgggctttggctaattcctcattagcaatagaattatgtatattttgcaaactctaatacagaacacttaatgtatcagacaaccatgattatgatgtatatacctggtataaacaatcttttttgcatattgaattctgcatttttttcttccttgatacgtatgagattcaccagtaccagtttttctcttgtggtggcatatagttgattgtcatttgcattatctattaaaaacctgtggcagctcatggtattattgaccatatgttctagtgtcttcttgcagatttaaatattttattgcagtgtaaagtttaatatttagatgtgtgatacatctttggataatctgtaattaaattgatcttttgtaatggtgatagtgattagcacacactgaaaatccagcaaagcaattatttttctctttttaactggaaatcatattcgtaagttgtggtagatattatcatcagtgtattcatgattcgatttatattttgtgttatctggttataaattttatatagcattcaatttgacaaaatataaatctatttgatttgaa

SEQ ID NO: 202510 - DNA, 610 bp, Homo sapiens
  Payload ID: 19936
  Gene Name: zinc finger protein 431
  ENST ID: ENST00000594425
  CDS Start-End: 148-270
tttgtctctcgccgcagcctgagctccaggtctccccttcgctgctctgtgtcctctgctcctagaggcccaacatctgtggccctgtgacctgcaggtattgggagacccacagctaagacaccgggaccccctgaaagcctagaaatggacgacttgaaatatggagtgtatcctctcaaggaagcaagtggatgccctggggctgagaggaatcttctagtttactcttattttgaaaaggccaggagtggtggctcacacctgtaatcccagctctgggaggccaaggccagtggattgcttgagcccaggagtttgagaccagcctggacaacgtggaaaaaccccatctctactaaaaatacaaaaacaacaaaacaaaaacaaaaaacacctcagctgggtgtggtggtgcaggcctgtaatctcagctactccagaggctgaggcatgagaatcccttgaaccacagatgcagaggttgcagtgaactgagatcatgccactgcactccatcctgggcaacagagtgagactcggtctcaagagggaaaataaggcatttttctcatttaaataataaatagtattccattatgtatatcaa

SEQ ID NO: 202511 - DNA, 586 bp, Homo sapiens
  Payload ID: 19936
  Gene Name: zinc finger protein 431
  ENST ID: ENST00000599296
  CDS Start-End: 150-518
cctttgtctctcgccgcagcctgagctccaggtctccccttcgctgctctgtgtcctctgctcctagaggcccaacatctgtggccctgtgacctgcaggtattgggagacccacagctaagacaccgggaccccctgaaagcctagaaatggacgacttgaaatatggagtgtatcctctcaaggaagcaagtggatgccctggggctgagaggaatcttctagtttactcttattttgaaaaggagacattgacatttagggatgtggccatagaattctctctggaggagtgggaatgcctgaaccctgctcagcagaatttatatatgaatgtgatgttagaaaactacaaaaacctggtcttcttgggtgttgctgtctctaagcaagacccagtcacctgtctggagcaagaaaaagagccctggaatatgaagagacatgagatggtggatgaacccccaggaaaaactgatcatgatctgcggctcagagagctggaactgagtcaataaactgcttcagggaccacagtaaaaaccaagctatgtgttcttattttaccaaagacctttggccagag

SEQ ID NO: 202512 - DNA, 1971 bp, Homo sapiens
  Payload ID: 19936
  Gene Name: zinc finger protein 431
  ENST ID: ENST00000600692
  CDS Start-End: 161-595
atgtggcggggcctttgtctctcgccgcagcctgagctccaggtctccccttcgctgctctgtgtcctctgctcctagaggcccaacatctgtggccctgtgacctgcaggtattgggagacccacagctaagacaccgggaccccctgaaagcctagaaatggacgacttgaaatatggagtgtatcctctcaaggaagcaagtggatgccctggggctgagaggaatcttctagtttactcttattttgaaaaggagacattgacatttagggatgtggccatagaattctctctggaggagtgggaatgcctgaaccctgctcagcagaatttatatatgaatgtgatgttagaaaactacaaaaacctggtcttcttgggtgttgctgtctctaagcaagacccagtcacctgtctggagcaagaaaaagagccctggaatatgaagagacatgagatggtggatgaacccccaggatacatgtgcaggatgtgcagctatgtgttcttattttaccaaagacctttggccagagcaagacataaaagattcttttcaacaagtaatactgagaagatatggcaaatgtgaacatgagaatttacagttaagaaaaggctccgcaagtgtagatgagtataaggtgcacaaagaaggttataatgagctaaaccagtgtttgacaactacccagagcaaaatatttccatgtgataaatatgtgaaagtctttcataaatttttaaatgcaaatagacataagacaagacatactggaaagaaacctttcaaatgtaaaaaatgtggcaaatcattttgcatgcttttacacctaagtcaacataaaagaattcatattagagagaattcttaccaatgtgaagaatgtggcaaagcttttaaatggttctcaacccttactagacacaagagaattcatactggagagaaacccttcaaatgtgaagaatgtggcaaagcttttaagcagtcctcaacccttactacacataagataattcatactggggagaaaccatatagatgtgaagaatgtggcaaagccttcaaccggtcctcacaccttactacacataagataattcatactggagagaagccctacaaatgtgaagaatgtggcaaagcttttaaccagtcttcaacccttagtacacataagttcattcatgctggagagaaaccctacaaatgtgaggaatgtgacaaagcttttaatcgattctcataccttactaaacataagataattcatactggagaaaaatcttacaaatgtgaagaatgtggcaaaggctttaattggtcctcaacccttactaaacataaaagaattcatactggagagaaaccctacaaatgtgaagtgtgtggcaaagcctttaatgagtcctcaaaccttactacacataagatgattcatactggagagaaaccctacaaatgtgaagaatgtggcaaagcttttaaccggtccccacaacttactgcacataagataattcatactggagagaaaccttacaaatgtgaagaatgtggcaaagcttttagccagtcatcaatccttactacacataagagaattcacactggagagaaaccctacaaatgtgaagaatgtggcaaagcttttaaccgatcctcaaatcttactaaacataagataattcatacaggagagaaatcttacaaatgtgaagaatgtggtaaagcctttaaccaatcctcaactcttactaaacataggaaaattcatactagacagaaaccctacaactgtgaagaatgtgacaatacatttaaccagtcctcaaaccttattaaacaaaataattcatactggagagaaactctacaaatgtcaagaatgtgggaaagcctttaagcagtcctcaactcttactaagcattaaatattggccgggtgcggtggcttatgcaaa

SEQ ID NO: 202513 - DNA, 1082 bp, Homo sapiens
  Payload ID: 19936
  Gene Name: zinc finger protein 431
  ENST ID: ENST00000598331
  CDS Start-End: 108-1082
gctgctctgtgtcctctgctcctagaggcccaacatctgtggccctgtgacctgcaggtattgggagacccacagctaagacaccgggaccccctgaaagcctagaaatggacgacttgaaatatggagtgtatcctctcaaggaagcaagtggatgccctggggctgagaggaatcttctagtttactcttattttgaaaagtctcgctctgtcgcccaggctggaatgcagtggcgctcgctatcttggctcactgtaatatctgcctcccaggttcaagtgattctcgtgcctcagcctcctgagttgctgggactacaggagacattgacatttagggatgtggccatagaattctctctggaggagtgggaatgcctgaaccctgctcagcagaatttatatatgaatgtgatgttagaaaactacaaaaacctggtcttcttgggtgttgctgtctctaagcaagacccagtcacctgtctggagcaagaaaaagagccctggaatatgaagagacatgagatggtggatgaacccccagctatgtgttcttattttaccaaagacctttggccagagcaagacataaaagattcttttcaacaagtaatactgagaagatatggcaaatgtgaacatgagaatttacagttaagaaaaggctccgcaagtgtagatgagtataaggtgcacaaagaaggttataatgagctaaaccagtgtttgacaactacccagagcaaaatatttccatgtgataaatatgtgaaagtctttcataaatttttaaatgcaaatagacataagacaagacatactggaaagaaacctttcaaatgtaaaaaatgtggcaaatcattttgcatgcttttacacctaagtcaacataaaagaattcatattagagagaattcttaccaatgtgaagaatgtggcaaagcttttaaatggttctcaacccttactagacacaagagaattcatactggagagaaacccttcaaatgtgaagaatgtggcaaagcttttaagcagtcctcaacccttactacacataagataattcatactggggag

SEQ ID NO: 202514 - DNA, 2577 bp, Homo sapiens
  Payload ID: 19937
  Gene Name: zinc finger protein 432
  Uniprot ID: O94892
  ENST ID: ENST00000221315
  CDS Start-End: 319-2277
aaacgcggctgaccgtctctggaggtttagagggggagggagttgggcgaggggcccagaagtggaagaagtttagggaagtaagttcagcttttaagaggtcgcggcgattccaaggagagtcagtccacaggtcctggctaccctgggaagagacaagaagtaaatgaagaaagaggaagattccaggacctagatatgatttctgtggacacccttcactggtgactgaagtttctaaatagaaatttaaggcagatccagaggagacaaagacagagtatcccaggtgctggccatttcccacaacagaagaaaatgatcaatgcccaggaattgctgacactggaggatgttactgtggagttcacctgggaggagtggcagctcctgggcccttttcagaaggatttgtaccgggatgtgatgttggagatctacagcaacctgctatcaatgggttatcaagtcagcaaaccagatgcactctccaagttggaacgaggagaagaaccatggacaatggaagatgaaaggcacagtcgaatctgtccagaaaacaacgaagttgatgatcatctgcaggatcacttggaaaatcaaaggatgctgaagagtgtggaacaataccatgaacataatgcatttggaaatactgcctctcaaaccaaaagcctttgtcttttcagggaaaatcatgatacatttgagttatatataaaaactttgaaatcaaatttaagtttagtcaaccagaacaaaagctgtgaaattaacaactctactaaatttagtggagatgggaaatcatttcttcatggtaactatgaagaactttattctgcagctaaattctctgtaagtacaaaagccaatagcactaaatcccaagtcagtaagcatcagagaactcatgaaatagaaaaaaaccacgtatgcagtgaatgtgggaaagcgtttgtcaagaagtctcagctcactgatcatgagagagttcatacaggagaaaaaccttatggatgtactttgtgtgcaaaagtgttctccagaaagtccaggctaaatgaacatcaaagaattcataaaagagagaaatcttttatatgcagtgaatgtggaaaagtcttcactatgaagagccgtctgattgaacatcagcgaactcatactggagagaaaccctacatatgcaatgaatgtggaaaaggcttcccaggcaagcgtaatctcattgtacatcagcgaaatcatactggagagaaatcctatatatgtagtgaatgtggaaaaggcttcactgggaagagcatgcttattatacatcagcgaactcatacaggagagaagccctacatctgtagtgaatgtgggaaaggcttcaccacaaaacactatgtcatcatacatcaacgaaatcatacaggagagaaaccatatatatgcaatgaatgtgggaaaggcttcaccatgaagagccgtatgatcgaacatcaacgaactcatacaggagagaaaccctacatatgcagtgaatgtggaaaaggctttcccaggaagagtaatcttattgtacatcagagaaatcatacagtagagaagtcatatctatgtagtgaatgtggaaaaggttttactgtgaaaagcatgctcatcatacatcagcgaactcatacaggagagaagccctacacatgcagtgaatgtgggaaaggcttccccttgaagagtcggctgattgtacatcagcgaactcatactggagagaaaccttacaggtgcagtgaatgtgggaaaggtttcattgtgaatagcggactgatgttacatcagcgaactcatactggagagaaaccgtacatatgcaatgaatgtggaaaaggttttgcctttaagagcaatcttgttgtacaccagcgaactcatactggagagaaaccctttatgtgcagtgaatgtggaaaaggcttcaccatgaaacgctatctcattgtacatcagcaaattcatacagaagagaaatcttgtatatgtagtgaatgtggaagaggctttgccaaggaaacagagcttgctttacataagcaagttcatactggagaaaaaccttatggatgtaatgaatgtggtaaaggcttcactatgaagagccgtctaattgttcatcaacgaactcatacaggagagaaaccctttgtatgcagtgaatgtagaaaagccttctcctcaaagagaaatctcattgtacatcagcgaactcataatggaaacaaaccctgacaatgcagtggacatgttcatgcctttgggaagaaaatctgccttgtacaacatcagagatttcacagtatagattttctacatgtgtactgagtatgaaaaatcatatttcaaaatccagtgttattcactaggatgaatgctatcaatgtcagaaaggcttcaacatgaattcaggctctgaattctttgatgtaccaatgtatagaaaattactcatctgagagagagtctgtggattgggggtaacctttcatttgtcaaccttcattaaaactatgacaacgtccacatgacaaa

SEQ ID NO: 202515 - DNA, 624 bp, Homo sapiens
  Payload ID: 19937
  Gene Name: zinc finger protein 432
  ENST ID: ENST00000597273
  CDS Start-End: 263-508
cagaagtggaagaagtttagggaagtaagttcagcttttaagaggtcgcggcgattccaaggagagtcagtccacaggtcctggctaccctgggaagagacaagaagtaaatgaagaaagaggaagattccaggacctagatatgatttctgtggacacccttcactggtgactgaagtttctaaatagaaatttaaggcagatccagaggagacaaagacagagtatcccaggtgctggccatttcccacaacagaagaaaatgatcaatgcccaggaattgctgacactggaggatgttactgtggagttcacctgggaggagtggcagctcctgggcccttttcagaaggatttgtaccgggatgtgatgttggagatctacagcaacctgctatcaatgggttatcaagtcagcaaaccagatgcactctccaagttggaacgaggagaagaaccatggacaatggaagatgaaaggcacagtcgaatctgtccaggtatgtgagaagcagcaagatgcgtaagtaatattatagtcagtgaaagaaggctctgtgggtgtctgaggacacagaagcagtgcctacattaggaatgggaatcgttttccctccacaagaa

SEQ ID NO: 202516 - DNA, 4513 bp, Homo sapiens
  Payload ID: 19937
  Gene Name: zinc finger protein 432
  Uniprot ID: O94892
  ENST ID: ENST00000594154
  CDS Start-End: 214-2172
gggagctggtaggagtccctgtccacaggtcctggctaccctgggaagagacaagaagtaaatgaagaaagaggaagattccaggacctagatatgatttctgtggacacccttcactggtgactgaagtttctaaatagaaatttaaggcagatccagaggagacaaagacagagtatcccaggtgctggccatttcccacaacagaagaaaatgatcaatgcccaggaattgctgacactggaggatgttactgtggagttcacctgggaggagtggcagctcctgggcccttttcagaaggatttgtaccgggatgtgatgttggagatctacagcaacctgctatcaatgggttatcaagtcagcaaaccagatgcactctccaagttggaacgaggagaagaaccatggacaatggaagatgaaaggcacagtcgaatctgtccagaaaacaacgaagttgatgatcatctgcaggatcacttggaaaatcaaaggatgctgaagagtgtggaacaataccatgaacataatgcatttggaaatactgcctctcaaaccaaaagcctttgtcttttcagggaaaatcatgatacatttgagttatatataaaaactttgaaatcaaatttaagtttagtcaaccagaacaaaagctgtgaaattaacaactctactaaatttagtggagatgggaaatcatttcttcatggtaactatgaagaactttattctgcagctaaattctctgtaagtacaaaagccaatagcactaaatcccaagtcagtaagcatcagagaactcatgaaatagaaaaaaaccacgtatgcagtgaatgtgggaaagcgtttgtcaagaagtctcagctcactgatcatgagagagttcatacaggagaaaaaccttatggatgtactttgtgtgcaaaagtgttctccagaaagtccaggctaaatgaacatcaaagaattcataaaagagagaaatcttttatatgcagtgaatgtggaaaagtcttcactatgaagagccgtctgattgaacatcagcgaactcatactggagagaaaccctacatatgcaatgaatgtggaaaaggcttcccaggcaagcgtaatctcattgtacatcagcgaaatcatactggagagaaatcctatatatgtagtgaatgtggaaaaggcttcactgggaagagcatgcttattatacatcagcgaactcatacaggagagaagccctacatctgtagtgaatgtgggaaaggcttcaccacaaaacactatgtcatcatacatcaacgaaatcatacaggagagaaaccatatatatgcaatgaatgtgggaaaggcttcaccatgaagagccgtatgatcgaacatcaacgaactcatacaggagagaaaccctacatatgcagtgaatgtggaaaaggctttcccaggaagagtaatcttattgtacatcagagaaatcatacagtagagaagtcatatctatgtagtgaatgtggaaaaggttttactgtgaaaagcatgctcatcatacatcagcgaactcatacaggagagaagccctacacatgcagtgaatgtgggaaaggcttccccttgaagagtcggctgattgtacatcagcgaactcatactggagagaaaccttacaggtgcagtgaatgtgggaaaggtttcattgtgaatagcggactgatgttacatcagcgaactcatactggagagaaaccgtacatatgcaatgaatgtggaaaaggttttgcctttaagagcaatcttgttgtacaccagcgaactcatactggagagaaaccctttatgtgcagtgaatgtggaaaaggcttcaccatgaaacgctatctcattgtacatcagcaaattcatacagaagagaaatcttgtatatgtagtgaatgtggaagaggctttgccaaggaaacagagcttgctttacataagcaagttcatactggagaaaaaccttatggatgtaatgaatgtggtaaaggcttcactatgaagagccgtctaattgttcatcaacgaactcatacaggagagaaaccctttgtatgcagtgaatgtagaaaagccttctcctcaaagagaaatctcattgtacatcagcgaactcataatggaaacaaaccctgacaatgcagtggacatgttcatgcctttgggaagaaaatctgccttgtacaacatcagagatttcacagtatagattttctacatgtgtactgagtatgaaaaatcatatttcaaaatccagtgttattcactaggatgaatgctatcaatgtcagaaaggcttcaacatgaattcaggctctgaattctttgatgtaccaatgtatagaaaattactcatctgagagagagtctgtggattgggggtaacctttcatttgtcaaccttcattaaaactatgacaacgtccacatgacaaatgtgtaaggtacatagtccttttgcagagaatctgaactgattacatacaaacaaattcatgcagagagaaaaccacgttagtaatgtgaactgattaaacagcagtgtgctcctagcatacatgcatataggcagtgtagagcagcctgttgctagattttcacccttggaagacaatgcaatttccaggagcgaattttaatgaatgcagagaatgcactagtgccttcggtgattaattacctcatattttatgtcacaataaacatgtaggaaataaacttgatacatccaatgcagaaaagtcttgaaaattttctaagtaactatgtcttgaaaagtatttactgagataaatcttacaaaggagtaggctaggaaagccttctatgggaagaaagaccctatctcttcagtgatcataatagatcatcaatgaacttacacatactagcagcattatcatgggaaagcctttgcccagaaataaaaccttaacagttggcagatatatttcatactggagaacaagtttcagatggcagtgaatacacgaggatttcagtgatacatgctgcctcatcatcattacttcatacagaaataaaacttatatgaagagtaactttaaaaaggatcaggaaattcatgaagtaaaaaagtctcatgaaaatgatacataatgccgggcatggtggcttgcacctgtaatcccagcactttgggaggccaaggtgggtggatcacttgaggtcgggagttcgagaccagcctgaccaacatggtgaagcccccctctctactaaaaatacaaaattagccgagcatggtggctcacgcttgtaatcccagctactctggaggctaagctggagaatcacttgaacctgggaggcagaggtttcagtgagccaagattgcgccattgcattccagcctgggcaacaagagcgaaactctgcctcaaaaaaaaaaaaaaaaaaccatatttgaggactgtcacaaatctaaactcatgatacacttgatatctattctgtgacagcataccttgcatcatattatcaatgattccataattgtaaagcgggctgttcttatcactgattaaattttaatcctatatataacacaggtgttttctgtgccaatctggtgttatttattagttcttacatattataggccccaaatttatttttttcaatttactgataaatgtaattcagtatatttggatgtgtttatccaagttactaggtaccattatgtagtttacaaaaatgccttaaatgttatttttctaaaatttgttttgaaataattctagattcacaagagattacaaaatatacaaaagtttcctgagtattctttgcttagcatcatcaatgttatcttacataaccataataataaaaaccacggagttctgctcttgttgcccaggttggagtgtaatagcacgatcttggctcactgcaaccccgcctcccaggttcaagagattttcctgcctcagcctcctaagtagctgggattacaggcacccacgaccacgctcgactaatttttgtatttttagtagagacggggtttcactgtgttggccaggctggccttgaactctcgaccccgggcggtccacccgcctcagcctcccaaagtgctgggattacaggcatgagccaccacgcctggcctcctcttgctacctctttatactcacactgtcctcccaatatgacccatggtagccactgatcccattaccctaattttgttatttcaagaatgctattaaaatggaatcgtaaggtacgcaagctttgagatagggctttgttcactcagcaaattacccttaagatctatccaagttgttaggtgtctaaatagttttaatttttgttactgagttagtattcttttaaatggatgcaccagggtttgtgtatccattcactgttgatggacatttgggttgtttccagtgttttgctgttataaataaagatgctgtgactatttgtgtacccg

SEQ ID NO: 202517 - DNA, 764 bp, Homo sapiens
  Payload ID: 19937
  Gene Name: zinc finger protein 432
  ENST ID: ENST00000600368
  CDS Start-End: 228-764
gtcagcgccatgtttcctataaagcctgcaaaatttccacaggtcctggctaccctgggaagagacaagaagtaaatgaagaaagaggaagattccaggacctagatatgatttctgtggacacccttcactggtgactgaagtttctaaatagaaatttaaggcagatccagaggagacaaagacagagtatcccaggtgctggccatttcccacaacagaagaaaatgatcaatgcccaggaattgctgacactggaggatgttactgtggagttcacctgggaggagtggcagctcctgggcccttttcagaaggatttgtaccgggatgtgatgttggagatctacagcaacctgctatcaatgggttatcaagtcagcaaaccagatgcactctccaagttggaacgaggagaagaaccatggacaatggaagatgaaaggcacagtcgaatctgtccagaaaacaacgaagttgatgatcatctgcaggatcacttggaaaatcaaaggatgctgaagagtgtggaacaataccatgaacataatgcatttggaaatactgcctctcaaaccaaaagcctttgtcttttcagggaaaatcatgatacatttgagttatatataaaaactttgaaatcaaatttaagtttagtcaaccagaacaaaagctgtgaaattaacaactctactaaatttagtggagatgggaaatcatttcttcatggtaactatgaagaactttattctgcagctaaattc

SEQ ID NO: 202518 - DNA, 596 bp, Homo sapiens
  Payload ID: 19937
  Gene Name: zinc finger protein 432
  ENST ID: ENST00000598745
  CDS Start-End: 225-596
gtctgcgttgttggtggcgctatatggtggagtccacaggtcctggctaccctgggaagagacaagaagtaaatgaagaaagaggaagattccaggacctagatatgatttctgtggacacccttcactggtgactgaagtttctaaatagaaatttaaggcagatccagaggagacaaagacagagtatcccaggtgctggccatttcccacaacagaagaaaatgatcaatgcccaggaattgctgacactggaggatgttactgtggagttcacctgggaggagtggcagctcctgggcccttttcagaaggatttgtaccgggatgtgatgttggagatctacagcaacctgctatcaatgggttatcaagtcagcaaaccagatgcactctccaagttggaacgaggagaagaaccatggacaatggaagatgaaaggcacagtcgaatctgtccagaaaacaacgaagttgatgatcatctgcaggatcacttggaaaatcaaaggatgctgaagagtgtggaacaataccatgaacataatgcatttggaaatactgcctctcaaaccaaaagcctttgtcttttcagg

SEQ ID NO: 202519 - DNA, 604 bp, Homo sapiens
  Payload ID: 19937
  Gene Name: zinc finger protein 432
  ENST ID: ENST00000601310
  CDS Start-End: 497-604
acttttaaagaggtgtgagagtaacattgtataaaggaaaaaatgtagtttctcaccatccatatggcctgatttaaaaaactgatatgagaattacctactgcttaggcatgatgctatgtggattctcctttgtgacctcccctttcatcttcatgttacttccacacttcaccgaagaaaggcatttggcctacattgagggtcttgtgtttccttggtttgagagaaccaaataaagagacaaatattcagggccacgtgttaaggtgaatgtacccctgaaagttgttttgctcttcagtccacaggtcctggctaccctgggaagagacaagaagtaaatgaagaaagaggaagattccaggacctagatatgatttctgtggacacccttcactggtgactgaagtttctaaatagaaatttaaggcagatccagaggagacaaagacagagtatcccaggtgctggccatttcccacaacagaagaaaatgatcaatgcccaggaattgctgacactggaggatgttactgtggagttcacctgggaggagtggcagctcctgggcccttttcagaaggatttgtaccgggatgtg

SEQ ID NO: 202520 - DNA, 2280 bp, Homo sapiens
  Payload ID: 19938
  Gene Name: zinc finger protein 433
  Uniprot ID: Q8N7K0
  ENST ID: ENST00000344980
  CDS Start-End: 172-2193
gtccatcggggagggcgaaggccctgctctcctcggttcccggctccaggcggcgagctgaggttgggagcctggctttcccctccgagagggttcaggtgcctctgccatagcttctgtcgcctgtgctgtgacccgcactggtcgtgggagtcacctgaaaggcaagaaatgatgtttcaggattcagtggcctttgaggatgtggctgtgaccttcacccaagaggagtgggctttgctggatccttcccagaaaaatctctgtagagatgtgatgcaagaaaccttcaggaacctggcctctatagggaaaaaatggaaaccccagaacatatatgtagagtacgaaaatctaaggagaaacctaagaattgtgggagagagactctttgaaagtaaagaaggtcatcagcatggagaaattttgacccaggttccagatgacatgctgaagaaaacaactactggagtaaaatcatgcgaaagcagtgtgtatggagaagtaggcagtgctcattcatctcttaataggcacatcagagatgacactggacacaaggcatatgagtatcaagaatatggacagaaaccatataaatgtaaatactgtaaaaaacctttcaactgtctctcctctgttcagacacatgaaagggctcatagtggaaggaaactctatgtttgtgaggaatgcggaaaaacatttatttcccattcaaaccttcaaagacacaggataatgcaccgtggagatggaccttataagtgtaaattttgtgggaaagccttgatgtttctcagtttgtatcttatccacaaacgaactcacactggagagaaaccatatcaatgtaaacagtgtggtaaagcctttagtcattctagtagccttcgaatacatgaaagaactcacactggggagaagccttataaatgtaatgaatgtgggaaagcattccatagttccacatgccttcatgctcataaaagaactcacactggggagaagccatatgaatgtaaacagtgtgggaaagccttcagctcttcccattcctttcaaatacatgaaagaactcacacgggggagaagccatatgaatgtaaggaatgtggaaaagcattcaagtgtcccagttctgttcgcagacatgaaagaacccactctaggaaaaaaccctatgaatgtaaacattgtgggaaagtattatcttatcttaccagctttcaaaaccacttgggaatgcacactggagagatatctcataaatgtaagatatgtgggaaagccttttattctcccagttcacttcaaacacatgaaaaaactcacactggagagaaaccctataaatgcaaccaatgtggtaaagcctttaattcttccagttccttccgatatcatgaaagaactcacactggagagaaaccttacgagtgtaagcaatgtgggaaagccttcagatctgcctcactccttcaaacacatggtaggactcacacgggagagaaaccctatgcatgtaaggaatgtggaaaaccatttagtaatttctctttctttcaaatacatgaaaggatgcacagagaagagaagccgtatgaatgtaagggttatgggaaaacattcagtttgcccagtttatttcatagacatgaaaggactcacactggaggaaaaacctatgaatgcaagcagtgtggcagatccttcaactgttcgagctcctttcgatatcatggaaggactcacactggagagaaaccctatgaatgcaagcaatgtggaaaagccttcagatctgcctcacagcttcaaattcatggaaggactcacactggagagaaaccttatgaatgtaagcagtgtgggaaagcctttggatctgcctcacaccttcaaatgcatggaaggactcacactggagagaaaccctatgaatgtaagcagtgtgggaagtcttttggatgtgcctcgcgacttcaaatgcatggaaggactcacactggagagaaaccgtataaatgtaagcaatgtgggaaagcttttggatgtccctcaaaccttcgaaggcatggaaggactcacactggagagaaaccctataaatgtaaccaatgtggtaaagtctttagatgttcttcacaacttcaagtgcatggaagggctcactgcatagacaccccataaccccaggctttaggaggctgaggtggggggactgcttaagcccaggagttcaagaccagcctgggcaacatagtgagactctgttat

SEQ ID NO: 202521 - DNA, 2322 bp, Homo sapiens
  Payload ID: 19938
  Gene Name: zinc finger protein 433
  Uniprot ID: Q8N7K0
  ENST ID: ENST00000419886
  CDS Start-End: 293-2209
cctgctctcctcggttcccggctccaggcggcgagctgaggttgggagcctggctttcccctccgagagggttcaggtgcctctgccatagcttctgtcgcctgtgctgtgacccgcactggtcgtgggagtcacctgaaaggcaagaaatgggagacaggaattgcagggagaatcatgcatcaatgcctggaaaggtgattcagtggcctttgaggatgtggctgtgaccttcacccaagaggagtgggctttgctggatccttcccagaaaaatctctgtagagatgtgatgcaagaaaccttcaggaacctggcctctatagggaaaaaatggaaaccccagaacatatatgtagagtacgaaaatctaaggagaaacctaagaattgtgggagagagactctttgaaagtaaagaaggtcatcagcatggagaaattttgacccaggttccagatgacatgctgaagaaaacaactactggagtaaaatcatgcgaaagcagtgtgtatggagaagtaggcagtgctcattcatctcttaataggcacatcagagatgacactggacacaaggcatatgagtatcaagaatatggacagaaaccatataaatgtaaatactgtaaaaaacctttcaactgtctctcctctgttcagacacatgaaagggctcatagtggaaggaaactctatgtttgtgaggaatgcggaaaaacatttatttcccattcaaaccttcaaagacacaggataatgcaccgtggagatggaccttataagtgtaaattttgtgggaaagccttgatgtttctcagtttgtatcttatccacaaacgaactcacactggagagaaaccatatcaatgtaaacagtgtggtaaagcctttagtcattctagtagccttcgaatacatgaaagaactcacactggggagaagccttataaatgtaatgaatgtgggaaagcattccatagttccacatgccttcatgctcataaaagaactcacactggggagaagccatatgaatgtaaacagtgtgggaaagccttcagctcttcccattcctttcaaatacatgaaagaactcacacgggggagaagccatatgaatgtaaggaatgtggaaaagcattcaagtgtcccagttctgttcgcagacatgaaagaacccactctaggaaaaaaccctatgaatgtaaacattgtgggaaagtattatcttatcttaccagctttcaaaaccacttgggaatgcacactggagagatatctcataaatgtaagatatgtgggaaagccttttattctcccagttcacttcaaacacatgaaaaaactcacactggagagaaaccctataaatgcaaccaatgtggtaaagcctttaattcttccagttccttccgatatcatgaaagaactcacactggagagaaaccttacgagtgtaagcaatgtgggaaagccttcagatctgcctcactccttcaaacacatggtaggactcacacgggagagaaaccctatgcatgtaaggaatgtggaaaaccatttagtaatttctctttctttcaaatacatgaaaggatgcacagagaagagaagccgtatgaatgtaagggttatgggaaaacattcagtttgcccagtttatttcatagacatgaaaggactcacactggaggaaaaacctatgaatgcaagcagtgtggcagatccttcaactgttcgagctcctttcgatatcatggaaggactcacactggagagaaaccctatgaatgcaagcaatgtggaaaagccttcagatctgcctcacagcttcaaattcatggaaggactcacactggagagaaaccttatgaatgtaagcagtgtgggaaagcctttggatctgcctcacaccttcaaatgcatggaaggactcacactggagagaaaccctatgaatgtaagcagtgtgggaagtcttttggatgtgcctcgcgacttcaaatgcatggaaggactcacactggagagaaaccgtataaatgtaagcaatgtgggaaagcttttggatgtccctcaaaccttcgaaggcatggaaggactcacactggagagaaaccctataaatgtaaccaatgtggtaaagtctttagatgttcttcacaacttcaagtgcatggaagggctcactgcatagacaccccataaccccaggctttaggaggctgaggtggggggactgcttaagcccaggagttcaagaccagcctgggcaacatagtgagactctgttataaaaattaaataaataaataaaaaga

SEQ ID NO: 202522 - DNA, 567 bp, Homo sapiens
  Payload ID: 19938
  Gene Name: zinc finger protein 433
  ENST ID: ENST00000411841
  CDS Start-End: 337-567
aatcaggggcgctgggcggggcctgccgagtgtccatcggggagggcgaaggccctgctctcctcggttcccggctccaggcggcgagctgaggttgggagcctggctttcccctccgagagggttcaggtgcctctgccatagcttctgtcgcctgtgctgtgacccgcactggtcgtgggagtcacctgaaaggcaagaaatggaacacctttaagtggttttctaccctgggtgggccaggtgttccctgccttcattccggtaaaccaacagtcttcattgtgggtgtcatggccatcacgaacatgtcacagtgctgcagagattttgtttatggccagttttggagccagtttatggccagatttgggggcctgttcccaacacctaagtctctatcacagcgtgacggttgaattggcagccagtaccgccaggcatcctgcatcatcactgcaggaggattcagtggcctttgaggatgtggctgtgaccttcacccaagaggagtgggctttgctggatccttcccagaaaaatctctgtagagatgtgatgcaagaa

SEQ ID NO: 202523 - DNA, 721 bp, Homo sapiens
  Payload ID: 19938
  Gene Name: zinc finger protein 433
  ENST ID: ENST00000455504
  CDS Start-End: 224-721
ggctccaggcggcgagctgaggttgggagcctggctttcccctccgagagggttcaggtgcctctgccatagcttctgtcgcctgtgctgtgacccgcactggtcgtgggagtcacctgaaaggcaagaaatgggagacaggaattgcagggagaatcatgcatcaatgcctggaaaggtcatcatggaaacctcttgggaatagagtataggcttcccagtgatgttagtcttatccatcctcctctatacatgtgagatgtttcaggattcagtggcctttgaggatgtggctgtgaccttcacccaagaggagtgggctttgctggatccttcccagaaaaatctctgtagagatgtgatgcaagaaaccttcaggaacctggcctctatagggaaaaaatggaaaccccagaacatatatgtagagtacgaaaatctaaggagaaacctaagaattgtgggagagagactctttgaaagtaaagaaggtcatcagcatggagaaattttgacccaggttccagatgacatgctgaagaaaacaactactggagtaaaatcatgcgaaagcagtgtgtatggagaagtaggcagtgctcattcatctcttaataggcacatcagagatgacactggacacaaggcatatgagtatcaagaatatggacagaaaccatataaatgtaaatactgtaaaaaacctttcaactgtctctcc

SEQ ID NO: 202524 - DNA, 709 bp, Homo sapiens
  Payload ID: 19938
  Gene Name: zinc finger protein 433
  ENST ID: ENST00000548669
  CDS Start-End: 158-283
gcgaaggccctgctctcctcggttcccggctccaggcggcgagctgaggttgggagcctggctttcccctccgagagggttcaggtgcctctgccatagcttctgtcgcctgtgctgtgacccgcactggtcgtgggagtcacctgaaaggcaagaaatgggagacaggaattgcagggagaatcatgcatcaatgcctggaaaggtttctggaagcctggaagttatgaagtccatgttcaaggtgctgacagatctggtgcctggattcagtggcctttgaggatgtggctgtgaccttcacccaagaggagtgggctttgctggatccttcccagaaaaatctctgtagagatgtgatgcaagaaaccttcaggaacctggcctctatagggaaaaaatggaaaccccagaacatatatgtagagtacgaaaatctaaggagaaacctaagaattgtgggagagagactctttgaaagtaaagaaggtcatcagcatggagaaattttgacccaggttccagatgacatgctgaagaaaacaactactggagtaaaatcatgcgaaagcagtgtgtatggagaagtaggcagtgctcattcatctcttaataggcacatcagagatgacactggacacaaggcatatgagtatcaagaatatggacagaaaccatataaatgtaaatactgtaaaaaacctttcaa

SEQ ID NO: 202525 - DNA, 467 bp, Homo sapiens
  Payload ID: 19938
  Gene Name: zinc finger protein 433
  ENST ID: ENST00000550745
  CDS Start-End: 236-467
gtgtccatcggggagggcgaaggccctgctctcctcggttcccggctccaggcggcgagctgaggttgggagcctggctttcccctccgagagggttcaggtgcctctgccatagcttctgtcgcctgtgctgtgacccgcactggtcgtgggagtcacctgaaaggcaagaaatgttctggaagcctggaagttatgaagtccatgttcaaggtgctgacagatctggtgcctgatgtttcaggattcagtggcctttgaggatgtggctgtgaccttcacccaagaggagtgggctttgctggatccttcccagaaaaatctctgtagagatgtgatgcaagaaaccttcaggaacctggcctctatagggaaaaaatggaaaccccagaacatatatgtagagtacgaaaatctaaggagaaacctaagaattgtgggagagagactctttgaaagtaaagaag

SEQ ID NO: 202526 - DNA, 692 bp, Homo sapiens
  Payload ID: 19938
  Gene Name: zinc finger protein 433
  ENST ID: ENST00000478765
  CDS Start-End: 341-692
taggcatttttttttcaaggatatgcagcctcaggactgctaatgttaactttttctgcacaggaatttggaagactttgttatggcaggtgccgtactcccactttacaaacaaacattaggggcagcccaggcagcacacctttctggatttaccaaaaatacacattttcctattctactgttgctttaccacatggttcagttgtagcctcagaattactttatggaagaaactgagtgtagacagagagtatgaggtctgatggtcatggaataattgttttgagtccacagcatcatggaaacctcttgggaatagagtataggcttcccagtgatgttagtcttatccatcctcctctatacatgtgagatgtttcaggattcagtggcctttgaggatgtggctgtgaccttcacccaagaggagtgggctttgctggatccttcccagaaaaatctctgtagagatgtgatgcaagaaaccttcaggaacctggcctctatagggaaaaaatggaaaccccagaacatatatgtagagtacgaaaatctaaggagaaacctaagaattgtgggagagagactctttgaaagtaaagaaggtcatcagcatggagaaattttgacccaggttccagatgacatgctgaagaaaacaactactggagtaaaatcatgcgaaagca

SEQ ID NO: 202527 - DNA, 785 bp, Homo sapiens
  Payload ID: 19938
  Gene Name: zinc finger protein 433
  ENST ID: ENST00000550507
  CDS Start-End: 165-785
ggggagggcgaaggccctgctctcctcggttcccggctccaggcggcgagctgaggttgggagcctggctttcccctccgagagggttcaggtgcctctgccatagcttctgtcgcctgtgctgtgacccgcactggtcgtgggagtcacctgaaaggcaagaaatggattcagtggcctttgaggatgtggctgtgaccttcacccaagaggagtgggctttgctggatccttcccagaaaaatctctgtagagatgtgatgcaagaaaccttcaggaacctggcctctatagggaaaaaatggaaaccccagaacatatatgtagagtacgaaaatctaaggagaaacctaagaattgtgggagagagactctttgaaagtaaagaaggtcatcagcatggagaaattttgacccaggttccagatgacatgctgaagaaaacaactactggagtaaaatcatgcgaaagcagtgtgtatggagaagtaggcagtgctcattcatctcttaataggcacatcagagatgacactggacacaaggcatatgagtatcaagaatatggacagaaaccatataaatgtaaatactgtaaaaaacctttcaactgtctctcctctgttcagacacatgaaagggctcatagtggaaggaaactctatgtttgtgaggaatgcggaaaaacatttatttcccattcaaaccttcaaagacacaggataatgcaccgtggagatggaccttataagtgtaaattttgtgggaaagccttgatgtttctc

SEQ ID NO: 202528 - DNA, 583 bp, Homo sapiens
  Payload ID: 19938
  Gene Name: zinc finger protein 433
  ENST ID: ENST00000552904
  CDS Start-End: 226-583
tcggttcccggctccaggcggcgagctgaggttgggagcctggctttcccctccgagagggttcaggtgcctctgccatagcttctgtcgcctgtgctgtgacccgcactggtcgtgggagtcacctgaaaggattcagtggcctttgaggatgtggctgtgaccttcacccaagaggagtgggctttgctggatccttcccagaaaaatctctgtagagatgtgatgcaagaaaccttcaggaacctggcctctatagggaaaaaatggaaaccccagaacatatatgtagagtacgaaaatctaaggagaaacctaagaattgtgggagagagactctttgaaagtaaagaaggtcatcagcatggagaaattttgacccaggttccagatgacatgctgaagaaaacaactactggagtaaaatcatgcgaaagcagtgtgtatggagaagtaggcagtgctcattcatctcttaataggcacatcagagatgacactggacacaaggcatatgagtatcaagaatatggacagaaaccatataaatgtaaatactgtaaaaaacctttcaactgtctct

SEQ ID NO: 202529 - DNA, 449 bp, Homo sapiens
  Payload ID: 19938
  Gene Name: zinc finger protein 433
  ENST ID: ENST00000547560
  CDS Start-End: 293-449
ggttcccggctccaggcggcgagctgaggttgggagcctggctttcccctccgagagggttcaggtgcctctgccatagcttctgtcgcctgtgctgtgacccgcactggtcgtgggagtcacctgaaaggcaagaaatgttctggaagcctggaagttatgaagtccatgttcaaggtgctgacagatctggtgcctggattcagtggcctttgaggatgtggctgtgaccttcacccaagaggagtgggctttgctggatccttcccagaaaaatctctgtagagatgtgatgcaagaaaccttcaggaacctggcctctatagggaaaaaatggaaaccccagaacatatatgtagagtacgaaaatctaaggagaaacctaagaattgtgggagagagactctttgaaagtaaagaaggtcatcagcatggagaaattttgaccc

SEQ ID NO: 202530 - DNA, 4071 bp, Homo sapiens
  Payload ID: 19939
  Gene Name: zinc finger protein 436
  Uniprot ID: Q9C0F3
  ENST ID: ENST00000314011
  CDS Start-End: 138-1550
gctgcggctctggaacccgttcgcggtctctcaggttttggagacgacgatctagtggatcttttgcgggacaggagcgctgtctgctagctgcttttcctgctctctctccctggaggcgaacccttgtgctcgagatggcagccaccctgctcatggctgggtcccaggcacctgtgacgtttgaagatatggccatgtatctcacccgggaagaatggagacctctggacgctgcacagagggacctttaccgggatgttatgcaggagaattatggaaatgttgtctcactagattttgagatcaggagtgagaacgaggtaaatcccaagcaagagattagtgaagatgtacaatttgggactacatctgaaagacctgctgagaatgctgaggaaaatcctgaaagtgaagagggctttgaaagcggagataggtcagaaagacaatggggagatttaacagcagaagagtgggtaagctatcctctccaaccagtcactgatctacttgtccacaaagaagtccacacaggcatccgctatcatatatgttctcattgtggaaaggccttcagtcagatctcagaccttaatcgacatcagaagacccacactggagacagaccctataaatgttatgaatgtggaaaaggcttcagtcgcagctcacaccttattcagcatcaaagaacacatactggggagaggccttatgactgtaacgagtgtgggaaaagttttggaagaagttctcacctgattcagcatcagacaatccacactggagagaagcctcacaaatgtaatgagtgtggaaaaagtttctgccgtctctctcacctaatccaacaccaaaggacccacagtggtgagaaaccctatgagtgtgaggagtgtgggaaaagcttcagccggagctctcacctagctcagcaccagaggacccacacgggtgagaaaccttatgaatgtaacgaatgtggccgaggcttcagtgagagatctgatctcatcaaacactatcgagtccacacaggggagaggccctacaagtgtgatgagtgtgggaagaatttcagtcagaactccgaccttgtgcgtcatcgcagagcccacacgggagagaagccataccactgtaacgaatgtggggaaaatttcagccgcatctcacacttggttcagcaccagagaactcacactggagagaagccatatgaatgcaatgcttgtgggaaaagcttcagccggagctctcatctcatcacacaccagaaaattcacactggagagaagccttatgagtgtaatgagtgttggcgaagctttggtgaaaggtcagatctaattaaacatcagagaacccacacaggggagaagccctacgagtgtgtgcagtgtgggaaaggtttcacccagagctccaacctcatcacacatcaaagagttcacacgggagagaaaccttatgaatgtaccgaatgtgagaagagtttcagcaggagctcagctcttattaaacataagagagttcatacggactaagctgtaattatgatggctgagaaatgattcatttgaagatacaattttatttgatatcaatgaacgccctcaagactgagctgcttttatcatactctcctagttgtgggccacgatttaaaccatcagagatgacaagccatttgaaattctgaccctcagctttgggaatgttatctcctccaaaatggtgatttttattcactcaatgggttacttcattaaaagcagccccacaagtaactggaaatctgaagaccaggggacaaatgctggtgaatgcttaggcctggaaatggagtaaatctttcaatgttattttctcccatccttggcccaaggaactatgctaagtgaaacgtgggactgtaatagggtggtaatggctgctttggaaaaaggcaactagagactctgcctaaattgccacacctattcacacaccatagtagttgggcacacacatcttcccttccaaagggctttttccttgagttgctcatgcatttgtatcttttccatcttcctgagggcaagattttgcacgatgaaggcaatgattgtaacttttctccttctcattgtttctaattagctcctttaaagcttgcatctttgtgaaggctaactgaagatacggttggaaaggaaaaatgagacacaggtttggggaccaaggacccatcaatgatggtgactttagcagaagatgcccacagttattactgccattaatcagatttatgaattttctttggggatcactatagggaatattgtatagaaaatatcttcaagaaaagataggaccatcagtgacagttaagtgtaaggagcaagtggaattgagtccttcagggaaggaaccacagagtcccttcccaaggaatgtaggtcgtttctgtgttctttcccttctaatctttaagatcaactcttcctatcctgctaactctaagatttgataagggccacatcccagtgtttatcttagcttgcatcagggcatgtgtatgtacagtaatgtgtattcctgtggtttttctaatagaaactgaatttacagagacttagcatgttcttgggtgatgtgagtcatgtgacagaagtacagacataactccaatgtgagaaatgtccttttttcattatggaaaataatttaaacactagtgctttagtgtgcactctcctgtaaggtctgtctttgtacagagctaagcacttgtttgtatgtgtttgtcaattgtggaagataatgaccagacaaataggtcgattgtcctattctcagaatgaattatcttctatggtaatgaagaactctttggcttagtcagaaggaattaacgaacctcggtaggaatgtatttccatcctcccaccctacagatataagaggttaaaataacagttcgcccaatttaagcccagtagtgtcagttttcctaatctcagtccaggtaggaattaagaaatatctcaagtgttgatgctatccaagcatgttggggtggaagggaattggtgcccagaaaatgggactggagtgaggaatatcttttcttttgagagtacccccagtttatttctactgtgctttattgctactgttctttattgtgaatgttgtaacattttaaaaatgttttgccatagctttttaggacttggtgttaaaggagccagtggtctctctgggtgggtactataatgagttattgtgacccacagctgtgtgggaccacatcacttgttaataacacaacctttaaagtaacccatcttccaggggggttccttcatgttgccactcctttttaaggacaaactcaggcaaggagcatgtttttttgttatttacaaaatctagcagactgtgggtatccatattttaattgtcgggtgacacatgttcttggtaactaaactcaaatatgtcttttctcatatatgttgctgatggttttaataaatgtcaaagttctcctgttgcttctgtgagccactatgggtatcagcttgggagtggccatagatgaccgcatttccatgacctaactgtatttcacccccttttccttccctactgttcttgccccaccccaaccagttcctgctgctgcttttggcttcttggaggtgaagggcttaaaacaaggcttctaagcacccagctatctccatacatgaacaatctagctgggaaacttaagggacaagggccacaccagctgtctcctctttctgccaattgttgcccgtttgctgtgttgaactttgtatagaactcatgcatcagactcccttcactaatgctttttgcatgccttctgctcccaagtccctggctgcctctgcacatcccgtgaacactttgtgcctgttttctatggttgtggagaattaatgaacaaatcaatatgtagaacagttttccttatggtattggtcacagttatcctagtgtttgtattattctaacaatattctataattaaaaatataatttttaaagtca

SEQ ID NO: 202531 - DNA, 3788 bp, Homo sapiens
  Payload ID: 19939
  Gene Name: zinc finger protein 436
  Uniprot ID: Q9C0F3
  ENST ID: ENST00000374608
  CDS Start-End: 382-1794
gccggaaaggacccggcctcgagatggcagagcggaggcgttccctgggctgagctgagcacctcctccctgagacagcagcggtctaacccccggcgcgggagggacccagccagggggctgtcctagtagattccggcattgcctccaccccgctgtggcggagacgcagagggcgggtcgcgctcgagggtcagggaggagagtgacccggccctggtccagggccctccctgcccgccttggggccagaactccagccctggggagtgggcagggcctgttttccgtgcctcacgccctgcttttcgcctccttcagcgctgtctgctagctgcttttcctgctctctctccctggaggcgaacccttgtgctcgagatggcagccaccctgctcatggctgggtcccaggcacctgtgacgtttgaagatatggccatgtatctcacccgggaagaatggagacctctggacgctgcacagagggacctttaccgggatgttatgcaggagaattatggaaatgttgtctcactagattttgagatcaggagtgagaacgaggtaaatcccaagcaagagattagtgaagatgtacaatttgggactacatctgaaagacctgctgagaatgctgaggaaaatcctgaaagtgaagagggctttgaaagcggagataggtcagaaagacaatggggagatttaacagcagaagagtgggtaagctatcctctccaaccagtcactgatctacttgtccacaaagaagtccacacaggcatccgctatcatatatgttctcattgtggaaaggccttcagtcagatctcagaccttaatcgacatcagaagacccacactggagacagaccctataaatgttatgaatgtggaaaaggcttcagtcgcagctcacaccttattcagcatcaaagaacacatactggggagaggccttatgactgtaacgagtgtgggaaaagttttggaagaagttctcacctgattcagcatcagacaatccacactggagagaagcctcacaaatgtaatgagtgtggaaaaagtttctgccgtctctctcacctaatccaacaccaaaggacccacagtggtgagaaaccctatgagtgtgaggagtgtgggaaaagcttcagccggagctctcacctagctcagcaccagaggacccacacgggtgagaaaccttatgaatgtaacgaatgtggccgaggcttcagtgagagatctgatctcatcaaacactatcgagtccacacaggggagaggccctacaagtgtgatgagtgtgggaagaatttcagtcagaactccgaccttgtgcgtcatcgcagagcccacacgggagagaagccataccactgtaacgaatgtggggaaaatttcagccgcatctcacacttggttcagcaccagagaactcacactggagagaagccatatgaatgcaatgcttgtgggaaaagcttcagccggagctctcatctcatcacacaccagaaaattcacactggagagaagccttatgagtgtaatgagtgttggcgaagctttggtgaaaggtcagatctaattaaacatcagagaacccacacaggggagaagccctacgagtgtgtgcagtgtgggaaaggtttcacccagagctccaacctcatcacacatcaaagagttcacacgggagagaaaccttatgaatgtaccgaatgtgagaagagtttcagcaggagctcagctcttattaaacataagagagttcatacggactaagctgtaattatgatggctgagaaatgattcatttgaagatacaattttatttgatatcaatgaacgccctcaagactgagctgcttttatcatactctcctagttgtgggccacgatttaaaccatcagagatgacaagccatttgaaattctgaccctcagctttgggaatgttatctcctccaaaatggtgatttttattcactcaatgggttacttcattaaaagcagccccacaagtaactggaaatctgaagaccaggggacaaatgctggtgaatgcttaggcctggaaatggagtaaatctttcaatgttattttctcccatccttggcccaaggaactatgctaagtgaaacgtgggactgtaatagggtggtaatggctgctttggaaaaaggcaactagagactctgcctaaattgccacacctattcacacaccatagtagttgggcacacacatcttcccttccaaagggctttttccttgagttgctcatgcatttgtatcttttccatcttcctgagggcaagattttgcacgatgaaggcaatgattgtaacttttctccttctcattgtttctaattagctcctttaaagcttgcatctttgtgaaggctaactgaagatacggttggaaaggaaaaatgagacacaggtttggggaccaaggacccatcaatgatggtgactttagcagaagatgcccacagttattactgccattaatcagatttatgaattttctttggggatcactatagggaatattgtatagaaaatatcttcaagaaaagataggaccatcagtgacagttaagtgtaaggagcaagtggaattgagtccttcagggaaggaaccacagagtcccttcccaaggaatgtaggtcgtttctgtgttctttcccttctaatctttaagatcaactcttcctatcctgctaactctaagatttgataagggccacatcccagtgtttatcttagcttgcatcagggcatgtgtatgtacagtaatgtgtattcctgtggtttttctaatagaaactgaatttacagagacttagcatgttcttgggtgatgtgagtcatgtgacagaagtacagacataactccaatgtgagaaatgtccttttttcattatggaaaataatttaaacactagtgctttagtgtgcactctcctgtaaggtctgtctttgtacagagctaagcacttgtttgtatgtgtttgtcaattgtggaagataatgaccagacaaataggtcgattgtcctattctcagaatgaattatcttctatggtaatgaagaactctttggcttagtcagaaggaattaacgaacctcggtaggaatgtatttccatcctcccaccctacagatataagaggttaaaataacagttcgcccaatttaagcccagtagtgtcagttttcctaatctcagtccaggtaggaattaagaaatatctcaagtgttgatgctatccaagcatgttggggtggaagggaattggtgcccagaaaatgggactggagtgaggaatatcttttcttttgagagtacccccagtttatttctactgtgctttattgctactgttctttattgtgaatgttgtaacattttaaaaatgttttgccatagctttttaggacttggtgttaaaggagccagtggtctctctgggtgggtactataatgagttattgtgacccacagctgtgtgggaccacatcacttgttaataacacaacctttaaagtaacccatcttccaggggggttccttcatgttgccactcctttttaaggacaaactcaggcaaggagcatgtttttttgttatttacaaaatctagcagactgtgggtatccatattttaattgtcgggtgacacatgttcttggtaactaaactcaaatatgtcttttctcatatatgttgctgatggttttaataaatgtcaaagttctcctgtt

SEQ ID NO: 202532 - DNA, 3788 bp, Homo sapiens; identical to SEQ ID NO: 202531
  Payload ID: 19939
  Gene Name: Zinc finger protein 436
  ENST ID: ENST00000635349
  CDS Start-End: 382-1794

SEQ ID NO: 202533 - DNA, 4071 bp, Homo sapiens; identical to SEQ ID NO: 202530
  Payload ID: 19939
  Gene Name: Zinc finger protein 436
  ENST ID: ENST00000635400
  CDS Start-End: 138-1550

SEQ ID NO: 202534 - DNA, 3243 bp, Homo sapiens
  Payload ID: 19940
  Gene Name: zinc finger protein 438
  Uniprot ID: Q7Z4V0
  ENST ID: ENST00000331737
  CDS Start-End: 460-2916
aattaattaaaaggatttacggtatatcttatgactctacaggagccttgggatatagataaaaatgaatgccatttcccatccagtactgaagtgttaaagttagaagacatttgctaagtcaaatcacttcaggaagctcatcctgggagtggaggaacagatgttctgtcattgccacattcttctggacacagactggagaactataggaatgtatgttgaagaaagtacgcacatcttatcttctgaacattttgatggaattaaccacaaacttcatgcaagaacagtaaaaggaaagatactattcaagtccagtacatcataatgcagaattctgtatcagtaccaccaaaagatgaagatccaatcctttgatggcaatggaggaggaggaggacacacgttgcacattctccaaatatccaacagcctttctggatttctcagagtcctatggatagtgaatcaaacatcccttctggaacaatacagagtaggaaaggtttgcagaataagagtcagtttaggaccattgcaccaaaaattgtgcccaaagtcctaacgtccagaatgctgccatgtcattcaccatcacgctctgatcaggtgaatctgggaccctccatcaactccaagctgctggggatgtccacccagaactatgccctgatgcaggttgctggccaggaggggacattttctcttgttgctctgccacatgttgcctcagctcagccaattcagaaacccagaatgtccctacctgaaaacctgaaacttcctattcctagatatcaaccccctagaaatagcaaagcatcaagaaagaaacccatcctgatctttcctaagagtggctgtagcaaagctcctgcccaaacccaaatgtgtcctcagatgtccccttccccacctcaccaccctgaactcctgtacaaacccagtccatttgaggaagtaccatcactagagcaagccccagccagcattagcacagctgcgctgaccaatggaagtgaccatggggacttgagaccaccagtgaccaacacccatggcagtctgaaccctcctgctaccccagcatcatccacaccagaggagcctgccaagcaggacctcacagctctttcagggaaagcacactttgtaagcaagataacatctagtaaaccttctgctgttgccagtgaaaaatttaaagaacaagttgatcttgcaaaaaccatgaccaatttatcaccaaccattcttggcaatgcagttcagttgatctcttcagtccccaaagggaaactgccaatcccaccctactcaagaatgaagacaatggaggtttacaaaatcaaatcagatgctaacattgcaggtttttctttaccaggacctaaggccgactgtgataagataccctccaccacagaaggctttaatgcagccaccaaggtggcaagcaggctacctgttccacaagtgtcacagcagagtgcctgtgaaagtgccttttgtccacccaccaaacttgatcttaaccacaaaacaaaactgaacagtggagcagcaaagagaaaaggaagaaaacggaaggtaccagatgaaattttggcatttcagggaaaaaggaggaaatatatcattaataagtgtagagatggtaaagaaagagtaaaaaatgatccccaagaattcagagaccaaaagctggggaccctgaaaaaataccgtagcattatgcccaaacctatcatggtcatacccactttggcctccctggcttctccaactacactacagtcccagatgcttgggggcctaggacaggatgttttgttaaataattcactcactcctaaatatcttggctgtaagcaagacaacagctcttcccctaagcccagctccgtgttcagaaatggattctctggcattaagaagccttggcacagatgtcacgtctgcaaccaccacttccagttcaaacagcaccttcgagaccacatgaatacacacaccaacagacgcccttacagttgtcggatttgtcgcaagtcctatgtacgtcctggcagcctgagcacacacatgaaacttcatcatggtgagaaccgtctgaagaaactcatgtgttgtgagttttgtgcaaaagtgtttggccacatccgagtctattttggccatctgaaagaagtgcatagggttgtgatcagcactgagcctgcgcccagtgaactgcagccaggagacataccaaagaacagagacatgagtgtgcgaggcatggagggatcattggagagggaaaacaagtccaacctggaagaagacttccttctaaaccaggcagacgaagtcaaattacaaatcaaatgtggtcgttgtcagattactgctcagtcttttgcggaaataaaatttcatttacttgatgttcatggagaggaaattgagggcaggctacaagaagggaccttcccaggaagcaaggggactcaggaagagttggtgcagcacgctagccccgactggaaaaggcatcctgagagagggaagccggagaaggttcattcctcctccgaggaatcacatgcatgtccaagactgaaaaggcagctccaccttcatcagaatggcgtggaaatgctcatggaaaatgaaggaccccagtcaggaaccaacaagccaagggaaacctgccagggccctgagtgtcctggcctccacacgtttctcttgtggtcccattcaggctttaactgcctgctttgtgcagagatgctgggacggaaagaggacctcctccaccactggaagcaccagcataactgtgaggacccttccaaactgtgggctattttaaatacggtctccaaccagggagtgatcgaactttccagtgaagctgagaaatgagaccccaaggcagcctggggttaaggagagagctctgccgccaccttccttcagagcttcgtgctttatggtggtgcttagtcacaaagatcaaacaacaggattggtgtgagtgaacagaaatgatttttgtacatggttttattttcttaacgaaataaaatataagctctcgaagcatatttttctaactatatgcagtcttattttaaaatacgtactgattcttaatatcttagactttcagaataaataaaaagatcaaaatttgaagattgaaatttagcagaatataggctgttcttcaaatacagctctcagtgaaaa

SEQ ID NO: 202535 - DNA, 3144 bp, Homo sapiens
  Payload ID: 19940
  Gene Name: zinc finger protein 438
  Uniprot ID: Q7Z4V0
  ENST ID: ENST00000361310
  CDS Start-End: 331-2817
aattaattaaaaggatttacggtatatcttatgactctacaggagccttgggatatagataaaaatgaatgccatttcccatccagtactgaagtgttaaagttagaagacatttgctaagtcaaatcacttcaggaagctcatcctgggagtggaggaacagatgttctgtcattgccacattcttctggacacagactggagaactataggaatgtatgttgaagaaagtacgcacatcttatcttctgaacattttgatggaattaaccacaaacttcatgcaagaacagtaaaaggaaagatactattcaagtccagtacatcataatgcagaattctgtatcagtaccaccaaaagatgaaggtgaatcaaacatcccttctggaacaatacagagtaggaaaggtttgcagaataagagtcagtttaggaccattgcaccaaaaattgtgcccaaagtcctaacgtccagaatgctgccatgtcattcaccatcacgctctgatcaggtgaatctgggaccctccatcaactccaagctgctggggatgtccacccagaactatgccctgatgcaggttgctggccaggaggggacattttctcttgttgctctgccacatgttgcctcagctcagccaattcagaaacccagaatgtccctacctgaaaacctgaaacttcctattcctagatatcaaccccctagaaatagcaaagcatcaagaaagaaacccatcctgatctttcctaagagtggctgtagcaaagctcctgcccaaacccaaatgtgtcctcagatgtccccttccccacctcaccaccctgaactcctgtacaaacccagtccatttgaggaagtaccatcactagagcaagccccagccagcattagcacagctgcgctgaccaatggaagtgaccatggggacttgagaccaccagtgaccaacacccatggcagtctgaaccctcctgctaccccagcatcatccacaccagaggagcctgccaagcaggacctcacagctctttcagggaaagcacactttgtaagcaagataacatctagtaaaccttctgctgttgccagtgaaaaatttaaagaacaagttgatcttgcaaaaaccatgaccaatttatcaccaaccattcttggcaatgcagttcagttgatctcttcagtccccaaagggaaactgccaatcccaccctactcaagaatgaagacaatggaggtttacaaaatcaaatcagatgctaacattgcaggtttttctttaccaggacctaaggccgactgtgataagataccctccaccacagaaggctttaatgcagccaccaaggtggcaagcaggctacctgttccacaagtgtcacagcagagtgcctgtgaaagtgccttttgtccacccaccaaacttgatcttaaccacaaaacaaaactgaacagtggagcagcaaagagaaaaggaagaaaacggaaggtaccagatgaaattttggcatttcagggaaaaaggaggaaatatatcattaataagtgtagagatggtaaagaaagagtaaaaaatgatccccaagaattcagagaccaaaagctggggaccctgaaaaaataccgtagcattatgcccaaacctatcatggtcatacccactttggcctccctggcttctccaactacactacagtcccagatgcttgggggcctaggacaggatgttttgttaaataattcactcactcctaaatatcttggctgtaagcaagacaacagctcttcccctaagcccagctccgtgttcagaaatggattctctggcattaagaagccttggcacagatgtcacgtctgcaaccaccacttccagttcaaacagcaccttcgagaccacatgaatacacacaccaacagacgcccttacagttgtcggatttgtcgcaagtcctatgtacgtcctggcagcctgagcacacacatgaaacttcatcatggtgagaaccgtctgaagaaactcatgtgttgtgagttttgtgcaaaagtgtttggccacatccgagtctattttggccatctgaaagaagtgcatagggttgtgatcagcactgagcctgcgcccagtgaactgcagccaggagacataccaaagaacagagacatgagtgtgcgaggcatggagggatcattggagagggaaaacaagtccaacctggaagaagacttccttctaaaccaggcagacgaagtcaaattacaaatcaaatgtggtcgttgtcagattactgctcagtcttttgcggaaataaaatttcatttacttgatgttcatggagaggaaattgagggcaggctacaagaagggaccttcccaggaagcaaggggactcaggaagagttggtgcagcacgctagccccgactggaaaaggcatcctgagagagggaagccggagaaggttcattcctcctccgaggaatcacatgcatgtccaagactgaaaaggcagctccaccttcatcagaatggcgtggaaatgctcatggaaaatgaaggaccccagtcaggaaccaacaagccaagggaaacctgccagggccctgagtgtcctggcctccacacgtttctcttgtggtcccattcaggctttaactgcctgctttgtgcagagatgctgggacggaaagaggacctcctccaccactggaagcaccagcataactgtgaggacccttccaaactgtgggctattttaaatacggtctccaaccagggagtgatcgaactttccagtgaagctgagaaatgagaccccaaggcagcctggggttaaggagagagctctgccgccaccttccttcagagcttcgtgctttatggtggtgcttagtcacaaagatcaaacaacaggattggtgtgagtgaacagaaatgatttttgtacatggttttattttcttaacgaaataaaatataagctctcgaagcatatttttctaactatatgcagtcttattttaaaatacgtactgattcttaatatcttagactttcagaataaataaaaagatcaaaatttgaagattgaaatttagcagaatataggctgttcttcaaatacagctctcagtgaaaa

SEQ ID NO: 202536 - DNA, 2173 bp, Homo sapiens
  Payload ID: 19940
  Gene Name: zinc finger protein 438
  ENST ID: ENST00000375311
  CDS Start-End: 815-1993
gggggcccagcggcccgcgccccgtggcttgacctccccgactgctgggcccgtgacgtcaccccgctgtgacgcgcacgctgtaggaaaactataaaaatgaatgccatttcccatccagtactgaagtgttaaagttagaagacatttgctaagtcaaatcacttcaggtatgttgaagaaagtacgcacatcttatcttctgaacattttgatggaattaaccacaaacttcatgcaagaacagtaaaaggaaagatactattcaagtccagtacatcataatgcagaattctgtatcagtaccaccaaaagatgaaggtgaatcaaacatcccttctggaacaatacagagtaggaaaggtttgcagaataagagtcagtttaggaccattgcaccaaaaattgtgcccaaagtcctaacgtccagaatgctgccatgtcattcaccatcacgctctgatcaggacctaaggccgactgtgataagataccctccaccacagaaggctttaatgcagccaccaaggtggcaagcaggctacctgttccacaagtgtcacagcagagtgcctgtgaaagtgccttttgtccacccaccaaacttgatcttaaccacaaaacaaaactgaacagtggagcagcaaagagaaaaggaagaaaacggaaggtaccagatgaaattttggcatttcagggaaaaaggaggaaatatatcattaataagtgtagagatggtaaagaaagagtaaaaaatgatccccaagaattcagagaccaaaagctggggaccctgaaaaaataccgtagcattatgcccaaacctatcatggtcatacccactttggcctccctggcttctccaactacactacagtcccagatgcttgggggcctaggacaggatgttttgttaaataattcactcactcctaaatatcttggctgtaagcaagacaacagctcttcccctaagcccagctccgtgttcagaaatggattctctggcattaagaagccttggcacagatgtcacgtctgcaaccaccacttccagttcaaacagcaccttcgagaccacatgaatacacacaccaacagacgcccttacagttgtcggatttgtcgcaagtcctatgtacgtcctggcagcctgagcacacacatgaaacttcatcatggtgagaaccgtctgaagaaactcatgtgttgtgagttttgtgcaaaagtgtttggccacatccgagtctattttggccatctgaaagaagtgcatagggttgtgatcagcactgagcctgcgcccagtgaactgcagccaggagacataccaaagaacagagacatgagtgtgcgaggcatggagggatcattggagagggaaaacaagtccaacctggaagaagacttccttctaaaccaggcagacgaagtcaaattacaaatcaaatgtggtcgttgtcagattactgctcagtcttttgcggaaataaaatttcatttacttgatgttcatggagaggaaattgagggcaggctacaagaagggaccttcccaggaagcaaggggactcaggaagagttggtgcagcacgctagccccgactggaaaaggcatcctgagagagggaagccggagaaggttcattcctcctccgaggaatcacatgcatgtccaagactgaaaaggcagctccaccttcatcagaatggcgtggaaatgctcatggaaaatgaaggaccccagtcaggaaccaacaagccaagggaaacctgccagggccctgagtgtcctggcctccacacgtttctcttgtggtcccattcaggctttaactgcctgctttgtgcagagatgctgggacggaaagaggacctcctccaccactggaagcaccagcataactgtgaggacccttccaaactgtgggctattttaaatacggtctccaaccagggagtgatcgaactttccagtgaagctgagaaatgagaccccaaggcagcctggggttaaggagagagctctgccgccaccttccttcagagcttcgtgctttatggtggtgcttagtcacaaagatcaaacaacaggattggtgtgagtgaacagaaatgatttttgtacatggttttattttcttaacgaaataaaatataagctctcgaagca

SEQ ID NO: 202537 - DNA, 3106 bp, Homo sapiens
  Payload ID: 19940
  Gene Name: zinc finger protein 438
  Uniprot ID: Q7Z4V0
  ENST ID: ENST00000413025
  CDS Start-End: 297-2783
agggcggagcctgggggcccagcggcccgcgccccgtggcttgacctccccgactgctgggcccgtgacgtcaccccgctgtgacgcgcacgctgtaggaaaactataaaaatgaatgccatttcccatccagtactgaagtgttaaagttagaagacatttgctaagtcaaatcacttcaggtatgttgaagaaagtacgcacatcttatcttctgaacattttgatggaattaaccacaaacttcatgcaagaacagtaaaaggaaagatactattcaagtccagtacatcataatgcagaattctgtatcagtaccaccaaaagatgaaggtgaatcaaacatcccttctggaacaatacagagtaggaaaggtttgcagaataagagtcagtttaggaccattgcaccaaaaattgtgcccaaagtcctaacgtccagaatgctgccatgtcattcaccatcacgctctgatcaggtgaatctgggaccctccatcaactccaagctgctggggatgtccacccagaactatgccctgatgcaggttgctggccaggaggggacattttctcttgttgctctgccacatgttgcctcagctcagccaattcagaaacccagaatgtccctacctgaaaacctgaaacttcctattcctagatatcaaccccctagaaatagcaaagcatcaagaaagaaacccatcctgatctttcctaagagtggctgtagcaaagctcctgcccaaacccaaatgtgtcctcagatgtccccttccccacctcaccaccctgaactcctgtacaaacccagtccatttgaggaagtaccatcactagagcaagccccagccagcattagcacagctgcgctgaccaatggaagtgaccatggggacttgagaccaccagtgaccaacacccatggcagtctgaaccctcctgctaccccagcatcatccacaccagaggagcctgccaagcaggacctcacagctctttcagggaaagcacactttgtaagcaagataacatctagtaaaccttctgctgttgccagtgaaaaatttaaagaacaagttgatcttgcaaaaaccatgaccaatttatcaccaaccattcttggcaatgcagttcagttgatctcttcagtccccaaagggaaactgccaatcccaccctactcaagaatgaagacaatggaggtttacaaaatcaaatcagatgctaacattgcaggtttttctttaccaggacctaaggccgactgtgataagataccctccaccacagaaggctttaatgcagccaccaaggtggcaagcaggctacctgttccacaagtgtcacagcagagtgcctgtgaaagtgccttttgtccacccaccaaacttgatcttaaccacaaaacaaaactgaacagtggagcagcaaagagaaaaggaagaaaacggaaggtaccagatgaaattttggcatttcagggaaaaaggaggaaatatatcattaataagtgtagagatggtaaagaaagagtaaaaaatgatccccaagaattcagagaccaaaagctggggaccctgaaaaaataccgtagcattatgcccaaacctatcatggtcatacccactttggcctccctggcttctccaactacactacagtcccagatgcttgggggcctaggacaggatgttttgttaaataattcactcactcctaaatatcttggctgtaagcaagacaacagctcttcccctaagcccagctccgtgttcagaaatggattctctggcattaagaagccttggcacagatgtcacgtctgcaaccaccacttccagttcaaacagcaccttcgagaccacatgaatacacacaccaacagacgcccttacagttgtcggatttgtcgcaagtcctatgtacgtcctggcagcctgagcacacacatgaaacttcatcatggtgagaaccgtctgaagaaactcatgtgttgtgagttttgtgcaaaagtgtttggccacatccgagtctattttggccatctgaaagaagtgcatagggttgtgatcagcactgagcctgcgcccagtgaactgcagccaggagacataccaaagaacagagacatgagtgtgcgaggcatggagggatcattggagagggaaaacaagtccaacctggaagaagacttccttctaaaccaggcagacgaagtcaaattacaaatcaaatgtggtcgttgtcagattactgctcagtcttttgcggaaataaaatttcatttacttgatgttcatggagaggaaattgagggcaggctacaagaagggaccttcccaggaagcaaggggactcaggaagagttggtgcagcacgctagccccgactggaaaaggcatcctgagagagggaagccggagaaggttcattcctcctccgaggaatcacatgcatgtccaagactgaaaaggcagctccaccttcatcagaatggcgtggaaatgctcatggaaaatgaaggaccccagtcaggaaccaacaagccaagggaaacctgccagggccctgagtgtcctggcctccacacgtttctcttgtggtcccattcaggctttaactgcctgctttgtgcagagatgctgggacggaaagaggacctcctccaccactggaagcaccagcataactgtgaggacccttccaaactgtgggctattttaaatacggtctccaaccagggagtgatcgaactttccagtgaagctgagaaatgagaccccaaggcagcctggggttaaggagagagctctgccgccaccttccttcagagcttcgtgctttatggtggtgcttagtcacaaagatcaaacaacaggattggtgtgagtgaacagaaatgatttttgtacatggttttattttcttaacgaaataaaatataagctctcgaagcatatttttctaactatatgcagtcttattttaaaatacgtactgattcttaatatcttagactttcagaataaataaaaagatcaaaatttgaagattgaaatttagcagaatataggctgttcttcaaatacagctctcagtg

SEQ ID NO: 202538 - DNA, 3164 bp, Homo sapiens
  Payload ID: 19940
  Gene Name: zinc finger protein 438
  Uniprot ID: Q7Z4V0
  ENST ID: ENST00000436087
  CDS Start-End: 355-2841
agggcggagcctgggggcccagcggcccgcgccccgtggcttgacctccccgactgctgggcccgtgacgtcaccccgctgtgacgcgcacgctgtaggaaaactaattaattaaaaggatttacggtatatcttatgactctacaggagccttgggatatagataaaaatgaatgccatttcccatccagtactgaagtgttaaagttagaagacatttgctaagtcaaatcacttcaggtatgttgaagaaagtacgcacatcttatcttctgaacattttgatggaattaaccacaaacttcatgcaagaacagtaaaaggaaagatactattcaagtccagtacatcataatgcagaattctgtatcagtaccaccaaaagatgaaggtgaatcaaacatcccttctggaacaatacagagtaggaaaggtttgcagaataagagtcagtttaggaccattgcaccaaaaattgtgcccaaagtcctaacgtccagaatgctgccatgtcattcaccatcacgctctgatcaggtgaatctgggaccctccatcaactccaagctgctggggatgtccacccagaactatgccctgatgcaggttgctggccaggaggggacattttctcttgttgctctgccacatgttgcctcagctcagccaattcagaaacccagaatgtccctacctgaaaacctgaaacttcctattcctagatatcaaccccctagaaatagcaaagcatcaagaaagaaacccatcctgatctttcctaagagtggctgtagcaaagctcctgcccaaacccaaatgtgtcctcagatgtccccttccccacctcaccaccctgaactcctgtacaaacccagtccatttgaggaagtaccatcactagagcaagccccagccagcattagcacagctgcgctgaccaatggaagtgaccatggggacttgagaccaccagtgaccaacacccatggcagtctgaaccctcctgctaccccagcatcatccacaccagaggagcctgccaagcaggacctcacagctctttcagggaaagcacactttgtaagcaagataacatctagtaaaccttctgctgttgccagtgaaaaatttaaagaacaagttgatcttgcaaaaaccatgaccaatttatcaccaaccattcttggcaatgcagttcagttgatctcttcagtccccaaagggaaactgccaatcccaccctactcaagaatgaagacaatggaggtttacaaaatcaaatcagatgctaacattgcaggtttttctttaccaggacctaaggccgactgtgataagataccctccaccacagaaggctttaatgcagccaccaaggtggcaagcaggctacctgttccacaagtgtcacagcagagtgcctgtgaaagtgccttttgtccacccaccaaacttgatcttaaccacaaaacaaaactgaacagtggagcagcaaagagaaaaggaagaaaacggaaggtaccagatgaaattttggcatttcagggaaaaaggaggaaatatatcattaataagtgtagagatggtaaagaaagagtaaaaaatgatccccaagaattcagagaccaaaagctggggaccctgaaaaaataccgtagcattatgcccaaacctatcatggtcatacccactttggcctccctggcttctccaactacactacagtcccagatgcttgggggcctaggacaggatgttttgttaaataattcactcactcctaaatatcttggctgtaagcaagacaacagctcttcccctaagcccagctccgtgttcagaaatggattctctggcattaagaagccttggcacagatgtcacgtctgcaaccaccacttccagttcaaacagcaccttcgagaccacatgaatacacacaccaacagacgcccttacagttgtcggatttgtcgcaagtcctatgtacgtcctggcagcctgagcacacacatgaaacttcatcatggtgagaaccgtctgaagaaactcatgtgttgtgagttttgtgcaaaagtgtttggccacatccgagtctattttggccatctgaaagaagtgcatagggttgtgatcagcactgagcctgcgcccagtgaactgcagccaggagacataccaaagaacagagacatgagtgtgcgaggcatggagggatcattggagagggaaaacaagtccaacctggaagaagacttccttctaaaccaggcagacgaagtcaaattacaaatcaaatgtggtcgttgtcagattactgctcagtcttttgcggaaataaaatttcatttacttgatgttcatggagaggaaattgagggcaggctacaagaagggaccttcccaggaagcaaggggactcaggaagagttggtgcagcacgctagccccgactggaaaaggcatcctgagagagggaagccggagaaggttcattcctcctccgaggaatcacatgcatgtccaagactgaaaaggcagctccaccttcatcagaatggcgtggaaatgctcatggaaaatgaaggaccccagtcaggaaccaacaagccaagggaaacctgccagggccctgagtgtcctggcctccacacgtttctcttgtggtcccattcaggctttaactgcctgctttgtgcagagatgctgggacggaaagaggacctcctccaccactggaagcaccagcataactgtgaggacccttccaaactgtgggctattttaaatacggtctccaaccagggagtgatcgaactttccagtgaagctgagaaatgagaccccaaggcagcctggggttaaggagagagctctgccgccaccttccttcagagcttcgtgctttatggtggtgcttagtcacaaagatcaaacaacaggattggtgtgagtgaacagaaatgatttttgtacatggttttattttcttaacgaaataaaatataagctctcgaagcatatttttctaactatatgcagtcttattttaaaatacgtactgattcttaatatcttagactttcagaataaataaaaagatcaaaatttgaagattgaaatttagcagaatataggctgttcttcaaatacagctctcagtg

SEQ ID NO: 202539 - DNA, 3245 bp, Homo sapiens
  Payload ID: 19940
  Gene Name: zinc finger protein 438
  Uniprot ID: Q7Z4V0
  ENST ID: ENST00000442986
  CDS Start-End: 436-2922
agggcggagcctgggggcccagcggcccgcgccccgtggcttgacctccccgactgctgggcccgtgacgtcaccccgctgtgacgcgcacgctgtaggaaaactaattaattaaaaggatttacggtatatcttatgactctacaggagccttgggatatagataaaaatgaatgccatttcccatccagtactgaagtgttaaagttagaagacatttgctaagtcaaatcacttcaggaagctcatcctgggagtggaggaacagatgttctgtcattgccacattcttctggacacagactggagaactataggaatgtatgttgaagaaagtacgcacatcttatcttctgaacattttgatggaattaaccacaaacttcatgcaagaacagtaaaaggaaagatactattcaagtccagtacatcataatgcagaattctgtatcagtaccaccaaaagatgaaggtgaatcaaacatcccttctggaacaatacagagtaggaaaggtttgcagaataagagtcagtttaggaccattgcaccaaaaattgtgcccaaagtcctaacgtccagaatgctgccatgtcattcaccatcacgctctgatcaggtgaatctgggaccctccatcaactccaagctgctggggatgtccacccagaactatgccctgatgcaggttgctggccaggaggggacattttctcttgttgctctgccacatgttgcctcagctcagccaattcagaaacccagaatgtccctacctgaaaacctgaaacttcctattcctagatatcaaccccctagaaatagcaaagcatcaagaaagaaacccatcctgatctttcctaagagtggctgtagcaaagctcctgcccaaacccaaatgtgtcctcagatgtccccttccccacctcaccaccctgaactcctgtacaaacccagtccatttgaggaagtaccatcactagagcaagccccagccagcattagcacagctgcgctgaccaatggaagtgaccatggggacttgagaccaccagtgaccaacacccatggcagtctgaaccctcctgctaccccagcatcatccacaccagaggagcctgccaagcaggacctcacagctctttcagggaaagcacactttgtaagcaagataacatctagtaaaccttctgctgttgccagtgaaaaatttaaagaacaagttgatcttgcaaaaaccatgaccaatttatcaccaaccattcttggcaatgcagttcagttgatctcttcagtccccaaagggaaactgccaatcccaccctactcaagaatgaagacaatggaggtttacaaaatcaaatcagatgctaacattgcaggtttttctttaccaggacctaaggccgactgtgataagataccctccaccacagaaggctttaatgcagccaccaaggtggcaagcaggctacctgttccacaagtgtcacagcagagtgcctgtgaaagtgccttttgtccacccaccaaacttgatcttaaccacaaaacaaaactgaacagtggagcagcaaagagaaaaggaagaaaacggaaggtaccagatgaaattttggcatttcagggaaaaaggaggaaatatatcattaataagtgtagagatggtaaagaaagagtaaaaaatgatccccaagaattcagagaccaaaagctggggaccctgaaaaaataccgtagcattatgcccaaacctatcatggtcatacccactttggcctccctggcttctccaactacactacagtcccagatgcttgggggcctaggacaggatgttttgttaaataattcactcactcctaaatatcttggctgtaagcaagacaacagctcttcccctaagcccagctccgtgttcagaaatggattctctggcattaagaagccttggcacagatgtcacgtctgcaaccaccacttccagttcaaacagcaccttcgagaccacatgaatacacacaccaacagacgcccttacagttgtcggatttgtcgcaagtcctatgtacgtcctggcagcctgagcacacacatgaaacttcatcatggtgagaaccgtctgaagaaactcatgtgttgtgagttttgtgcaaaagtgtttggccacatccgagtctattttggccatctgaaagaagtgcatagggttgtgatcagcactgagcctgcgcccagtgaactgcagccaggagacataccaaagaacagagacatgagtgtgcgaggcatggagggatcattggagagggaaaacaagtccaacctggaagaagacttccttctaaaccaggcagacgaagtcaaattacaaatcaaatgtggtcgttgtcagattactgctcagtcttttgcggaaataaaatttcatttacttgatgttcatggagaggaaattgagggcaggctacaagaagggaccttcccaggaagcaaggggactcaggaagagttggtgcagcacgctagccccgactggaaaaggcatcctgagagagggaagccggagaaggttcattcctcctccgaggaatcacatgcatgtccaagactgaaaaggcagctccaccttcatcagaatggcgtggaaatgctcatggaaaatgaaggaccccagtcaggaaccaacaagccaagggaaacctgccagggccctgagtgtcctggcctccacacgtttctcttgtggtcccattcaggctttaactgcctgctttgtgcagagatgctgggacggaaagaggacctcctccaccactggaagcaccagcataactgtgaggacccttccaaactgtgggctattttaaatacggtctccaaccagggagtgatcgaactttccagtgaagctgagaaatgagaccccaaggcagcctggggttaaggagagagctctgccgccaccttccttcagagcttcgtgctttatggtggtgcttagtcacaaagatcaaacaacaggattggtgtgagtgaacagaaatgatttttgtacatggttttattttcttaacgaaataaaatataagctctcgaagcatatttttctaactatatgcagtcttattttaaaatacgtactgattcttaatatcttagactttcagaataaataaaaagatcaaaatttgaagattgaaatttagcagaatataggctgttcttcaaatacagctctcagtg

SEQ ID NO: 202540 - DNA, 3344 bp, Homo sapiens
  Payload ID: 19940
  Gene Name: zinc finger protein 438
  Uniprot ID: Q7Z4V0
  ENST ID: ENST00000452305
  CDS Start-End: 565-3021
agggcggagcctgggggcccagcggcccgcgccccgtggcttgacctccccgactgctgggcccgtgacgtcaccccgctgtgacgcgcacgctgtaggaaaactaattaattaaaaggatttacggtatatcttatgactctacaggagccttgggatatagataaaaatgaatgccatttcccatccagtactgaagtgttaaagttagaagacatttgctaagtcaaatcacttcaggaagctcatcctgggagtggaggaacagatgttctgtcattgccacattcttctggacacagactggagaactataggaatgtatgttgaagaaagtacgcacatcttatcttctgaacattttgatggaattaaccacaaacttcatgcaagaacagtaaaaggaaagatactattcaagtccagtacatcataatgcagaattctgtatcagtaccaccaaaagatgaagatccaatcctttgatggcaatggaggaggaggaggacacacgttgcacattctccaaatatccaacagcctttctggatttctcagagtcctatggatagtgaatcaaacatcccttctggaacaatacagagtaggaaaggtttgcagaataagagtcagtttaggaccattgcaccaaaaattgtgcccaaagtcctaacgtccagaatgctgccatgtcattcaccatcacgctctgatcaggtgaatctgggaccctccatcaactccaagctgctggggatgtccacccagaactatgccctgatgcaggttgctggccaggaggggacattttctcttgttgctctgccacatgttgcctcagctcagccaattcagaaacccagaatgtccctacctgaaaacctgaaacttcctattcctagatatcaaccccctagaaatagcaaagcatcaagaaagaaacccatcctgatctttcctaagagtggctgtagcaaagctcctgcccaaacccaaatgtgtcctcagatgtccccttccccacctcaccaccctgaactcctgtacaaacccagtccatttgaggaagtaccatcactagagcaagccccagccagcattagcacagctgcgctgaccaatggaagtgaccatggggacttgagaccaccagtgaccaacacccatggcagtctgaaccctcctgctaccccagcatcatccacaccagaggagcctgccaagcaggacctcacagctctttcagggaaagcacactttgtaagcaagataacatctagtaaaccttctgctgttgccagtgaaaaatttaaagaacaagttgatcttgcaaaaaccatgaccaatttatcaccaaccattcttggcaatgcagttcagttgatctcttcagtccccaaagggaaactgccaatcccaccctactcaagaatgaagacaatggaggtttacaaaatcaaatcagatgctaacattgcaggtttttctttaccaggacctaaggccgactgtgataagataccctccaccacagaaggctttaatgcagccaccaaggtggcaagcaggctacctgttccacaagtgtcacagcagagtgcctgtgaaagtgccttttgtccacccaccaaacttgatcttaaccacaaaacaaaactgaacagtggagcagcaaagagaaaaggaagaaaacggaaggtaccagatgaaattttggcatttcagggaaaaaggaggaaatatatcattaataagtgtagagatggtaaagaaagagtaaaaaatgatccccaagaattcagagaccaaaagctggggaccctgaaaaaataccgtagcattatgcccaaacctatcatggtcatacccactttggcctccctggcttctccaactacactacagtcccagatgcttgggggcctaggacaggatgttttgttaaataattcactcactcctaaatatcttggctgtaagcaagacaacagctcttcccctaagcccagctccgtgttcagaaatggattctctggcattaagaagccttggcacagatgtcacgtctgcaaccaccacttccagttcaaacagcaccttcgagaccacatgaatacacacaccaacagacgcccttacagttgtcggatttgtcgcaagtcctatgtacgtcctggcagcctgagcacacacatgaaacttcatcatggtgagaaccgtctgaagaaactcatgtgttgtgagttttgtgcaaaagtgtttggccacatccgagtctattttggccatctgaaagaagtgcatagggttgtgatcagcactgagcctgcgcccagtgaactgcagccaggagacataccaaagaacagagacatgagtgtgcgaggcatggagggatcattggagagggaaaacaagtccaacctggaagaagacttccttctaaaccaggcagacgaagtcaaattacaaatcaaatgtggtcgttgtcagattactgctcagtcttttgcggaaataaaatttcatttacttgatgttcatggagaggaaattgagggcaggctacaagaagggaccttcccaggaagcaaggggactcaggaagagttggtgcagcacgctagccccgactggaaaaggcatcctgagagagggaagccggagaaggttcattcctcctccgaggaatcacatgcatgtccaagactgaaaaggcagctccaccttcatcagaatggcgtggaaatgctcatggaaaatgaaggaccccagtcaggaaccaacaagccaagggaaacctgccagggccctgagtgtcctggcctccacacgtttctcttgtggtcccattcaggctttaactgcctgctttgtgcagagatgctgggacggaaagaggacctcctccaccactggaagcaccagcataactgtgaggacccttccaaactgtgggctattttaaatacggtctccaaccagggagtgatcgaactttccagtgaagctgagaaatgagaccccaaggcagcctggggttaaggagagagctctgccgccaccttccttcagagcttcgtgctttatggtggtgcttagtcacaaagatcaaacaacaggattggtgtgagtgaacagaaatgatttttgtacatggttttattttcttaacgaaataaaatataagctctcgaagcatatttttctaactatatgcagtcttattttaaaatacgtactgattcttaatatcttagactttcagaataaataaaaagatcaaaatttgaagattgaaatttagcagaatataggctgttcttcaaatacagctctcagtg

SEQ ID NO: 202541 - DNA, 3284 bp, Homo sapiens
  Payload ID: 19940
  Gene Name: zinc finger protein 438
  Uniprot ID: Q7Z4V0
  ENST ID: ENST00000538351
  CDS Start-End: 756-3095
attaagctgagaccagaaggctgagtggtggtgacctacaagaagaagaagggaaggtcataacagtaatgacttggagtggagaggccctgcaggttggagaagttcagtgtggctcaccatggagtgtcagagtgagggagatgactgctgagctccgagaggtgaacagagcccctgaattaattaaaaggatttacggtatatcttatgactctacaggagccttgggatatagataaaaatgaatgccatttcccatccagtactgaagtgttaaagttagaagacatttgctaagtcaaatcacttcaggtatgttgaagaaagtacgcacatcttatcttctgaacattttgatggaattaaccacaaacttcatgcaagaacagtaaaaggaaagatactattcaagtccagtacatcataatgcagaattctgtatcagtaccaccaaaagatgaagcaagcaaggagaagcttaggagaaaaaataatggaacaagtatcaggaaagctggactccattccatacctgcctccaaccagctgtggaaccccaggcaaagttattttgcccctgagcctcagttttctcattgaaaaatcgagaatgactaggtgttcctttcaggctctaaaaaggtgaatcaaacatcccttctggaacaatacagagtaggaaaggtttgcagaataagagtcagtttaggaccattgcaccaaaaattgtgcccaaagtcctaacgtccagaatgctgccatgtcattcaccatcacgctctgatcaggtgaatctgggaccctccatcaactccaagctgctggggatgtccacccagaactatgccctgatgcaggttgctggccaggaggggacattttctcttgttgctctgccacatgttgcctcagctcagccaattcagaaacccagaatgtccctacctgaaaacctgaaacttcctattcctagatatcaaccccctagaaatagcaaagcatcaagaaagaaacccatcctgatctttcctaagagtggctgtagcaaagctcctgcccaaacccaaatgtgtcctcagatgtccccttccccacctcaccaccctgaactcctgtacaaacccagtccatttgaggaagtaccatcactagagcaagccccagccagcattagcacagctgcgctgaccaatggaagtgaccatggggacttgagaccaccagtgaccaacacccatggcagtctgaaccctcctgctaccccagcatcatccacaccagaggagcctgccaagcaggacctcacagctctttcagggaaagcacactttgtaagcaagataacatctagtaaaccttctgctgttgccagtgaaaaatttaaagaacaagttgatcttgcaaaaaccatgaccaatttatcaccaaccattcttggcaatgcagttcagttgatctcttcagtccccaaagggaaactgccaatcccaccctactcaagaatgaagacaatggaggtttacaaaatcaaatcagatgctaacattgcaggtttttctttaccaggacctaaggccgactgtgataagataccctccaccacagaaggctttaatgcagccaccaaggtggcaagcaggctacctgttccacaagtgtcacagcagagtgcctgtgaaagtgccttttgtccacccaccaaacttgatcttaaccacaaaacaaaactgaacagtggagcagcaaagagaaaaggaagaaaacggaaggtaccagatgaaattttggcatttcagggaaaaaggaggaaatatatcattaataagtgtagagatggtaaagaaagagtaaaaaatgatccccaagaattcagagaccaaaagctggggaccctgaaaaaataccgtagcattatgcccaaacctatcatggtcatacccactttggcctccctggcttctccaactacactacagtcccagatgcttgggggcctaggacaggatgttttgttaaataattcactcactcctaaatatcttggctgtaagcaagacaacagctcttcccctaagcccagctccgtgttcagaaatggattctctggcattaagaagccttggcacagatgtcacgtctgcaaccaccacttccagttcaaacagcaccttcgagaccacatgaatacacacaccaacagacgcccttacagttgtcggatttgtcgcaagtcctatgtacgtcctggcagcctgagcacacacatgaaacttcatcatggtgagaaccgtctgaagaaactcatgtgttgtgagttttgtgcaaaagtgtttggccacatccgagtctattttggccatctgaaagaagtgcatagggttgtgatcagcactgagcctgcgcccagtgaactgcagccaggagacataccaaagaacagagacatgagtgtgcgaggcatggagggatcattggagagggaaaacaagtccaacctggaagaagacttccttctaaaccaggcagacgaagtcaaattacaaatcaaatgtggtcgttgtcagattactgctcagtcttttgcggaaataaaatttcatttacttgatgttcatggagaggaaattgagggcaggctacaagaagggaccttcccaggaagcaaggggactcaggaagagttggtgcagcacgctagccccgactggaaaaggcatcctgagagagggaagccggagaaggttcattcctcctccgaggaatcacatgcatgtccaagactgaaaaggcagctccaccttcatcagaatggcgtggaaatgctcatggaaaatgaaggaccccagtcaggaaccaacaagccaagggaaacctgccagggccctgagtgtcctggcctccacacgtttctcttgtggtcccattcaggctttaactgcctgctttgtgcagagatgctgggacggaaagaggacctcctccaccactggaagcaccagcataactgtgaggacccttccaaactgtgggctattttaaatacggtctccaaccagggagtgatcgaactttccagtgaagctgagaaatgagaccccaaggcagcctggggttaaggagagagctctgccgccaccttccttcagagcttcgtgctttatggtggtgcttagtcacaaagatcaaacaacaggattggtgtgagtgaacagaaatgatttttgtacatggttttattttcttaacgaaataaaatataagctctcgaagcatatttttct

SEQ ID NO: 202542 - DNA, 857 bp, Homo sapiens
  Payload ID: 19940
  Gene Name: zinc finger protein 438
  ENST ID: ENST00000609683
  CDS Start-End: 217-504
aagaaaatgaaactgtcaaatgaaaacaacattggaaggagtacaagagaaaaagatgatacaggaaaaacagtgaggtcatggaaattagacatgagagaggtatgttgaagaaagtacgcacatcttatcttctgaacattttgatggaattaaccacaaacttcatgcaagaacagtaaaaggaaagatactattcaagtccagtacatcataatgcagaattctgtatcagtaccaccaaaagatgaaggtgaatcaaacatcccttctggaacaatacagagtaggaaaggtttgcagaataagagtcagtttaggaccattgcaccaaaaattgtgcccaaagtcctaacgtccagaatgctgccatgtcattcaccatcacgctctgatcaggtcagatgcccagggccactgaagagaaaactccgcttttcatttagctgtcacttggcccaaaccagtcaaagattcatcaacatcgttgtgaaaatgtcttaaatggacaattcttctagaagacaattaaaataagacagaaaagatgggcaaccgctgaaaaataactaccatcagagtcttcaaatgggacacattccagagttgcattctaaagatggaggaatgggggctcacagccttatctaatctccaaatgaagaatgggcccatctgacatatcctatgagcacaaagcttaggggactcttcaccgaaacctagacaaatatttgaatgcattttttttttttttttttggaaagggagataacgtccaatgggtctgttttataatgcatttgtgtaaggggaacgggaggaaatgagatttaaaaataaaactgtttacttca

SEQ ID NO: 202543 - DNA, 2622 bp, Homo sapiens
  Payload ID: 19941
  Gene Name: zinc finger protein 439
  Uniprot ID: Q8NDP4
  ENST ID: ENST00000304030
  CDS Start-End: 201-1700
gtgagccgagattgcaccattgtactccagcctgggcaataagagtgaaattctgtctcaaaaaaataaaaaaaaaaattgctttatggaagaaagtaagtatagacagagagaaagggatctgatgaccaaagcagggaataaatgtttggagtccacggcatcctgagaacttcttgggaatagagtctaggcccccaatgctgtcactctcacccatcctcctctacacatgtgagatgtttcaggacccagtggcttttaaggatgtggctgtgaacttcacccaggaggagtgggctttgctggatatttcccagaagaatctctacagggaagtgatgctggaaactttctggaacctgacctctataggaaaaaagtggaaagaccagaacattgaatatgagtaccaaaaccccaggagaaacttcaggagtgtcacagaagagaaagtcaatgaaattaaagaagacagtcattgtggagaaacttttaccccagttccagatgacaggctgaacttccagaagaagaaagcttctcctgaagtaaaatcatgtgacagctttgtgtgtgaagttggcctaggtaactcatcttctaatatgaacatcagaggtgacactggacacaaggcatgtgaatgtcaggaatatggaccaaagccatggaagagtcaacaacctaaaaaagccttcagatatcacccctccttgagaacacaagaaagggatcacactggaaagaaaccctatgcttgtaaagaatgtggaaaaaacattatttaccattcaagcattcaaagacacatggtagtgcacagtggggatggaccttataaatgtaagttttgtgggaaagcattccattgtctcagtttatatcttatccatgaaagaactcacactggagagaaaccgtatgaatgtaaacaatgtggtaaatcttttagttattctgctacccatcgaatacatgaaagaactcacattggagaaaagccttatgaatgtcaggaatgtgggaaagcattccatagtcccagatcctgtcacagacatgaaaggagtcacatgggagagaaggcttatcaatgtaaggaatgtggaaaagcattcatgtgtccccgttatgttcgtagacatgaaaggacccactctaggaaaaaactttatgaatgtaagcagtgtgggaaagcattatcctctcttacaagttttcaaacacacataagaatgcactctggagaaagaccttatgaatgtaagacatgtgggaaaggcttttattctgccaagtcatttcaaagacatgaaaaaactcacagtggagagaaaccgtataaatgcaagcaatgtggtaaagccttcactcgttccggttcctttcgatatcatgaaaggactcacactggagagaaaccctatgagtgtaagcaatgtgggaaagccttcagatctgccccaaatcttcaattgcatggtaggactcacactggagagaaaccgtatcaatgtaaggaatgtgggaaagctttcagatctgcctcacaacttcgaatccatcgtaggattcacactggagagaaaccctatgaatgtaagaaatgtgggaaagccttcagatatgtccagaactttcgatttcatgaaaggacacaaacacataagaatgcactctggagaaagaccttataaatataagatatatgggaaacacttttattctgccaagttatttcaaacacatgaaaaaattcacactggagagaaaccctataaatgcaagcaatgtggtaaagccttaattgttccagttcctttcgatatctaaaaggactcacagtggagaaaaactctatgagtgtaagcaatgtgggaaagtcttcagatctgtcaagaacctttcaatttatgaaaggacacacactggagagaaaccctatgaatgtaagaaatgtggaaaagcgttccataatttctcttcttttcaaatacatgaaagttgcacagaggagaggcgccctaagaatgtaagcattgtgggaaagcattcatatctgccaagatcgtttgaatacatgcaaaacacacactggagagaaacctatgaatgtaaggaatgcaaacaagcattcaattatttttcttccttgcatatacatgaaaggactcatacgagagagaatccgtatgaatgtaaggattgtgggaaagcattcagcttgcttaattgctttcatagacatgtaaagacacaccagaaggaaaccctatgaatgtaagcaatgtggcaaaagctttcacttcttccagttcttttcaatatcatgaaaggactcacactggggagaaaccgtatcaatgtaagcaatgtgggaaagccgtcagatcagcctcaagacttcaaatgcatggaagcactcacacttggcagaaactctatgaatgtaagcagtatgggaaagccttcagatcggctaggattctttgaatacaaataatgaatgtaaacaattaactgtttataataactgtatactaacaaatgttattctttttaaataattaagaagctataataaaatatccattggtgtcatgtattagatcaagctta

SEQ ID NO: 202544 - DNA, 605 bp, Homo sapiens
  Payload ID: 19941
  Gene Name: zinc finger protein 439
  ENST ID: ENST00000442091
  CDS Start-End: 252-605
ggccgctggatgtgggtgggccggcagccgggactccgggcgtcctgtcccgtccctgcccgtcgactgcggccttggccccgaagcccttttgtgcagctccgcgcccgcagcccgacgccccagcttgtgcgggggccacgggagggtcatgcgcggatttcgactcgggtgtggatttcgtccgtaggaggagcagcggtctgtggggcccacagcctccactttctcctgttaaaaattatactgagatgtttcaggacccagtggcttttaaggatgtggctgtgaacttcacccaggaggagtgggctttgctggatatttcccagaagaatctctacagggaagtgatgctggaaactttctggaacctgacctctataggaaaaaagtggaaagaccagaacattgaatatgagtaccaaaaccccaggagaaacttcaggagtgtcacagaagagaaagtcaatgaaattaaagaagacagtcattgtggagaaacttttaccccagttccagatgacaggctgaacttccagaagaagaaagcttctcctgaagtaaaatcatgtgacagctttgtgtgtgaagttggcctaggt

SEQ ID NO: 202545 - DNA, 2408 bp, Homo sapiens
  Payload ID: 19941
  Gene Name: zinc finger protein 439
  ENST ID: ENST00000455282
  CDS Start-End: 404-1495
gccgtcacctttgtcgctgcgagggcggcggttgggatctggcctttccagccccgagagggacctagtgcctctacccagatttctgtcgctctgtcacctgcgctatgccctgctttactcacaggagctgtagagaggaccccggtacatctgaaagccgggaaatggaaaaaagtggaaagaccagaacattgaatatgagtaccaaaaccccaggagaaacttcaggagtgtcacagaagagaaagtcaatgaaattaaagaagacagtcattgtggagaaacttttaccccagttccagatgacaggctgaacttccagaagaagaaagcttctcctgaagtaaaatcatgtgacagctttgtgtgtgaagttggcctaggtaactcatcttctaatatgaacatcagaggtgacactggacacaaggcatgtgaatgtcaggaatatggaccaaagccatggaagagtcaacaacctaaaaaagccttcagatatcacccctccttgagaacacaagaaagggatcacactggaaagaaaccctatgcttgtaaagaatgtggaaaaaacattatttaccattcaagcattcaaagacacatggtagtgcacagtggggatggaccttataaatgtaagttttgtgggaaagcattccattgtctcagtttatatcttatccatgaaagaactcacactggagagaaaccgtatgaatgtaaacaatgtggtaaatcttttagttattctgctacccatcgaatacatgaaagaactcacattggagaaaagccttatgaatgtcaggaatgtgggaaagcattccatagtcccagatcctgtcacagacatgaaaggagtcacatgggagagaaggcttatcaatgtaaggaatgtggaaaagcattcatgtgtccccgttatgttcgtagacatgaaaggacccactctaggaaaaaactttatgaatgtaagcagtgtgggaaagcattatcctctcttacaagttttcaaacacacataagaatgcactctggagaaagaccttatgaatgtaagacatgtgggaaaggcttttattctgccaagtcatttcaaagacatgaaaaaactcacagtggagagaaaccgtataaatgcaagcaatgtggtaaagccttcactcgttccggttcctttcgatatcatgaaaggactcacactggagagaaaccctatgagtgtaagcaatgtgggaaagccttcagatctgccccaaatcttcaattgcatggtaggactcacactggagagaaaccgtatcaatgtaaggaatgtgggaaagctttcagatctgcctcacaacttcgaatccatcgtaggattcacactggagagaaaccctatgaatgtaagaaatgtgggaaagccttcagatatgtccagaactttcgatttcatgaaaggacacaaacacataagaatgcactctggagaaagaccttataaatataagatatatgggaaacacttttattctgccaagttatttcaaacacatgaaaaaattcacactggagagaaaccctataaatgcaagcaatgtggtaaagccttaattgttccagttcctttcgatatctaaaaggactcacagtggagaaaaactctatgagtgtaagcaatgtgggaaagtcttcagatctgtcaagaacctttcaatttatgaaaggacacacactggagagaaaccctatgaatgtaagaaatgtggaaaagcgttccataatttctcttcttttcaaatacatgaaagttgcacagaggagaggcgccctaagaatgtaagcattgtgggaaagcattcatatctgccaagatcgtttgaatacatgcaaaacacacactggagagaaacctatgaatgtaaggaatgcaaacaagcattcaattatttttcttccttgcatatacatgaaaggactcatacgagagagaatccgtatgaatgtaaggattgtgggaaagcattcagcttgcttaattgctttcatagacatgtaaagacacaccagaaggaaaccctatgaatgtaagcaatgtggcaaaagctttcacttcttccagttcttttcaatatcatgaaaggactcacactggggagaaaccgtatcaatgtaagcaatgtgggaaagccgtcagatcagcctcaagacttcaaatgcatggaagcactcacacttggcagaaactctatgaatgtaagcagtatgggaaagccttcagatcggctaggattctttgaatacaaataatgaatgtaaacaattaactgtttataataactgtatactaacaaatgttattctttttaaataattaagaagctataataaaatatccattggtgtcatgtattaga

SEQ ID NO: 202546 - DNA, 517 bp, Homo sapiens
  Payload ID: 19942
  Gene Name: zinc finger protein 44
  ENST ID: ENST00000354656
  CDS Start-End: 158-352
gacgttccaggagctagtggcctcttcaccctggtgacctctgttccgtattctgtcactgagagacgccctgggacatctgtggtggcttttgtcgcgctgggacctaccctgactacgggagttgggaggacccgggacaccgcacagccgggaaatggccctgtgttatggaactttctggggctaccctaagatgctggaagctgccaatctcatggagggcctagtggatatcggcccttgggtcactcttcccagaggacagcctgaggtgttggagtggggcctcccaaaggatcaggctggagaacttgggacagtggataagtctggactcagtggcctttgaggatgtggctgtgaacttcacccatgaggagtgggctttgctgggtccatcacagaagaatctctacagagatgtgatgcgagaaaccattaggaacctgaactgtataggaatgaaatgggaaaaccagaacattgatgatcagcaccaaaatctcaggagaaa

SEQ ID NO: 202547 - DNA, 2119 bp, Homo sapiens
  Payload ID: 19942
  Gene Name: zinc finger protein 44
  ENST ID: ENST00000355684
  CDS Start-End: 194-2041
aattgtcaatcaggcgcgaggcagagaggagggtgtgacgttccaggagctagtggcctcttcaccctggtgacctctgttccgtattctgtcactgagagacgccctgggacatctgtggtggcttttgtcgcgctgggacctaccctgactacgggagttgggaggacccgggacaccgcacagccgggaaatggactcagtggcctttgaggatgtggctgtgaacttcacccatgaggagtgggctttgctgggtccatcacagaagaatctctacagagatgtgatgcgagaaaccattaggaacctgaactgtataggaatgaaatgggaaaaccagaacattgatgatcagcaccaaaatctcaggagaaatccaaggtgtgatgtggtagagagatttggtaaaagtaaagatggtagtcagtgtggagaaaccttaagccagattcgaaatagtattgtaaacaagaacactcccgccagagtagatgcatgtggaagcagtgtgaatggagaagtcataatgggtcattcatccctgaattgctacatcagagttgatactggacacaaacaccgggagtgtcatgaatatgcagagaagtcatatacacataagcagtgtgggaaaggcttaagttatcgccactcctttcaaacatgtgaaaggcctcacactggaaagaaaccctatgattgtaaggaatgtggaaaaaccttcagttctcctggaaaccttcgaagacatatggtagtaaaaggtggagatggaccttataaatgtgaattgtgtgggaaagcctttttttggcccagtttattacgtatgcatgaaagaactcacactggagagaaaccatatgaatgtaagcagtgttctaaagccttccctgtttacagttcctatctaagacatgaaaaaatacacactggggagaaaccgtatgaatgtaagcagtgttctaaagccttccctgattacagttcatatctaagacatgaaagaactcacactggagagaaaccctacaaatgtaaacaatgtgggaaagccttcagtgtttccggttcccttcgagtacatgaaagaattcacactggagagaaaccctatacatgtaaacagtgtgggaaagcgttttgtcatcttggaagctttcaaagacacatgataatgcacagtggagatggacctcataaatgtaagatatgtgggaaaggctttgattttcctggttcagcacgaattcatgaaggaactcacactctagagaaaccctatgaatgtaagcaatgtgggaaattgttatctcatcgctcaagctttcgaagacacatgatggcacacactggagatggccctcataaatgcacagtatgtgggaaagcctttgattctcctagtgtatttcaaagacatgaaaggactcacactggagagaaaccctatgaatgcaagcaatgtgggaaagccttccgtacttccagttcccttcgaaaacatgaaacaacacacactggagagcaaccctataaatgtaaatgtggaaaagcttttagtgatttattttcctttcaaagtcatgaaacaacacacagtgaagaggagccttatgaatgtaaggagtgtgggaaagcatttagttcttttaaatacttttgtcgccatgaaaggactcacagtgaagaaaaatcttatgagtgtcaaatttgtggcaaagccttcagtcgtttcagttacttaaaaactcatgaaaggactcacacggcagagaagccatatgaatgtaagcaatgcaggaaagcattcttttggccctctttccttctaagacatgaaaggactcacactggagaaagaccctatgaatgtaaacactgtggtaaagccttcagtcgttccagtttctgtcgagaacatgaaagaactcacactggagagaagccctatgaatgtaaggaatgtgggaaagccttcagttctctcagttcctttaatagacataaaaggacacactggaaggatattctataagtgtatggaatgtgggaaagcattcattggttttatcacattcagatacttgaaagaaataaatcctgtgaatgtaaa

SEQ ID NO: 202548 - DNA, 2706 bp, Homo sapiens
  Payload ID: 19942
  Gene Name: zinc finger protein 44
  Uniprot ID: P15621
  ENST ID: ENST00000356109
  CDS Start-End: 120-2111
ctctgttccgtattctgtcactgagagacgccctgggacatctgtggtggcttttgtcgcgctgggacctaccctgactacgggagttgggaggacccgggacaccgcacagccgggaaatggccctgtgttatggaactttctggggctaccctaagatgctggaagctgccaatctcatggagggcctagtggatatcggcccttgggtcactcttcccagaggacagcctgaggtgttggagtggggcctcccaaaggatcaggactcagtggcctttgaggatgtggctgtgaacttcacccatgaggagtgggctttgctgggtccatcacagaagaatctctacagagatgtgatgcgagaaaccattaggaacctgaactgtataggaatgaaatgggaaaaccagaacattgatgatcagcaccaaaatctcaggagaaatccaaggtgtgatgtggtagagagatttggtaaaagtaaagatggtagtcagtgtggagaaaccttaagccagattcgaaatagtattgtaaacaagaacactcccgccagagtagatgcatgtggaagcagtgtgaatggagaagtcataatgggtcattcatccctgaattgctacatcagagttgatactggacacaaacaccgggagtgtcatgaatatgcagagaagtcatatacacataagcagtgtgggaaaggcttaagttatcgccactcctttcaaacatgtgaaaggcctcacactggaaagaaaccctatgattgtaaggaatgtggaaaaaccttcagttctcctggaaaccttcgaagacatatggtagtaaaaggtggagatggaccttataaatgtgaattgtgtgggaaagcctttttttggcccagtttattacgtatgcatgaaagaactcacactggagagaaaccatatgaatgtaagcagtgttctaaagccttccctgtttacagttcctatctaagacatgaaaaaatacacactggggagaaaccgtatgaatgtaagcagtgttctaaagccttccctgattacagttcatatctaagacatgaaagaactcacactggagagaaaccctacaaatgtaaacaatgtgggaaagccttcagtgtttccggttcccttcgagtacatgaaagaattcacactggagagaaaccctatacatgtaaacagtgtgggaaagcgttttgtcatcttggaagctttcaaagacacatgataatgcacagtggagatggacctcataaatgtaagatatgtgggaaaggctttgattttcctggttcagcacgaattcatgaaggaactcacactctagagaaaccctatgaatgtaagcaatgtgggaaattgttatctcatcgctcaagctttcgaagacacatgatggcacacactggagatggccctcataaatgcacagtatgtgggaaagcctttgattctcctagtgtatttcaaagacatgaaaggactcacactggagagaaaccctatgaatgcaagcaatgtgggaaagccttccgtacttccagttcccttcgaaaacatgaaacaacacacactggagagcaaccctataaatgtaaatgtggaaaagcttttagtgatttattttcctttcaaagtcatgaaacaacacacagtgaagaggagccttatgaatgtaaggagtgtgggaaagcatttagttcttttaaatacttttgtcgccatgaaaggactcacagtgaagaaaaatcttatgagtgtcaaatttgtggcaaagccttcagtcgtttcagttacttaaaaactcatgaaaggactcacacggcagagaagccatatgaatgtaagcaatgcaggaaagcattcttttggccctctttccttctaagacatgaaaggactcacactggagaaagaccctatgaatgtaaacactgtggtaaagccttcagtcgttccagtttctgtcgagaacatgaaagaactcacactggagagaagccctatgaatgtaaggaatgtgggaaagccttcagttctctcagttcctttaatagacataaaaggacacactggaaggatattctataagtgtatggaatgtgggaaagcattcattggttttatcacattcagatacttgaaagaaataaatcctgtgaatgtaaacgtggtaaagccttaagaagtttccaggctgggcgcagcggctcacacctgtaatcccagcactttgagaggccgaggagggcagatcacgaggccaggagatcgagaccagcctggctaacatgggaaaccctgtctctactaaaaatacggaaaaaaaaaaaaatagccaggcatagttgctcacacctgtagtcctagctactcaggaggctgaggcaggagaatcccttgaacccgggaggtggaggttgcagtgagccgagattgcactactgcactccagcttgggtgctagagcgagactccatctcaaaaaaaaaaaaaaaagtttccatttctttcaaatagagttgctgcctgctatatgcaagaagattggttccagtacaccctgagtatacctaaatccacagatgccagctcttttataaaatggaatattcgcatgtacctacccacattctcctgtatactctataaatgtctagattaattaaaatatctcatgcattgt

SEQ ID NO: 202549 - DNA, 3236 bp, Homo sapiens
  Payload ID: 19942
  Gene Name: zinc finger protein 44
  Uniprot ID: P15621
  ENST ID: ENST00000393337
  CDS Start-End: 101-2014
actgagagacgccctgggacatctgtggtggcttttgtcgcgctgggacctaccctgactacgggagttgggaggacccgggacaccgcacagccgggaaatggccctgtgttatggaactttctggggctaccctaagatgctggaagctgccaatctcatggagggcctagtggatatcggcccttgggtcactcttcccagaggacagcctgaggtgttggagtggggcctcccaaaggatcaggactcagtggcctttgaggatgtggctgtgaacttcacccatgaggagtgggctttgctgggtccatcacagaagaatctctacagagatgtgatgcgagaaaccattaggaacctgaactgtataggaatgaaatgggaaaaccagaacattgatgatcagcaccaaaatctcaggagaaatccaaggtgtgatgtggtagagagatttggtaaaagtaaagatggtagtcagtgtggagaaaccttaagccagattcgaaatagtattgtaaacaagaacactcccgccagagtagatgcatgtggaagcagtgtgaatggagaagtcataatgggtcattcatccctgaattgctacatcagagttgatactggacacaaacaccgggagtgtcatgaatatgcagagaagtcatatacacataagcagtgtgggaaaggcttaagttatcgccactcctttcaaacatgtgaaaggcctcacactggaaagaaaccctatgattgtaaggaatgtggaaaaaccttcagttctcctggaaaccttcgaagacatatggtagtaaaaggtggagatggaccttataaatgtgaattgtgtgggaaagcctttttttggcccagtttattacgtatgcatgaaagaactcacactggagagaaaccatatgaatgtaagcagtgttctaaagccttccctgtttacagttcctatctaagacatgaaaaaatacacactggggagaaaccgtatgaatgtaagcagtgttctaaagccttccctgattacagttcatatctaagacatgaaagaactcacactggagagaaaccctacaaatgtaaacaatgtgggaaagccttcagtgtttccggttcccttcgagtacatgaaagaattcacactggagagaaaccctatacatgtaaacagtgtgggaaagcgttttgtcatcttggaagctttcaaagacacatgataatgcacagtggagatggacctcataaatgtaagatatgtgggaaaggctttgattttcctggttcagcacgaattcatgaaggaactcacactctagagaaaccctatgaatgtaagcaatgtgggaaattgttatctcatcgctcaagctttcgaagacacatgatggcacacactggagatggccctcataaatgcacagtatgtgggaaagcctttgattctcctagtgtatttcaaagacatgaaaggactcacactggagagaaaccctatgaatgcaagcaatgtgggaaagccttccgtacttccagttcccttcgaaaacatgaaacaacacacactggagagcaaccctataaatgtaaatgtggaaaagcttttagtgatttattttcctttcaaagtcatgaaacaacacacagtgaagaggagccttatgaatgtaaggagtgtgggaaagcatttagttcttttaaatacttttgtcgccatgaaaggactcacagtgaagaaaaatcttatgagtgtcaaatttgtggcaaagccttcagtcgtttcagttacttaaaaactcatgaaaggactcacacggcagagaagccatatgaatgtaagcaatgcaggaaagcattcttttggccctctttccttctaagacatgaaaggactcacactggagaaagaccctatgaatgtaaacactgtggtaaagccttcagtcgttccagtttctgtcgagaacatgaaagaactcacactggagagaagccctatgaatgactcagtgacctttgaagatgtggctgtgaacttcacccaggaggaatggactttgctggatccttcacagaaaaaactctacagagacgtgatgtgggaaaccttcaggaacctggccactataggaacaaaacaaaaagaatggaacattgaagagcagtacaaaaaccaggggagaaatctcagaaatcatatggtagagagactctgtgaaagtaaagaaggtagtcatggcggagaaggtttcagccagattgcaaatctcagtctgaacaagaaaactccttctggaggaaagctttgggaaagcagtgtatgtggaaaagtcttgagccatcattcatcccttaacaggcacattagatcttacaccagacacaaactgtataagtgtcaggaatatggagagaagccatataaatgtaagaaatgtgggaaacccttcagttatctgcagtcttttaaaaaacataaaagaacacacagtgcagggatagtctacaaatgtaaggcctgtgggaaagccttcagttgtcaacgttctttccaaatacatggaaggactcacactggagataaaccctttaagtgtaaagaatgtggaaaagcattccgataccaccaatctgctcaaaaacatgaaaaggctcatactggagagaaaccctacaaatgtaaggaatgtgggaaacccttcatttaccgccattctgctcgagcacatgaaaggaatcacactgtacagaaacgctatgaatgtaaacaatgtggaaaaacctacatatcttctgtaggttttcaagcacatgaaagaactcacactggagaaaaaccctatgaatgtaaaaaatgtgggaaagtgttcgtatatcacaactctgctcaaagacatgaaaagactcatactggagagaaaccctacaaatgcaaggaatgtgggaaagccttcagttaccactgtactgctcaaaaacatgagaggaatcacactgcacagaaacactatgaatgtaaactgtgtgggaaaacttacttgtctcctttaggttttcaagcacatgaaagtactcacactggagataaaccctttgagtgtaaaaaatgtggaaaagcatttagatactactactcagctcaaagacatgaaaggactcatactggagagaaaccctacaaatgtaaggaatgtgggaaagccttttattgttgcagttctgcccga

SEQ ID NO: 202550 - DNA, 2372 bp, Homo sapiens
  Payload ID: 19942
  Gene Name: zinc finger protein 44
  Uniprot ID: P15621
  ENST ID: ENST00000397742
  CDS Start-End: 141-1910
tggcctcttcaccctggtgacctctgttccgtattctgtcactgagagacgccctgggacatctgtggtggcttttgtcgcgctgggacctaccctgactacgggagttgggaggacccgggacaccgcacagccgggaaatggactcagtggcctttgaggatgtggctgtgaacttcacccatgaggagtgggctttgctgggtccatcacagaagaatctctacagagatgtgatgcgagaaaccattaggaacctgaactgtataggaatgaaatgggaaaaccagaacattgatgatcagcaccaaaatctcaggagaaatccaaggtgtgatgtggtagagagatttggtaaaagtaaagatggtagtcagtgtggagaaaccttaagccagattcgaaatagtattgtaaacaagaacactcccgccagagtagatgcatgtggaagcagtgtgaatggagaagtcataatgggtcattcatccctgaattgctacatcagagttgatactggacacaaacaccgggagtgtcatgaatatgcagagaagtcatatacacataagcagtgtgggaaaggcttaagttatcgccactcctttcaaacatgtgaaaggcctcacactggaaagaaaccctatgattgtaaggaatgtggaaaaaccttcagttctcctggaaaccttcgaagacatatggtagtaaaaggtggagatggaccttataaatgtgaattgtgtgggaaagcctttttttggcccagtttattacgtatgcatgaaagaactcacactggagagaaaccatatgaatgtaagcagtgttctaaagccttccctgtttacagttcctatctaagacatgaaaaaatacacactggggagaaaccgtatgaatgtaagcagtgttctaaagccttccctgattacagttcatatctaagacatgaaagaactcacactggagagaaaccctacaaatgtaaacaatgtgggaaagccttcagtgtttccggttcccttcgagtacatgaaagaattcacactggagagaaaccctatacatgtaaacagtgtgggaaagcgttttgtcatcttggaagctttcaaagacacatgataatgcacagtggagatggacctcataaatgtaagatatgtgggaaaggctttgattttcctggttcagcacgaattcatgaaggaactcacactctagagaaaccctatgaatgtaagcaatgtgggaaattgttatctcatcgctcaagctttcgaagacacatgatggcacacactggagatggccctcataaatgcacagtatgtgggaaagcctttgattctcctagtgtatttcaaagacatgaaaggactcacactggagagaaaccctatgaatgcaagcaatgtgggaaagccttccgtacttccagttcccttcgaaaacatgaaacaacacacactggagagcaaccctataaatgtaaatgtggaaaagcttttagtgatttattttcctttcaaagtcatgaaacaacacacagtgaagaggagccttatgaatgtaaggagtgtgggaaagcatttagttcttttaaatacttttgtcgccatgaaaggactcacagtgaagaaaaatcttatgagtgtcaaatttgtggcaaagccttcagtcgtttcagttacttaaaaactcatgaaaggactcacacggcagagaagccatatgaatgtaagcaatgcaggaaagcattcttttggccctctttccttctaagacatgaaaggactcacactggagaaagaccctatgaatgtaaacactgtggtaaagccttcagtcgttccagtttctgtcgagaacatgaaagaactcacactggagagaagccctatgaatgactcagtgacctttgaagatgtggctgtgaacttcacccaggaggaatggactttgctggatccttcacagaaaaaactctacagagacgtgatgtgggaaaccttcaggaacctggccactataggaacaaaacaaaaagaatggaacattgaagagcagtacaaaaaccaggggagaaatctcagaaatcatatggtagagagactctgtgaaagtaaagaaggtagtcatggcggagaaggtttcagccagattgcaaatctcagtctgaacaagaaaactccttctggaggaaagctttgggaaagcagtgtatgtggaaaagtcttgagccatcattcatcccttaacaggcacattagatcttacaccagacacaaactgtataagtgtcaggaatatggagagaagccatataaatgtaagaaatgtgggaaacccttcagttatctgcagtcttt

SEQ ID NO: 202551 - DNA, 2051 bp, Homo sapiens
  Payload ID: 19942
  Gene Name: zinc finger protein 44
  ENST ID: ENST00000600003
  CDS Start-End: 129-593
cctggtgacctctgttccgtattctgtcactgagagacgccctgggacatctgtggtggcttttgtcgcgctgggacctaccctgactacgggagttgggaggacccgggacaccgcacagccgggaaatggccctgtgttatggaactttctggggctaccctaagatgctggaagctgccaatctcatggagggcctagtggatatcggcccttgggtcactcttcccagaggacagcctgaggtgttggagtggggcctcccaaaggatcaggactcagtggcctttgaggatgtggctgtgaacttcacccatgaggagtgggctttgctgggtccatcacagaagaatctctacagagatgtgatgcgagaaaccattaggaacctgaactgtataggaatgaaatgggaaaaccagaacattgatgatcagcaccaaaatctcaggagaaatccaaggttatcggagacatggttacagaatttcattttgatccattatggtcacctggtagctttgtctgatggaggtttgttacagttttcaacaggacagggtctccctgtcacccaggctggagttcagtagtgttctcttggctcactgaaactgctgcctcccaagcaaatgatcctcccacctcagcctcctgaatagctgggactacaggtgcacactaccatgcccagactgagataaggtatgaggaagccttggccatgccaccagccgcttatcccaaattcctgatccctggaagacatctgggctctccctcctgttccagcccagtagcttccagcaaaggtactggctcaattggacacggagtgtggaactgcctgctcacacttgtgaacccccgtccagaaggaagaaacagaaagggcccaccttccagaggccgaggtggctccaccacagcttctgtccggtggtgaccagcactgatctccggagccaagggaggacccgggacacctgggagccgggaaatgttttccatggctccgagacaatgacaccgcttcagtgtgaactctcatgaattgagtctagatccccagtgctgtccgtctcacctgtcctcctctacacatatctgggatatgtcacggcttggtggtctttgaagatgtgactctgaacttcatccagaaggagtaggctttgctggatttttccgtgaagaatctgtagagatgtgatgagggaagccatcagcacctggcttctatagctgcagcccaagaggccaactggaacgttaacatcagacactaatccagctgactggacacaattgggaaaactggttattttaccaaggctttaactggaatggtgtgccttcctttaaggaatcaaatttgacttatggagccaataaagcccttggaaagctggcctcagatttcatgtacagtccctgtacagggtttccgatctgtgagattttttaaactgacaggatcatggccatttcacagacaactacccaaaaatatctacagacggcactgctcctaccaacccgataccagagaactctctgtcccctcgtcagcaggaagtagccagaaagaacatgccgcccctcgtcctttttataactatgaggtctggattgacagagcagaagcatcaccattgtggataagcgcctcattttaaaattcaccttaatcaaaaactgcctaaatccaaagggcatcagcctaatggctaaggtcagcatgatcacaaaccacaaataacatctccaaccaaaaacattccagacacctcccacagagaaatgctagcctcgggataacccctctcctgccggaaagatgtcacccccaagataaccacccctccgcccagaacattccaaccctgccacaaacttctcccccacacagaaacattccaagcttgtaataagctccctcaccctaaaaccaacgtacattcttagtctgcaaggaaaagtgctcctgactgaccagccagaatcctctctcaggtcttttctataataaacctgtctttgactgtcaa

SEQ ID NO: 202552 - DNA, 4189 bp, Homo sapiens
  Payload ID: 19943
  Gene Name: zinc finger protein 440
  Uniprot ID: Q8IYI8
  ENST ID: ENST00000304060
  CDS Start-End: 165-1952
attcctttagtgctgcgccgacagcggtcaggatctcggctttcttgcttcgagagggactaggtgcctccaccagagcttctgtcgctctgtaacctgcactgtgacctacactagtcgcgggagccacgcagaggacgccggaacaccctggaagccgagaaatggacccagtggcttttaaggatgtggctgtgaacttcacccaggaggagtgggctttgctggatatttcccagaggaaactctacagggaagtgatgctggaaactttcaggaacctgacctctttaggaaaaaggtggaaagaccagaacattgaatatgagcaccaaaaccccaggagaaacttcaggagtctcatagaagaaaaagtcaatgaaattaaagatgacagtcattgtggagaaacttttaccccagttccagatgacagactgaacttccaggagaagaaagcttctcctgaagtaaaatcatgtgaaagctttgtgtgtggagaagttggcctaggtaactcatcttttaatatgaacatcagaggtgacattggacacaaggcatatgagtatcaggaatatggaccaaagccatgtaagtgtcaacaacctaaaaaagccttcagataccgcccctcctttagaacacaagaaagggatcacactggagagaaacccaatgcttgtaaagtatgtggaaaaacctttatttcccattcaagtgttcgaagacacatggtaatgcacagtggggatggaccttataaatgtaagttttgtgggaaagcattccattgtctcagattatatcttatccatgaaagaattcacactggagagaaaccatgtgaatgtaaacagtgtggtaaatcctttagttattctgctacccatcgaatacataaaagaactcacactggagaaaagccttatgaatatcaggagtgtgggaaagcatttcatagtcccagatcctatcgtagacatgaaaggattcacatgggagaaaaggcttatcaatgtaaggaatgtggaaaagcattcacgtgtccccgttatgttcgtatacatgaaaggacccactctaggaaaaatctctatgaatgtaagcagtgtgggaaagcattatcctctcttacaagttttcaaacacacgtaagattgcactctggagaaagaccttatgaatgtaagatatgtggaaaagacttttgttctgtgaattcatttcaaagacatgaaaaaattcacagtggagagaaaccctataaatgtaagcagtgtggtaaagccttccctcattccagttcccttcgatatcatgaaaggactcacactggagagaaaccctatgagtgtaagcaatgtgggaaagccttcagatctgcctcacaccttcgagtgcatggtaggactcacactggagagaaaccgtatgaatgtaaggaatgtgggaaagccttcagatatgtgaataaccttcaaagtcatgaaaggacacaaacacacataagaatacactctggagaaagacgttataaatgtaagatatgtgggaaaggcttttattgtcccaaatcatttcaaagacatgaaaaaactcacactggagagaaactctatgaatgcaagcaacgttcagtagttccttcagtagttccagttccttttgatatcatgaaaggactcacactggagagaagccctataaatgcgagcaatgtgggaaagccttcagagctgtgtcaatcctttgaatgcatggtaggactcaccctgaagagaaaccctatgagtgtgagcaatgacggaaagccttcagatctgccccacacctttgaatacgtggtaggacacacaatggagagaagccctatgcatgtaaggaatgtgggaaacccttcggatctgcccagaaccttcgaattcatgaaaggacacaaacacacataatgcactctgtagagagaccttataaatgtaagatatgtgggaggggcttttattctgccaagtcatttcaaatacatgaaaaatcttacactggagagaaaccctatgagtgtaagcaatgtgggaaagcctttgtttccttcacttcctttcgatatcatgaaaggactcacactggagagaacccctatgagtgtaagcaatttgggaaagccttcagatctgtcaaaaatcttcgatttcataaaaggacacacactggagagaaaccctgtgaatgtaagaaatgtagaaaagcattccataatttctcttctttgcaaatacatgaaaggatgcacagaggagagaagctctgtgaatgtaagcattgtgggaaagcattcatatctgccaagatcctttgaatacatgcaagaacacacaatggagagaaaccctatgaatgtaaagaatgcagaaaagcattcagcttgcctacttcctttcatagacatgaaaagactcacactggaaggaaacactatgaatgcaagcaatgtggcaaagctttcacttcttccagttcttttcaatatcatgaaagaacacactagggagaaaccctatcaatgtaagcaatgtgcaaaagcctttatttcttccacttcttttcaatatcatgaaaggactcacatgggagagaaaccctatgagtgtatgccaagtgggaaagccttcatttcttctagttcccttcaatatcatgaaaggactcacactggagagaagccctatgaatataagcaatgtgggaaagccttcagatcagcctcgcaccttcaaatgcatggaaggactcacactggagaaaaaccctatgaatgtaagcagtatgggaaagcgttcagacctgacaagattctttgaatacagataatgaatgtaaacaattaactgtttataataactgtatactaacaaatgatattctttttaaataagaagctataatatcccattggtgtcatgtattagatcagccttatactgttaaattgttattatttggacattgtgagtcagtataaccatgtggataaaatgccagacatctttttattcgaaaattttacttttcatgcttctgtacttacatttttatctcaaccttaatttttctttctttttttttttcccccagaaagaatctcactctgtcacccaggctggagtgcagtggcatgatctcaggtcactgcaacctctgcctccagggttcaagcaattctcctgcctcagtctcctgagtagctgggactacaggcatgcgccaccatgccaggctaattttttgtattttttagtagagacggggtttcaccatattggctaggctggtctcaaactccagacctcatgatttacccacctcggcctcccaaaatgctgggattacagacatgaaccatcatgcccagctgcaaccctaatttttcattcagtcataataccaatagttatctcatgcacctctgagtgccttcttccccaaaaccagcagtgccatacctgctgtcagcaagggtgtaatataccatagtgataaatatgaccaaaagccataaatgactgtgagatgtatgagaattacaagtcacattagtaagaagagaaaaattttggtcatgtttatgatttgaaatacgttttcctctatcacatttaaaaatatagttacaaaatgcccttgtttttgtcctgattcatcatggtcactgaggagcatcgtctcatatgcctggtatgtgacacgtgtctctccaacaataaaagacttggccttggctgggcatggtggctcacgcctgtaatcccagcactttgggaggccgaggtcaggagttagagaccattctgaccaatatgatcaaaccccgtctctactaaaaatacaaaagttagcagggcgtggtggcatgctcctgtaatcctagctattcaggaggctgacataggagaattgcttgaatataggaagcagaggttgcagtgagccgaggttgcaccattgtactccagcctgggcaacaagagtgaaactctgtcttaaaaaacacaaaaaaagacttggccttagggccgagtgcggtggctcacgcctataatcccagcactttgggaggccgaggcgggcggatcactaggtcaggaaatggagaccatcctggccaacacagtgaaacccagtctctact

SEQ ID NO: 202553 - DNA, 920 bp, Homo sapiens
  Payload ID: 19943
  Gene Name: zinc finger protein 440
  ENST ID: ENST00000427505
  CDS Start-End: 105-920
taggtgcctccaccagagcttctgtcgctctgtaacctgcactgtgacctacactagtcgcgggagccacgcagaggacgccggaacaccctggaagccgagaaatgatgtttcaggacccagtggcttttaaggatgtggctgtgaacttcacccaggaggagtgggctttgctggatatttcccagaggaaactctacagggaagtgatgctggaaactttcaggaacctgacctctttaggaaaaaggtggaaagaccagaacattgaatatgagcaccaaaaccccaggagaaacttcaggagtctcatagaagaaaaagtcaatgaaattaaagatgacagtcattgtggagaaacttttaccccagttccagatgacagactgaacttccaggagaagaaagcttctcctgaagtaaaatcatgtgaaagctttgtgtgtggagaagttggcctaggtaactcatcttttaatatgaacatcagaggtgacattggacacaaggcatatgagtatcaggaatatggaccaaagccatgtaagtgtcaacaacctaaaaaagccttcagataccgcccctcctttagaacacaagaaagggatcacactggagagaaacccaatgcttgtaaagtatgtggaaaaacctttatttcccattcaagtgttcgaagacacatggtaatgcacagtggggatggaccttataaatgtaagttttgtgggaaagcattccattgtctcagattatatcttatccatgaaagaattcacactggagagaaaccatgtgaatgtaaacagtgtggtaaatcctttagttattctgctacccatcgaatacataaaagaactcacactggagaaaagccttatgaatatcaggagtgtgggaaagcatttcatagtcccaga

SEQ ID NO: 202554 - DNA, 559 bp, Homo sapiens
  Payload ID: 19943
  Gene Name: zinc finger protein 440
  ENST ID: ENST00000457526
  CDS Start-End: 401-559
cctttagtgctgcgccgacagcggtcaggatctcggctttcttgcttcgagagggactaggtgcctccaccagagcttctgtcgctctgtaacctgcactgtgacctacactagtcgcgggagccacgcagaggacgccggaacaccctggaagccgagaaatggaaaaaggtggaaagaccagaacattgaatatgagcaccaaaaccccaggagaaacttcaggagtctcatagaagaaaaagtcaatgaaattaaagatgacagtcattgtggagaaacttttaccccagttccagatgacagactgaacttccaggagaagaaagcttctcctgaagtaaaatcatgtgaaagctttgtgtgtggagaagttggcctaggtaactcatcttttaatatgaacatcagaggtgacattggacacaaggcatatgagtatcaggaatatggaccaaagccatgtaagtgtcaacaacctaaaaaagccttcagataccgcccctcctttagaacacaagaaagggatcacactggagagaaacccaatgcttgtaaa

SEQ ID NO: 202555 - DNA, 796 bp, Homo sapiens
  Payload ID: 19943
  Gene Name: zinc finger protein 440
  ENST ID: ENST00000414255
  CDS Start-End: 289-796
gtggcatatgcctgtaatcttagctactcaggaggctgaggaagaagaagtgctagaaccccggcagtgagccgagatcatgccattgcactgcagcctgggcaacaagagtgaaaaaaaaaacaagttgctttgtggaagaaagtaagtatacacagggagaaagagatctgatgaccaaagcagggaatacgtgtttggagtccacggcatcctgagaacttcttgggaatagagtctaggcccccagtgctgtcactctcacccatcttcttctacacatgtgagatgtttcaggacccagtggcttttaaggatgtggctgtgaacttcacccaggaggagtgggctttgctggatatttcccagaggaaactctacagggaagtgatgctggaaactttcaggaacctgacctctttaggaaaaaggtggaaagaccagaacattgaatatgagcaccaaaaccccaggagaaacttcaggagtctcatagaagaaaaagtcaatgaaattaaagatgacagtcattgtggagaaacttttaccccagttccagatgacagactgaacttccaggagaagaaagcttctcctgaagtaaaatcatgtgaaagctttgtgtgtggagaagttggcctaggtaactcatcttttaatatgaacatcagaggtgacattggacacaaggcatatgagtatcaggaatatggaccaaagccatgtaagtgtcaacaacctaaaaaagccttcagataccgcccctcctttagaacacaagaaagggatcacactg

SEQ ID NO: 202556 - DNA, 556 bp, Homo sapiens
  Payload ID: 19943
  Gene Name: zinc finger protein 440
  ENST ID: ENST00000588954
  CDS Start-End: 409-556
agaagaattgcttgaacccaggaggcggcggttgcagtcagccaagacggcgtcactccagcctggcaacagagccagactccatctcaaaacaacaacaacgattcacgaatgagaaacacccagtcctggcttgtggtttgtcaacggaaaaagccaagctatgtaaaataaagaagtttattaggagccgaataggagagccgttggccgagggaaacacaaccccaagcagcctggaatcatgctttttgtgttgtgtgtgaaatcttattgccaaatcaaggtcgtcttggttttgacaagtgtgaaattgacccagtggcttttaaggatgtggctgtgaacttcacccaggaggagtgggctttgctggatatttcccagaggaaactctacagggaagtgatgctggaaactttcaggaacctgacctctttaggaaaaaggtggaaagaccagaacattgaatatgagcaccaaaaccccaggagaaacttcaggagtctcatagaagaaaaagtcaatgaaattaaagatgacagtcattgtggag

SEQ ID NO: 202557 - DNA, 4356 bp, Homo sapiens
  Payload ID: 19944
  Gene Name: zinc finger protein 441
  Uniprot ID: Q8N8Z8
  ENST ID: ENST00000357901
  CDS Start-End: 103-2184
actgagagacgccctggaacgtctgtggcagcttctgtctcgctgggacccgcactgacagcgggaggcagagggaggaacctggacgccggaagccgggaaatggactcagtggcatttgaggatgtggctataaacttcacctgtgaggagtgggctttgctgggtccatcacagaagagtctctacagagatgtgatgcaggaaaccatcagaaacctggactgtataggaatgatatggcaaaatcatgatatagaagaagatcagtacaaagatctcagaagaaatctaagatgtcatatggtagagagagcctgtgaaattaaagataatagtcaatgtggaggaccctttacccagactcaagacagtattgtgaacgagaaaatacctggagtagatccatgggaaagcagtgagtgtacagacgtcctcatgggtcgttcatctcttaattgctacgttagagttgacagtgaacacaaaccatgtgagtatcaagaatatggagagaagccatatacacatacacaatgtgggacagctttcagttatcagccctgctttcaaatacatgaaagacctcagcatggaaagaaactctatgattgtaaggaatgtgcaagcttcagttctcttgaaaaccttcaaagacacatggcagcacaccatggagatggacctcgtatatgtaagttgtgtggaaacgcctttatttggcctagtttatttcatatgcttagaagaactcacactgaagagaaaccatatgaatatgagcagtgttctacagcgtttcctgcttatagttccactctaagacatgaaagaacacacagtggagagaaaccctatcaatgtaaacaatgtgggaaagccttcagttgttcctgttacactcaactatatgaaaggactcacactggagaacaatcctatgaatgtaagcaatgtgggaaagcattttatcatcttggaagctttcaaagacacatgatagtgcacactggagatgggcctcataaatgtaagatatgtggaaaaggctttctttctcccagttcagttcgaagacataaaagaactcacactggagagaaaccgtatgaatgtaagtattgtgggaaagcattctctgattgcacaggttttcgaagacacatgataacgcacactggagatggacctcataaatgcaaggtatgtgggaaagcctttgattctcccagtttatgtcgaaggcatgaaacaactcatactggggagaaaccctataaatgtgaatgtgggaaagcctttagtgatttctattactttcgaaatcatgaaactactcacactggagagaagccatataaatgtaaacaatgtggaaaagccttcatttgttgcacttaccttcaaatacatgaaagaattcacactggggagagaccctataaatgtaaacaatgcggaaaagccttcaggtcttccaattacattcgagtacatgaaaagactcacactggagaaaagccctatgaatgtaagcagtgtggaaaagcactttctcatctgaaaagctttcagagacacatgataatgcacactggagatggacctcataaatgtaagatatgtgggaaaagctttgattctcccagttcatttcgaagacatgaaagaattcacactggggagagaccctataagtgtaaactatgtgggaaaggcttcaggtcttccagttacattcaactacatgaaaggactcacactggagagaaaccctatggttgtcagcaatgtgggaaagcattatctgatctctcaagctttcgaagacacatgataacacatactggaaatggacctcataaatgtaagatatgtgggaaaggctttgattatcccagttcagtgcaaagacatgaaagaactcacactggagagaaaccctatgaatgcaaggaatgtggtaaagccttcagtcattcaagttacttacgaatacacgaaagagttcatactggagagaagccgtataaatgtaaggaatgtgggaaaccattccattgtcccagtgcctttcataaacatgaaaggacccacagtatggagaaaccctataagtgtaaagaatgtggggaagcatttcattgtatcagttcctttcataaacatgaaatgactcactagagaaaacccctatgagtgttgaacatgtgagaaagccttaagtactttcagcttcttacaaatacataagagactcacactgaaaaaagttgtatgaatataaaaatgtactaaaaccttccatttttttcagtaccttttgaaaacatgaccaaactcatacttcaaaaatatatatataatgaatgtgaggaatatgaaaaaactttctttgtctagcaaactttcaaaggtggttattataacatactagcaatggaccttactactgtaaggaatgtagaaatgcatttactagtcctaattcatttcagttacatgaaagatttcaaactgcagagaaccactatgaatgtaaacaatgtggtaaagcatttagtagcttcagtttcttttgaatacagtcttctctagtttctgaggtgaattgattccagcaccctcaggaatacctatattcagagatattcaagtccctgatattaaaaacagcatatttgcatataatctaggcacatttttctgtatatcttaaatcatttctagattacttataatacacaatgcattgtaaattctgtataagttgcttttgtattatttagggaatcatgacaagaaaaaagtctacatgttcagtacaaatacaactgtcattcattgtcctaagtacgtgtacatgtcagcaacaatgtcaggatctgtggagtttgcgagtataagatctttaagtgttgaaggtttcatctccataattgcagctgctttagctacaaatattataggaagctgttccttctttttctttacatcaccaaaccttccagtggttataggcattttgttatccttcaagtgacctggagcctttgttgcatgacaggattgtacctgaagatcacattctttaacaattggacctactgaatctgtaaaactactagaagaaaacatattgaaaatacttcaggacattggtttaggcaaagattttatggctaatacctcaaagcacagacaacaaagataaaaatagacaaatgagactatcttacactaaaaagtagctgtgcaaagtaaagggaacaacaagagtgcagagaaaacctgttgaatatgagagaatatttgcaaactatgcgacaagggactaatatccaaatatacaaggaactcaaacatctcaacagcaaaaaatataaataatcccattaaagtgggaaaaggatgtgaacagacagttctcaaaagaagacatgcaaatggccaaaaagtatatggaaatatgttcaacatcactaatgattaggaaaatgcaaattgaaaccacaatgagatactctacttagaattgttcttactaaaaaagataaaaaacaacaaatgctgatgaggatgtggagaaaagaaaactttcactgttggtgaaagtataaattagaacaactactgtggaaaacagtatgtagatttctcaaaaacctaaaaatagaaccaccacatgatccagcaaaccaagtataaccacaggaaaagaaatcagtatatcaaagagatacttgcacttgcatatttatcacagcactattcatgataacaaagatatggaattaacctaagcatccatcagtggacacagggataaagaaaatgtttatgtacacagtggaatactatttggccataaaaaagagtaaaatgttattgctaacaacatggatggaacttgaggtcattatggtaagtgaaataagccaggcacagaaagacaaataccacatgttctcacttatatgtgggaggtgaaaaacttcacctcatggagatagggaatagaataagttatccggggctgagaaggggaaatgaagagaaattggtgaatatgtacaaatttccatttagatcaaaggaataagttctgatgttagaaagcatactagagtgaactatagttagcaaaaatatattgcatatttcaaagtagttggaagagaggacttgaaatgttaccaacacatagaagtggtaaatactcaagatcatggataccccaaatacgctgacttgaccattacacattctatgcatgcaagaaatgctcatgtgtaccttatatatatgtaaaatatgtatcaataaaagaaaatatataagatagttttaaaataa

SEQ ID NO: 202558 - DNA, 2828 bp, Homo sapiens
  Payload ID: 19944
  Gene Name: zinc finger protein 441
  ENST ID: ENST00000409902
  CDS Start-End: 103-237
actgagagacgccctggaacgtctgtggcagcttctgtctcgctgggacccgcactgacagcgggaggcagagggaggaacctggacgccggaagccgggaaatggactcagtggcatttgaggatgtggctataaacttcacctgtgaggagtgggctttgctgggtccatcacagaagagtctctacagagatgtgatgcaggaaaccatcagaaacctggactgtatagactgaataagaggaggggttggtcttgctgtctcaagagtagcagagactgaagaaattcatatgaatgatatggcaaaatcatgatatagaagaagatcagtacaaagatctcagaagaaatctaagatgtcatatggtagagagagcctgtgaaattaaagataatagtcaatgtggaggaccctttacccagactcaagacagtattgtgaacgagaaaatacctggagtagatccatgggaaagcagtgagtgtacagacgtcctcatgggtcgttcatctcttaattgctacgttagagttgacagtgaacacaaaccatgtgagtatcaagaatatggagagaagccatatacacatacacaatgtgggacagctttcagttatcagccctgctttcaaatacatgaaagacctcagcatggaaagaaactctatgattgtaaggaatgtgcaagcttcagttctcttgaaaaccttcaaagacacatggcagcacaccatggagatggacctcgtatatgtaagttgtgtggaaacgcctttatttggcctagtttatttcatatgcttagaagaactcacactgaagagaaaccatatgaatatgagcagtgttctacagcgtttcctgcttatagttccactctaagacatgaaagaacacacagtggagagaaaccctatcaatgtaaacaatgtgggaaagccttcagttgttcctgttacactcaactatatgaaaggactcacactggagaacaatcctatgaatgtaagcaatgtgggaaagcattttatcatcttggaagctttcaaagacacatgatagtgcacactggagatgggcctcataaatgtaagatatgtggaaaaggctttctttctcccagttcagttcgaagacataaaagaactcacactggagagaaaccgtatgaatgtaagtattgtgggaaagcattctctgattgcacaggttttcgaagacacatgataacgcacactggagatggacctcataaatgcaaggtatgtgggaaagcctttgattctcccagtttatgtcgaaggcatgaaacaactcatactggggagaaaccctataaatgtgaatgtgggaaagcctttagtgatttctattactttcgaaatcatgaaactactcacactggagagaagccatataaatgtaaacaatgtggaaaagccttcatttgttgcacttaccttcaaatacatgaaagaattcacactggggagagaccctataaatgtaaacaatgcggaaaagccttcaggtcttccaattacattcgagtacatgaaaagactcacactggagaaaagccctatgaatgtaagcagtgtggaaaagcactttctcatctgaaaagctttcagagacacatgataatgcacactggagatggacctcataaatgtaagatatgtgggaaaagctttgattctcccagttcatttcgaagacatgaaagaattcacactggggagagaccctataagtgtaaactatgtgggaaaggcttcaggtcttccagttacattcaactacatgaaaggactcacactggagagaaaccctatggttgtcagcaatgtgggaaagcattatctgatctctcaagctttcgaagacacatgataacacatactggaaatggacctcataaatgtaagatatgtgggaaaggctttgattatcccagttcagtgcaaagacatgaaagaactcacactggagagaaaccctatgaatgcaaggaatgtggtaaagccttcagtcattcaagttacttacgaatacacgaaagagttcatactggagagaagccgtataaatgtaaggaatgtgggaaaccattccattgtcccagtgcctttcataaacatgaaaggacccacagtatggagaaaccctataagtgtaaagaatgtggggaagcatttcattgtatcagttcctttcataaacatgaaatgactcactagagaaaacccctatgagtgttgaacatgtgagaaagccttaagtactttcagcttcttacaaatacataagagactcacactgaaaaaagttgtatgaatataaaaatgtactaaaaccttccatttttttcagtaccttttgaaaacatgaccaaactcatacttcaaaaatatatatataatgaatgtgaggaatatgaaaaaactttctttgtctagcaaactttcaaaggtggttattataacatactagcaatggaccttactactgtaaggaatgtagaaatgcatttactagtcctaattcatttcagttacatgaaagatttcaaactgcagagaaccactatgaatgtaaacaatgtggtaaagcatttagtagcttcagtttcttttgaatacagtcttctctagtttctgaggtgaattgattccagcaccctcaggaatacctatattcagagatattcaagtccctgatattaaaaacagcatatttgcatataatctaggcacatttttctgtatatcttaaatcatttctagattacttataatacacaatgcattgtaaattctg

SEQ ID NO: 202559 - DNA, 6219 bp, Homo sapiens
  Payload ID: 19945
  Gene Name: zinc finger protein 442
  Uniprot ID: Q9H7R0
  ENST ID: ENST00000242804
  CDS Start-End: 584-2467
gaagccctggcaggtcagtggcaggcactgtcacgctgagtcctatgctggcagcggggaaccttggggagaacacgggacaccgcggaagccgggaaatgattgtgcggctgtaaccggcacaggttcgcggtccgagtcactgcaccgagactccaaggcctgcagcagaaacagtttaatagggggagaggagagaagaccccagttccgcctccatgagaggtttggggatgggggtgtttaggggtctggacaggggcggctgaagtgtggggtcgctggttggtggggaagtgacaggcgaatcctgggacgggaggtgaagaaaccgcattctcctgctgagtgggttccctcgtggggttttcaccctgcttggcgccagcctttccgttggaattcaagatctgagaaagaacttgggcaactcgagcagctctccgagatcttatccccaggcacaatgcagaagccggcggtcagtgtcttctgtgacctgactctcaggaaggcggcccccgcgaggcagtggggctcaggtttccattccttggggacacacggctggtcagccagttgaatgattgtatttgggggagaagacagaagtgatctcttccttcctgactctcagactaatgaagagagaaaacaatatgattcagtagcctttgaggatgtggcggtgaacttcacccaggaagagtgggctttgctgggtccatcacagaagagtctgtacagagatgtgatgtgggaaaccattaggaacctggactgtataggaatgaaatgggaagacacaaacattgaagatcagcacagaaatcccaggaggagcctaagatgtcatatcatagagagatttagtgaaagtcgccagccagatagtactgtgaatgaaaaacctcctggagtagatccatgtaaaagcagtgtgtgtggagaaatcatgggttgttcattccttaattgctatatcacatttgatgctggacacaaaccagatgagtgtcaggaatatggagagaagccacatacacataaacaatgtgggacagccttcaattatcaccactcctttcaaacacaggaaagacctcacactggaaagaaacgctatgattgtaaggaatgtgggaaaaccttcagttcttcgggaaaccttcgaagacacataatagtacaacgtggaggtggaccttatatatgtaagttgtgtgggaaagcctttttttggcctagtttatttcgtatgcatgaaagaactcacactggagagaaaccgtatgaatgtaagcagtgttgtaaagccttccctatttacagttcctatctaagacatgaaagaacacacactggggagaaaccatatgaatgcaagcactgttccaaagccttccctgattacagttcctatgtaagacatgaaagaactcacactggagaaaaaccctataaatgtaaacgatgtggaagagccttcagtgtttccagttcccttcgaatacatgaaagaactcacactggagagaaaccctatgaatgcaagcaatgcgggaaagcatttcatcatctgggaagctttcaaagacacatgataaggcacactggagatggacctcataaatgtaagatatgtgggaaaggctttgattgtcctagttcactgcaaagtcatgaaagaactcacactggagagaaaccctatgaatgcaagcagtgtgggaaagcgttatctcatcactcaagctttcgaagtcatatgataatgcacactggagatggacctcacaaatgcaaggtatgtgggaaagccttcatttatcccagtgtatttcaaggacatgaaaggactcatactggtgagaaaccctatgaatgtaaagaatgtggtaaagccttccgtatttctagttcccttcgaagacatgaaacaactcacactggagagaaaccctataaatgtaaatgtgggaaagcctttattgatttctattcctttcaaaatcatgaaacaactcacactggagagaagccatatgagtgtaaggaatgtgggaaagcattcagttgtttcacatacctttctcaacatagaaggactcacatggctgaaaaaccttatgaatgtaaaacatgtaagaaagccttcagtcattttggtaacttaaaagtccatgaaaggattcacactggagagaagccatatgaatgtaaggaatgcaggaaagcattctcttggctcacttgccttctgcgacatgaaagaattcacactggaaagaaatcttatgaatgtcaacaatgtggtaaagccttcactcgttctcgtttccttcgaggacatgaaaaaactcacactggagagaagatgcatgaatgtaaggaatgtgggaaggcactgagttctctcagttccttgcatagacataaaaggactcactggagagatactctataaatgtggaaaagcattcattaattttatttcatttcagaaacgtgaaagaaatcacataggagataagcctcatgaatgcaaacacatggtaaagccttaagatgtttcttttgaatatggttatcccctaaccatatgcaggggattggttccagaccccctaagcatacctaaatccacagatgctgtgttccttttataaaaggacatttgcatgtaacctatccacatcctcctgcatcccataaatcatgcctagattacttaatttttcaccaacccaaagcttttgtaaaagtaaaaataaaaagtaggttactaaaatacctcatgtgttgtaaaagctatgtaaacagtcattttattgtattttttttagagaatcgtgatatgaaaataatcctgtgctgttgagaacagacccaaccatcacaggcctgcctacatagtacatgtcacctagaatgttacagtttctttttttcttttttttttttttaagacagagtttcactcttattgcccaggctggagggcaatggcacaatctcagctcactgcatcctctgcctcccgggttcaagcaattctcctgtcttagcctcctgagtagctgggattacagatgcatgccaccacacccagctaatttttttttttttttttttttttttgtatttttagtagagacggggtttcatcatattggtcaggctggtctcgaactcctgacctcagatgatctgcctgccttggtctcccaaagtgctgggattacaggcatgagcctgtaatctacagtttcttttttttcaacaatcatagattgcttttatttaatgacctggaatcgtgtgttaacacttatgaaaatcctgatccttcttgcttgataacccaaggatgatgatgatgatcatgatcatgatgatgctgattacagtatggtgcctaatatgattcactgaggtgactagatgggtggcactgtagataaacagtgagacatcaggctcacttgaatcttgacaggatgtcaggatgatcatctgtgttggatgaaccaggttctgattgcagatgctgagtttggaagagactaaataatactaatgtcagaatctgttcagcatgagggctgaagatgtgtacacactgaaggatctgtcttcatatttgcagatatttagttagaaacattgttgtaggaagctggttctttttctttaaatatccttgcagtgtttgttggcatgttatcccttgggtgacacagaggttttgttccattgaaggatcttacttgaggatggcaatctttattttatttttatttttatttatttatttatcatttgagactgagtttcgttcttattgcccagtctggagtgcagtggcgcgatctcgactcactgcaacctccacctcccagattcaagcgattctcctgcctcagcctccagagtagctgggattacaggcactcgccaccatgcctggctaatttttatttttagtagagatggggtttcaccatgttggtcaggctggtctcgaactcctgacctcaggtgatccacctgcctcggcctcccaaagtgctgagattacaggcatgagccaccgtgccctgcgaggattgtaatctttaatacttttcaccttgcagaggctgtagatgccccaaaaactgctgcacatgtttcaagtgtcacatctttgatattacctcttctaagtcttctgcatcatcattatcatcattatctgcagagaatttcagtatatcttcgagttccttgttagtatttatgctctcttatttgtgttgggatagaaagattaaggaaaggagagatgagaaggtggctcaacagttgagacagttttattgggagtaaacctgagaagggcttccagcggcagggtcaggtgcaaacttctcttacagcctgaggcttttttaaagggcccagtggagaagtgtgctttgaaacaaaattctgttagggaggggttggggaagtcctggctgttctgttacagttagggccgttattctctgttgaagttatgggcggggctgacattttcagttttggccaggtggccaaatagaaacttaaagcttaggatggtggagtgttataaagatggcggtgctcttgtcctgtcaatgtgttcctcaataaagtcttcaagcatgtcatagattgttttccccaccaacctcccttgcagcatttgagatattcctgatacttcatcaatagtggagaagctcctgaaatcattgacttcctcactccataatggtttccaacacccaatgaagtagtaggaggaaaacatgggtttcttctcctggaagcctccagaagaaggtatttcaatatggggagagtggtcagctgtgtcacaggtcactgagaatttgaataagacaaggaaaaagggttgactgtagattttggcaagtatttggtcactgggggccttgataagagctgtttcattgaagtattcatgagaataacttgtagtgaaatatatctcaaatagacctccacgatgttgcctagagggcagtgttaccctttgaactaccaacattaaccactggaactgctcatctggaagcctcttacagtgctggtacaaactagaatacacaaaggaagggatcattttatacgtgttactgtgctacttgctctatctacttagtgttccatacatgtaattacctattccatcctatcccaaagtactgaaaatctccattctactttctctgtctgtgaatttgactattcatagagagagagatatgtggaagtatgcatgtgtccttccatgtctggcttatttcacttagaacgttttcaaggtttatccatgtggtagcatgtatcaggaactcattgtttttgtgtctgaataaatttccactgtatggttaaagcatactttgtttatccatttttatgttgataaacatgggttgtttccacagtaataatttgactgctatcaataaggctgctgtggatgtggtatgtctatgtctgtgtgagtccctgctttcaattcttttggatatatgtatccctaggagtgtaattgctggttcacagaataattggtgtaaacctttttcaggaacaggtatattgctttacaaagtggctacaatgttttacattctctccagcaatgcataagggtttctattttccacattgtcacatatactggttgtcgtatttttttcataatagccaattaatggttctgtactgctttttcattgtggttttgatttgcatttccctaatgaccaataataatgcacattggtttttgtttttgttggttgtttatatattttttgaaccagtttgttttaaaatcctttgctcattaaaattgagtcatttgtgttttgttgttgagttataggaattcttatttaaaatttttagtttttaatatttagaaaatttctttcttttttcagctcccaagtgcttggaagagagttgtaggaattctttatacactgtgggtattaagcccttatttgatatgtgatatgcagatgtgttctccctttctgtaggttttcttttcatcttgagattgtcctttggtgcgcaaaagtttttaatttcgatgtagtccagtttatcttttattggttgtctgtgccttaaatgtcgtatccaataaatcactgccaaatttaa

SEQ ID NO: 202560 - DNA, 1906 bp, Homo sapiens
  Payload ID: 19945
  Gene Name: zinc finger protein 442
  Uniprot ID: Q9H7R0
  ENST ID: ENST00000438182
  CDS Start-End: 112-1788
agctgagagaagccctggcaggtcagtggcaggcactgtcacgctgagtcctatgctggcagcggggaaccttggggagaacacgggacaccgcggaagccgggaaatggaatgaaatgggaagacacaaacattgaagatcagcacagaaatcccaggaggagcctaagatgtcatatcatagagagatttagtgaaagtcgccagccagatagtactgtgaatgaaaaacctcctggagtagatccatgtaaaagcagtgtgtgtggagaaatcatgggttgttcattccttaattgctatatcacatttgatgctggacacaaaccagatgagtgtcaggaatatggagagaagccacatacacataaacaatgtgggacagccttcaattatcaccactcctttcaaacacaggaaagacctcacactggaaagaaacgctatgattgtaaggaatgtgggaaaaccttcagttcttcgggaaaccttcgaagacacataatagtacaacgtggaggtggaccttatatatgtaagttgtgtgggaaagcctttttttggcctagtttatttcgtatgcatgaaagaactcacactggagagaaaccgtatgaatgtaagcagtgttgtaaagccttccctatttacagttcctatctaagacatgaaagaacacacactggggagaaaccatatgaatgcaagcactgttccaaagccttccctgattacagttcctatgtaagacatgaaagaactcacactggagaaaaaccctataaatgtaaacgatgtggaagagccttcagtgtttccagttcccttcgaatacatgaaagaactcacactggagagaaaccctatgaatgcaagcaatgcgggaaagcatttcatcatctgggaagctttcaaagacacatgataaggcacactggagatggacctcataaatgtaagatatgtgggaaaggctttgattgtcctagttcactgcaaagtcatgaaagaactcacactggagagaaaccctatgaatgcaagcagtgtgggaaagcgttatctcatcactcaagctttcgaagtcatatgataatgcacactggagatggacctcacaaatgcaaggtatgtgggaaagccttcatttatcccagtgtatttcaaggacatgaaaggactcatactggtgagaaaccctatgaatgtaaagaatgtggtaaagccttccgtatttctagttcccttcgaagacatgaaacaactcacactggagagaaaccctataaatgtaaatgtgggaaagcctttattgatttctattcctttcaaaatcatgaaacaactcacactggagagaagccatatgagtgtaaggaatgtgggaaagcattcagttgtttcacatacctttctcaacatagaaggactcacatggctgaaaaaccttatgaatgtaaaacatgtaagaaagccttcagtcattttggtaacttaaaagtccatgaaaggattcacactggagagaagccatatgaatgtaaggaatgcaggaaagcattctcttggctcacttgccttctgcgacatgaaagaattcacactggaaagaaatcttatgaatgtcaacaatgtggtaaagccttcactcgttctcgtttccttcgaggacatgaaaaaactcacactggagagaagatgcatgaatgtaaggaatgtgggaaggcactgagttctctcagttccttgcatagacataaaaggactcactggagagatactctataaatgtggaaaagcattcattaattttatttcatttcagaaacgtgaaagaaatcacataggagataagcctcatgaatgcaaacacatggtaaagccttaagatgtttcttttgaatat

SEQ ID NO: 202561 - DNA, 567 bp, Homo sapiens
  Payload ID: 19945
  Gene Name: zinc finger protein 442
  ENST ID: ENST00000424168
  CDS Start-End: 106-567
aatgcaaatgtcccctgggaggggtcaggtcacagcgaagggaggaagcccaccctatcaagggctgtgtctggaaccgcttcatctcgctccactcagccgtgaatgaaatgggaagacacaaacattgaagatcagcacagaaatcccaggaggagcctaagatgtcatatcatagagagatttagtgaaagtcgccagccagatagtactgtgaatgaaaaacctcctggagtagatccatgtaaaagcagtgtgtgtggagaaatcatgggttgttcattccttaattgctatatcacatttgatgctggacacaaaccagatgagtgtcaggaatatggagagaagccacatacacataaacaatgtgggacagccttcaattatcaccactcctttcaaacacaggaaagacctcacactggaaagaaacgctatgattgtaaggaatgtgggaaaaccttcagttcttcgggaaaccttcgaagacacataatagtacaacgtggaggtggaccttatatatgtaagttgtgtgggaaagcctttttttggcctagttta

SEQ ID NO: 202562 - DNA, 1884 bp, Homo sapiens
  Payload ID: 19945
  Gene Name: zinc finger protein 442
  Uniprot ID: Q9H7R0
  ENST ID: ENST00000545749
  CDS Start-End: 1-1884
atgattgtatttgggggagaagacagaagtgatctcttccttcctgactctcagactaatgaagagagaaaacaatatgattcagtagcctttgaggatgtggcggtgaacttcacccaggaagagtgggctttgctgggtccatcacagaagagtctgtacagagatgtgatgtgggaaaccattaggaacctggactgtataggaatgaaatgggaagacacaaacattgaagatcagcacagaaatcccaggaggagcctaagatgtcatatcatagagagatttagtgaaagtcgccagccagatagtactgtgaatgaaaaacctcctggagtagatccatgtaaaagcagtgtgtgtggagaaatcatgggttgttcattccttaattgctatatcacatttgatgctggacacaaaccagatgagtgtcaggaatatggagagaagccacatacacataaacaatgtgggacagccttcaattatcaccactcctttcaaacacaggaaagacctcacactggaaagaaacgctatgattgtaaggaatgtgggaaaaccttcagttcttcgggaaaccttcgaagacacataatagtacaacgtggaggtggaccttatatatgtaagttgtgtgggaaagcctttttttggcctagtttatttcgtatgcatgaaagaactcacactggagagaaaccgtatgaatgtaagcagtgttgtaaagccttccctatttacagttcctatctaagacatgaaagaacacacactggggagaaaccatatgaatgcaagcactgttccaaagccttccctgattacagttcctatgtaagacatgaaagaactcacactggagaaaaaccctataaatgtaaacgatgtggaagagccttcagtgtttccagttcccttcgaatacatgaaagaactcacactggagagaaaccctatgaatgcaagcaatgcgggaaagcatttcatcatctgggaagctttcaaagacacatgataaggcacactggagatggacctcataaatgtaagatatgtgggaaaggctttgattgtcctagttcactgcaaagtcatgaaagaactcacactggagagaaaccctatgaatgcaagcagtgtgggaaagcgttatctcatcactcaagctttcgaagtcatatgataatgcacactggagatggacctcacaaatgcaaggtatgtgggaaagccttcatttatcccagtgtatttcaaggacatgaaaggactcatactggtgagaaaccctatgaatgtaaagaatgtggtaaagccttccgtatttctagttcccttcgaagacatgaaacaactcacactggagagaaaccctataaatgtaaatgtgggaaagcctttattgatttctattcctttcaaaatcatgaaacaactcacactggagagaagccatatgagtgtaaggaatgtgggaaagcattcagttgtttcacatacctttctcaacatagaaggactcacatggctgaaaaaccttatgaatgtaaaacatgtaagaaagccttcagtcattttggtaacttaaaagtccatgaaaggattcacactggagagaagccatatgaatgtaaggaatgcaggaaagcattctcttggctcacttgccttctgcgacatgaaagaattcacactggaaagaaatcttatgaatgtcaacaatgtggtaaagccttcactcgttctcgtttccttcgaggacatgaaaaaactcacactggagagaagatgcatgaatgtaaggaatgtgggaaggcactgagttctctcagttccttgcatagacataaaaggactcactggagagatactctataa

SEQ ID NO: 202563 - DNA, 2663 bp, Homo sapiens
  Payload ID: 19946
  Gene Name: zinc finger protein 443
  Uniprot ID: Q9Y2A4
  ENST ID: ENST00000301547
  CDS Start-End: 199-2214
aactgtcaatcaggcactgcccagagaagtgtgtgtggttgaaaaagcccgcggcgtctgctccacccacctgcgctcggctctgggttctgtagctgagagacgacctggaagttctgaggcagcctttgtctggctggaacacgcattggcagcgggagctgtcggtaggacctgggacaccgcggaagtcgggaaatggcctcagtggctttagaggatgtggctgtgaacttcacccgagaagagtgggctttgctgggtccttgtcagaagaatctctacaaagatgtgatgcaggaaaccatcaggaacctggattgtgtagtaatgaaatggaaagaccagaacattgaagatcaatatagatatcccaggaaaaatctaagatgtcgtatgttagagagatttgttgaaagtaaagatggaactcaatgtggagaaacatctagccagattcaagatagtattgtgaccaagaacactcttcctggagtaggtccttgtgaaagcagtatgagaggagaaaaagtcatgggtcattcatcccttaattgttacatcagagttggtgctgggcacaaaccacatgagtatcatgaatgtggagagaagccagatacgcataaacaacgtgggaaagccttcagttaccacaactcatttcaaacacatgagaggcttcacactggaaagaaaccatatgattgtaaagaatgtgggaagtccttcagttctttgggaaaccttcaaagacacatggcagtgcagcgtggagatggaccttataaatgtaagttgtgtgggaaagcgtttttttggcccagtttattacatatgcatgaaagaacgcacactggagagaaaccatatgaatgtaagcagtgttctaaagccttttctttttacagttcctatctaagacatgaaagaacacatactggggagaaaccgtatgaatgtaaacagtgttctaaagcctttcctttttacagttcctatctaagacatgaaagaacacatactggggagaaaccatataaatgtaagcagtgttctaaagccttccctgattccagttcttgtctaatacatgaaagaactcacactggagagaaaccctatacatgtaaacaatgtgggaaagccttcagtgtttccggttcccttcaaagacatgaaaccactcacagtgcagagaaaccctatgcatgtcagcaatgtgggaaagcgtttcatcatctgggaagctttcaaagacacatgataaggcacactggaaatggacctcataaatgtaagatatgtgggaaaggctttgattgtcctagttcactgcaaagtcatgaaagaactcacactggagagaaaccctatgaatgcaagcagtgtgggaaagcattatctcatcgctcaagctttcgaagtcatatgataatgcacactggagatggacctcataaatgcaaggtatgtgggaaagcctttgtttatcccagtgtatttcaaagacatgaaaggactcacactgcagagaaaccctataaatgtaaacaatgtggcaaagcctaccgtatttccagttcccttcgaaggcatgaaacaactcatactggagagaaaccctataaatgcaaacttgggaaagcctgtattgatttctgttcctttcaaaatcacaaaacaactcacactggagagaagccatatgagtgtaaggaatgtgggaaagcattcagtcgtttcagatacctttctcgacataaaaggactcacacaggagagaaaccttatgagtgtaaaacatgtaggaaagccttcggtcattatgataacttaaaggtacatgaaagaattcactctggagagaagccgtatgaatgtaaggaatgtgggaaagcattctcttggctcacttgctttctacgacatgaaagaattcacatgagagagaaatcctatgaatgtccacaatgtggtaaagccttcactcattcccgttttcttcaaggacatgaaaaaactcatactggagagaacccgtatgaatgtaaggaatgtgggaaagcatttgcttctctcagttccttgcatagacataaaaagactcactggaaaaaaactcacactggagagaacccatatgaatgtaaggaatgtgggaaagcatttgcttctctcagttccttgcatagacataaaaagactcactagcattctctctaaatgtatggaatgtgggaaagcatttattaattttatttcatttcagatacttgtacgaaacacattggagatagaccctgtgaatgtaagcacttggtaaagccttaagtagtttcagtttctttccagtacagtcatcccttgatacctgctgggtattggttccagcactccgtgagccatgtccagtcccttttataaaatgacatgtttgtatgtaacttacccacatcctcttgtatagtctcaattatgtctagattacttaaaatacctcatgcattataaaagctatgcaaatagttgttctattgtattgtttagggaatcatgataaggaaaagagtctatgtattttcagtatagatgcagtaattgtgagcctatcaacatagtgtagtcagccagaacattaaagtttctttgtttcaactctc

SEQ ID NO: 202564 - DNA, 800 bp, Homo sapiens
  Payload ID: 19946
  Gene Name: zinc finger protein 443
  ENST ID: ENST00000436821
  CDS Start-End: 108-302
gtagctgagagacgacctggaagttctgaggcagcctttgtctggctggaacacgcattggcagcgggagctgtcggtaggacctgggacaccgcggaagtcgggaaatggcctcagtggctttagaggatgtggctgtgaacttcacccgagaagagtgggctttgctgggtccttgtcagaagaatctctacaaagatgtgatgcaggaaaccatcaggaacctggattgtgtagtaatgaaatggaaagaccagaacattgaagatcaatatagatatcccaggaaaaatctaaggtaatttacactcacaagagaaagatatgtccctggagccgttctgagaatgacatgaaaatttaaaaagaagcaaagaaaatgaacaagatgtcgtatgttagagagatttgttgaaagtaaagatggaactcaatgtggagaaacatctagccagattcaagatagtattgtgaccaagaacactcttcctggagtaggtccttgtgaaagcagtatgagaggagaaaaagtcatgggtcattcatcccttaattgttacatcagagttggtgctgggcacaaaccacatgagtatcatgaatgtggagagaagccagatacgcataaacaacgtgggaaagccttcagttaccacaactcatttcaaacacatgagaggcttcacactggaaagaaaccatatgattgtaaagaatgtgggaagtccttcagttctttgggaaaccttcaaagacacatggcagtgcagcgtggagatggaccttataaatgtaagttg

SEQ ID NO: 202565 - DNA, 2042 bp, Homo sapiens
  Payload ID: 19947
  Gene Name: zinc finger protein 444
  Uniprot ID: Q8N0Y2
  ENST ID: ENST00000337080
  CDS Start-End: 368-1351
cggggcttcatggggagttgttgggctgaacgagcggctcggagtatgggattgggggagggggacgggggagtttggcgcaaagcctgctggggcatggagtcccggcgagctttgtgcgcatgtgcggggaggtgagggggcttggggggcctcgcctgagagagtgaggacaggctgcgggaggagctgcaggactgaggtacagaggccaggggcccagggcaggacccagcctggacttgactccctgggatcccaggaagggcacaccctttcctcaccacccgagtgagcgctgccccctcacagagacctctttgccccctgggccaggcagagcaggcgctgcggtccgggaggccccatggaggtggcggtgcccgtgaagcaggaggccgagggcctggcgctggactccccgtggcaccgcttccgccgcttccacctgggcgacgcgccgggcccgcgggaggcgctggggctgctccgcgccctgtgccgggactggctgcggcccgaggtgcacaccaaggagcagatgttggagctgctggtgctggaacagttcctgagcgcgctgcccgccgacacgcaggcctgggtgtgcagccggcagccgcagagcggggaggaggcggtggccctgctggaggagctctgggggccagcagcctcccccgatgggtcgtcagcaacgagggtgcctcaggatgtgacgcagggccctggggccacaggtggaaaggaggacagtgggatgattcccttagcaggcaccgcccctggggctgaggggccggcgcctggggactcccaggctgtgcgcccctacaagcaggagcccagcagccccccgctggcgcctggcctgcccgccttcctagcggccccgggcaccacgtcctgccccgagtgcggcaaaacgtccctgaaaccagctcacctgctgcgccaccggcagagccactcgggcgagaagccgcacgcctgccctgagtgcgggaaggcctttcggcgcaaggagcacctgcggcgccaccgcgacacgcaccccggcagccccggcagccccgggcccgcgctgcgccctctgcccgcccgtgagaagccccacgcgtgctgcgagtgtggcaagaccttctactggcgcgagcacctggtgcgccaccgcaagacgcactcgggagcgcggccctttgcctgctgggagtgtggcaagggcttcgggcgccgcgagcacgtgctgcgccaccagcgcatccacggccgggcagcggccagcgcgcagggggcggtagctccgggcccggatggtggaggccccttcccgccctggcccttgggttagccgcctcccggccagcgccatctcccgcccttggtgctgcccccgggcggtacctgctctctcccagcgccacttggcctcttcctctcctccttccctcccatcgtcctcctccacctgcgcctcccttgtctgaacttcccaacgccttcctattcctttccaactccttttcccccaaatttcactttccttctcaggtctcacctcagccccccccttctccctgatttctcggcctctctctctgtgtgaaggggcctctccctaatgtctcctccttcccccctcttctctctcctgcggcccagcctccctctccctcctccattcctctctccctgcccttttcctgcctgaagagcagaggtgaggacctgggacccctgaggggcaggccaggaggagctcgggcgcaggccaggcccccttggtgaagcagaggctgaaggaaaggggtctgggtcttgtccctaggaattctcctccctcaggagattgggggttgggggaggcagcgggtgatggctctgaagctgaacccagggcctggctgtggtcttcttggtcttgctgccccctgtgacccaaaggcatgggatggacagagatgcctgcccccgtgaagctggttggggagggcagttcaccagcatccatagagtaataaagtcactgtgtgtagacccgg

SEQ ID NO: 202566 - DNA, 562 bp, Homo sapiens
  Payload ID: 19947
  Gene Name: zinc finger protein 444
  ENST ID: ENST00000593100
  CDS Start-End: 265-562
aaagctgagtgggaagctggaccctacaaaggagtctgggggcgccgggaccggaccccttcggaaaggacaggctgcgggaggagctgcaggactgaggtacagaggccaggggcccagggcaggacccagcctggacttgactccctgggatcccaggaagggcacaccctttcctcaccacccgagtgagcgctgccccctcacagagacctctttgccccctgggccaggcagagcaggcgctgcggtccgggaggccccatggaggtggcggtgcccgtgaagcaggaggccgagggcctggcgctggactccccgtggcaccgcttccgccgcttccacctgggcgacgcgccgggcccgcgggaggcgctggggctgctccgcgccctgtgccgggactggctgcggcccgaggtgcacaccaaggagcagatgttggagctgctggtgctggaacagttcctgagcgcgctgcccgccgacacgcaggcctgggtgtgcagccggcagccgcagagcggggaggaggcggtggccctgctggaggagctctggg

SEQ ID NO: 202567 - DNA, 646 bp, Homo sapiens
  Payload ID: 19947
  Gene Name: zinc finger protein 444
  ENST ID: ENST00000587467
  CDS Start-End: 377-646
gaaatgcagcttcaatctccaaccggagagatttctctccagagagtaaagggctggaagtgggggcgagacggaagccacagtatcaacctctgagaagccgcgttcattcctgccagacattgcgagatacagttgggaagaatttccaaggaattcttctctgccttggcagtgagggacaggctgcgggaggagctgcaggactgaggtacagaggccaggggcccagggcaggacccagcctggacttgactccctgggatcccaggaagggcacaccctttcctcaccacccgagtgagcgctgccccctcacagagacctctttgccccctgggccaggcagagcaggcgctgcggtccgggaggccccatggaggtggcggtgcccgtgaagcaggaggccgagggcctggcgctggactccccgtggcaccgcttccgccgcttccacctgggcgacgcgccgggcccgcgggaggcgctggggctgctccgcgccctgtgccgggactggctgcggcccgaggtgcacaccaaggagcagatgttggagctgctggtgctggaacagttcctgagcgcgctgcccgccgacacgcaggcctgggtgtgcagccggcagccgcagagcggggaggag

SEQ ID NO: 202568 - DNA, 585 bp, Homo sapiens
  Payload ID: 19947
  Gene Name: zinc finger protein 444
  ENST ID: ENST00000588203
  CDS Start-End: 452-585
agcttgatggcctgtggcattgctctctggcggaaattcctccttagtcccagagggatcttttttatagcagagcaggcatctgtgtggcttttgagacttggatctggcctgggtcttccgataagtctttctgcctgctcccaggttcatcagcccttaaactgatggatgggtggggtgggaggtgatgctgtggcctggctgtggatgtgcaagtccaggctctgccacgtgttagctgagtgactttaggacaggctgcgggaggagctgcaggactgaggtacagaggccaggggcccagggcaggacccagcctggacttgactccctgggatcccaggaagggcacaccctttcctcaccacccgagtgagcgctgccccctcacagagacctctttgccccctgggccaggcagagcaggcgctgcggtccgggaggccccatggaggtggcggtgcccgtgaagcaggaggccgagggcctggcgctggactccccgtggcaccgcttccgccgcttccacctgggcgacgcgccgggcccgcgggaggcgctggggctgctccgcgccctgtg

SEQ ID NO: 202569 - DNA, 642 bp, Homo sapiens
  Payload ID: 19947
  Gene Name: zinc finger protein 444
  ENST ID: ENST00000588358
  CDS Start-End: 426-642
gtgcattctgggaaatgtagtccaaagcctgtcgcgctcagacagcccgcgacatttgcgccgtcaaggccaaataggctgcagacgacgctttcgcgtatcttgggaaatgtagttccagtgttggcgaagacgccacgcggtgacaaacaggagtaaggcggtccccaggcgagggccaattggcagccgcctttgccgcgatgcttcctgggagttgtagttcggggacaggctgcgggaggagctgcaggactgaggtacagaggccaggggcccagggcaggacccagcctggacttgactccctgggatcccaggaagggcacaccctttcctcaccacccgagtgagcgctgccccctcacagagacctctttgccccctgggccaggcagagcaggcgctgcggtccgggaggccccatggaggtggcggtgcccgtgaagcaggaggccgagggcctggcgctggactccccgtggcaccgcttccgccgcttccacctgggcgacgcgccgggcccgcgggaggcgctggggctgctccgcgccctgtgccgggactggctgcggcccgaggtgcacaccaaggagcagatgttggagctgctggtgctggaacagttcctgagcgcgctgc

SEQ ID NO: 202570 - DNA, 574 bp, Homo sapiens
  Payload ID: 19947
  Gene Name: zinc finger protein 444
  ENST ID: ENST00000586123
  CDS Start-End: 363-574
gtgcgcatgtgcggggaggtgagggggcttggggggcctcgcctgagagagtgagtcaacgaaatggagatacagggtattacaaaaggtgccttgtacctcgtccaaggacacagagctggtaggaggcagagctggaatttgccccagagcctttgtgccgtaggacaggctgcgggaggagctgcaggactgaggtacagaggccaggggcccagggcaggacccagcctggacttgactccctgggatcccaggaagggcacaccctttcctcaccacccgagtgagcgctgccccctcacagagacctctttgccccctgggccaggcagagcaggcgctgcggtccgggaggccccatggaggtggcggtgcccgtgaagcaggaggccgagggcctggcgctggactccccgtggcaccgcttccgccgcttccacctgggcgacgcgccgggcccgcgggaggcgctggggctgctccgcgccctgtgccgggactggctgcggcccgaggtgcacaccaaggagcagatgttggagctgctggtgctggaacagttcctgagcgc

SEQ ID NO: 202571 - DNA, 1906 bp, Homo sapiens
  Payload ID: 19947
  Gene Name: zinc finger protein 444
  Uniprot ID: Q8N0Y2
  ENST ID: ENST00000592949
  CDS Start-End: 234-1214
gtgagggggcttggggggcctcgcctgagagagtgaggacaggctgcgggaggagctgcaggactgaggtacagaggccaggggcccagggcaggacccagcctggacttgactccctgggatcccaggaagggcacaccctttcctcaccacccgagtgagcgctgccccctcacagagacctctttgccccctgggccaggcagagcaggcgctgcggtccgggaggccccatggaggtggcggtgcccgtgaagcaggaggccgagggcctggcgctggactccccgtggcaccgcttccgccgcttccacctgggcgacgcgccgggcccgcgggaggcgctggggctgctccgcgccctgtgccgggactggctgcggcccgaggtgcacaccaaggagcagatgttggagctgctggtgctggaacagttcctgagcgcgctgcccgccgacacgcaggcctgggtgtgcagccggcagccgcagagcggggaggaggcggtggccctgctggaggagctctgggggccagcagcctcccccgatgggtcgtcagcaacgagggtgcctcaggatgtgacgcagggccctggggccacaggtggaaaggaggacagtgggatgattcccttaggcaccgcccctggggctgaggggccggcgcctggggactcccaggctgtgcgcccctacaagcaggagcccagcagccccccgctggcgcctggcctgcccgccttcctagcggccccgggcaccacgtcctgccccgagtgcggcaaaacgtccctgaaaccagctcacctgctgcgccaccggcagagccactcgggcgagaagccgcacgcctgccctgagtgcgggaaggcctttcggcgcaaggagcacctgcggcgccaccgcgacacgcaccccggcagccccggcagccccgggcccgcgctgcgccctctgcccgcccgtgagaagccccacgcgtgctgcgagtgtggcaagaccttctactggcgcgagcacctggtgcgccaccgcaagacgcactcgggagcgcggccctttgcctgctgggagtgtggcaagggcttcgggcgccgcgagcacgtgctgcgccaccagcgcatccacggccgggcagcggccagcgcgcagggggcggtagctccgggcccggatggtggaggccccttcccgccctggcccttgggttagccgcctcccggccagcgccatctcccgcccttggtgctgcccccgggcggtacctgctctctcccagcgccacttggcctcttcctctcctccttccctcccatcgtcctcctccacctgcgcctcccttgtctgaacttcccaacgccttcctattcctttccaactccttttcccccaaatttcactttccttctcaggtctcacctcagccccccccttctccctgatttctcggcctctctctctgtgtgaaggggcctctccctaatgtctcctccttcccccctcttctctctcctgcggcccagcctccctctccctcctccattcctctctccctgcccttttcctgcctgaagagcagaggtgaggacctgggacccctgaggggcaggccaggaggagctcgggcgcaggccaggcccccttggtgaagcagaggctgaaggaaaggggtctgggtcttgtccctaggaattctcctccctcaggagattgggggttgggggaggcagcgggtgatggctctgaagctgaacccagggcctggctgtggtcttcttggtcttgctgccccctgtgacccaaaggcatgggatggacagagatgcctgcccccgtgaagctggttggggagggcagttcaccagcatccatagagtaataaagtcactgtgtgtagacccgga

SEQ ID NO: 202572 - DNA, 586 bp, Homo sapiens
  Payload ID: 19947
  Gene Name: zinc finger protein 444
  ENST ID: ENST00000591564
  CDS Start-End: 356-586
agcagttagttggggtggcttctgagtaggctgcaaagtgtctgctcccagggtgtggggtgcacggccccacaagtccagtgagggtggtgctgatggtgacctgctgctgccaggcctgctgcaagctctttctgtgttttctggttgaatcctcaggacaggctgcgggaggagctgcaggactgaggtacagaggccaggggcccagggcaggacccagcctggacttgactccctgggatcccaggaagggcacaccctttcctcaccacccgagtgagcgctgccccctcacagagacctctttgccccctgggccaggcagagcaggcgctgcggtccgggaggccccatggaggtggcggtgcccgtgaagcaggaggccgagggcctggcgctggactccccgtggcaccgcttccgccgcttccacctgggcgacgcgccgggcccgcgggaggcgctggggctgctccgcgccctgtgccgggactggctgcggcccgaggtgcacaccaaggagcagatgttggagctgctggtgctggaacagttcctgagcgcgctgcccgccgacacgcag

SEQ ID NO: 202573 - DNA, 18299 bp, Homo sapiens
  Payload ID: 19948
  Gene Name: zinc finger protein 445
  Uniprot ID: P59923
  ENST ID: ENST00000396077
  CDS Start-End: 349-3444
ggagccgccgggaggtaggcgcgggacgggcggctgcggtggcggcgggtggaccgattgtcgctcggcggcgggagtcggtggagtctcgctctttcgcaaggctggagtgcaatggcatgatctcggctcactgcagcctccgcctcctgggttcaagtgattcttctgcctcagcctcccgagtagctgggactacagaaatgctggtaatttcagtcacttgctgatgacttctgatgtcccagcaaatgttggcattgttgactgctgagaagatacttctgaggacccacgtctaaggtggacttggttcgcactcttctggttagtccctgaacaggagtgatgcctccaggcaggtggcatgctgcctatccagctcaggcccagtcttcgagggagcgagggcggcttcagacagtaaagaaggaagaagaggatgaaagctatactccagtgcaggctgccaggccacagactctcaaccgccctggccaggagctgttccgccagctcttcagacagcttcgctaccatgagtcttcagggcccctagaaactctgagccggctccgggaactctgtcgctggtggctgaggcctgacgttctctccaaggcacagatcctagagctgctggtgctggaacagttcctgagcatcctgcctggggagctccgggtttgggtgcagcttcataaccctgagagtggcgaggaggctgtggccttgctggaggagctgcagagggaccttgatgggacatcctggagggacccgggccctgcccagagcccagatgtgcattggatgggtacaggagccctgcgatctgcacagatatggtcccttgcttcacctctcaggagcagctctgctctgggggaccacctggagcctccctatgaaatagaagcacgtgacttcctggctgggcaatccgatactcctgctgcccagatgcctgcccttttcccgagagaggggtgcccgggagaccaggtaacaccaaccaggtccctgacagcccagctccaggagaccatgactttcaaggatgtggaggtgaccttctcccaggacgagtgggggtggctggactctgctcagaggaacctgtacagggatgtgatgctggagaattataggaacatggcttccctggtgggaccattcaccaaacctgctctgatctcctggttggaagcaagggagccatggggcctgaacatgcaggcagctcagcctaaggggaatccagttgctgctcctacaggagatgacctccagagtaaaacaaacaaattcatcttaaatcaggaacctttggaagaagcagaaaccttagctgtgtcatcaggatgtcctgcgacaagtgtttctgagggaattgggctcagagaatcttttcaacagaagagcaggcagaaggatcaatgtgaaaatcccatacaagtaagagttaagaaagaagagaccaatttcagtcacaggacaggaaaagactctgaagtatcaggaagtaatagtcttgacttaaaacatgttacatatttgagagtttctggaagaaaggaatcccttaaacatggctgtggcaaacacttcagaatgagttcacaccactatgactacaagaaatatgggaaggggctcagacacatgattgggggcttcagcctacatcagagaattcatagtggactgaaagggaacaaaaaggacgtgtgtggaaaagacttcagccttagctctcatcaccaacgtgggcagagtcttcacacagtgggagtgtcatttaagtgcagtgactgtggaaggactttcagtcatagctcccatcttgcgtatcatcagagacttcacactcaagagaaagcatttaaatgtagggtgtgtgggaaagccttccggtggagttccaactgtgcgcggcatgagaaaattcacactggagtgaagccttataaatgcgatttatgtgagaaagctttccgacgcctgtcagcctaccgtctgcaccgagaaacccatgctaagaagaaatttcttgaattgaatcagtatagggcagctctcacctacagctcagggtttgatcatcatttgggagaccaaagtggggagaaactctttgactgcagccagtgcaggaaatccttccactgtaagtcatatgttcttgaacatcaaaggattcacacccaggagaagccctataaatgtaccaaatgtaggaaaacctttagatggagatcaaactttactcgtcatatgaggttgcatgaggaggaaaaattctacaaacaagatgaatgtcgtgaaggcttcaggcaatctcctgactgcagtcagccccagggtgctcccgctgtggagaaaacatttctgtgtcagcagtgtgggaaaacttttactagaaagaaaactctcgttgaccaccagagaattcacacaggtgagaaaccttaccagtgtagcgattgtgggaaggactttgcctataggtcagcctttattgttcataagaagaagcatgccatgaaaagaaaacctgagggcgggccatcttttagtcaggacacagtgttccaggttcctcagagcagtcactccaaagaggagccctacaaatgcagccagtgtggcaaggccttccgcaatcactcattcctcctcatccatcagagagttcacactggagagaagccatataagtgcagggagtgtgggaaagccttcagatggagttccaatctctaccgacatcagaggattcactctcttcaaaaacagtatgattgccatgaaagtgaaaagactccaaatgtggagccaaaaatcctcactggtgagaaacgtttttggtgtcaagaatgtgggaaaacctttacacgtaaaagaacccttttagatcataagggaatacacagtggagagaagcgctataaatgtaatctatgtgggaaatcttatgatagaaactatcgccttgttaaccatcagaggatccactctacagagagacctttcaaatgtcagtggtgtgggaaagagttcattgggagacataccctttccagtcaccagaggaaacacaccagagcagcacaggctgaacgtagcccgcctgcacggtcttcctctcaggacacaaagttgagattacagaagctaaaaccaagtgaagagatgcccctcgaagactgcaaagaagcttgcagccagagctccaggctcactggactccaggacataagcattgggaaaaagtgccacaaatgcagcatatgtgggaaaacttttaacaagagttcacaactcattagccacaagagatttcatactcgagagaggcccttcaaatgcagcaagtgtggaaagaccttcaggtggtcttcgaacctggctcggcatatgaaaaaccatattagagattagcctgggacctgacagtgacagtgggggtgggttctcagtcccctgctagagaacccttaattataggcattgtggagtaactttgataaagggcccagccctttctgttttggaagctagtgacagaatcccaaggatttgaaagctcggggagtccccagcctgcctgctaggatgtgacgctggggaagtgcagcaccatgtcctttggagcccttctggagactccggcccctaggagtggcctctgcaccatagcctgcggctcccctattcaggtctccttccacaactctgaagagagagaccactgccctttgtggttggacagaatatctgtggcatcatgggctatggctgctggaaaggggccagtgggatcctagatttgtcttcaagtttggcctgtggccatgcctattctgttgactttaaaagcagcagcatcaagaactcctagccttcccaaatgccccctggggagttctggctggggcttcagccttcctggctggcttttggatatctgctagggggttagagtggtctcagcggcaggtggaggagagcaggatgctgggctcaagcgcttggcgtgtggatctctaccagtaccctgttgccatccccatcccacaggcctgcataggcagcagcggtccatctgtttaacagaaatgtgctgagcactcccatacaccaggcgctggtgtgtttgccagagacccagcagggaccagaacagatgaaaatcctgccatcttggatctttacagatgacaaacaaatgggatacgcagtattctggatggtgatgtgtgtagtggacaaagtgaatcagagaagagcagagggagtgctggattgggagatcagtcgtgattttagatagtctggtcagggagggcctcaactgagaaggtgaaatgtgagcaaagacgtgaaggaagccagggaggtagcaggtagctctctagggagagttgcaggcagaggagattgggtcttgactggtgtcctcaggaaggaagcccctgggatggagtgcagggagccagctggaagggaaggagaggggccagggaggccacaggcccggccatatgagcatcatgggtcattacgggggcttgagctggctcagagggaggcagggagcttttggacaattttgagttgaggagtgatgtggtttgaatctgaattatattttataagggttaaccacagatccaaggactcagtaaaagggtgaaaggcttctcatgcagttagccttgctgccagttcccataaatcagactcctccccactccgtttctgaattttctataggatcctcggcctcagcagatataaacgcttaccattgttgtgttcatgtctctagcccctgcacactgcaggcccctctcagcttcacatacccctctccatgtatgagatctggtgctagcaatcagattcaacccgaaggaacaagtgcatgtgcctgctgctctcaggagaaaaggcagcctgttctgggaggagctccctcactggcccacccacttgtgttgaagcaaaaagcaagaatcaattacttaaaggcaaaggagtgatattgctaaagcatgtgagtaatcattgcttctgattattgaagaggtcagattatgaatgaaaggataaaatgttttaatagtagagcagtgtcctgactataggggcccgttcatggagctggtcatttcttgaaatgagaagaaaccaacctggaagatgtctttttcagtagagtatggaataatcttacctgctctggattgccatgagcaggtgaaaatgaaggctctgatattgtgtggtggtgtcacaggatggtgggggcggggcagaagtctcctgttggtgttctgatgcctgttcagctttgtcctcaggaaggtttggtcatcttggttctgccatcctcttgccttcctacggcagcagctgttcatggcactgaagatgtcccttcactgtcccaaaactggcactagaagtggctgggcaggggggccagagtcataggaagggtcttggagtcatcagatctgggttccaggcatggtgtgccttttcttggcaggattgatcttgagcaagtcaatgaacctctgcatcaatttccttatgtgtgaagttagagtgcttggctgtgctacctgattcctgagattggtgaaagagggcttggtttaccaaggctctccatcaggtggttgacctctaggaccagggccctctcagaggtgcagcttccatgtcagttggtgttgtaaccatggaaaagtccctttccaatcaaacttttagcacccctttccccccatctctgctccctttgccacaggataccttgtaaagttcctgccccagtatagggatatttttactgtcttttttattttttgagacagggttgcccagggtggagtgcagtggcaggatcacagcttactgcagccttgacctcccaggctcaggtcccatctgagcctcccgagtagctggggctacaggtgtgtgccaccctgccagctaattttttatatttttttgtagagacaaaacttttatttttttttcccatgttgctcatgctggtctcaaactcctgggctcaagcaatccacccacctctgcctcccaaagtgctgggattacaggcgtgagccactgtgcctgacctgtcatttttatagaatgaaatgtgcttatttctaaacattctaatcaaattttaaaatgtgcaaagaatgaagtgaaaaactgaatttttttttttttttgatacggagtctcactctgttacccaggctagagtgcagtggcgcgatctccgctcactgcaagctctgcctcctgggctcacaccattctcctgcctcagcctcctcagtagctgggactacaagtgcctgccaccacgcctgggttattttttatatttttagtagagacggggtttcactgtgttagccaggatggtctcgatctccaggatggtctcgatctccaggatggtctcgatctcctgacgtcgtgatccacccgcctcggcctcccaaaatgctgggattacaggtgtgagccactgtgcccggccaaaagaacagaaattattttatcctgaagtaagctgtttatatttgggattatactgaacctatttgtccaataacctgagttttcaaataattttagttctataagtactataattatataaatattaatgaattcagattagctgaaaggaaaaaaagtagaagcctgactacttggtgctaactactaaagattttggcagaatcaatgttggatttggctttcctgtcccttccccatgccagccccccagagtgttctgccttgtgctgcctcccttcacctggagtgccacacccctctctctgccagttcagctcttcattcttcaaggcctgaccttgtctgacccttgtgcctctaaacccgtggccccacctctcttggttcctatgtcaggtgatgtttgtgtttttggttatgcccatctccatagccagaccaagcactctggaagccagggttgggtgcttatttatctgtttgccatgcagaaaatatcttgcacaaaattacctctgttaaggaatctgaagctgaatttagtttggctgagtcagggttgggttttttttaaggggctgtggggtgaaatgttgactggaagccacccacaaacacacacctgctggttaggaacccggctgtgggtggttctgagctgtttggcttcagttgacagtttctgattgccctgagcaccaggtctcatcttgcatctcatcctggcctggagaacattcagtttccttccaacccttcccacctttcccccactcccttggaggaactgaagttggggttgaggagagccagatggctggagtgggtatttgaaggtctttctgtcacctgttcagtgtggtctgccccacccctgctgaccaagactgactgaaatgtaaaataatacagaccatctcacactcagaaagctggcacatttttgaaagcccaagtgtgggtaagtgcgtggaacaacgataattcacactgctttatgagtagaaattgtgagaaatattgtgccaggcaatttgcaaaatcttggaaggttgtgtgcacttaaccacccagcaactactcctggatgcatcctagagaagtgccatgtgaacagagaatgattttaagacttcactgaagtattgtttaggtagcaagattgggaaaagcctgcatttcatcagcagaagaatggataaataaatgggttgtttttggtccttggaaagtgaatatgaaagagttacgtctcaacacagatagatgaaaaattatgctgagaaagttggtgaagctacatacaaggtacccttagtgtaaagttaagcatactgtgtacctgtgggcacgttacttcaacttgtttttcactttttctgtaaaatgggatagtagtggcaatctcacagggtgattgtgggtgggggggtggtcaatgaagtaatgcatgtaaaatgcttagaatagtgtctagcatgtaagccttgtggacatatagaaagtgttattgttttgcacagtaatctattttctgtggattcaaataatatgaaatgagtataaaatcatgtattggaacgatgtgtgcaagtcaccattctgccttcctaaggcaggagacctgatggatttggggagggtacatggggccttcagttgtgttttctttgtttttttctaaaaattgatgcagaggcatcacaatgttaagatttttacagggtagtgtggtgggtactttttaactgtttgcttaaagtgtttcaaagtaaaaatatttcttaagcatagtctctgacatcttatgactttatagaaatccctgccaggtacatgatgttacttagagtgagccacctaatctttcaaggcttccatttcctcacctgcaaaaattgggagtgtcagaggcgtttgaaccagagtgactccatcttgaatagggaactgggtaaaataaggctgagacctactgggctgcattcccaggaggttaggcattccaagtcatgggatgagataggaggtcagcacaagatacagtcataaagaccttgccaataaaacagcatgtggtaaagaagccggtcaaaaccaagatggcaatgaaagtgacctctggttgtcctcactgctgtaattatactgtaattataatgcattagcatgctaacagacactcccaccagtgccatgacagtttacaaacgccatggcaggcctggcacgatggctcatgcctgtaatcccagcactttgggaggccaaggcgggcggattatgaggtcaggagattgagaccagcctggccaacatggtgaaaccctgtctctactaaaaaatacaaaaattagctgggcatggtggcacgtgcctgtaatcccagctacttgagaggctgaggcaggagaatctctagatcccgggagttggaggttgcagtgagccaagatggtgccactgcactccagcctgggtgacagagcaagactctgtctcaaaaaaaaaaaaaaaaaatgccatggcaacatcaggaagtaacactatatggtctaaaaaggagaggaaccctcagttctggtaattgctcacacctttcccgggaaacttatgaataatctaccccttgtttagcatataatcaataaataaccataaaaataggcaaccagcagcccttggggctactcttcctatggagtagccattctgtatttctttactttcttaatattaactactttcactttgtggactcgcccgaattcttttcttgagcaaggtccaagaactctctcttggggactggatcacgaccgctttctggtaacaggagcaatacaaatggctattagtaaacgaacgcttaagtaactctagtacatctatgatgaaataccaggccacagtttttttaaaaatgaggatgttctctatatactgacgcacagtcaccaagacatgcactttataggaaattataagctcctccttgcctaaatctccttaattttgcttaataaataacaagtgaagccagaagctgtaaactcataattttaatgaagaaatgggatccagaagatggagatgtttttcattctactttattagatgaggaaaaggagagtaaatacttgtatgccagctaccacaccttttaaagttaatgttaaccctgctaagaacagcaaggagattttatatcagccaggttttagttgccagaaaccacaccagttattttagcaaagaccttataaagaagtgtactatatttaagtagctaaaaaggcaagaagaaaatgccaaggtgtcttggaggtagcaactgctaagcagctgccaccccaggactgggggagctagaatagagtctccccatgtttgacgtttgtctgctaatagcattcaagctctccccctcagtttgcctggatctggacaagctgataagaaagcccagccacttcctctttgcgtcagaggggaagttcaaactgtgcaaaccctgactgtcaaatgcactgagctctcataaccacaacaaaaaccagagccacttgttcgtcctttcactgaagcccaacagactggcgtgggtgcccgctttgctttccctagaaggcctcatgtgagtagtaaactttttcataacctcttggtgtctgcagtgtcatcagtttcaacatccgaaccagttttgagtgatggtagtttattgatcccacctcatgtggagcaaagtgcaaagcaggaacaaagagacgtggctagaattgttgaaaggtgggagattggaagagggaccttgtggagctgaactcagacctatggtggaggagtggactgctgggctgacatagtgtctgtgctcagggaggggccctgtggcctttggatctgtgcttctgtggagaggtcccagctactaatgctggggcagggagcagaagggagggtcacaatgagactttgagtgttagttaaccaccttttgcctgaagaacatgtaatggccttccctgaggtatatgtcttccaaaagtccgctgacgttgctcatgacctatggtcaccactgctttttgcgttttgctttttttttttttttttttttgagacaaggtctcaccctgtcacccaggctggagtgcagtggcacgatctcagctcactgcaacctccactttcccaggctcaagcgattctccagcctcagcctcctgactagctgggactacaagcgtgcaccaccacacccagctaatttttgtatttttgtagagacaaggtttggccatgttgcccaagctggtcttgaactcctgacctcaagtgacccacctgcctcagcttgccaaagtgctgggattacaggtgtgagccaccatgcctggagtccttgttttttttttttttatacttttagggtacatgtgcacaatgtgcaggttagttacatatgtatacatgtgccatgctggtgcgctgcacccactaactcatcatctagcattaggtatatctcccaatgctatccctccccccctccccccaccccacaacagtccccagagtgtgatgttccccttcctgtgtccatgttttctcattgttcaattcccacctatgagtgagaatatgcggtgtttggttttttgttcttgcgatagtttactgagaatgattatttccaccttcatccatgtccctacaaaggacatgaactcatcattttttatggctgcatagtattccatggtgtatgtgtgccacattttcttaatccagtctatcattgcctggagtccttttaaaaaaattatttttttggccaggcacggtggctcacacctgtaatcccagcactttgggaggctgaggcgggcagatcacgaggtcaagagatcgagaccatgctggctaacgcggtgaaaccccgtctctagtaaaaatacaaaaaattaaccgggcgtggcagcgggcgcctgtagtcccagctactcgggaggctgaggcgggcagatcacgagatcaggagattgagaccagccagcctggccaatatggtgaaaccccatctctattaaaaatacaaaaattagccgggtgtggtggtgtgtgcctgtaatcctagctactggggaggctgaggcaggagaatcacttgaacccaggaggtggaagttgcagtgagccgagatcgcacaactgcactccagcctgggcgacagagtgaaactttgtctcaattaaaaaaaaaaaaaagtgaagtgcaaaatgtgactgaggagatacagtactctccaaattgcataattttgccaatttttatagaaacctggggaatctgtagagatagcgtcagaagcattggaacgagagcaactccatgttgaataggggctgggtaaaagtgtcagaggtatttgaaccagagcgactccattttgagtgagggctgggaaaatgaggctgagacttactggcctgcattctcagaaagttaggcattcctaccctctaggattgaattgggacccctttcctgtaacatatttctggtgaccacagaagggactatagtgcagaaacgttgacccaacggctacctttgcgtaagtgttggggtcctgtaacatatttctggcaaaccacagaaaggatgatactgaagaaatccccccaaccccaaagaaatagactgcagcactgattggacgactttgggtaagtgatggggtacccgagtaacaaatgggattgggttagaggcccaacttaggggagttggagtttctcctaagacagagtgagttagaggcccctcttaataaaaggcaaggacacttgactgacctcaggttagaggttactccatcctactctatggagtagctgtcctttcaccactttactttcttaataaacttgtttttgctttgcactgcggacttgccctgaatcctttcttgcacgagatccaagaactctcttaagagtctggatcgggacccctttcctgtaacaaaatgaggctgagacctactgggctgcattcccagacggttaaggcattctaagtcacgggatgagataggagattggcacaagatccaggccacaaagaccttgctgataaagcaggttgcagtaaagaagccagctaaaacccaccaaaaccaagacggtgatgagaatgacctctggtcatcctcactgctaccctcccaccagtgccatgacagtttacagttgccatggcaacatcaggaagttaccctatatggcctggagaggggaggcatgaataatccaccccttgtttagcatatcatcaagaaaccataaaatagacaaccagcagccctcggggctgctctgtctatggagtagccattcttttattcctttacttaataaacttgctttctctttacggactcgccctgaattctttcttgtgcgagatccaagaaccctctcttggggtctggattgggaaccttttgcggtaacaagggtgcaggatcatcgtggaaggaatataaagtcagatcaagctgaattattcgatatgggataattaagcagagatttgtggttcattgttttaacttgagaagctgagaatggctgtcttcatttgctttgagttgttgagatatggactcactgtaatcccagcttgggaggctgaggtgggaggattgcttgaggccaggagtttgagactggcttgggcaatatagtgagaactcatctccaaaagaaaaaaaaaacacgaatgcaaacataacctgcactgaatgagttgaaatgcgagaacttcgttggtatactgtagaggaagatatgtaaatgcttaaggagataaaaatgcttgagtatttatcatgtaaatacctgctcacccacccagggagggtccagaggacacttcattatgagaaataaattcatgtagagagtgccagatattctatacaggccacattacagtgggaaatgctccctgaagtgcagtggggctgatggaatcctgaggaggcagggaccatatggtaacacttagtcaccaaaaacacaattggtgtggtgactgccatggacagtgcagccaaagcaggatcctgaatggtctgacccacagagatctgtgatgtctgcctgctgatcatagtgtcctgagaactgaaatggatgggctgcctactaaagttttacttgatccgagtaagtaggaaagctccagatctggtgaataaagtctgacctaaattaccaacacagagttacaatcactcagtcaattccaagtcttgatctagttcacaaacccacagcttcttgaataaaggataggccaggtccctttgaagtaggaccctgctgcactgacaataatttatactttttatcttcctaggcctccccaaaggcacccaaggccatttatcagagtgattgtgcattgggaagggcaaataattagacttttctgggataaccagcctctagttctgaactagcagtaattacaggagactcaaaatgccaccatggttcctcagagtaagagtgtatggaggtcaggtgatcaatgggctttttggctcagattcatctcacagtagatctagtagattcctgaacccatcctatggttatttccctggttctagaatgcgtaattagaatagacatagtcaacaatgggcagaatcccacactagttccctgatccatacagtaaaagtaattctggtagaaaaggccaagtagaagccactagagctgcctcattcacaaaaatattaaagcaaactaataccacattcctggagagattgttgagattagtgccaccatcaaagacgggaacacatctccacttagctcacctactcagcctgtgcagaagacagatggatcttggagaatgacaattggattaattgtaaacttaattaactagtgattccaagtgcaggtgctgtttccacatgtggtttcagtgctgagcaaacgatacgtctgacaactggtttgcagttgttactgagccaggcccaggtttgttctgttctcacacagtaaatcaatcactgtgacatgggttttgcaaaagagagaagaattattcacaaggctgtccagtgaggagatgggagaatggctctcaaattcacctccccaaagatgaggcttagagagatttataggttagagaagtagggtggtctgaggcatggggaaaggtgattggcagtggggaaaaatgcagtcataattggggttcatatgacatatgtgcagaaaatggtggcgttaacatgatctgagggtggagtttttggccctctgatgtcaaaaggccacctcttgggcatgtgtacaggcccagttgaagggttggcagtctcaactggtttgaactggacaggatctgccccaagttcctgaaaaataagtggttgttatggtgacttataaatgttatctataaggtagcacgtaaaagttgagttacagtgttcaatagcatagccttcagctatcgtggccttcagcttcatgggggaaaaaataacaaagagcaagcaaccaaaagcaagcggggcaggcgaagtgtggcacacccgatccgattatccccttggctgcccagttacccatctggtgaatgtttctctatacctgtgagtaaagaccatcaggaacagtttgctttcagctagatacaccttcaccaccctatctcaaggctgcctcaactctgccgcccagctcatgatctagttcccaggtcctttgagaaccttttcaccctcaggacgacacactggtccattatattgatgacattatagtcactggacctggtgtacagggagtagcaactgctccagacatgttggaagacacataatatgactcagtgtaggaaataaacccacaacatggctaagggcaaataatgtttccaaaacttctttctctcttttttttttcttttttgagacagagtctcactctgtagctcgagctggagtggaggcaatcttggctcactgcaacctgcacctcctgggtacaagtgaagctgcttcctcagcctgttgggactacaggtgtgcgccaccacgcccggctaatttttttttttttttttttggtaaaggcagggtttcaccatgttagccagcttggtcttgaactcttgacctcaagtgatctgcccacctcagcctcccaaagtgctgggattacagaagtgagccaccaagccaggccctttttctctctctttccaatagttacattctatatgtttaaaagggacacgagacaattttgtatgtgattttctgaatcacataattccacatttaacattttggggaaatgccaaactgttttccaaaggggctgcctgggagtctcagctctagttctcagtcctcagcagccattcctttcctcagtggggcgtcagtgctgccttccaaagtccagggctgccttgagacctgatcaggaccggctattttgccaggtgcagtgcatgatgttcaagaccattcagaatttcaagaccctgacagcagagcaagatagcaggcggaggccattctaagtgtggggccccgcagggctgcccaggctgcctgcctgtgaagccagtcctgcctgatggagatgcttttgccatggcgtgagggaaagtgagctgatggttctccactttcccactctctctctgcaggtccggctcctctaagggcagaagccagaacttggtccctgaaccttctccagtctccctccctgggcatttctctcataaccccatcagaccccccagtaatggcctgacgtgggttctggaaatagaacatgggttcttagaatggctctctgagacttcattgagttgtctgtcctatttctttcctcaacaaaatgtccacatcctcaatctcctgtctcagcaggaaagatgaaaagaacagtgaggcttaggccaggcacggtggctcacacctgtaatcccaacactttgggaggctgaggtgggcagatcacctgagaacgggagttcgagaccagtctgaactccctgtctctactaaaaatacaaaagtagccaggcgtggtagcgggcacctgtaaatcccagctactggggaggctgagacaggagaatcgtttgaacctgggaggcggacgttgtggtgagccgagatagtgccactgcactccagcctggacaacagagcgggaaaaaaaaaaaaaaagaacgatgacccttagcatcccaggaagctttgggtggtgagagatggagagtatctccttcctgtggtacttcagtttcccgtctccttgttaggatgttgcaaagctggcctgctgaggtcttctgtgatctcctgtgcttcctacacttccacctgaaaatgaacctactgcagggatgaatccatgagcagaattttaatgaaaaggaagcagacacaaaggaatccatgggttgtaactccaccgacttaaaatgaaaaacacaggcaacaaagaacaggcacgatgctgcttcgccagctggttccttgttgggttctgccattcagggatgtaagagggaagctgggatgttggaggactggagtgtgagggtaaattttaggtgtcaacttggctgagccacaaggtccccaggtatttgatcaaacattatgctgggtgtttctgtgaggttgctttggatgagattaacgtttaaatttgtggactttgaggaaagcagattgccctctatctgtgggtgggcttcatccaatcacctgaagacctgaggagaacataaagtctggctgccccagactctctctcaggcaagagagaattcttccgcagactgccttcagagttcatgcacaccatctactaatcctgctccacagcaggtgccactgggctctcactggaatatgtattctcctggttctccagcctgctcatccaccctgaagatttgggacttgccagcctccttaattctataagccaattccttatcataaattcataaatccctctctctctatctccatccacacacacacacacacacacacacacacacacacagacacacacacacaaatgagtgtagatgtgttccaataaaacttcatttagagacattgaaatttaaatttcaagggctgggcatggtggctcaacgcctgtaatctcagcactttgggaggctgaggcaggtggatcacttgaggtcaggagttcgagaccagcctggccaacatggtgaaaccccgtctctactaaaaatacaaaacatgtagccacgtgcagtggctcatgcctgtaatcccagctgggaggctaagatgggagaatagcttgaacacaggaggcagaggttgctgtgagctgaaatggtgcccagaagacagagcgaccctgtctcaaaaaaataaaaaataaaaaataaatttcatataatcttcagatatattcattcatttacatattgtctgtggttgttttcaccctttaggtcagaagtagccgacaacctttacacagtatttaccactgttatagacatctttaaatatggtttacttttgcctgtttttgtactttatagaaatgaagtaataaagtattgtctgtcttgc

SEQ ID NO: 202574 - DNA, 10052 bp, Homo sapiens
  Payload ID: 19948
  Gene Name: zinc finger protein 445
  Uniprot ID: P59923
  ENST ID: ENST00000425708
  CDS Start-End: 152-3247
acagaaatgctggtaatttcagtcacttgctgatgacttctgatgtcccagcaaatgttggcattgttgactgctgagaagatacttctgaggacccacgtctaaggtggacttggttcgcactcttctggttagtccctgaacaggagtgatgcctccaggcaggtggcatgctgcctatccagctcaggcccagtcttcgagggagcgagggcggcttcagacagtaaagaaggaagaagaggatgaaagctatactccagtgcaggctgccaggccacagactctcaaccgccctggccaggagctgttccgccagctcttcagacagcttcgctaccatgagtcttcagggcccctagaaactctgagccggctccgggaactctgtcgctggtggctgaggcctgacgttctctccaaggcacagatcctagagctgctggtgctggaacagttcctgagcatcctgcctggggagctccgggtttgggtgcagcttcataaccctgagagtggcgaggaggctgtggccttgctggaggagctgcagagggaccttgatgggacatcctggagggacccgggccctgcccagagcccagatgtgcattggatgggtacaggagccctgcgatctgcacagatatggtcccttgcttcacctctcaggagcagctctgctctgggggaccacctggagcctccctatgaaatagaagcacgtgacttcctggctgggcaatccgatactcctgctgcccagatgcctgcccttttcccgagagaggggtgcccgggagaccaggtaacaccaaccaggtccctgacagcccagctccaggagaccatgactttcaaggatgtggaggtgaccttctcccaggacgagtgggggtggctggactctgctcagaggaacctgtacagggatgtgatgctggagaattataggaacatggcttccctggtgggaccattcaccaaacctgctctgatctcctggttggaagcaagggagccatggggcctgaacatgcaggcagctcagcctaaggggaatccagttgctgctcctacaggagatgacctccagagtaaaacaaacaaattcatcttaaatcaggaacctttggaagaagcagaaaccttagctgtgtcatcaggatgtcctgcgacaagtgtttctgagggaattgggctcagagaatcttttcaacagaagagcaggcagaaggatcaatgtgaaaatcccatacaagtaagagttaagaaagaagagaccaatttcagtcacaggacaggaaaagactctgaagtatcaggaagtaatagtcttgacttaaaacatgttacatatttgagagtttctggaagaaaggaatcccttaaacatggctgtggcaaacacttcagaatgagttcacaccactatgactacaagaaatatgggaaggggctcagacacatgattgggggcttcagcctacatcagagaattcatagtggactgaaagggaacaaaaaggacgtgtgtggaaaagacttcagccttagctctcatcaccaacgtgggcagagtcttcacacagtgggagtgtcatttaagtgcagtgactgtggaaggactttcagtcatagctcccatcttgcgtatcatcagagacttcacactcaagagaaagcatttaaatgtagggtgtgtgggaaagccttccggtggagttccaactgtgcgcggcatgagaaaattcacactggagtgaagccttataaatgcgatttatgtgagaaagctttccgacgcctgtcagcctaccgtctgcaccgagaaacccatgctaagaagaaatttcttgaattgaatcagtatagggcagctctcacctacagctcagggtttgatcatcatttgggagaccaaagtggggagaaactctttgactgcagccagtgcaggaaatccttccactgtaagtcatatgttcttgaacatcaaaggattcacacccaggagaagccctataaatgtaccaaatgtaggaaaacctttagatggagatcaaactttactcgtcatatgaggttgcatgaggaggaaaaattctacaaacaagatgaatgtcgtgaaggcttcaggcaatctcctgactgcagtcagccccagggtgctcccgctgtggagaaaacatttctgtgtcagcagtgtgggaaaacttttactagaaagaaaactctcgttgaccaccagagaattcacacaggtgagaaaccttaccagtgtagcgattgtgggaaggactttgcctataggtcagcctttattgttcataagaagaagcatgccatgaaaagaaaacctgagggcgggccatcttttagtcaggacacagtgttccaggttcctcagagcagtcactccaaagaggagccctacaaatgcagccagtgtggcaaggccttccgcaatcactcattcctcctcatccatcagagagttcacactggagagaagccatataagtgcagggagtgtgggaaagccttcagatggagttccaatctctaccgacatcagaggattcactctcttcaaaaacagtatgattgccatgaaagtgaaaagactccaaatgtggagccaaaaatcctcactggtgagaaacgtttttggtgtcaagaatgtgggaaaacctttacacgtaaaagaacccttttagatcataagggaatacacagtggagagaagcgctataaatgtaatctatgtgggaaatcttatgatagaaactatcgccttgttaaccatcagaggatccactctacagagagacctttcaaatgtcagtggtgtgggaaagagttcattgggagacataccctttccagtcaccagaggaaacacaccagagcagcacaggctgaacgtagcccgcctgcacggtcttcctctcaggacacaaagttgagattacagaagctaaaaccaagtgaagagatgcccctcgaagactgcaaagaagcttgcagccagagctccaggctcactggactccaggacataagcattgggaaaaagtgccacaaatgcagcatatgtgggaaaacttttaacaagagttcacaactcattagccacaagagatttcatactcgagagaggcccttcaaatgcagcaagtgtggaaagaccttcaggtggtcttcgaacctggctcggcatatgaaaaaccatattagagattagcctgggacctgacagtgacagtgggggtgggttctcagtcccctgctagagaacccttaattataggcattgtggagtaactttgataaagggcccagccctttctgttttggaagctagtgacagaatcccaaggatttgaaagctcggggagtccccagcctgcctgctaggatgtgacgctggggaagtgcagcaccatgtcctttggagcccttctggagactccggcccctaggagtggcctctgcaccatagcctgcggctcccctattcaggtctccttccacaactctgaagagagagaccactgccctttgtggttggacagaatatctgtggcatcatgggctatggctgctggaaaggggccagtgggatcctagatttgtcttcaagtttggcctgtggccatgcctattctgttgactttaaaagcagcagcatcaagaactcctagccttcccaaatgccccctggggagttctggctggggcttcagccttcctggctggcttttggatatctgctagggggttagagtggtctcagcggcaggtggaggagagcaggatgctgggctcaagcgcttggcgtgtggatctctaccagtaccctgttgccatccccatcccacaggcctgcataggcagcagcggtccatctgtttaacagaaatgtgctgagcactcccatacaccaggcgctggtgtgtttgccagagacccagcagggaccagaacagatgaaaatcctgccatcttggatctttacagatgacaaacaaatgggatacgcagtattctggatggtgatgtgtgtagtggacaaagtgaatcagagaagagcagagggagtgctggattgggagatcagtcgtgattttagatagtctggtcagggagggcctcaactgagaaggtgaaatgtgagcaaagacgtgaaggaagccagggaggtagcaggtagctctctagggagagttgcaggcagaggagattgggtcttgactggtgtcctcaggaaggaagcccctgggatggagtgcagggagccagctggaagggaaggagaggggccagggaggccacaggcccggccatatgagcatcatgggtcattacgggggcttgagctggctcagagggaggcagggagcttttggacaattttgagttgaggagtgatgtggtttgaatctgaattatattttataagggttaaccacagatccaaggactcagtaaaagggtgaaaggcttctcatgcagttagccttgctgccagttcccataaatcagactcctccccactccgtttctgaattttctataggatcctcggcctcagcagatataaacgcttaccattgttgtgttcatgtctctagcccctgcacactgcaggcccctctcagcttcacatacccctctccatgtatgagatctggtgctagcaatcagattcaacccgaaggaacaagtgcatgtgcctgctgctctcaggagaaaaggcagcctgttctgggaggagctccctcactggcccacccacttgtgttgaagcaaaaagcaagaatcaattacttaaaggcaaaggagtgatattgctaaagcatgtgagtaatcattgcttctgattattgaagaggtcagattatgaatgaaaggataaaatgttttaatagtagagcagtgtcctgactataggggcccgttcatggagctggtcatttcttgaaatgagaagaaaccaacctggaagatgtctttttcagtagagtatggaataatcttacctgctctggattgccatgagcaggtgaaaatgaaggctctgatattgtgtggtggtgtcacaggatggtgggggcggggcagaagtctcctgttggtgttctgatgcctgttcagctttgtcctcaggaaggtttggtcatcttggttctgccatcctcttgccttcctacggcagcagctgttcatggcactgaagatgtcccttcactgtcccaaaactggcactagaagtggctgggcaggggggccagagtcataggaagggtcttggagtcatcagatctgggttccaggcatggtgtgccttttcttggcaggattgatcttgagcaagtcaatgaacctctgcatcaatttccttatgtgtgaagttagagtgcttggctgtgctacctgattcctgagattggtgaaagagggcttggtttaccaaggctctccatcaggtggttgacctctaggaccagggccctctcagaggtgcagcttccatgtcagttggtgttgtaaccatggaaaagtccctttccaatcaaacttttagcacccctttccccccatctctgctccctttgccacaggataccttgtaaagttcctgccccagtatagggatatttttactgtcttttttattttttgagacagggttgcccagggtggagtgcagtggcaggatcacagcttactgcagccttgacctcccaggctcaggtcccatctgagcctcccgagtagctggggctacaggtgtgtgccaccctgccagctaattttttatatttttttgtagagacaaaacttttatttttttttcccatgttgctcatgctggtctcaaactcctgggctcaagcaatccacccacctctgcctcccaaagtgctgggattacaggcgtgagccactgtgcctgacctgtcatttttatagaatgaaatgtgcttatttctaaacattctaatcaaattttaaaatgtgcaaagaatgaagtgaaaaactgaatttttttttttttttgatacggagtctcactctgttacccaggctagagtgcagtggcgcgatctccgctcactgcaagctctgcctcctgggctcacaccattctcctgcctcagcctcctcagtagctgggactacaagtgcctgccaccacgcctgggttattttttatatttttagtagagacggggtttcactgtgttagccaggatggtctcgatctccaggatggtctcgatctccaggatggtctcgatctcctgacgtcgtgatccacccgcctcggcctcccaaaatgctgggattacaggtgtgagccactgtgcccggccaaaagaacagaaattattttatcctgaagtaagctgtttatatttgggattatactgaacctatttgtccaataacctgagttttcaaataattttagttctataagtactataattatataaatattaatgaattcagattagctgaaaggaaaaaaagtagaagcctgactacttggtgctaactactaaagattttggcagaatcaatgttggatttggctttcctgtcccttccccatgccagccccccagagtgttctgccttgtgctgcctcccttcacctggagtgccacacccctctctctgccagttcagctcttcattcttcaaggcctgaccttgtctgacccttgtgcctctaaacccgtggccccacctctcttggttcctatgtcaggtgatgtttgtgtttttggttatgcccatctccatagccagaccaagcactctggaagccagggttgggtgcttatttatctgtttgccatgcagaaaatatcttgcacaaaattacctctgttaaggaatctgaagctgaatttagtttggctgagtcagggttgggttttttttaaggggctgtggggtgaaatgttgactggaagccacccacaaacacacacctgctggttaggaacccggctgtgggtggttctgagctgtttggcttcagttgacagtttctgattgccctgagcaccaggtctcatcttgcatctcatcctggcctggagaacattcagtttccttccaacccttcccacctttcccccactcccttggaggaactgaagttggggttgaggagagccagatggctggagtgggtatttgaaggtctttctgtcacctgttcagtgtggtctgccccacccctgctgaccaagactgactgaaatgtaaaataatacagaccatctcacactcagaaagctggcacatttttgaaagcccaagtgtgggtaagtgcgtggaacaacgataattcacactgctttatgagtagaaattgtgagaaatattgtgccaggcaatttgcaaaatcttggaaggttgtgtgcacttaaccacccagcaactactcctggatgcatcctagagaagtgccatgtgaacagagaatgattttaagacttcactgaagtattgtttaggtagcaagattgggaaaagcctgcatttcatcagcagaagaatggataaataaatgggttgtttttggtccttggaaagtgaatatgaaagagttacgtctcaacacagatagatgaaaaattatgctgagaaagttggtgaagctacatacaaggtacccttagtgtaaagttaagcatactgtgtacctgtgggcacgttacttcaacttgtttttcactttttctgtaaaatgggatagtagtggcaatctcacagggtgattgtgggtgggggggtggtcaatgaagtaatgcatgtaaaatgcttagaatagtgtctagcatgtaagccttgtggacatatagaaagtgttattgttttgcacagtaatctattttctgtggattcaaataatatgaaatgagtataaaatcatgtattggaacgatgtgtgcaagtcaccattctgccttcctaaggcaggagacctgatggatttggggagggtacatggggccttcagttgtgttttctttgtttttttctaaaaattgatgcagaggcatcacaatgttaagatttttacagggtagtgtggtgggtactttttaactgtttgcttaaagtgtttcaaagtaaaaatatttcttaagcatagtctctgacatcttatgactttatagaaatccctgccaggtacatgatgttacttagagtgagccacctaatctttcaaggcttccatttcctcacctgcaaaaattgggagtgtcagaggcgtttgaaccagagtgactccatcttgaatagggaactgggtaaaataaggctgagacctactgggctgcattcccaggaggttaggcattccaagtcatgggatgagataggaggtcagcacaagatacagtcataaagaccttgccaataaaacagcatgtggtaaagaagccggtcaaaaccaagatggcaatgaaagtgacctctggttgtcctcactgctgtaattatactgtaattataatgcattagcatgctaacagacactcccaccagtgccatgacagtttacaaacgccatggcaggcctggcacgatggctcatgcctgtaatcccagcactttgggaggccaaggcgggcggattatgaggtcaggagattgagaccagcctggccaacatggtgaaaccctgtctctactaaaaaatacaaaaattagctgggcatggtggcacgtgcctgtaatcccagctacttgagaggctgaggcaggagaatctctagatcccgggagttggaggttgcagtgagccaagatggtgccactgcactccagcctgggtgacagagcaagactctgtctcaaaaaaaaaaaaaaaaaatgccatggcaacatcaggaagtaacactatatggtctaaaaaggagaggaaccctcagttctggtaattgctcacacctttcccgggaaacttatgaataatctaccccttgtttagcatataatcaataaataaccataaaaataggcaaccagcagcccttggggctactcttcctatggagtagccattctgtatttctttactttcttaatattaactactttcactttgtggactcgcccgaattcttttcttgagcaaggtccaagaactctctcttggggactggatcacgaccgctttctggtaacaggagcaatacaaatggctattagtaaacgaacgcttaagtaactctagtacatctatgatgaaataccaggccacagtttttttaaaaatgaggatgttctctatatactgacgcacagtcaccaagacatgcactttataggaaattataagctcctccttgcctaaatctccttaattttgcttaataaataacaagtgaagccagaagctgtaaactcataattttaatgaagaaatgggatccagaagatggagatgtttttcattctactttattagatgaggaaaaggagagtaaatacttgtatgccagctaccacaccttttaaagttaatgttaaccctgctaagaacagcaaggagattttatatcagccaggttttagttgccagaaaccacaccagttattttagcaaagaccttataaagaagtgtactatatttaagtagctaaaaaggcaagaagaaaatgccaaggtgtcttggaggtagcaactgctaagcagctgccaccccaggactgggggagctagaatagagtctccccatgtttgacgtttgtctgctaatagcattcaagctctccccctcagtttgcctggatctggacaagctgataagaaagcccagccacttcctctttgcgtcagaggggaagttcaaactgtgcaaaccctgactgtcaaatgcactgagctctcataaccacaacaaaaaccagagccacttgttcgtcctttcactgaagcccaacagactggcgtgggtgcccgctttgctttccctagaaggcctcatgtgagtagtaaactttttcataacctc

SEQ ID NO: 202575 - DNA, 1291 bp, Homo sapiens
  Payload ID: 19948
  Gene Name: zinc finger protein 445
  ENST ID: ENST00000617032
  CDS Start-End: 152-973
acagaaatgctggtaatttcagtcacttgctgatgacttctgatgtcccagcaaatgttggcattgttgactgctgagaagatacttctgaggacccacgtctaaggtggacttggttcgcactcttctggttagtccctgaacaggagtgatgcctccaggcaggtggcatgctgccatcagctcaggcccagtcttcgagggagcgagggcgcttcagacagtaaagaaggaagaagaggatgaaagctatactccagtgcaggctgccaggccacagactctcaaccgccctggccaggagctgttccgccagctcttcagacagcttcgctaccatgagtcttcagggcccctagaaactctgagccggctccgggaactctgtcgctggtggctgaggcctgacgttctctccaaggcacagatcctagagctgctggtgctggaacagttcctgagcatcctgcctggggagctccgggtttgggtgcagcttcataaccctgagagtggcgaggagctgtggccttgctggaggagctgcagagggaccttgatgggacatcctggagggacccgggccctgccagagcccagatgtgcattggatgggtacaggagcctgcgatctgcacagatatggtcccttgcttcacctctcaggagcagctctgctctgggggaccacctggagcctccctatgaaatagaagcacgtgacttcctggctgggcaatccgatactcctgctgcccagatgcctgcccttttcccgagagaggggtgcccgggagaccaggtaacaccaaccaggtccctgacagcccagctccaggagaccatgactttcaaggatgtggaggtgaccttctcccaggacgagtgggggtggctggactctgctcagaggaacctgtacagggatgtgatgctggagaattataggaacatggcttccctgggtaagtaatcgatatcctcatgcttctatccatctttatttctgccttcttgggttgttctgtgctgcatagaaaggtacctgacctggttttagatcctggctctgtaactgctgaccagatcacttaatctagcaccttggtagcctcttttgaaaaatggggagaataatgcctgccattctggattattgtaaagattaaaggtggctgggtgtggtagctcacacctgtaatcccaccacttcgggaggcccaggtgggaagattgcttgagctcaggagtttgagaccagtctgggcaacatagtgaaaccccatctcta

SEQ ID NO: 202576 - DNA, 1291 bp, Homo sapiens; identical to SEQ ID NO: 202575
  Payload ID: 19948
  Gene Name: zinc finger protein 445
  ENST ID: ENST00000635138
  CDS Start-End: 152-973

SEQ ID NO: 202577 - DNA, 10052 bp, Homo sapiens; identical to SEQ ID NO: 202574
  Payload ID: 19948
  Gene Name: zinc finger protein 445
  ENST ID: ENST00000634579
  CDS Start-End: 152-3247

SEQ ID NO: 202578 - DNA, 18299 bp, Homo sapiens; identical to SEQ ID NO: 202573
  Payload ID: 19948
  Gene Name: zinc finger protein 445
  ENST ID: ENST00000635479
  CDS Start-End: 349-3444

SEQ ID NO: 202579 - DNA, 1889 bp, Homo sapiens
  Payload ID: 19949
  Gene Name: zinc finger protein 446
  ENST ID: ENST00000335841
  CDS Start-End: 118-1128
ttttggggacagatcccgaagttcgagcatccctcggataggccgggtgtcaggcctggtctctcaggcccgtccaggcccatcttgacgattccaagaccacccccttgagcaagaatgccatcccctctgggtcccccatgcctgcccgtcatggacccagagaccacccttgaggagcctgagactgcccgcctccgcttccgagggttctgctaccaggaggtggcaggtccccgagaagccctggcccggctgcgtgagctgtgttgccagtggctgcagcctgaggcacactccaaggagcagatgctggagatgctggtgctggagcagttcctgggcacactgcctcccgagatccaggcctgggtgcgcggtcagcggccaggcagtcctgaggaggccgctgccctagtcgaaggactgcagcatgaccctgggcaactgttgggctggatcacagcccatgtcctgaagcaggaggtgctccctgcagcccagaagacagaggaaccacttgggagcccccacccctcagggacagtggagtcccctggggaaggtccccaggacaccagaatagaggggtctgtccagctcagctgcagtgtgaaggaggagcccaatgtcgatggacaggaagtggcaccctccagccctccacttgcagcacagtcccctgaggggaaccatggacaccaagaaccagcctccacatccttccacccacccaggattcagggttaccgccccaccagccagaggcacaggcccagtcagagctggggatgctgctcacggggacaggcgtctgcagaagcctgcgctcgggaaatgagagtgagggtccacctggctgcccagaggcccagccgccccagggcccagggccggcagcctgggagggcttgtctggggctgccactcctgcccccactgtgcgcccagggacaccgccagtgcccactcagcccacacctgcagagacgagactggagccggctgccacccccaggaagccctacacgtgcgagcagtgtggccgcggcttcgactggaagtcagtgttcgtcatccaccaccggacacacacgagtgggccaggtgtgcagtccccggggctagccaccggggaaagcacagagaagccaccacaaggggaggtggcctttccgcaccacccccgacgctcactcacaggcccccggagttacccgtgtgaggagtgcgggtgcagcttcagctggaagtcgcagctggtcatccaccgcaagagccacacaggccagcggcgtcacttctgcagtgactgtggccgcgccttcgactggaagtcgcagctggtcatccaccgcaagggccaccggccggaggttccatgagcagccagacagcacagtccctcggggcctcggtgttctcggggcctggatacagcctctggggcaccagcagaagactctggaggcagcaggggatgccagagtgaacaaggggtcccaagccagttccctgcccctggtctggtctcccccaaaagacctgggtgcaaggaaaaggagctgctctctctcttcttgcccctgcctcctagagggaggtctgggttcccttctatggctgaccagtgcctgtggggtgactgccaagcaccaggctccctccctccctgtgacatggcctgggctgacaacactccctctcctgggacctccttgcctcaggtgggtgttcaaaaactgtgccttcccactcgtctgtgcagaggctgggcctgaggtctcagtgtggagagcagcagaagacccaggaaagcacagttggcttccgtttctcctgctccctgtgtgtgttagaattttaacataaattccactttcataata

SEQ ID NO: 202580 - DNA, 569 bp, Homo sapiens
  Payload ID: 19949
  Gene Name: zinc finger protein 446
  ENST ID: ENST00000600013
  CDS Start-End: 147-569
acatccgggaagcggcctccaagcaaccgctccgggttgagatcccgaagttcgagcatccctcggataggccgggtgtcaggcctggtctctcaggcccgtccaggcccatcttgacgattccaagaccacccccttgagcaagaatgccatcccctctgggtcccccatgcctgcccgtcatggacccagagaccacccttgaggagcctgagactgcccgcctccgcttccgagggttctgctaccaggaggtggcaggtccccgagaagccctggcccggctgcgtgagctgtgttgccagtggctgcagcctgaggcacactccaaggagcagatgctggagatgctggtgctggagcagttcctgggcacactgcctcccgagatccaggcctgggtgcgcggtcagcggccaggcagtcctgaggaggccgctgccctagtcgaaggactgcagcatgaccctgggcaactgttgggctggatcacagcccatgtcctgaagcaggaggtgctccctgcagcccagaagacagaggaaccacttgggagcccccacccctca

SEQ ID NO: 202581 - DNA, 3922 bp, Homo sapiens
  Payload ID: 19949
  Gene Name: zinc finger protein 446
  ENST ID: ENST00000596341
  CDS Start-End: 2221-3420
tccaaaatcctgcagctatcctgccctatacacaaagagcccagatccaggccccacacacttgatattggggccagactcttccacctgtgaaacctcacaggttcctgcagggagtggagacacacagaacctagctcccctggagcctgcaagacttgggccaccagaatcccagtaggtccctgaaccattgtcccccagtaagtctgcagagctgtgaaatgcagacaataacccttccctgcctgaaagagcacttttctggggagcccatgggagtcaggagcaaaagcatctgtcaaacaagtagatacccagagagtcacgtgaaatcatttctatgcctctgacagacgcttcttgagcgaagtttctgccctgagcccgcctgaccccttaggctgggctcagtaccctaccttgtcttcccaccagccgcctccctccatcaagttcctttccacgtctgcttgtgcccctgttgtccctcagtttgtccaccctcctccaatcttcccctccccaaacccatgactgatcagtggcccccaacctaggctcccacctccatgcaggtcttggcccctcggctgacctccctccaacctccccctctgctcttaattttgaataggtagtgactgtaaaagtatccctgggcttctatgtcaaaaggtcagactgaacacatgcatctcactgggctcagaaatccactgaaaccacagaggggagtatttaaaacacataacccacaagtatgaggatggtgacagaggagtcaggagcaatggcattcctaagctagaagtgggtgagagctgtcactaagttagggaaggcaaaatactacgtggcgacttggcgaagaggagagagttcccaccaggctgactccagaaccgcagaaggctgagaaccagcagcccagagacgggagacctatatcaaagctgcctggggaacaactactgaagaagcccttaacgccccagtgctctccccacatggtggagggtgaaagtttttgtttttttttccttctgggactctgcatagtcccagagaaaaggcctaagcacctcatccccaaaaacaacctgaggaggccgttggaaagctccgagttgacaagtctcatccacgcacatgctcggtgcttccaatcggtgatcaagaccactgctcttcatccagagcaggcagcagggattcccaggtatccaaagaaaccaaaacaggcggtgtaatttaggactgactaagtaatggctcggccacttttaagtgtggaagcaaaactgaccccacagatttagaaaactgtaacactgcttattgggagaaactagtgtcaccctggctagttctgctccccaaattcaaaggtaaataaacggttgagcatgtccgatcagcctggagggaaacctccacccccgactttgtaggactgacatctgaagacgtcagagactgcggtcacaaccgtcggtacctccttagggcgcttaacagaggtcaaagatggccctcgcaccctcctggcgggagaaagcccaggctcagggtggtcttctacaccaccgcctctcccgggtccacttggaagcgagtcccagcgaactactcgacctaggaaaccactgggccgccacttccagcctcttcggaagtcgaggcaacgctcctgaacgttgccacgggaacagctggaggcgggcggatatgccctagcgttatctaggggctggcccggggaatggcgtgggggcggcggggccaagcaagcgccacctctgattgggcaaaaccccctcccctcacctgccaatagaaaccggcccactgtacagacgcgcaagtttataacccgggaagagctgctctcagagcggagggagaccatataaccctgggactctgccgtacctcctagaggaacagagcgcctctcaggcgtcagaggctgctgcaaatgcgggtcagcgggtcacggtcgcgcctgtcttgctgatgctcatgggaaatgtagttcaaagggcatgggcggtgccttcggtgcaggcgagagattggtcagcgcggcgtcgccggggcaacacccggctgaggcgccccgcgttgtgcggcgccacatccgggaagcggcctccaagcaaccgctccgggttgaggcccatcttgacgattccaagaccacccccttgagcaagaatgccatcccctctgggtcccccatgcctgcccgtcatggacccagagaccacccttgaggagcctgagactgcccgcctccgcttccgagggttctgctaccaggaggtggcaggtccccgagaagccctggcccggctgcgtgagctgtgttgccagtggctgcagcctgaggcacactccaaggagcagatgctggagatgctggtgctggagcagttcctgggcacactgcctcccgagatccaggcctgggtgcgcggtcagcggccaggcagtcctgaggaggccgctgccctagtcgaaggactgcagcatgaccctgggcaactgttgggctggatcacagcccatgtcctgaagcaggaggtgctccctgcagcccagaagacagaggaaccacttgggagcccccacccctcagggacagtggagtcccctggggaaggtccccaggacaccagaatagaggggtctgtccagctcagctgcagtgtgaaggaggagcccaatgtcgatggacaggaagtggcaccctccagccctccacttgcagcacagtcccctgaggggaaccatggacaccaagaaccagcctccacatccttccacccacccaggattcaggaggagtgggggctgctggaccggtcacagaaggaactgtactgggatgcgatgctggagaagtacggcacagtggtctccctggggttaccgccccaccagccagaggcacaggcccagtcagagctggggatgctgctcacggggacaggcgtctgcagaagcctgcgctcggagacgagactggagccggctgccacccccaggaagccctacacgtgcgagcagtgtggccgcggcttcgactggaagtcagtgttcgtcatccaccaccggacacacacgagtgggccaggtgtgcagtccccggggctagccaccggggaaagcacagagaagccaccacaaggggaggtggcctttccgcaccacccccgacgctcactcacaggcccccggagttacccgtgtgaggagtgcgggtgcagcttcagctggaagtcgcagctggtcatccaccgcaagagccacacaggccagcggcgtcacttctgcagtgactgtggccgcgccttcgactggaagtcgcagctggtcatccaccgcaagggccaccggccggaggttccatgagcagccagacagcacagtccctcggggcctcggtgttctcggggcctggatacagcctctggggcaccagcagaagactctggaggcagcaggggatgccagagtgaacaaggggtcccaagccagttccctgcccctggtctggtctcccccaaaagacctgggtgcaaggaaaaggagctgctctctctcttcttgcccctgcctcctagagggaggtctgggttcccttctatggctgaccagtgcctgtggggtgactgccaagcaccaggctccctccctccctgtgacatggcctgggctgacaacactccctctcctgggacctccttgcctcaggtgggtgttcaaaaactgtgccttcccactcgtctgtgcagaggctgggcctgaggtctcagtgtggagagcagcagaagacccaggaaagcacagttggcttccgtttctcctgctccctgtgtgtgttagaattttaacataaattccactttcataa

SEQ ID NO: 202582 - DNA, 2238 bp, Homo sapiens
  Payload ID: 19949
  Gene Name: zinc finger protein 446
  Uniprot ID: Q9NWS9
  ENST ID: ENST00000594369
  CDS Start-End: 382-1734
gaagcggcctccaagcaaccgctccgggttgaggtgagcgcaggctgccagagtgggcgcagcctttccaccccgtgggagggcttggggtcgccctctggggcctgaacggctcctgctgtcggcgccctggagggcccgcccacttcccgacaggccgcgcgcgtcacctcagccttcgctcaggcctttcctaccctcaacgccgttccggggggccgggcctggcaagtcctcttggaacgcctccctcttgccttccccttttggggacagatcccgaagttcgagcatccctcggataggccgggtgtcaggcctggtctctcaggcccgtccaggcccatcttgacgattccaagaccacccccttgagcaagaatgccatcccctctgggtcccccatgcctgcccgtcatggacccagagaccacccttgaggagcctgagactgcccgcctccgcttccgagggttctgctaccaggaggtggcaggtccccgagaagccctggcccggctgcgtgagctgtgttgccagtggctgcagcctgaggcacactccaaggagcagatgctggagatgctggtgctggagcagttcctgggcacactgcctcccgagatccaggcctgggtgcgcggtcagcggccaggcagtcctgaggaggccgctgccctagtcgaaggactgcagcatgaccctgggcaactgttgggctggatcacagcccatgtcctgaagcaggaggtgctccctgcagcccagaagacagaggaaccacttgggagcccccacccctcagggacagtggagtcccctggggaaggtccccaggacaccagaatagaggggtctgtccagctcagctgcagtgtgaaggaggagcccaatgtcgatggacaggaagtggcaccctccagccctccacttgcagcacagtcccctgaggggaaccatggacaccaagaaccagcctccacatccttccacccacccaggattcaggaggagtgggggctgctggaccggtcacagaaggaactgtactgggatgcgatgctggagaagtacggcacagtggtctccctggggttaccgccccaccagccagaggcacaggcccagtcagagctggggatgctgctcacggggacaggcgtctgcagaagcctgcgctcgggaaatgagagtgagggtccacctggctgcccagaggcccagccgccccagggcccagggccggcagcctgggagggcttgtctggggctgccactcctgcccccactgtgcgcccagggacaccgccagtgcccactcagcccacacctgcagagacgagactggagccggctgccacccccaggaagccctacacgtgcgagcagtgtggccgcggcttcgactggaagtcagtgttcgtcatccaccaccggacacacacgagtgggccaggtgtgcagtccccggggctagccaccggggaaagcacagagaagccaccacaaggggaggtggcctttccgcaccacccccgacgctcactcacaggcccccggagttacccgtgtgaggagtgcgggtgcagcttcagctggaagtcgcagctggtcatccaccgcaagagccacacaggccagcggcgtcacttctgcagtgactgtggccgcgccttcgactggaagtcgcagctggtcatccaccgcaagggccaccggccggaggttccatgagcagccagacagcacagtccctcggggcctcggtgttctcggggcctggatacagcctctggggcaccagcagaagactctggaggcagcaggggatgccagagtgaacaaggggtcccaagccagttccctgcccctggtctggtctcccccaaaagacctgggtgcaaggaaaaggagctgctctctctcttcttgcccctgcctcctagagggaggtctgggttcccttctatggctgaccagtgcctgtggggtgactgccaagcaccaggctccctccctccctgtgacatggcctgggctgacaacactccctctcctgggacctccttgcctcaggtgggtgttcaaaaactgtgccttcccactcgtctgtgcagaggctgggcctgaggtctcagtgtggagagcagcagaagacccaggaaagcacagttggcttccgtttctcctgctccctgtgtgtgttagaattttaacataaattccactttcataata

SEQ ID NO: 202583 - DNA, 1869 bp, Homo sapiens
  Payload ID: 19949
  Gene Name: zinc finger protein 446
  ENST ID: ENST00000610298
  CDS Start-End: 103-1371
ccgaagttcgagcatccctcggataggccgggtgtcaggcctggtctctcaggcccgtccaggcccatcttgacgattccaagaccacccccttgagcaagaatgccatcccctctgggtcccccatgcctgcccgtcatggacccagagaccacccttgaggagcctgagactgcccgcctccgcttccgagggttctgctaccaggaggtggcaggtccccgagaagccctggcccggctgcgtgagctgtgttgccagtggctgcagcctgaggcacactccaaggagcagatgctggagatgctggtgctggagcagttcctgggcacactgcctcccgagatccaggcctgggtgcgcggtcagcggccaggcagtcctgaggaggccgctgccctagtcgaaggactgcagcatgaccctgggcaactgttgggctggatcacagcccatgtcctgaagcaggaggtgctccctgcagcccagaagacagaggaaccacttgggagcccccacccctcagggacagtggagtcccctggggaaggtccccaggacaccagaatagaggggtctgtccagctcagctgcagtgtgaaggaggagcccaatgtcgatggacaggaagtggcaccctccagccctccacttgcagcacagtcccctgaggggaaccatggacaccaagaaccagcctccacatccttccacccacccaggattcaggaggagtgggggctgctggaccggtcacagaaggaactgtactgggatgcgatgctggagaagtacggcacagtggtctccctggggttaccgccccaccagccagaggcacaggcccagtcagagctggggatgctgctcacggggacaggcgtctgcagaagcctgcgctcgggaaatgagagtgagggtccacctggctgcccagaggcccagccgccccagggcccagggccggcagcctgggagggcttgtctggggctgccactcctgcccccactgtgcgcccagggacaccgccagtgcccactcagcccacacctgcagagacgagactggagccggctgccacccccaggaagccctacacgtgcgagcagtgtggccgcggcttcgactggaagtcagtgttcgtcatccaccaccggacacacacgagtgggccaggtgtgcagtccccggggctagccaccggggaaagcacagagaagccaccacaaggggaggtggcctttccgcaccacccccgacgctcactcacaggcccccggagttacccgtgtgaggagtgcgggtgcagcttcagctggaagtcgcagctggtcatccaccgcaagagccaccggccggaggttccatgagcagccagacagcacagtccctcggggcctcggtgttctcggggcctggatacagcctctggggcaccagcagaagactctggaggcagcaggggatgccagagtgaacaaggggtcccaagccagttccctgcccctggtctggtctcccccaaaagacctgggtgcaaggaaaaggagctgctctctctcttcttgcccctgcctcctagagggaggtctgggttcccttctatggctgaccagtgcctgtggggtgactgccaagcaccaggctccctccctccctgtgacatggcctgggctgacaacactccctctcctgggacctccttgcctcaggtgggtgttcaaaaactgtgccttcccactcgtctgtgcagaggctgggcctgaggtctcagtgtggagagcagcagaagacccaggaaagcacagttggcttccgtttctcctgctccctgtgtgtgttagaattttaacataaattccactttc

SEQ ID NO: 202584 - DNA, 1884 bp, Homo sapiens
  Payload ID: 19949
  Gene Name: zinc finger protein 446
  ENST ID: ENST00000622313
  CDS Start-End: 118-1386
ttttggggacagatcccgaagttcgagcatccctcggataggccgggtgtcaggcctggtctctcaggcccgtccaggcccatcttgacgattccaagaccacccccttgagcaagaatgccatcccctctgggtcccccatgcctgcccgtcatggacccagagaccacccttgaggagcctgagactgcccgcctccgcttccgagggttctgctaccaggaggtggcaggtccccgagaagccctggcccggctgcgtgagctgtgttgccagtggctgcagcctgaggcacactccaaggagcagatgctggagatgctggtgctggagcagttcctgggcacactgcctcccgagatccaggcctgggtgcgcggtcagcggccaggcagtcctgaggaggccgctgccctagtcgaaggactgcagcatgaccctgggcaactgttgggctggatcacagcccatgtcctgaagcaggaggtgctccctgcagcccagaagacagaggaaccacttgggagcccccacccctcagggacagtggagtcccctggggaaggtccccaggacaccagaatagaggggtctgtccagctcagctgcagtgtgaaggaggagcccaatgtcgatggacaggaagtggcaccctccagccctccacttgcagcacagtcccctgaggggaaccatggacaccaagaaccagcctccacatccttccacccacccaggattcaggggttaccgccccaccagccagaggcacaggcccagtcagagctggggatgctgctcacggggacaggcgtctgcagaagcctgcgctcgggaaatgagagtgagggtccacctggctgcccagaggcccagccgccccagggcccagggccggcagcctgggagggcttgtctggggctgccactcctgcccccactgtgcgcccagggacaccgccagtgcccactcagcccacacctgcagagacgagactggagccggctgccacccccaggaagccctacacgtgcgagcagtgtggccgcggcttcgactggaagtcagtgttcgtcatccaccaccggacacacacgagtgggccaggtgtgcagtccccggggctagccaccggggaaagcacagagaagccaccacaaggggaggtggcctttccgcaccacccccgacgctcactcacaggcccccggagttacccgtgtgaggagtgcgggtgcagcttcagctggaagtcgcagctggtcatccaccgcaagagccacacaggccagcggcgtcacttctgcagtgactgtggccgcgccttcgactggaagtcgcagctggtcatccaccgcaagggccaccggccggaggttccatgagcagccagacagcacagtccctcggggcctcggtgttctcggggcctggatacagcctctggggcaccagcagaagactctggaggcagcaggggatgccagagtgaacaaggggtcccaagccagttccctgcccctggtctggtctcccccaaaagacctgggtgcaaggaaaaggagctgctctctctcttcttgcccctgcctcctagagggaggtctgggttcccttctatggctgaccagtgcctgtggggtgactgccaagcaccaggctccctccctccctgtgacatggcctgggctgacaacactccctctcctgggacctccttgcctcaggtgggtgttcaaaaactgtgccttcccactcgtctgtgcagaggctgggcctgaggtctcagtgtggagagcagcagaagacccaggaaagcacagttggcttccgtttctcctgctccctgtgtgtgttagaattttaacataaattccactttc

SEQ ID NO: 202585 - DNA, 3773 bp, Homo sapiens
  Payload ID: 19950
  Gene Name: zinc finger protein 449
  Uniprot ID: Q6P9G9
  ENST ID: ENST00000339249
  CDS Start-End: 141-1697
agttgccggtgagcttgggagaaccgtgggcgctgaggcgctgtaggtggctccctcccaccccaacgatttcagagagaaacaagtcggaatctgagaagtgaggctccagataaactgtaaactgctggaagggggcgatggctgtggccctgggttgtgcaatccaggcatccttgaatcaaggctctgtgtttcaagaatatgatactgactgtgaagttttccgtcagcgcttcaggcagttccagtacagagaagcagctgggcctcatgaagcatttaacaaactctgggagctttgctgtcaatggctgaagccaaagatgcgctctaaggaacaaatcctggagctgctagtgttggagcaattcctaactatcctgcccacagagatagagacctgggtgagggagcactgcccagagaatagagaaagagttgtgtcactgatagaagacttacagagagaacttgagataccagagcagcaggttgatatgcatgacatgctcttggaagaactggcaccagtgggaacggcacacataccaccaaccatgcacctagagtcacctgcactccaggtaatgggacctgcccaggaggccccagtagcagaggcatggatcccacaggcagggccaccggagctgaactatggtgctactggagaatgtcagaactttctggaccctggatatccattaccaaaacttgacatgaacttctcattggagaatagagaagagccatgggtgaaggaattacaggattctaaagaaatgaaacaattacttgattccaagataggttttgagatcgggatagaaaatgaagaagatacttcaaaacagaaaaaaatggagactatgtatccatttattgtaactttagaggggaatgctctccagggtcccattttgcaaaaagactatgtacagttagaaaatcaatgggaaacccccccagaggatttacagacagatttagcaaaactggtagatcagcagaaccccactctgggagagacacctgagaactccaacttggaagaacctctcaaccctaaaccccacaagaaaaagagtccaggagagaaacctcaccgatgtcctcagtgtggaaaatgttttgctcggaagtcacaacttactgggcatcagagaattcattcaggagaagaacctcacaaatgccctgaatgtgggaaaagattccttcgtagttcagacctttatagacaccaacgacttcatacaggggagagaccctatgaatgcactgtatgtaaaaagcgattcactcggcggtcacatcttatagggcaccagagaacccattctgaagaagaaacatataaatgtcttgagtgtgggaaaagtttttgtcatggatcaagtcttaaaagacatctgaaaactcatacaggtgaaaaacctcatagatgtcataattgtgggaaaagttttagtcgactgacagctcttactttgcaccagagaacgcatactgaagagagaccttttaaatgtaattattgtgggaaaagttttagacagagaccaagcctcgttattcatttaagaatccacacaggggagaagccatacaagtgtactcattgttctaaaagcttcagacagagagccggccttattatgcaccaggtcactcactttagaggacttatttaagaattgctaagggaaacaggtcttacacaaattgacactaactcaaaaaaaatcttaacctgcagcaggctgtttgtcttggaagcttttgtttgagcttataagaacatagacagcttttttttttactagttttaaaacccatcttccaaggtatatgaattctagagtatttatctactcctgtgattttcttagatttgatttcttctgtctgcacaactcttctttttttaattacaatgaaaaattttgtgttccaaggcaactgtatcataggtgtaaacataaagcatataaattatgacaatccttttagaggtagggtcaatatagtggataaacctgtctatcagacgtattgattatagcagtactatagttattctgctgtcattattaaagatgattatattcattcaaagctttagatgtgtcccatgtggcaagaaaggagacagtgaattttgtcaaacaataaaaatgtgtcaggaacacaaggatgaaggggatgtcatttgcctggtaagaactgggttatttccactgaaatttgttatgtttaaggaaattaagattttaagcttgaaattatacaagcagaatctaatttaattttgattgactgaagaaccagggtcttttgctctcctttggtatttcactctcctttggtattcaatcatgtgtcttttagtgctttttaaaattttacccattctttaattcagcatctccctatgtatgtgtcatagaatacttagttctgctagatattctgcaaatatatttgggaattacttcctgctgtttcgccttcttaggttcatagtacacatcagcatatgagaatctctgagaggtcctctagaaaggagagaaaaagcacctcttttggctcaatgttttccaaacttatttgaccccaaaacctttttcatatacccaataataagctacagaactaatattctgcaaatgtctcttggaacacactgccttaaacagatatttctatagctgtcagtatagttatgttgctcccaagcctagttatctccagttgttttaagggtgttatgaaaaattcttaaaatatatatgaatttgtgtaacacacacagagacacacacacatactactttaagggggtgaggatcattaattcagataatttttaagtttcctagtgattctcaatctctttgaattttacttacatttacacacacacgcacacacatatgtatatacacatatcattttaagaagctgaggatcactaattcagataatgtataagtttcccagtgattctcaacctctttgaattttacttataattacatacacacacacactgctacttatataaatgttctcatgtaatcatggtaacagctcaaattcccaaagcaagggaagacttctcattgtcagttaaacctgttaaaacatgaaaatattcattgagcctagttccttgttataaaatacaagaaataagacattcaggcattttccctttatgaagatgttcagtcatcctttccttgaactacaattaggaaaagtatatgtctttattccattgaagttctcgagagtgatataaatactttggggggtatctactatgtgcctaactagtcctgttctaggcttagtggaagctagtaaagaaatataattcatggatcaggctcataaagattttataatatttttagttaaacaagagttgggaaacaggtggagaataatgcaagagagtttgtaattaagtgccaattataccaattgctagacccaggatgtatctttaattcttgtcatccaggtcaacatatgatgctgctataagtctggggctcaaattgatatcccagtagcaataaacatataatataggaggagtctgaatgtagagatgaaaaatacagaatgtaatggcttctcttttctctcttgtggaattgcattcaaaccagaacagtgccttagaatggatgtgcccaactgctctgtatttatgcaatatttgaataaagcggaaatgtatgtgctcttcctgc

SEQ ID NO: 202586 - DNA, 2051 bp, Homo sapiens
  Payload ID: 19950
  Gene Name: zinc finger protein 449
  Uniprot ID: Q6P9G9
  ENST ID: ENST00000370761
  CDS Start-End: 141-635
agttgccggtgagcttgggagaaccgtgggcgctgaggcgctgtaggtggctccctcccaccccaacgatttcagagagaaacaagtcggaatctgagaagtgaggctccagataaactgtaaactgctggaagggggcgatggctgtggccctgggttgtgcaatccaggcatccttgaatcaaggctctgtgtttcaagaatatgatactgactgtgaagttttccgtcagcgcttcaggcagttccagtacagagaagcagctgggcctcatgaagcatttaacaaactctgggagctttgctgtcaatggctgaagccaaagatgcgctctaaggaacaaatcctggagctgctagtgttggagcaattcctaactatcctgcccacagagatagagacctgggtgagggagcactgcccagagaatagagaaagagttgtgtcactgatagaagacttacagagagaacttgagataccagagcagcaggtaagaaaagaatgtgggatctttgtgattggtccaaaggaagtagctgaggcagctgggactagaccacacatttgtctctatgtcattccccagcctcaagatttctccagagtcctcttcctttttctcttctgctgaactcagcaaatgagtcagtgcttttaactctatcagactcaattccccttctataacaaatagtttataatgtccactttactatgcacaaatgaaattgatagacaacataatctacccacatacatcaacccaaagcatcagtaaattgctccatggcctgaaggccaattctagccataccctgtttatctgtatactctgtatgtaatggtttttttatcttgttgaaaggtcattgaaaaaaagaggaaggagaagaactgacagtgaatgtgccccacagtgcctaaaatatttactatttggctctttataaagtttgccaaccctgaatcaagtctagaaggaatataaaggaaaagaaacatagtttgttataaattgatagggatttgtacatatatgtgcttgggcctgaccgaatgtcatgaagttgtcagatgtttgcatctatgcttagaatcattgtgaatgggacagccagaaattcagactgataaagctcaagtactacgaacagtgttgctcctcgtcatgtgattttccaaaatggcatacgactctaggtaaatctgaacaataagcagtgtagtctttgcttttcacattagtgcattcctagaaaatttcatttgtgctgaaactatgcaaaacaaaacaaacaattgtacttatttgaccaacaaggtggggttcttgacaggttctttttactcacatgaatgtttgagtgggacattccacacttggtagggacctagaacaattctgcattgtaaattatgttccattaaattctgatagccaccacctgtcagcatatccaaaactccccatggggacagtggcactgtctgccattcagaatgactgtgtaaagcctcttttcagaagtgccgtgactgagagagggcagtatctttgggaaaagggagcaggagcttccagatgggcatcagggatactccagtcttgtctatgggggttctctgcaggagctgttagcttcagggctcctgaacaggagtcttctgaagttttctgtctccctagggtacttgggttggtggttgcccttcctttctctgtctccttggttttgtttactatataagattttatcttcatgtggtctagacatttgctgctgaatacagtcactactagtcatgtacagctcttgagcccttgaaatatggccaatacaaattgagatctgctgtaagtatgaaatacacaccacatgcagaagacttggtatgaaaaaagtaggtgaaatatctcactaataattgttcatattgattacatgttgaaatcctgattgtttgcactggattaagtaacacgtactattaagattggccttactttttaaaaaatttattcatatggccactagaaaatttaaaa

SEQ ID NO: 202587 - DNA, 3898 bp, Homo sapiens
  Payload ID: 19951
  Gene Name: zinc finger protein 45
  Uniprot ID: Q02386
  ENST ID: ENST00000269973
  CDS Start-End: 1092-3140
gagagcgcggccttcattcctctcgtggaagtgagtgagtcctgggaccccgcgacctgttttaacttttatggtttggtcgtaggatcagcagggctcgcacttcggtcagcaggaaaagacgctgcggcgagcagcggagggcggagttgaatggctgggcagctgattgccttactgtatccggagctgctgcgttcggggcggttcgggagtcccctggttggaagtggacctgaatggggaggcgtctgaggatctcctgggctctcagcggcccgacccgccttcccccacctcccacagctctgtagcttcctagcggtgtaacgttgggaaaggaggctgttcttggactatgcctgacccgttttttaagaaagagtgcatcactcaacaggtggcgtctggagttatcctctgtggattttccaggatctcagacaagatcgtgcaatctcccagcctcctttccttcccctgccctgacttctgaaagaatgctgcgggagaggaggaaggagagcatcctggcttctggcagcagagccccactgtgacaggacctagcattcaccttcctcttctgttccgagtgcgagaagacttcagggacctctgtttcatggacattatcatattcttctcaagagtacccagcaagaggtttgcaaagaggagttattcagtgaaatcagaatcataccctgagagctacaagaactccatttttcactgtgcagaggctctctgctgaagggtcaagtggaatctggaatccagcccatgtttccccatcatcaagccatgtgaagctgcagactccaagcaacagagagacaagatttagaatactggctctggtatgaaagctggattcaggtactgttcctgcctcttgacctcaccaagcctcagcttcctcgcctgttaaatggatacaattgtcgtcattatcatctgttgagaactccctaaaatgccagctgagcataggcacagaagtttaggtgtttggaccaaggtcacacaactgatacaacagtagcttcttcacagacttggcacttctccagaaggaggaggacaaaatgacgaagtctaaggaggcagtgacattcaaggacgtggctgtggtcttctctgaggaggagctgcaactgctggaccttgcccagaggaagctgtaccgagatgtgatgctggagaacttcaggaatgtggtctcagtggggcatcagtccacaccagatggcctaccacagttagagagagaagaaaagctgtggatgatgaagatggcaacccagagagataactcctcaggagccaagaatctaaaagagatggagactcttcaagaagtaggattaaggtacctgcctcatgaagagcttttctgctcccagatctggcaacagattacaagagagttaatcaagtatcaagattctgtggtaaatattcaaagaacaggctgccagttggaaaaacgagatgatttgcactataaagatgagggattcagtaatcagagttcccatcttcaagttcacagagtccacactggtgaaaaaccctacaaaggagaacattgtgtgaaaagtttcagctggagctctcatcttcaaattaaccaaagggctcatgcaggagagaagccctacaaatgtgaaaaatgtgataatgccttccgtcggttttcaagtcttcaagcccatcagagagtccacagtagagcaaaatcatacacaaatgatgcaagttacaggagttttagtcagaggtcacatcttccccatcatcagagagttcccactggagagaatccatacaaatatgaagagtgtgggaggaatgttgggaaaagctcacattgtcaagctcctctgatagttcatacgggagagaaaccctataaatgtgaggagtgtggggtgggcttcagtcagagatcatatcttcaagttcatctgaaagttcacactggaaagaaaccatataagtgtgaagagtgtgggaagagcttcagttggcgttcacgactgcaggctcatgagcgaatccacactggcgagaaaccatacaaatgcaatgcatgtggcaagagctttagttacagctcacaccttaatattcattgtagaatccacacaggagagaaaccctataagtgtgaggagtgtgggaaaggtttcagtgtgggttcacaccttcaggcccatcagataagccacactggagagaagccatacaaatgtgaggagtgtgggaaaggcttctgccgggcctcaaatctgctggaccatcaaagaggccatactggagagaaaccgtatcagtgtgatgcatgtggtaagggcttcagtcgtagctcagattttaacattcattttagagtccatacaggggaaaaaccctataaatgtgaggagtgtggcaagggcttcagccaggcctcaaatcttctggcccatcaaagaggccacactggagagaaaccctacaaatgtggtacatgtgggaagggcttcagtcggagctcagatcttaatgtacactgtagaatccacacaggagagaaaccctataaatgcgagaggtgtggtaaggccttcagtcagttctccagccttcaggtgcatcagagagttcacactggagagaaaccatatcagtgtgcagagtgtgggaagggcttcagtgtaggttcacagcttcaagcccatcagaggtgccacactggagagaaaccctatcaatgtgaggagtgtgggaagggcttctgtcgggcctccaattttctggcacatcgtggagtccacacaggagaaaaaccataccgatgtgatgtgtgtggtaagcgcttcagacagagatcctaccttcaagcccaccagagggtccacacaggagagagaccatacaaatgtgaggaatgtgggaaagtcttcagctggagctcataccttcaagcccatcaaagagttcacaccggagaaaaaccatacaaatgtgaggagtgtgggaagggcttcagttggagctcaagtcttatcattcatcagcgagtccatgctgatgatgagggtgacaaggactttccttcatcagaggattcacacaggaaaactcgataaaatatgttttactatctcagatgggtgctgaaatattttaataatcagagctatcatagacaaaacatttgttttatagagtcagtagttcagccaagtgattgggagaccacacagcagagaagcctcacaagagtggagacatatggactgcattcagaacattgaccattagctgatacatgcagacaagaggatcaggaaggatgagtctgatctggagtaaatcagaagtactaagatagaaatgctgaattctgttccactagaatataagatccaagagggcagggactttgttgactgccaaatctactctgccttttcagtgcctaatacgttgtaatttttcagtagtatttgaaattactgtcatatttgaaattcagtaatatttgacatttttatttatctctagaagtttctctaaaattgtactcagaagaattctgcaaggcttggaggatatataagttagtcatatggcctgattttcccatttttgcagatctcgtggacaagtgtttatcaaactgaaggttgcagcttgttagtgggttcagaaatcagtttctggctagcaactagaagttttgtatgttaacagtactttattgaggtgtaatctgcatgcagtaacatgcacaagtctcaagttcatggctttctgaattttgacaaatgtaatcatcaccaagatcaatgtatacaatatgtctattaaaccaaaaagttttcttgtgcccatttccagtcaa

SEQ ID NO: 202588 - DNA, 520 bp, Homo sapiens
  Payload ID: 19951
  Gene Name: zinc finger protein 45
  ENST ID: ENST00000588140
  CDS Start-End: 134-520
tttattgcaagatttaggtggagtgtgtttgatgttgtaggaggcagtgacattcaaggacgtggctgtggtcttctctgaggaggagctgcaactgctggaccttgcccagaggaagctgtaccgagatgtgatgctggagaacttcaggaatgtggtctcagtggggcatcagtccacaccagatggcctaccacagttagagagagaagaaaagctgtggatgatgaagatggcaacccagagagataactcctcaggagccaagaatctaaaagagatggagactcttcaagaagtaggattaaggtacctgcctcatgaagagcttttctgctcccagatctggcaacagattacaagagagttaatcaagtatcaagattctgtggtaaatattcaaagaacaggctgccagttggaaaaacgagatgatttgcactataaagatgagggattcagtaatcagagttcccatcttcaagttcacagagtccacactggtgaaaaaccctacaaa

SEQ ID NO: 202589 - DNA, 2409 bp, Homo sapiens
  Payload ID: 19951
  Gene Name: zinc finger protein 45
  Uniprot ID: Q02386
  ENST ID: ENST00000589703
  CDS Start-End: 103-2151
tggttttttttttggccaaactctcatggcttttttctccttccctcatgttttctccttccctcttaagacttggcacttctccagaaggaggaggacaaaatgacgaagtctaaggaggcagtgacattcaaggacgtggctgtggtcttctctgaggaggagctgcaactgctggaccttgcccagaggaagctgtaccgagatgtgatgctggagaacttcaggaatgtggtctcagtggggcatcagtccacaccagatggcctaccacagttagagagagaagaaaagctgtggatgatgaagatggcaacccagagagataactcctcaggagccaagaatctaaaagagatggagactcttcaagaagtaggattaaggtacctgcctcatgaagagcttttctgctcccagatctggcaacagattacaagagagttaatcaagtatcaagattctgtggtaaatattcaaagaacaggctgccagttggaaaaacgagatgatttgcactataaagatgagggattcagtaatcagagttcccatcttcaagttcacagagtccacactggtgaaaaaccctacaaaggagaacattgtgtgaaaagtttcagctggagctctcatcttcaaattaaccaaagggctcatgcaggagagaagccctacaaatgtgaaaaatgtgataatgccttccgtcggttttcaagtcttcaagcccatcagagagtccacagtagagcaaaatcatacacaaatgatgcaagttacaggagttttagtcagaggtcacatcttccccatcatcagagagttcccactggagagaatccatacaaatatgaagagtgtgggaggaatgttgggaaaagctcacattgtcaagctcctctgatagttcatacgggagagaaaccctataaatgtgaggagtgtggggtgggcttcagtcagagatcatatcttcaagttcatctgaaagttcacactggaaagaaaccatataagtgtgaagagtgtgggaagagcttcagttggcgttcacgactgcaggctcatgagcgaatccacactggcgagaaaccatacaaatgcaatgcatgtggcaagagctttagttacagctcacaccttaatattcattgtagaatccacacaggagagaaaccctataagtgtgaggagtgtgggaaaggtttcagtgtgggttcacaccttcaggcccatcagataagccacactggagagaagccatacaaatgtgaggagtgtgggaaaggcttctgccgggcctcaaatctgctggaccatcaaagaggccatactggagagaaaccgtatcagtgtgatgcatgtggtaagggcttcagtcgtagctcagattttaacattcattttagagtccatacaggggaaaaaccctataaatgtgaggagtgtggcaagggcttcagccaggcctcaaatcttctggcccatcaaagaggccacactggagagaaaccctacaaatgtggtacatgtgggaagggcttcagtcggagctcagatcttaatgtacactgtagaatccacacaggagagaaaccctataaatgcgagaggtgtggtaaggccttcagtcagttctccagccttcaggtgcatcagagagttcacactggagagaaaccatatcagtgtgcagagtgtgggaagggcttcagtgtaggttcacagcttcaagcccatcagaggtgccacactggagagaaaccctatcaatgtgaggagtgtgggaagggcttctgtcgggcctccaattttctggcacatcgtggagtccacacaggagaaaaaccataccgatgtgatgtgtgtggtaagcgcttcagacagagatcctaccttcaagcccaccagagggtccacacaggagagagaccatacaaatgtgaggaatgtgggaaagtcttcagctggagctcataccttcaagcccatcaaagagttcacaccggagaaaaaccatacaaatgtgaggagtgtgggaagggcttcagttggagctcaagtcttatcattcatcagcgagtccatgctgatgatgagggtgacaaggactttccttcatcagaggattcacacaggaaaactcgataaaatatgttttactatctcagatgggtgctgaaatattttaataatcagagctatcatagacaaaacatttgttttatagagtcagtagttcagccaagtgattgggagaccacacagcagagaagcctcacaagagtggagacatatggactgcattcagaacattgaccattagctgatacatgcagacaagaggatcaggaaggatgagtctgatctggagtaaatcagaagtactaagatagaaatgctgaattc

SEQ ID NO: 202590 - DNA, 2912 bp, Homo sapiens
  Payload ID: 19951
  Gene Name: zinc finger protein 45
  Uniprot ID: Q02386
  ENST ID: ENST00000615985
  CDS Start-End: 108-2156
agctgagcataggcacagaagtttaggtgtttggaccaaggtcacacaactgatacaacagtagcttcttcacagacttggcacttctccagaaggaggaggacaaaatgacgaagtctaaggaggcagtgacattcaaggacgtggctgtggtcttctctgaggaggagctgcaactgctggaccttgcccagaggaagctgtaccgagatgtgatgctggagaacttcaggaatgtggtctcagtggggcatcagtccacaccagatggcctaccacagttagagagagaagaaaagctgtggatgatgaagatggcaacccagagagataactcctcaggagccaagaatctaaaagagatggagactcttcaagaagtaggattaaggtacctgcctcatgaagagcttttctgctcccagatctggcaacagattacaagagagttaatcaagtatcaagattctgtggtaaatattcaaagaacaggctgccagttggaaaaacgagatgatttgcactataaagatgagggattcagtaatcagagttcccatcttcaagttcacagagtccacactggtgaaaaaccctacaaaggagaacattgtgtgaaaagtttcagctggagctctcatcttcaaattaaccaaagggctcatgcaggagagaagccctacaaatgtgaaaaatgtgataatgccttccgtcggttttcaagtcttcaagcccatcagagagtccacagtagagcaaaatcatacacaaatgatgcaagttacaggagttttagtcagaggtcacatcttccccatcatcagagagttcccactggagagaatccatacaaatatgaagagtgtgggaggaatgttgggaaaagctcacattgtcaagctcctctgatagttcatacgggagagaaaccctataaatgtgaggagtgtggggtgggcttcagtcagagatcatatcttcaagttcatctgaaagttcacactggaaagaaaccatataagtgtgaagagtgtgggaagagcttcagttggcgttcacgactgcaggctcatgagcgaatccacactggcgagaaaccatacaaatgcaatgcatgtggcaagagctttagttacagctcacaccttaatattcattgtagaatccacacaggagagaaaccctataagtgtgaggagtgtgggaaaggtttcagtgtgggttcacaccttcaggcccatcagataagccacactggagagaagccatacaaatgtgaggagtgtgggaaaggcttctgccgggcctcaaatctgctggaccatcaaagaggccatactggagagaaaccgtatcagtgtgatgcatgtggtaagggcttcagtcgtagctcagattttaacattcattttagagtccatacaggggaaaaaccctataaatgtgaggagtgtggcaagggcttcagccaggcctcaaatcttctggcccatcaaagaggccacactggagagaaaccctacaaatgtggtacatgtgggaagggcttcagtcggagctcagatcttaatgtacactgtagaatccacacaggagagaaaccctataaatgcgagaggtgtggtaaggccttcagtcagttctccagccttcaggtgcatcagagagttcacactggagagaaaccatatcagtgtgcagagtgtgggaagggcttcagtgtaggttcacagcttcaagcccatcagaggtgccacactggagagaaaccctatcaatgtgaggagtgtgggaagggcttctgtcgggcctccaattttctggcacatcgtggagtccacacaggagaaaaaccataccgatgtgatgtgtgtggtaagcgcttcagacagagatcctaccttcaagcccaccagagggtccacacaggagagagaccatacaaatgtgaggaatgtgggaaagtcttcagctggagctcataccttcaagcccatcaaagagttcacaccggagaaaaaccatacaaatgtgaggagtgtgggaagggcttcagttggagctcaagtcttatcattcatcagcgagtccatgctgatgatgagggtgacaaggactttccttcatcagaggattcacacaggaaaactcgataaaatatgttttactatctcagatgggtgctgaaatattttaataatcagagctatcatagacaaaacatttgttttatagagtcagtagttcagccaagtgattgggagaccacacagcagagaagcctcacaagagtggagacatatggactgcattcagaacattgaccattagctgatacatgcagacaagaggatcaggaaggatgagtctgatctggagtaaatcagaagtactaagatagaaatgctgaattctgttccactagaatataagatccaagagggcagggactttgttgactgccaaatctactctgccttttcagtgcctaatacgttgtaatttttcagtagtatttgaaattactgtcatatttgaaattcagtaatatttgacatttttatttatctctagaagtttctctaaaattgtactcagaagaattctgcaaggcttggaggatatataagttagtcatatggcctgattttcccatttttgcagatctcgtggacaagtgtttatcaaactgaaggttgcagcttgttagtgggttcagaaatcagtttctggctagcaactagaagttttgtatgttaacagtactttattgaggtgtaatctgcatgcagtaacatgcacaagtctcaagttcatggctttctgaattttgacaaatgtaatcatcaccaagatcaatgtatacaatatgtctattaaaccaaaaagttttcttgtgcccatttccagtc

SEQ ID NO: 202591 - DNA, 4998 bp, Homo sapiens
  Payload ID: 19952
  Gene Name: zinc finger protein 451
  Uniprot ID: Q9Y4E5
  ENST ID: ENST00000357489
  CDS Start-End: 225-3266
ggaagcccgggagtgagagaaagcggctccgggggcatagcgggccagtaagggccgctcctcctttgaagaggttttgcgtctctttccgccggtggcgtcggcgctcacgcaggggcgggtcccggtagcgccaggcggtgcagggcgggaaggggattcgtggcgacggcggcggcagggacagcaggagcagtggtgctgtcagcgcggccgtcggagacatgggagacccggggtcggagataatagaatctgtccctccagctggccctgaggcatctgagtcaacaacggatgaaaatgaagacgacattcagtttgtcagtgaaggaccattacgacctgttcttgaatacattgatctggtcagcagtgatgatgaagagcctagcacctcttatactgatgagaatattaaacgtaaagaccatattgattatcagaaggataaagttgctttaactctggctcgtctagcccgccatgttgaagtggagaaacagcagaaagaagagaagaatagagcattcagagaaaaaattgattttcagcatgctcatgggttacaagaattggaatttattcgaggacattctgatacagaagcagcaagactgtgtgtggaccagtggctaaaaatgccaggactcaaaacaggcacaattaattgtggaacaaaaagttcattccgaagaggaggccacacgtgggtgtctgggaaaccaattttatgtcctataatgcactgtaacaaggagtttgacaatgggcaccttctcttaggacatttgaaaaggttcgatcactctccatgtgatccaacaattacactacatggacctttcttcagctcctttgcttgtgtagtatgttataaaaaatttgttactcaacaacaatatagagatcacctttttgataaggaagccacagatgatggacataacaacaaccttcttcctcagattattcagtgttttgcatgtccaaattgcttccttctttttagcagaaaggaggagtgttcaaagcatatgtctggaaagaatcatttccatcagagtttcaaactgggtgataacaaaggaattgcacatccaatatctttcccatcttttgcaaagaaacttttgatctctctgtgcaaagatgttccctttcaagttaagtgtgtggcctgccacaagacactgcgttcccacatggagctcactgcccatttcagagttcattgtcgaaatgctggacctgtagctgtagctgagaagagcattacccaggttgcagagaaattcatattaagaggttattgtccagattgcaatcaagtctttgtggatgaaaccagcacccaaaatcataagcagaattcaggacacaaagtccgagtcattaactcagtggaagaatcagtcttactctattgccacagcagcgaagggaacaaggatccttcttctgacttgcatttattgttggatcaatcaaaattttcatcacttaaaagaaccatgtctattaaagaatctagctcactggagtgcattgccattccaaaaaagaagatgaatttaaaagataaaagccatgaaggtgttgcttgtgtccagaaagaaaaatcagtagttaaaacctggttctgtgaatgcaatcagcgattcccaagtgaagatgcagtagaaaagcatgttttctcagcaaacacaatgggttataaatgtgtggtctgtggaaaggtatgtgatgattcaggggtcattcgtttacacatgagccggattcacggaggggcacatttaaataactttcttttctggtgtcggacatgcaaaaaggagttaacaaggaaagatactatcatggcacatgtgactgaatttcataatggacacagatatttttatgagatggatgaggtagaaggtgaaactttgccatcatcctctacaacattggataatttgactgctaacaagccttcatcagctattactgttattgatcattccccggcaaatagttctccgaggggtaaatggcaatgccggatttgtgaagatatgtttgattcccaggaatatgtaaaacagcactgcatgtctttggcaagccacaagtttcatagatacagctgtgctcactgcagaaagccttttcataagatagaaacattgtaccgacattgccaagatgagcatgacaatgagataaagattaaatacttctgtgggctttgtgatcttatctttaatgtggaagaagcatttctgagtcattatgaggagcaccacagcatagattatgtatttgtgtcagaaaaaactgaaacttcaattaaaaccgaagatgattttccagtaatagagaccagtaaccagttaacttgtggttgccgtgagagttacatctgtaaagtcaacagaaaagaagattatagcagatgtctccaaatcatgctggataaaggaaaactgtggtttcgctgcagtttatgttcggcaacagcacagaatttaaccgacatgaacactcatatccatcaagtgcacaaagaaaagagtgatgaggaggagcagcagtatgtaatcaagtgtggcacctgcaccaaagcatttcatgatcctgagagtgcacagcagcatttccatagaaaacattgcttcttacagaaacccagtgtggctcattttggatctgaaaaatcaaacctgtacaagtttactgctagtgcctcacatacagagagaaaactgaaacaggcaataaactattcaaaaagtttagacatggagaaaggagttgagaatgacctaagctatcagaatataggaggaaacaccaattggaagcctccgctcaactgtaagatttataactacctgaacaggattggatgcttcttccttcatcctcgctgtagtaaaagaaaagatgctgctgattttgccatatgtatgcatgctggccgtctagatgaacaactacccaagcaaattcctttcaccatcctctcaggagatcaaggttttctggagctagagaatcaatttaagaagactcagaggccagctcatatactaaaccctcaccacttagagggagatatgatgtgtgccttgttaaatagcatatctgataccaccaaagaatgtgacagtgatgataacatgggtgccaaaaatacttcaataggagaagaatttatatccacagaagatgtggaattagaagaagctattagaagaagtcttgaggaaatgtaattaaagatattaccacacaacatcaagtggccttgaagagactgagataacgaattcttgagtttgttttctaaaggagaccagaaatccactattacaaatgtatttgaaaacatgtttttgctttcatatgttcaaaatctgatctttgttttgtatttttgtgctaatgtgcaaacatgtacagaagaaatagaatacatgttcatgcaaatataaattatgtattctaatataggtgtaacagtttcccagttaactttgaatttatatatttagatttaaaggattaaaaaaaaggaaagctcttgacagttgtttcccaaatagcattagttctttaattttatttgtactgtacaaatgatgctagtttatttttttagcagtgaaaatgaatataaaaaaggtgacataggtcaagttttccataaattctacttctcatgtggcactattatataatacctttgagatctttgtttatgtttattagaagagggtaatggaaactgatcatggaaacatttaaaattttatcagcaatgttctttgtgggtgccatgcatatgtaaattattgctttaattagagcagcacattgctaaaataaaaaatacaccttaatttttaagaaataatttaaatgaaacaatttccattccttttacctgcttagacttttatgtgacttgtatggtctcctggttaaagggaatggtgtcagaatatttgcataaaattatttttcataacagtccttttttatatattggtgtaaacataatattcttcaagaaataatgttgaaagcctactcaggaataatcttccttaactctttaaatttttatttcatgtgaagtgttttcagtttagttattcactgaattgtcagtttccttcatttggtattacatatttaattcttaaatattgaggccccattgtgagtaataaaaaatacgacataagtagaagactaagaagggcttgtcatattatctttgtgtatatgcttcatgttatttaaccagaaatgtcttatctctaaaaatttttagtagtaattatttaccaaacttaaaaacatttctataaatataaagcttttctttatatttaagacaaaatataaaggctagaatttggttccttctctgtaacactaaatattttagtgtgaaattgaatttttttattactatagtcttttcaatctataatttgtgtttttaatttcttgatatgtcacttctgttcctccctgcttgcattttttaaaaactagacattgtggcttgagaatttatcaatcatctttccgaaatgaccacattgtgcttttagtttgtatgtttaagtggtcaagcaaggctctaggaggtagtcactgagctggaccttaaacacatctgcaggagctcacaaaatgggagcaaaagaggcattccagaaagaagagtagttaagcagatgtgggggcagggcaagaggagacagcaccttgttgccagagattctacacaaaggtgtgatggacactgatgctctattaagaagcttttgtggtgtgtgtggtagagaataattaaggcttctgataagacaggaaagggatatttcatcatgactgttaagaaaaggtaactgggttgtttaatgttttaattgataattgtcactgatcgtatttctacttgttaaataattaaaaatcatcttaaaattc

SEQ ID NO: 202592 - DNA, 458 bp, Homo sapiens
  Payload ID: 19952
  Gene Name: zinc finger protein 451
  ENST ID: ENST00000370702
  CDS Start-End: 178-399
gtaagggccgctcctcctttgaagaggttttgcgtctctttccgccggtggcgtcggcgctcacgcaggggcgggtcccggtagcgccaggcggtgcagggcgggaaggggattcgtggcgacggcggcggcagggacagcaggagcagtggtgctgtcagcgcggccgtcggagacatgggagacccggggtcggagataatagaatctgtccctccagctggccctgaggcatctgagtcaacaacggatgaaaatgaagacgacattcagtttgtcagtgaaggaccattacgacctgttcttgaatacattgatctggtcagcagtgatgatgaagagcctagcacctcttatactgatgggtcggcgctttgcctgatgaccctacctctctgacagatctgagaagagtttactcttcagcttttaagtgaataaagatgataaatgtccta

SEQ ID NO: 202593 - DNA, 5268 bp, Homo sapiens
  Payload ID: 19952
  Gene Name: zinc finger protein 451
  Uniprot ID: Q9Y4E5
  ENST ID: ENST00000370706
  CDS Start-End: 245-3430
atcctgcgcggcgcggggaaggaagcccgggagtgagagaaagcggctccgggggcatagcgggccagtaagggccgctcctcctttgaagaggttttgcgtctctttccgccggtggcgtcggcgctcacgcaggggcgggtcccggtagcgccaggcggtgcagggcgggaaggggattcgtggcgacggcggcggcagggacagcaggagcagtggtgctgtcagcgcggccgtcggagacatgggagacccggggtcggagataatagaatctgtccctccagctggccctgaggcatctgagtcaacaacggatgaaaatgaagacgacattcagtttgtcagtgaaggaccattacgacctgttcttgaatacattgatctggtcagcagtgatgatgaagagcctagcacctcttatactgatgagaatattaaacgtaaagaccatattgattatcagaaggataaagttgctttaactctggctcgtctagcccgccatgttgaagtggagaaacagcagaaagaagagaagaatagagcattcagagaaaaaattgattttcagcatgctcatgggttacaagaattggaatttattcgaggacattctgatacagaagcagcaagactgtgtgtggaccagtggctaaaaatgccaggactcaaaacaggcacaattaattgtggaacaaaaagttcattccgaagaggaggccacacgtgggtgtctgggaaaccaattttatgtcctataatgcactgtaacaaggagtttgacaatgggcaccttctcttaggacatttgaaaaggttcgatcactctccatgtgatccaacaattacactacatggacctttcttcagctcctttgcttgtgtagtatgttataaaaaatttgttactcaacaacaatatagagatcacctttttgataaggaagccacagatgatggacataacaacaaccttcttcctcagattattcagtgttttgcatgtccaaattgcttccttctttttagcagaaaggaggagtgttcaaagcatatgtctggaaagaatcatttccatcagagtttcaaactgggtgataacaaaggaattgcacatccaatatctttcccatcttttgcaaagaaacttttgatctctctgtgcaaagatgttccctttcaagttaagtgtgtggcctgccacaagacactgcgttcccacatggagctcactgcccatttcagagttcattgtcgaaatgctggacctgtagctgtagctgagaagagcattacccaggttgcagagaaattcatattaagaggttattgtccagattgcaatcaagtctttgtggatgaaaccagcacccaaaatcataagcagaattcaggacacaaagtccgagtcattaactcagtggaagaatcagtcttactctattgccacagcagcgaagggaacaaggatccttcttctgacttgcatttattgttggatcaatcaaaattttcatcacttaaaagaaccatgtctattaaagaatctagctcactggagtgcattgccattccaaaaaagaagatgaatttaaaagataaaagccatgaaggtgttgcttgtgtccagaaagaaaaatcagtagttaaaacctggttctgtgaatgcaatcagcgattcccaagtgaagatgcagtagaaaagcatgttttctcagcaaacacaatgggttataaatgtgtggtctgtggaaaggtatgtgatgattcaggggtcattcgtttacacatgagccggattcacggaggggcacatttaaataactttcttttctggtgtcggacatgcaaaaaggagttaacaaggaaagatactatcatggcacatgtgactgaatttcataatggacacagatatttttatgagatggatgaggtagaaggtgaaactttgccatcatcctctacaacattggataatttgactgctaacaagccttcatcagctattactgttattgatcattccccggcaaatagttctccgaggggtaaatggcaatgccggatttgtgaagatatgtttgattcccaggaatatgtaaaacagcactgcatgtctttggcaagccacaagtttcatagatacagctgtgctcactgcagaaagccttttcataagatagaaacattgtaccgacattgccaagatgagcatgacaatgagataaagattaaatacttctgtgggctttgtgatcttatctttaatgtggaagaagcatttctgagtcattatgaggagcaccacagcatagattatgtatttgtgtcagaaaaaactgaaacttcaattaaaaccgaagatgattttccagtaatagagaccagtaaccagttaacttgtggttgccgtgagagttacatctgtaaagtcaacagaaaagaagattatagcagatgtctccaaatcatgctggataaaggaaaactgtggtttcgctgcagtttatgttcggcaacagcacagaatttaaccgacatgaacactcatatccatcaagtgcacaaagaaaagagtgatgaggaggagcagcagtatgtaatcaagtgtggcacctgcaccaaagcatttcatgatcctgagagtgcacagcagcatttccatagaaaacattgcttcttacagaaacccagtgtggctcattttggatctgaaaaatcaaacctgtacaagtttactgctagtgcctcacatacagagagaaaactgaaacaggcaataaactattcaaaaagtttagacatggagaaaggagttgagaatgacctaagctatcagaatatagaggaagaaattgttgagcttccagatttggattacctgcgaaccatgactcatatagtctttgtagattttgataactggtcaaacttttttggtcatctaccagggcatctaaaccaaggaacatttatttggggctttcaaggaggaaacaccaattggaagcctccgctcaactgtaagatttataactacctgaacaggattggatgcttcttccttcatcctcgctgtagtaaaagaaaagatgctgctgattttgccatatgtatgcatgctggccgtctagatgaacaactacccaagcaaattcctttcaccatcctctcaggagatcaaggttttctggagctagagaatcaatttaagaagactcagaggccagctcatatactaaaccctcaccacttagagggagatatgatgtgtgccttgttaaatagcatatctgataccaccaaagaatgtgacagtgatgataacatgggtgccaaaaatacttcaataggagaagaatttatatccacagaagatgtggaattagaagaagctattagaagaagtcttgaggaaatgtaattaaagatattaccacacaacatcaagtggccttgaagagactgagataacgaattcttgagtttgttttctaaaggagaccagaaatccactattacaaatgtatttgaaaacatgtttttgctttcatatgttcaaaatctgatctttgttttgtatttttgtgctaatgtgcaaacatgtacagaagaaatagaatacatgttcatgcaaatataaattatgtattctaatataggtgtaacagtttcccagttaactttgaatttatatatttagatttaaaggattaaaaaaaaggaaagctcttgacagttgtttcccaaatagcattagttctttaattttatttgtactgtacaaatgatgctagtttatttttttagcagtgaaaatgaatataaaaaaggtgacataggtcaagttttccataaattctacttctcatgtggcactattatataatacctttgagatctttgtttatgtttattagaagagggtaatggaaactgatcatggaaacatttaaaattttatcagcaatgttctttgtgggtgccatgcatatgtaaattattgctttaattagagcagcacattgctaaaataaaaaatacaccttaatttttaagaaataatttaaatgaaacaatttccattccttttacctgcttagacttttatgtgacttgtatggtctcctggttaaagggaatggtgtcagaatatttgcataaaattatttttcataacagtccttttttatatattggtgtaaacataatattcttcaagaaataatgttgaaagcctactcaggaataatcttccttaactctttaaatttttatttcatgtgaagtgttttcagtttagttattcactgaattgtcagtttccttcatttggtattacatatttaattcttaaatattgaggccccattgtgagtaataaaaaatacgacataagtagaagactaagaagggcttgtcatattatctttgtgtatatgcttcatgttatttaaccagaaatgtcttatctctaaaaatttttagtagtaattatttaccaaacttaaaaacatttctataaatataaagcttttctttatatttaagacaaaatataaaggctagaatttggttccttctctgtaacactaaatattttagtgtgaaattgaatttttttattactatagtcttttcaatctataatttgtgtttttaatttcttgatatgtcacttctgttcctccctgcttgcattttttaaaaactagacattgtggcttgagaatttatcaatcatctttccgaaatgaccacattgtgcttttagtttgtatgtttaagtggtcaagcaaggctctaggaggtagtcactgagctggaccttaaacacatctgcaggagctcacaaaatgggagcaaaagaggcattccagaaagaagagtagttaagcagatgtgggggcagggcaagaggagacagcaccttgttgccagagattctacacaaaggtgtgatggacactgatgctctattaagaagcttttgtggtgtgtgtggtagagaataattaaggcttctgataagacaggaaagggatatttcatcatgactgttaagaaaaggtaactgggttgtttaatgttttaattgataattgtcactgatcgtatttctacttgttaaataattaaaaatcatcttaaaattcatactttgactttaatttagacacaaggagatgtaatcgctgtgtaacatcagagaaagctatatggattatcgtcagaagtaaatgtttctaacattgacaaaga

SEQ ID NO: 202594 - DNA, 9478 bp, Homo sapiens
  Payload ID: 19952
  Gene Name: zinc finger protein 451
  Uniprot ID: Q9Y4E5
  ENST ID: ENST00000370708
  CDS Start-End: 179-1858
agtaagggccgctcctcctttgaagaggttttgcgtctctttccgccggtggcgtcggcgctcacgcaggggcgggtcccggtagcgccaggcggtgcagggcgggaaggggattcgtggcgacggcggcggcagggacagcaggagcagtggtgctgtcagcgcggccgtcggagacatgggagacccggggtcggagataatagaatctgtccctccagctggccctgaggcatctgagtcaacaacggatgaaaatgaagacgacattcagtttgtcagtgaaggaccattacgacctgttcttgaatacattgatctggtcagcagtgatgatgaagagcctagcacctcttatactgatagaatgcctgaatctaaggtgccatcctctgagaatcatcgcccagaaatgtgctctagctgcaatgttcctcttcccattggagatagcagctccttctctgggagttgttccagcagtccagaaaggatagtttctcaaacttcctctgttgagaacccattggagaaccagaaaaatgatcaaaataattcagatactaagatctctgagacagagacccttaaatcatcacagaattttcagactctgccttcatctccacttctggtcccccaagaatctttggcctcttctgaggtcaaagagaatttacgtatagattcttcttcagcttcacagcatggacgggatgccatcctctatctccagacacaagtagctgaaatgtcccgagtgatacgtgatctgcagtccaggagctgttttagatttcatcattctaggccaagtgagaactcctcagttccttgggacatctccacctctaaagaggaaaatttatccacagttgaagaagaaactgattacaaatcaccatcagctgatgacaaagggcagccatctgaccccagccaatctagtttcacaggtcttttgaagagaatggaacaaagaggtgttataaaaagggtgacattacaatctgaagcggagtcatgtgaagggaaacctgattgtgtgacttctaaaaaacgtttggttcctccattgcatcctcttctgagaattgccaccactgaggtttttaaagaccctgctgattgccatccttcttccttcatgggacacagggtatatcctgtggccaaggacacctctcctttccaaccaaacccaccagctgaaggccccattgtagaagcattagaacacagcaaaagaggaaacacaacatcccctctagattctacctcaaaagaaatggaggtcatgggttgtaggttttaccacgctgcctccattgcagcccgagctgctagctacatggcctatatgactcaatatcagcgtaaactctgggaagacatggaagatctggttcatgacccagaatttgatcgtggaaaagcaagatgcataatatctgatggtatggatgcaggcctttggcaactttgtactactagggacataatggactctgtagtcagagttatggccatggccatagactatagacggcaggcctggcttcgacttacatctctcactaagaaaacccaggagaagatctcccacttgccctttgatggtacttccctttttggacaagatgtgaaagctgttgttgcagaagacaacaatataaaagaaaatgactataaagatcacaaatactataatcagcatcgatacttttatagtcatgatcagaaagcacattatcacaatagaggatactccaaaggggattggtacaaacctcgaaaccacccctatagatatagaaagaagggagactctccagaacgccatgggtacaagaattaataacctgtttaatgttcagcagagtagtcattcaagatcctaactattttacttgttcctccttgtacaaataggatctacaggtaggagatcatctcaaaaactggatgcatgtctggaatgatcacagctgacatttgaattctagacttttgaaatgaagtatataataaagaaactcatgacttattggccaagtgagcagtggagactttcttgaaagggttggacaaatgtttatcctttatttctggtccaaaaataagtgtggaggaggaccactcaggaatctgaatcctcttgtgattaaagaaaaatataaagatgtgttcctcaggaaaatcttatttgtaaactgaggactagcagattttgaatctagaaataatactagatgtctgtttactaagaccagaggtaaatccttaacttttaggttatcagtgcttccttgttcaggcttcagtttgacagatcttcacaaaatgacacatctgttaaaatgtctttatgtcaagatggtcaactcaccaagagtccgtactactatcaagctctgtgagacttcagaatcagccatgaagctttgtgtcaactggaattcaaatcaaattttgccaaatccagtttgcttccccttggaatggctagatgtcgcaggtctattatggacaccaactggaaaaagacttctacctgtaacatctctgtagaaattgcacagtaactatcttcatcaagactttgatggccaccataccatcactactcataaagctacatgtgagagaattgtttgttgttatcaatcctaatagtctttgacctatcaagctctcgtatcaagctgtaagactgagtcatggtagtctctcactgtaagctgggcctttcaccaagatggccttcttaaacaacctaccttctaaacatttaattcttttgagcttgatagtgcatcacactctaaatacaaaaaagatacgcacatcagtgccctggaaataaaggatgttacacgatccaggcatgcaaatctgaactcctaagaccaagaattccaaacatgcctgacaatcttgtccccttattgtaataaagagggataccatcagtctagattttattgagaatccttaagatttaaagcatagctgtggatgtggtgaagagaacaagccacacagctctgtttctggatatctaagtgatgatatccattaatgatttgaaaggctgaaatcaagatttaagtgatacgctcttggttaattggttacttaatttagtcagattcttagtgtaagagacagcttatctttttgctcccaattggtcccattaatagtttttcaccatactggaactggcagcagatacctcaattatatgtcccacagtatcttctctttagactcaaggtagtggatgtatggtatatcagcccttagatccatgtcttcacagcatgacatcaggaatggagaatatgtcaaatttgaggggtctgaatacatcacctagtattatttgcttggcagccaaaaacagttgtttttattgacagacttaattctgtaacttctgcgttttttcatctgcttgatcaaggcattttggatgtactgctaatggaatatggcactgttttacggtttatgtggcttctgttcttgccacagttgttgcacagtggtaattgatgttttctctggtgccacactttttaataatctattggaagctcattcctcctcccccatcataaccatattcagcacccatttttaaatctacttttcttccttatttgtgctacagaggttgatggcgtaaattttcctacttggaagaaattactttatcagttaatttcagggtactgtattgatcttgtttgtcctatttgtagattaaacttgaactagtcttaataaaggggatattgttttgcaaatttagcccagtcatatcaagagttaatatttatcttatttttctgtattttactcaaaattttatttccacttctgtagaaataggtccatgccagtgttctctacaaagtgtctttcaaactaaactctagaagaatatcgattacctgaacagaaacaaaggcctaagaaatcatacatttttgtagcttatgtgtattgcaccaatcaagcaatcccatgtgctcttgatattggcactgtagttttatcttagaggacttgccactggagaactcagtggtgagagaccttggaaatgttttatgtggctgcacataagtgtttctgactagctaaggctacttcagacttttcactttccatttgtccccttttccttccctgaattagatgctatgtcataaacttggtggtttttgaaatactcttatttcaaaccttaaactaaaccgaaataagttatgcctgagaatgcgtttgtctgaaacgattttggcacttccctttaatatgcttccccttccctttgccttttaaattgtggttaaaaaaaaagaaaaaaaaaggcacataaagctgagcaccttaaccattttttaagcgtatggtagtgttgactatatttgcattgttgcgcagctcctccattcttaaatatttgtaagatgatgttgctgttctcttttcctcctgtgatatttatgttgcccagtaataagtaaaagtatcctttcttagttactctaactgatatgcccaagtgtctccagatactctgttttcctggaagtgtaaaggtattgggaaattatcaaattggtgaccaagtagttctgaaaggatttgaccgtttaatagggatggggacagaatgcagatcaggaagagtttttagtaatagattagtttcttgattgcaaaagaaatatctttaatgtgttaattttttattattttaaaatctctggcatacttgaatgataatgttataaaacttaaagtgaggatttggtctagggagattaccccaatagaatcagaaactcttagtcagataataaatcctcatattatgcctgccatgttcagaacctgcaacaaaattccctactaggccaacctctaacgtttaaatacctctaggttttctaggaggccttggaatagttgcaagtttaatgatctggtattctcaaaaaggatgtatctaatgatcttgattcttcaaaatgttatttcttgattagatatacaatgtatatagagacaatatggtttcttgtagttactgtgtatagagaagtactgtttccatttttatatgaagtgcctttttaattctacacttttctttaaaacttaaactttgatgtcttgcatatattgctggtggtatttatgtgaattttgtacagtgatttaatcttgtagtttatcatttgtacaattgcactatctaaatgtactcccttctgaatgttaatttgttttctttatagcactgttgattcatttcagaaggttgtagagtatacctccctcccccttatttaactaactagacagtagttcctttttgttattagtgagtggctaattttggggggccttaaggcagctttgttttctatagatatgctctaggttttctgattgtctcgtatctaaccttgttcttagccatgataacacaacttatatttgataagtggatgtgtttacttggttagaataagcaaggacatttttaaaaagcagtaaatttgctgacacttttatctttttttaaaagaatgaatgacagcttccttatcagtataattacatttaaacttttttttttaaaccgtgtggcagcttctttatcaatcagtataattccatttatttacttagccctcaaaatgacattttgaagggagcataaactctttcaggctacttggacagtatttagtattctatattagtactacactaataatttactgagtgctacctaagtgacctgattgataatgtccttaaggacctgatacatccaggataacctctcaggtactgtaaacaaggaggttgaaaaagacacattccggaatccctttgtctggtaaaattggatactgatgtggatggacatgacattcattattcttgaagatataactagttgactgggattctgatgaaggtttgaaattatggattagatctttgtagaagtagtttaaagattgcaataagtgaaatcttttttttttttttttttttgagacagtttcgctcttgttgcccaggctggagtgcaatggcacgatcttggctgactgcaaccgccacctcccgggttcaagcaattctgtctcagcctcccgagtagctgggattacaggcatgtgtcaccatgacctgctaattttgtatttttagtagagacggggtctctccatgttggtcaggctggtctcaaactcctgacctcaagtgatccgcccgccttggcctcccaaagtgctgggattataggcgtgagccaccgcgcctggctgtgaaattttttttttttttttttttatgtgaggcatattttgccacagtctcgcactgtttaggttctcttgtcttttggaatctatcattctgtatttaatgttagtggctagtccaataattgattgtctcatctgtatgcatcttatgcatgtgattcaatagactagatcgattctgtgtggtttatcatagtagatacacaaaccagtctttattttttacttaagaaaatatataagtggaagttatcagtaaactggtgattattgtattgaatgcaaatctttttattatttttccagatatattgagttttataaaccattaaaatattattttatgaaatttcccttcctggatgaacagaatattgttttattaaatcttctcttattagtggaatattttttacttctttgtcttttcatttacttgttttttgttataatgaaaactttactagtgtttggtaccattgagataacttattactggaaattttgtttgcttcctgtgggatatatctggaagtggtcatagtccaaccatgtccttttgatgttgttagcatatcagttattctatgtattgatcttttcttctcctgtattcaacacctctttctgaaaggatgtctgatcttcccataatcgctttgatgtagatgatatttttattctatcagtgtatactagacaggattttgatgtggctttgtatttgtatatttaaataccatgtctttaaagcattattagaagagatattctagtttcttctaatgtcccttttaaaaaaaatatagccagtccaatatctcaaactactttgatttttgaacttaaatcaacttttagtgctaccttgtttaatggtagtagtattttctcatttctacatgttcacacaagtttattatatatagtttatggtcatatgtatcttataaaaattttgaagcccatccccatggatttattataatacagctctgatatatcttaaagttaacccgttttccgtagatgttaagggctttactggttgaggtaacctatttcaaatggtctgttgggttttgtggtaccttgtcaagaattcaataagaattctcaggctgtctgtattttcttttaggactttggagatctctcaagttgtactgttttctagtattcctgagtatattcctttggtaacgtgaaagtaaatagtttatatttgatgattttttttttttttttttgagacggagtcttgctctgtcacccaggctggagtacagtggtgagatcacggctcactgcaagctctgcctcccgggttcacgccattctcctgcctaagcctcctgagtagctgggactacaggcgcccgccaccacacccggcgaattttttgtatttttagtagagatggggtttcaccgtgttagtccaggtggtctcaatctcctgaaccttgtgatccacctaccttggcctcccaaagtgctgggattacaggcgtgagccacagtgcccggcctgtatttggtgatattttaaaaaattctactttgaccttaagtgcttcaagaattgtgttcagttagtagtccttttgtaagactaactttcatatgctatctttgctccatgagctatcatagtactgttttctttcattacccgtaagagtggctctatcacagcatttactgttaagggctacagttagacctcttgttaactctacttttatttgtgatggctgtgtttcacactaccttgatttataaatgtagtaatgtgttaaataactatatgttgtggtcccttaatacctcttttgattggtgaggtaacagtgatgtggatgatgaaataaaaacgtttccccaagtcactaaacacagttttcaattcatttttttttacatatttaatttacatctaactactgttaggtatgcagcccgttcctttttgccttcagtagaatatagttatataagtagtctcatttagattcttgggacagaacggcctgtgtattgatctttctttaatggcttggaacagcttctatatattctgacaggtcttggaagcatgttaatatccgtgtgtttaattgtcatcttcctgcctgggaaggcagtagaagaaagaatctacatttgtatagtctgtagtacaggctctgtgctgattgcaaggcactcttgagagaaattcattcttattttgcagaagaagaactgaaacttcattaagtcattaagcaacttgctcaggtggtggaactgagctttaaatatggactttttccagtctcaattcagcattatactaggctgcctccatgtgtttttcaaagccccattcaagttttacttctatggtaaactaattttacatacacaaatcttttcattttctgaacttcctttatggctttactgtcaccccactagtatttgatgtcttagctattaactaattcctgattatttcacttgtcacatcaggaaccctatcctcttagttctcccattgagatttcactgctggactaagattattcttgattcgtagtcattggtttctgtttccattcattttcagcactgattatgttaatcgtattgcttgagttttttctttgttcaatgttgtttattacattcattttgtttcatatacacacattttttttttttaactggcattttgaggatattggtttaatggaaggaaaaaggaatggtgcaaagcacatggtatttgaattccaaagaccttgaccctcagcattagcaagtcacttgttttctgagcctcagttttcttactctcaaatgaggtaatatccgaaagtactttgacaacacactaaagcctgatgcagatttcctttttgaagtaattgtgctgtttctattcatattggatatggtattctatggtattggctatagatacatacattttaaaatgttatttaacagcatgtaaatgttcatttcatgccatgtgatcatgttcccctttatgattttttaaggctgtcttacaagcctaacagtgtactaagtcattaaaagatatatttaaagtaaaa

SEQ ID NO: 202595 - DNA, 375 bp, Homo sapiens
  Payload ID: 19952
  Gene Name: zinc finger protein 451
  ENST ID: ENST00000370710
  CDS Start-End: 48-275
gcagggacagcaggagcagtggtgctgtcagcgcggccgtcggagacatgggagacccggggtcggagataatagaatctgtccctccagctggccctgaggcatctgagtcaacaacggatgaaaatgaagacgacattcagtttgtcagtgaaggaccattacgacctgttcttgaatacattgatctggtcagcagtgatgatgaagagcctagcacctcttatactgatgtgccctatacaacaggattcttttgttccagaaccacatgaccacagaaaatttgttttctcttagaaaaaaggatatgtagagatccttttaggaatggaaagtgggggaagggtttataggggatatattacttcagtc

SEQ ID NO: 202596 - DNA, 3632 bp, Homo sapiens
  Payload ID: 19952
  Gene Name: zinc finger protein 451
  ENST ID: ENST00000491832
  CDS Start-End: 66-3191
ttcgtggcgacggcggcggcagggacagcaggagcagtggtgctgtcagcgcggccgtcggagacatgggagacccggggtcggagataatagaatctgtccctccagctggccctgaggcatctgagtcaacaacggatgaaaatgaagacgacattcagtttgtcagtgaaggaccattacgacctgttcttgaatacattgatctggtcagcagtgatgatgaagagcctagcacctcttatactgatgagaatattaaacgtaaagaccatattgattatcagaaggataaagttgctttaactctggctcgtctagcccgccatgttgaagtggagaaacagcagaaagaagagaagaatagagcattcagagaaaaaattgattttcagcatgctcatgggttacaagaattggaatttattcgaggacattctgatacagaagcagcaagactgtgtgtggaccagtggctaaaaatgccaggactcaaaacaggcacaattaattgtggaacaaaaagttcattccgaagaggaggccacacgtgggtgtctgggaaaccaattttatgtcctataatgcactgtaacaaggagtttgacaatgggcaccttctcttaggacatttgaaaaggttcgatcactctccatgtgatccaacaattacactacatggacctttcttcagctcctttgcttgtgtagtatgttataaaaaatttgttactcaacaacaatatagagatcacctttttgataaggaagccacagatgatggacataacaacaaccttcttcctcagattattcagtgttttgcatgtccaaattgcttccttctttttagcagaaaggaggagtgttcaaagcatatgtctggaaagaatcatttccatcagagtttcaaactgggtgataacaaaggaattgcacatccaatatctttcccatcttttgcaaagaaacttttgatctctctgtgcaaagatgttccctttcaagttaagtgtgtggcctgccacaagacactgcgttcccacatggagctcactgcccatttcagagttcattgtcgaaatgctggacctgtagctgtagctgagaagagcattacccaggttgcagagaaattcatattaagaggttattgtccagattgcaatcaagtctttgtggatgaaaccagcacccaaaatcataagcagaattcaggacacaaagtccgagtcattaactcagtggaagaatcagtcttactctattgccacagcagcgaagggaacaaggatccttcttctgacttgcatttattgttggatcaatcaaaattttcatcacttaaaagaaccatgtctattaaagaatctagctcactggagtgcattgccattccaaaaaagaagatgaatttaaaagataaaagccatgaaggtgttgcttgtgtccagaaagaaaaatcagtagttaaaacctggttctgtgaatgcaatcagcgattcccaagtgaagatgcagtagaaaagcatgttttctcagcaaacacaatgggttataaatgtgtggtctgtggaaaggtatgtgatgattcaggggtcattcgtttacacatgagccggattcacggaggggcacatttaaataactttcttttctggtgtcggacatgcaaaaaggagttaacaaggaaagatactatcatggcacatgtgactgaatttcataatggacacagatatttttatgagatggatgaggtagaaggtgaaactttgccatcatcctctacaacattggataatttgactgctaacaagccttcatcagctattactgttattgatcattccccggcaaatagttctccgaggggtaaatggcaatgccggatttgtgaagatatgtttgattcccaggaatatgtaaaacagcactgcatgtctttggcaagccacaagtttcatagatacagctgtgctcactgcagaaagccttttcataagatagaaacattgtaccgacattgccaagatgagcatgacaatgagataaagattaaatacttctgtgggctttgtgatcttatctttaatgtggaagaagcatttctgagtcattatgaggagcaccacagcatagattatgtatttgtgtcagaaaaaactgaaacttcaattaaaaccgaagatgattttccagtaatagagaccagtaaccagttaacttgtggttgccgtgagagttacatctgtaaagtcaacagaaaagaagattatagcagatgtctccaaatcatgctggataaaggaaaactgtggtttcgctgcagtttatgttcggcaacagcacagaatttaaccgacatgaacactcatatccatcaagtgcacaaagaaaagagtgatgaggaggagcagcagtatgtaatcaagtgtggcacctgcaccaaagcatttcatgatcctgagagtgcacagcagcatttccatagaaaacattgcttcttacagaaacccagtgtggctcattttggatctgaaaaatcaaacctgtacaagtttactgctagtgcctcacatacagagagaaaactgaaacaggcaataaactattcaaaaagtttagacatggagaaaggagttgagaatgacctaagctatcagaatatagaggaagaaattgttgagcttccagatttggattacctgcgaaccatgactcatatagtctttgtagattttgataactggtcaaacttttttggtcatctaccagggcatctaaaccaaggaacatttatttggggctttcaaggaggaaacaccaattggaagcctccgctcaactgtaagatttataactacctgaacaggattggatgcttcttccttcatcctcgctgtagtaaaagaaaagatgctgctgattttgccatatgtatgcatgctggccgtctagatgaacaactacccaagcaaattcctttcaccatcctctcaggagatcaaggttttctggagctagagaatcaatttaagaagactcagaggccagctcatatactaaaccctcaccacttagagggagatatgatgtgtgccttgttaaatagcatatctgataccaccaaaggtacgcagctgcagtcacagtgcaaaccacccaagaggaggagacttcactgctgagagaaaccaataaactgctgtccgctagtgaactgttgcctgcttgctaaaccatcatgttctcttacttctatcttacttatcttttttaaaaaaatctcactttcattctttagtgttttagaaggaggatgaattcataataattttctggagctttttttgatctagtagataaaatctatattgatgtatataaaacatatattcatgtgttacagtatgttactacaattttaaaagctcagaattcagatcttcactttgtttctgaaattccaagttgaccttcagttttttagaaagcagtgcgcttagaggtgaaaaccagaaagcaataacaaaggtgatcatttaagaggttgacagtgacaaaataaaacgctgataggcttttaggtccttagagaagtgggtacatcctatcttattgctgggact

SEQ ID NO: 202597 - DNA, 538 bp, Homo sapiens
  Payload ID: 19952
  Gene Name: zinc finger protein 451
  ENST ID: ENST00000508603
  CDS Start-End: 86-538
ggtgcagggcgggaaggggattcgtggcgacggcggcggcagggacagcaggagcagtggtgctgtcagcgcggccgtcggagacatgggagacccggggtcggaggaaggaccattacgacctgttcttgaatacattgatctggtcagcagtgatgatgaagagcctagcacctcttatactgatagaatgcctgaatctaaggtgccatcctctgagaatcatcgcccagaaatgtgctctagctgcaatgttcctcttcccattggagatagcagctccttctctgggagttgttccagcagtccagaaaggatagtttctcaaacttcctctgttgagaacccattggagaaccagaaaaatgatcaaaataattcagatactaagatctctgagacagagacccttaaatcatcacagaattttcagactctgccttcatctccacttctggtcccccaagaatctttggcctcttctgaggtcaaagagaatttacgtatagattcttcttcagcttcacagcatggacgg

SEQ ID NO: 202598 - DNA, 790 bp, Homo sapiens
  Payload ID: 19952
  Gene Name: zinc finger protein 451
  ENST ID: ENST00000502749
  CDS Start-End: 44-262
ggacagcaggagcagtggtgctgtcagcgcggccgtcggagacatgggagacccggggtcggagctggccctgaggcatctgagtcaacaacggatgaaaatgaagacgacattcagtttgtcagtgaaggaccattacgacctgttcttgaatacattgatctggtcagcagtgatgatgaagagcctagcacctcttatactgatgagaatattaaacgtaaagaccatattgattatcagaaggataaagttgctttaactctggctcgtctagcccgccatgttgaagtggagaaacagcagaaagaagagaagaatagagcattcagagaaaaaattgattttcagcatgctcatgggttacaagaattggaatttattcgaggacattctgatacagaagcagcaagactgtgtgtggaccagtggctaaaaatgccaggactcaaaacaggcacaattaattgtggaacaaaaagttcattccgaagaggaggccacacgtgggtgtctgggaaaccaattttatgtcctataatgcactgtaacaaggagtttgacaatgggcaccttctcttaggacatttgaaaaggttcgatcactctccatgtgatccaacaattacactacatggacctttcttcagctcctttgcttgtgtagtatgttataaaaaatttgttactcaacaacaatatagagatcacctttttgataaggaagccacagatgatggacataacaacaaccttcttcctcagattattcagtgttttgcatgtccaa

SEQ ID NO: 202599 - DNA, 581 bp, Homo sapiens
  Payload ID: 19952
  Gene Name: zinc finger protein 451
  ENST ID: ENST00000515290
  CDS Start-End: 462-581
aacgcaatgatgggccctcttcaagatcttaacttataaggcaaaataatggattcacagctcagataatagaatctgtccctccagctggccctgaggcatctgagtcaacaacggatgaaaatgaagacgacattcagtttgtcagtgaaggaccattacgacctgttcttgaatacattgatctggtcagcagtgatgatgaagagcctagcacctcttatactgatgagaatattaaacgtaaagaccatattgattatcagaaggataaagttgctttaactctggctcgtctagcccgccatgttgaagtggagaaacagcagaaagaagagaagaatagagcattcagagaaaaaattgattttcagcatgctcatgggttacaagaattggaatttattcgaggacattctgatacagaagcagcaagactgtgtgtggaccagtggctaaaaatgccaggactcaaaacaggcacaattaattgtggaacaaaaagttcattccgaagaggaggccacacgtgggtgtctgggaaaccaattttatgtcctataatgcactgtaacaaggag

SEQ ID NO: 202600 - DNA, 561 bp, Homo sapiens
  Payload ID: 19952
  Gene Name: zinc finger protein 451
  ENST ID: ENST00000504603
  CDS Start-End: 30-191
gtggtgctgtcagcgcggccgtcggagacatgggagacccggggtcggagataatagaatctgtccctccagctggccctgaggcatctgagtcaacaacggatgaaaatgaagacgacattcagtttgtcagtataacaaaggaattgcacatccaatatctttcccatcttttgcaaagaaacttttgatctctctgtgcaaagatgttccctttcaagttaagtgtgtggcctgccacaagacactgcgttcccacatggagctcactgcccatttcagaatgtgacagtgatgataacatgggtgccaaaaatacttcaataggagaagaatttatatccacagaagatgtggaattagaagaagctattagaagaagtcttgaggaaatgtaattaaagatattaccacacaacatcaagtggccttgaagagactgagataacgaattcttgagtttgttttctaaaggagaccagaaatccactattacaaatgtatttgaaaacatgtttttgctttcatatgttcaaaatctgatctttgttttgtattttt

SEQ ID NO: 202601 - DNA, 719 bp, Homo sapiens
  Payload ID: 19952
  Gene Name: zinc finger protein 451
  ENST ID: ENST00000510483
  CDS Start-End: 245-719
atcctgcgcggcgcggggaaggaagcccgggagtgagagaaagcggctccgggggcatagcgggccagtaagggccgctcctcctttgaagaggttttgcgtctctttccgccggtggcgtcggcgctcacgcaggggcgggtcccggtagcgccaggcggtgcagggcgggaaggggattcgtggcgacggcggcggcagggacagcaggagcagtggtgctgtcagcgcggccgtcggagacatgggagacccggggtcggaggaaggaccattacgacctgttcttgaatacattgatctggtcagcagtgatgatgaagagcctagcacctcttatactgatgagaatattaaacgtaaagaccatattgattatcagaaggataaagttgctttaactctggctcgtctagcccgccatgttgaagtggagaaacagcagaaagaagagaagaatagagcattcagagaaaaaattgattttcagcatgctcatgggttacaagaattggaatttattcgaggacattctgatacagaagcagcaagactgtgtgtggaccagtggctaaaaatgccaggactcaaaacaggcacaattaattgtggaacaaaaagttcattccgaagaggaggccacacgtgggtgtctgggaaaccaattttatgtcctataatgcactgtaacaaggagtttgacaatgggcaccttctct

SEQ ID NO: 202602 - DNA, 609 bp, Homo sapiens
  Payload ID: 19952
  Gene Name: zinc finger protein 451
  ENST ID: ENST00000370711
  CDS Start-End: 116-343
acgcaggggcgggtcccggtagcgccaggcggtgcagggcgggaaggggattcgtggcgacggcggcggcagggacagcaggagcagtggtgctgtcagcgcggccgtcggagacatgggagacccggggtcggagataatagaatctgtccctccagctggccctgaggcatctgagtcaacaacggatgaaaatgaagacgacattcagtttgtcagtgaaggaccattacgacctgttcttgaatacattgatctggtcagcagtgatgatgaagagcctagcacctcttatactgatgtgccctatacaacaggattcttttgttccagaaccacatgaccacagaaaatttgttttctcttagaaaaaaggatatgtagagatccttttaggaatggagaatattaaacgtaaagaccatattgattatcagaaggataaagttgctttaactctggctcgtctagcccgccatgttgaagtggagaaacagcagaaagaagagaagaatagagcattcagagaaaaaattgattttcagcatgctcatgggttacaagaattggaatttattcgaggacattctgatacagaagcagcaagac

SEQ ID NO: 202603 - DNA, 2332 bp, Homo sapiens
  Payload ID: 19953
  Gene Name: zinc finger protein 454
  Uniprot ID: Q8N9F8
  ENST ID: ENST00000320129
  CDS Start-End: 304-1872
gcagttcggctcccggctgcagactccagctcattgtgttctgactgcgatgtggcgcttgcgatctctcgccgccggcagaggctcctcgaagagcgacacggggctgaccaggcacggtggtcaaagccgcagagggagagcgggagcggtcgtgaggtcgtctggggagaagggcggaggcaaagccgaggagcaggtgtgtggacccttctagcctgaggagtcctgcaggtgtgaagctccacacctgcctccatagcactttgcctgtccctaagagggctcatcggagaagaaagaatggctgtcagccacctgccaaccatggtccaggaatcggtgaccttcaaggatgtggctatactgttcacccaggaagagtgggggcagctgagccccgcccagagggccctgtacagggacgtgatgctggagaactacagcaacctggtctcactgggactcttaggacccaaaccagatacgttttcccagctagaaaaaagggaagtgtggatgccagaggacacccctggaggcttctgtcttgactggatgactatgcctgccagtaagaaatctactgtcaaggcagagattcctgaagaagaattggatcaatggacaataaaggaaagattcagtagcagtagtcactggaagtgtgctagcctgctggagtggcaatgtggaggccaggagatcagtttgcagcgagtggtactcactcaccccaacaccccatcacaggaatgtgatgaatccgggagcactatgagctcatctcttcacagtgatcaaagtcagggatttcaacctagcaaaaatgcctttgagtgtagtgagtgtggaaaagtcttctctaagagttcaactcttaataaacatcagaaaattcataatgaaaaaaatgcaaatcagaaaattcatattaaggagaaaagatatgaatgtagagaatgtgggaaagcctttcaccagagtacgcaccttatccatcaccaaagaattcacactggcgagaaaccctatgaatgtaaggaatgtggcaaggccttctcagtgagctcctcacttacgtaccatcagaaaattcatactggagagaagccttttgaatgcaacttatgtggaaaagcttttatccgaaatatacaccttgcccatcatcatagaatacatactggagagaaaccttttaaatgtaacatttgtgaaaaagcctttgtgtgcagggcacaccttaccaaacaccagaatatccacagtggagagaaaccctataaatgcaatgaatgtggaaaagcctttaatcagagtacaagtttccttcagcatcagagaattcacactggagagaaaccctttgaatgtaatgaatgtgggaaggccttcagggtgaactcttcccttactgaacatcagagaattcatactggagagaaaccttataaatgtaatgaatgtgggaaagctttcagggataattcatcctttgcacgacatcggaaaattcacactggagagaaaccttacagatgtggcttgtgtgagaaagcctttcgggaccaatcagcactagcccaacatcagagaattcatactggggaaaaaccttatacatgtaacatatgtgaaaaagccttcagtgaccattcagcccttacccaacataagagaattcatactagggaaaaaccttacaaatgtaaaatctgtgagaaagcctttatccgaagcactcacctgactcaacatcagaggattcacacaggagagaaaccctataaatgtaataaatgtgggaaagcttttaaccagactgcaaacctcattcagcatcagagacatcatattggagagaagtgatatgaatgcagtttgtatggaagacctttgagactgagtagatgaattattgaatgtgagataatccgttctagagaataactatgaaagcttgcatcaagatagtcactttatttactgagggtcaggtttcacagtgtcatggggtttgggcatttaagaatggcaaacactcggctgggcacagtggctcacgtctgtaatctttgggagcactttgggaggccgaggtgggcggatcacgaggtcaggagatcgagaccatcctggctaacagggtgaaaccccatcgctactaaaaatataaaaaattacccgggcatggtggtgggcgcctgtagtcccagctactcgggaggctgaggcaggagaatggcatgaacccgggaggcagaggttgcagtgagccgagatcgtgccactgcactccagcctgggcgacagagcaagactcagtctc

SEQ ID NO: 202604 - DNA, 2142 bp, Homo sapiens
  Payload ID: 19953
  Gene Name: zinc finger protein 454
  Uniprot ID: Q8N9F8
  ENST ID: ENST00000519564
  CDS Start-End: 330-1898
attgtgttctgactgcgatgtggcgcttgcgatctctcgccgccggcagaggctcctcgaagagcgacacggggctgaccaggcacggtggtcaaagccgcagagggagagcgggagcggtcgtgaggtcgtctggggagaagggcggaggcaaagccgaggaggtgcgggttgtggtccattctggaggacgctgatcgaatgccccaaacttcccggaatcaggtgtgtggacccttctagcctgaggagtcctgcaggtgtgaagctccacacctgcctccatagcactttgcctgtccctaagagggctcatcggagaagaaagaatggctgtcagccacctgccaaccatggtccaggaatcggtgaccttcaaggatgtggctatactgttcacccaggaagagtgggggcagctgagccccgcccagagggccctgtacagggacgtgatgctggagaactacagcaacctggtctcactgggactcttaggacccaaaccagatacgttttcccagctagaaaaaagggaagtgtggatgccagaggacacccctggaggcttctgtcttgactggatgactatgcctgccagtaagaaatctactgtcaaggcagagattcctgaagaagaattggatcaatggacaataaaggaaagattcagtagcagtagtcactggaagtgtgctagcctgctggagtggcaatgtggaggccaggagatcagtttgcagcgagtggtactcactcaccccaacaccccatcacaggaatgtgatgaatccgggagcactatgagctcatctcttcacagtgatcaaagtcagggatttcaacctagcaaaaatgcctttgagtgtagtgagtgtggaaaagtcttctctaagagttcaactcttaataaacatcagaaaattcataatgaaaaaaatgcaaatcagaaaattcatattaaggagaaaagatatgaatgtagagaatgtgggaaagcctttcaccagagtacgcaccttatccatcaccaaagaattcacactggcgagaaaccctatgaatgtaaggaatgtggcaaggccttctcagtgagctcctcacttacgtaccatcagaaaattcatactggagagaagccttttgaatgcaacttatgtggaaaagcttttatccgaaatatacaccttgcccatcatcatagaatacatactggagagaaaccttttaaatgtaacatttgtgaaaaagcctttgtgtgcagggcacaccttaccaaacaccagaatatccacagtggagagaaaccctataaatgcaatgaatgtggaaaagcctttaatcagagtacaagtttccttcagcatcagagaattcacactggagagaaaccctttgaatgtaatgaatgtgggaaggccttcagggtgaactcttcccttactgaacatcagagaattcatactggagagaaaccttataaatgtaatgaatgtgggaaagctttcagggataattcatcctttgcacgacatcggaaaattcacactggagagaaaccttacagatgtggcttgtgtgagaaagcctttcgggaccaatcagcactagcccaacatcagagaattcatactggggaaaaaccttatacatgtaacatatgtgaaaaagccttcagtgaccattcagcccttacccaacataagagaattcatactagggaaaaaccttacaaatgtaaaatctgtgagaaagcctttatccgaagcactcacctgactcaacatcagaggattcacacaggagagaaaccctataaatgtaataaatgtgggaaagcttttaaccagactgcaaacctcattcagcatcagagacatcatattggagagaagtgatatgaatgcagtttgtatggaagacctttgagactgagtagatgaattattgaatgtgagataatccgttctagagaataactatgaaagcttgcatcaagatagtcactttatttactgagggtcaggtttcacagtgtcatggggtttgggcatttaagaatggcaaacactcggctgggcacagtggctcacgtctgtaatctttgggagcactttgggaggccgaggtgggcggatcacg

SEQ ID NO: 202605 - DNA, 3350 bp, Homo sapiens
  Payload ID: 19954
  Gene Name: zinc finger protein 460
  Uniprot ID: Q14592
  ENST ID: ENST00000360338
  CDS Start-End: 323-2011
gaaacagtgtggggcctagagcgctgggtgggcgcgttctgcggcctgagcagggacgggtagtgaagcggttacgccccttcttcgcgtcttggcgggagcctgacgccccgcttctcccctaacgaggtgtcccaccggcgcccgccgaggcctaggcctccgcagccgccctccgtctcctcagccccgacgctgcgccttgggccttgtgcgcatttttttcgggggaaaactgaggctcggagtgcgaaagtcagccgaggtcgccccgcccaggacagagaagggctgtggtcggctgatccgcggcattcccgggatggcggcggcgtggatggctccggcgcaggagtctgtgaccttcgaggatgtggctgtgacatttacccaggaggagtgggggcagttggacgtgacccagagggccttgtacgtggaggtgatgctggagacctgtgggcttctggtcgcactgggtgacagcacaaaacctgagaccgtagagcctatcccttctcatctggccttgcctgaggaagtctcactccaggaacagctggcacagggagtcccaagatactcctatttggggcaggccatggatcaagatgggccatctgaaatgcaggaatactttttgagaccagggacagacccacagagtgagaaactccatgggaaaatgagccttgaacacgaaggtttggcgacagctgatggtatttgttcaatgatgatacagaaccaagtctcaccagaagatgctctctatggatttgactcatatggaccagttacagattccttgattcatgaaggggaaaattcctataaattcgaggaaatgtttaatgagaattgcttccttgttcagcatgagcagattctccctcgtgtgaagccctatgattgcccagaatgtgggaaagccttcggcaagagcaaacacctccttcagcatcacatcatccatactggggagaagccctataaatgcctggagtgtgggaaagacttcaaccgcaggtcacacctcacacggcaccagcggactcacaatggagataagccctttgtgtgcagtgaatgtggaaggaccttcaatcgcgggtcgcaccttacacggcaccagcgggttcacagtggagagaagccttttgtgtgcaatgaatgtggaaaggcctttacctaccgctccaattttgtcttgcataacaagagccacaatgagaagaaacccttcgcatgcagcgaatgtggaaaaggcttttatgagagtacagccctcattcaacacttcattatccatactggggagaggccctttaagtgccttgagtgtgggaaggccttcaactgcaggtcacacctcaagcagcatgagcggattcacactggtgagaagccctttgtgtgcagtcaatgtggaaaggccttcactcactattccacctatgtcctgcatgaaagagcccacactggagaaaagccttttgagtgcaaagaatgtgggaaagcctttagcattcgaaaagacctcattcgacacttcaacatccacactggagagaagccctatgagtgtttacagtgtggaaaggcttttacccgcatgtcagggctcacaaggcaccagtggattcatactggagagaagccgtatgtatgcatccaatgtgggaaagccttttgtcggaccacaaacctgattcgacactttagcatccacactggagagaagccctatgaatgcgtggagtgcgggaaggccttcaaccgcaggtcacccctcacaaggcaccagcggattcacactgcagagaagtcccacgaacccatccagagtgggaacgtttcttgtgagagcacagatctcattcaacactccatcatccacactgagagtagcccagtgagtgcagtgaatatggaaacgccttcaattgccgctcattcctcctcactcgacatcaacggattcatagtggaagaaaccctaccattgtaacagatgtggaaagactttttacgtacacttcagtcaacatccaagaattcctattagcgaaatagttttttaatataaccactgaagaaaatctgtggtgagaggaaacatcttaccatctggtcattcatactgaagagaaactccataagtatcatctctgtgggaaaacctgttttagatcatcatttgtcatctaaacaattatgttagaaattgacacagccaagagtcttattctacatctgataattcacccatgaaagagacccagtggttactgtgcacttaggaaaaccttcagccacatctttcttattagtttacagtgaaatgttatctcagggacattcaaacaaaggaggaggagtcatagggaagagaaagaaatggaagcacagcttctttcagacttccctgacaagcccatggcaatttgtcatcccctccttattttatttgggagagggaaatgtttcagaaacaaaagggcctcatcccctttattttccctgtgtatacattcactgctgtccagtgctgtagacaaacggtttgtttgaaaacattttgtgaaagcctgctttgttccacagcattgtctccactcttgaggagcagaagcatatatctttatgagaaagatggaggcttgagttatgaaatacttttacatttaaggagataaaggatgtacatatgaatgggcacattttactgcacacttcagacgctttgacttttttaaaaaaattgtttctccgtgtgtctttaaccacccagtaccatacttttttcttgatctggatctacttgtcaatttcttctttatttttctgtaggatggagatgatattgtagctgtttgtacataatgtaatccagggagtcctaattcttccctctgattgtggtttctcagcttttttactgctctttagagagagtaaatagttcaaaattcacctcaacaattttctagaggtcaatttggaaccaaaaatgaaataagacatgtagctaaagtaagttaaaagattatgataaactcagaaaataaacacagagaaggaatctcatttttcagtcttacagaagattgtgtgaaggctgactatacataaagtgactggaattttaacaggtgaacctgcatatgtatatgcaggtagttgtcaccatggattgagtccagtcgtagtaattaatatgtttaatcagaatattttggaatttctcttttggtattctttttgtttcttttattgtttttaattgacaatgtttatggggtttggtgtgatatttcaatacatgtgtgctaagagtaatgatcaaa

SEQ ID NO: 202606 - DNA, 2037 bp, Homo sapiens
  Payload ID: 19954
  Gene Name: zinc finger protein 460
  Uniprot ID: Q14592
  ENST ID: ENST00000537645
  CDS Start-End: 168-1733
atccttttcttctatgaaaagatccagaaaagaggcaaagcaagcgagaagtcgcgggcccagcccacagcagggagtctgtgaccttcgaggatgtggctgtgacatttacccaggaggagtgggggcagttggacgtgacccagagggccttgtacgtggaggtgatgctggagacctgtgggcttctggtcgcactgggtgacagcacaaaacctgagaccgtagagcctatcccttctcatctggccttgcctgaggaagtctcactccaggaacagctggcacagggagtcccaagatactcctatttggggcaggccatggatcaagatgggccatctgaaatgcaggaatactttttgagaccagggacagacccacagagtgagaaactccatgggaaaatgagccttgaacacgaaggtttggcgacagctgatggtatttgttcaatgatgatacagaaccaagtctcaccagaagatgctctctatggatttgactcatatggaccagttacagattccttgattcatgaaggggaaaattcctataaattcgaggaaatgtttaatgagaattgcttccttgttcagcatgagcagattctccctcgtgtgaagccctatgattgcccagaatgtgggaaagccttcggcaagagcaaacacctccttcagcatcacatcatccatactggggagaagccctataaatgcctggagtgtgggaaagacttcaaccgcaggtcacacctcacacggcaccagcggactcacaatggagataagccctttgtgtgcagtgaatgtggaaggaccttcaatcgcgggtcgcaccttacacggcaccagcgggttcacagtggagagaagccttttgtgtgcaatgaatgtggaaaggcctttacctaccgctccaattttgtcttgcataacaagagccacaatgagaagaaacccttcgcatgcagcgaatgtggaaaaggcttttatgagagtacagccctcattcaacacttcattatccatactggggagaggccctttaagtgccttgagtgtgggaaggccttcaactgcaggtcacacctcaagcagcatgagcggattcacactggtgagaagccctttgtgtgcagtcaatgtggaaaggccttcactcactattccacctatgtcctgcatgaaagagcccacactggagaaaagccttttgagtgcaaagaatgtgggaaagcctttagcattcgaaaagacctcattcgacacttcaacatccacactggagagaagccctatgagtgtttacagtgtggaaaggcttttacccgcatgtcagggctcacaaggcaccagtggattcatactggagagaagccgtatgtatgcatccaatgtgggaaagccttttgtcggaccacaaacctgattcgacactttagcatccacactggagagaagccctatgaatgcgtggagtgcgggaaggccttcaaccgcaggtcacccctcacaaggcaccagcggattcacactgcagagaagtcccacgaacccatccagagtgggaacgtttcttgtgagagcacagatctcattcaacactccatcatccacactgagagtagcccagtgagtgcagtgaatatggaaacgccttcaattgccgctcattcctcctcactcgacatcaacggattcatagtggaagaaaccctaccattgtaacagatgtggaaagactttttacgtacacttcagtcaacatccaagaattcctattagcgaaatagttttttaatataaccactgaagaaaatctgtggtgagaggaaacatcttaccatctggtcattcatactgaagagaaactccataagtatcatctctgtgggaaaacctgttttagatcatcatttgtcatctaaacaattatgttagaaattgacacagccaagagtcttattctacatctgataattcacccatgaaagagacccagtggttactgtgcacttaggaaaaccttcag

SEQ ID NO: 202607 - DNA, 555 bp, Homo sapiens
  Payload ID: 19954
  Gene Name: zinc finger protein 460
  ENST ID: ENST00000599602
  CDS Start-End: 175-555
aatttgagggtcacatacgtccaattacctgccttacatcactgtagctcttaagtttcttaagtcagaaactaacaactggagtctgtgaccttcgaggatgtggctgtgacatttacccaggaggagtgggggcagttggacgtgacccagagggccttgtacgtggaggtgatgctggagacctgtgggcttctggtcgcactgggtgacagcacaaaacctgagaccgtagagcctatcccttctcatctggccttgcctgaggaagtctcactccaggaacagctggcacagggagtcccaagatactcctatttggggcaggccatggatcaagatgggccatctgaaatgcaggaatactttttgagaccagggacagacccacagagtgagaaactccatgggaaaatgagccttgaacacgaaggtttggcgacagctgatggtatttgttcaatgatgatacagaaccaagtctcaccagaagatgctctctatggatttgactcatatggaccagttacagattccttgattcatgaaggggaa

SEQ ID NO: 202608 - DNA, 2361 bp, Homo sapiens
  Payload ID: 19955
  Gene Name: zinc finger protein 461
  ENST ID: ENST00000360357
  CDS Start-End: 233-1855
agctacttccggtaggagcctcgcaggaatggtctccgggtagaggcaggtaaggatgtcccgggccggtggagaaggaagagctgggcgtgtggcttcgcttggaatccgaatcagagcttggaccagagccttccctgagaatgctgaagcaacaccttctttggattgagtttcttccagagggaacgaagaagaggattaaataatacattcaattctaaaataagacatggcccatgagttggtgatgttcagagatgtggctatagatgtctctcaggaggaatgggaatgcctgaacccagcgcagaggaatttgtacaaggaggtgatgttggagaattatagcaacttggtgtcacttggactttctgtttctaagccagccgtaatctcctcattggagcaagggaaggagccctggatggttgtgagggaagagacaggaagatggtgcccagacttggcatccagagatgagccccagaagttatctccaaaaagggatatttatgaaacagaattatcccagtgggttaacatggaagaatttaaaagccatagtcctgagagatcaattttcagcgctatctgggaaggcaactgtcattttgagcaacatcagggacaagaggagggttattttagacaacttatgattaaccatgaaaacatgcccatttttagccaacatactttactcactcaagaattttatgatagagagaaaatctctgaatgtaaaaagtgtagaaaaatcttcagttaccatttattttttagtcaccacaaaagaactcattctaaagaactttctgaatgtaaagaatgcacagaaattgttaatacaccatgcctttttaaacaacagacaattcaaaatggtgacaaatgcaatgagtgtaaagaatgttggaaggcctttgttcattgctcacaacttaaacatctaagaattcataatggtgaaaaacgctatgaatgtaacgaatgtgggaaggcctttaattatggctcagaacttactctacatcaaagaattcacactggtgagaaaccttatgaatgtaaagaatgtgggaaggcctttagacagcgatcacagcttactcaacatcagagacttcatactggtgaaaaaccctatgaatgtaagcaatgtgggaaggcttttattcgtggctttcaacttactgaacacctgcgactccatactggagagaaaccttatgaatgtaaagaatgtggaaagacttttaggcatcgctcacatcttactatacatcagagaattcatactggtgagaaaccctatgaatgtcgggaatgtgggaaggcctttagctatcactcaagcttctcacaccatcagaaaattcattctggcaagaaaccttatgaatgtcatgaatgtgggaaggctttttgtgatggcttacaactaaccctacatcagaggattcatactggtgagaaaccctatgagtgtaaggaatgtgggaagacttttagacagtgttcacacctcaaaagacatcagagaattcatactggtgagaaacctcatgaatgcatgatatgtggtaaggcctttagacttcattcacaccttattcaacatcaaagaattcatactggtgagaaaccctatgaatgtaaggaatgtgggaaggcctttagctatcattcaagcttctcacaccatcagagaattcattctggaaagaaaccttatcaatgcgggaaggcgtttaatcatagattacaacttaacttacatcagactcttcatactggcgagaagccagtcaggtttcctctcctccctccccatcctagtctagcatcatgaaatttgttgatggaaatatacattgtctttgttttatttaaggaaaaagttggtaagccaccagtttcattagtatttatttatttaaataatccttgaaaatcaaatgtttttaagtgagaaagtggataactaaagtgtaaattttggtctcattttaatgctgtttctgagttattgtattaaccattattgagaataaatttttttattgagaataaattttctaaaattacatgtttcactgaaaccagtgaaatatttcactgaaacagtgaaataaaatgaaaacaatttcctcccttccctcaaatctctgagataaccagtatgtgtatttcttcttcctttatgctcaaacaacctgtacacagaaagcattttttgcatgtgtttggaggagcttttacccccatacagacatttgacagcgtcttgtccttttcataataatcatgaatacttttccaggtcagtacgtaaagatgtaacccattctttgtaag

SEQ ID NO: 202609 - DNA, 3326 bp, Homo sapiens
  Payload ID: 19955
  Gene Name: zinc finger protein 461
  ENST ID: ENST00000396893
  CDS Start-End: 211-336
gcaggaatggtctccgggtagaggcaggtaaggatgtcccgggccggtggagaaggaagagctgggcgtgtggcttcgcttggaatccgaatcagagcttggaccagagccttccctgagaatgctgaagcaacaccttctttggattgagtttcttccagagggaacgaagaagaggattaaataatacattcaattctaaaataagacatggcccatgagttggtgatgttcagagatgtggctatagatgtctctcaggaggaatgggaatgcctgaacccagcgcagaggaatttgtacaaggaggactttctgtttctaagccagccgtaatctcctcattggagcaagggaaggagccctggatggttgtgagggaagagacaggaagatggtgcccaggtacatggaaaacttggggatttcacaataatttcttggacaataatgaggctacagacataaatgcagacttggcatccagagatgagccccagaagttatctccaaaaagggatatttatgaaacagaattatcccagtgggttaacatggaagaatttaaaagccatagtcctgagagatcaattttcagcgctatctgggaaggcaactgtcattttgagcaacatcagggacaagaggagggttattttagacaacttatgattaaccatgaaaacatgcccatttttagccaacatactttactcactcaagaattttatgatagagagaaaatctctgaatgtaaaaagtgtagaaaaatcttcagttaccatttattttttagtcaccacaaaagaactcattctaaagaactttctgaatgtaaagaatgcacagaaattgttaatacaccatgcctttttaaacaacagacaattcaaaatggtgacaaatgcaatgagtgtaaagaatgttggaaggcctttgttcattgctcacaacttaaacatctaagaattcataatggtgaaaaacgctatgaatgtaacgaatgtgggaaggcctttaattatggctcagaacttactctacatcaaagaattcacactggtgagaaaccttatgaatgtaaagaatgtgggaaggcctttagacagcgatcacagcttactcaacatcagagacttcatactggtgaaaaaccctatgaatgtaagcaatgtgggaaggcttttattcgtggctttcaacttactgaacacctgcgactccatactggagagaaaccttatgaatgtaaagaatgtggaaagacttttaggcatcgctcacatcttactatacatcagagaattcatactggtgagaaaccctatgaatgtcgggaatgtgggaaggcctttagctatcactcaagcttctcacaccatcagaaaattcattctggcaagaaaccttatgaatgtcatgaatgtgggaaggctttttgtgatggcttacaactaaccctacatcagaggattcatactggtgagaaaccctatgagtgtaaggaatgtgggaagacttttagacagtgttcacacctcaaaagacatcagagaattcatactggtgagaaacctcatgaatgcatgatatgtggtaaggcctttagacttcattcacaccttattcaacatcaaagaattcatactggtgagaaaccctatgaatgtaaggaatgtgggaaggcctttagctatcattcaagcttctcacaccatcagagaattcattctggaaagaaaccttatcaatgcgggaaggcgtttaatcatagattacaacttaacttacatcagactcttcatactggcgagaagccagtcaggtttcctctcctccctccccatcctagtctagcatcatgaaatttgttgatggaaatatacattgtctttgttttatttaaggaaaaagttggtaagccaccagtttcattagtatttatttatttaaataatccttgaaaatcaaatgtttttaagtgagaaagtggataactaaagtgtaaattttggtctcattttaatgctgtttctgagttattgtattaaccattattgagaataaatttttttattgagaataaattttctaaaattacatgtttcactgaaaccagtgaaatatttcactgaaacagtgaaataaaatgaaaacaatttcctcccttccctcaaatctctgagataaccagtatgtgtatttcttcttcctttatgctcaaacaacctgtacacagaaagcattttttgcatgtgtttggaggagcttttacccccatacagacatttgacagcgtcttgtccttttcataataatcatgaatacttttccaggtcagtacgtaaagatgtaacccattctttgtaaggttcagaatatttctagaatggaatgtatgtccgtattttgggccattacctactacagacattgaagttgtttctaatgttcacctagaactctaattttaccttcttttgtttctattgtgcagattcccaacagtgggattaaagagtatctggcgtatatattttgacattacatttattttttaaaatcttctaaattttttgtttaataaaagcacacattataaaaattcaaaaattaccaaaaatgtgaaaattaattctcccctaacatccagttctgtagccactcactttccacagatgcaacaactgctatcagtttccttttattctaacgggaatatttcatgtaaatttcataaattctttggacaaaagtaggttattcataatatgtgatttattacacattctcattattagtccacatttggcctacttcattttttttttttttgagacacacccaggctggagtccagtggtgcaatcttggctcactgcaacctccgccacccaggttaaaaattctcctgcctcagcctcctgagtagctgggactacaggcatgcgcagccactatgcccggccaataagctatatttattcttatttgatgtggatgaaaattatcaaaattggccaggcttggtggctcatgcctgtaatcccagcactttgggaggccgaggcgggcggatcacgaggtcaggagatcgagaccatcctggctaacatggtgaaaccccgtctctactaaaaaaaaaatacaaaaattagctgggcgtggtggtgggtgcctgtagtcccagctactcgggaggctgaggcagaagaatggcgtgaacctgggagatggatcttgcagtaagctgagatcgcgccactgcactccagcgtgggcaacacagtgagactctgtctcaaaaagaaaaaaaaaaaagaaaa

SEQ ID NO: 202610 - DNA, 467 bp, Homo sapiens
  Payload ID: 19955
  Gene Name: zinc finger protein 461
  ENST ID: ENST00000592829
  CDS Start-End: 254-467
cctcgcaggaatggtctccgggtagaggcaggtaaggatgtcccgggccggtggagaaggaagagctgggcgtgtggcttcgcttggaatccgaatcagagcttggaccagagccttccctgagaatgctgaagcaacaccttctttggattgagtttcttccagagggaacgaagaagaggattaaataatacattcaattctaaaataagacatggcccattactattatttgtcattttaggagttggtgatgttcagagatgtggctatagatgtctctcaggaggaatgggaatgcctgaacccagcgcagaggaatttgtacaaggaggtgatgttggagaattatagcaacttggtgtcacttggactttctgtttctaagccagccgtaatctcctcattggagcaagggaaggagccctggatggttgtgagggaagagacaggaagatggtgcccag

SEQ ID NO: 202611 - DNA, 579 bp, Homo sapiens
  Payload ID: 19955
  Gene Name: zinc finger protein 461
  ENST ID: ENST00000590361
  CDS Start-End: 229-369
acttccggtaggagcctcgcaggaatggtctccgggtagaggcaggtaaggatgtcccgggccggtggagaaggaagagctgggcgtgtggcttcgcttggaatccgaatcagagcttggaccagagccttccctgagaatgctgaagcaacaccttctttggattgagtttcttccagagggaacgaagaagaggattaaataatacattcaattctaaaataagacatggcccatgagttggtgatgttcagagatgtggctatagatgtctctcaggaggaatgggaatgcctgaacccagcgcagaggaatttgtacaaggaggtgatgttggagaattatagcaacttggtgtcacttggctagagtgcaatggcgtgatctcggctcaccacaacctctgcctcccagcttcaagcaattctcctgcctcagcctcccgagtagctgtgattacaggactttctgtttctaagccagccgtaatctcctcattggagcaagggaaggagccctggatggttgtgagggaagagacaggaagatggtgcccagacttggcatccagagatgagc

SEQ ID NO: 202612 - DNA, 562 bp, Homo sapiens
  Payload ID: 19955
  Gene Name: zinc finger protein 461
  ENST ID: ENST00000588844
  CDS Start-End: 229-441
acttccggtaggagcctcgcaggaatggtctccgggtagaggcaggtaaggatgtcccgggccggtggagaaggaagagctgggcgtgtggcttcgcttggaatccgaatcagagcttggaccagagccttccctgagaatgctgaagcaacaccttctttggattgagtttcttccagagggaacgaagaagaggattaaataatacattcaattctaaaataagacatggcccatgagttggtgatgttcagagatgtggctatagatgtctctcaggaggaatgggaatgcctgaacccagcgcagaggaatttgtacaaggaggctagagtgcaatggcgtgatctcggctcaccacaacctctgcctcccagcttcaagcaattctcctgcctcagcctcccgagtagctgtgattacaggactttctgtttctaagccagccgtaatctcctcattggagcaagggaaggagccctggatggttgtgagggaagagacaggaagatggtgcccaggtacatggaaaacttggggatttcacaataatttcttggac

SEQ ID NO: 202613 - DNA, 2584 bp, Homo sapiens
  Payload ID: 19955
  Gene Name: zinc finger protein 461
  Uniprot ID: Q8TAF7
  ENST ID: ENST00000588268
  CDS Start-End: 229-1920
acttccggtaggagcctcgcaggaatggtctccgggtagaggcaggtaaggatgtcccgggccggtggagaaggaagagctgggcgtgtggcttcgcttggaatccgaatcagagcttggaccagagccttccctgagaatgctgaagcaacaccttctttggattgagtttcttccagagggaacgaagaagaggattaaataatacattcaattctaaaataagacatggcccatgagttggtgatgttcagagatgtggctatagatgtctctcaggaggaatgggaatgcctgaacccagcgcagaggaatttgtacaaggaggtgatgttggagaattatagcaacttggtgtcacttggactttctgtttctaagccagccgtaatctcctcattggagcaagggaaggagccctggatggttgtgagggaagagacaggaagatggtgcccaggtacatggaaaacttggggatttcacaataatttcttggacaataatgaggctacagacataaatgcagacttggcatccagagatgagccccagaagttatctccaaaaagggatatttatgaaacagaattatcccagtgggttaacatggaagaatttaaaagccatagtcctgagagatcaattttcagcgctatctgggaaggcaactgtcattttgagcaacatcagggacaagaggagggttattttagacaacttatgattaaccatgaaaacatgcccatttttagccaacatactttactcactcaagaattttatgatagagagaaaatctctgaatgtaaaaagtgtagaaaaatcttcagttaccatttattttttagtcaccacaaaagaactcattctaaagaactttctgaatgtaaagaatgcacagaaattgttaatacaccatgcctttttaaacaacagacaattcaaaatggtgacaaatgcaatgagtgtaaagaatgttggaaggcctttgttcattgctcacaacttaaacatctaagaattcataatggtgaaaaacgctatgaatgtaacgaatgtgggaaggcctttaattatggctcagaacttactctacatcaaagaattcacactggtgagaaaccttatgaatgtaaagaatgtgggaaggcctttagacagcgatcacagcttactcaacatcagagacttcatactggtgaaaaaccctatgaatgtaagcaatgtgggaaggcttttattcgtggctttcaacttactgaacacctgcgactccatactggagagaaaccttatgaatgtaaagaatgtggaaagacttttaggcatcgctcacatcttactatacatcagagaattcatactggtgagaaaccctatgaatgtcgggaatgtgggaaggcctttagctatcactcaagcttctcacaccatcagaaaattcattctggcaagaaaccttatgaatgtcatgaatgtgggaaggctttttgtgatggcttacaactaaccctacatcagaggattcatactggtgagaaaccctatgagtgtaaggaatgtgggaagacttttagacagtgttcacacctcaaaagacatcagagaattcatactggtgagaaacctcatgaatgcatgatatgtggtaaggcctttagacttcattcacaccttattcaacatcaaagaattcatactggtgagaaaccctatgaatgtaaggaatgtgggaaggcctttagctatcattcaagcttctcacaccatcagagaattcattctggaaagaaaccttatcaatgcgggaaggcgtttaatcatagattacaacttaacttacatcagactcttcatactggcgagaagccagtcaggtttcctctcctccctccccatcctagtctagcatcatgaaatttgttgatggaaatatacattgtctttgttttatttaaggaaaaagttggtaagccaccagtttcattagtatttatttatttaaataatccttgaaaatcaaatgtttttaagtgagaaagtggataactaaagtgtaaattttggtctcattttaatgctgtttctgagttattgtattaaccattattgagaataaatttttttattgagaataaattttctaaaattacatgtttcactgaaaccagtgaaatatttcactgaaacagtgaaataaaatgaaaacaatttcctcccttccctcaaatctctgagataaccagtatgtgtatttcttcttcctttatgctcaaacaacctgtacacagaaagcattttttgcatgtgtttggaggagcttttacccccatacagacatttgacagcgtcttgtccttttcataataatcatgaatacttttccaggtcagtacgtaaagatgtaacccattctttgtaaggttcagaatatttctagaatggaatgtatgtccgtattttgggccattacctactacagacattgaagttgtttctaatgttcacctagaactctaattttaccttcttttgtttctattgtgcagattcccaacagtgggattaaagagtatctggc

SEQ ID NO: 202614 - DNA, 713 bp, Homo sapiens
  Payload ID: 19955
  Gene Name: zinc finger protein 461
  ENST ID: ENST00000591370
  CDS Start-End: 288-713
aggagcctcgcaggaatggtctccgggtagaggcaggtaaggatgtcccgggccggtggagaaggaagagctgggcgtgtggcttcgcttggaatccgaatcagagcttggaccagagccttccctgagaatgctgaagcaacaccttctttggattgagtttcttccagagggaacgaagaagaggattaaataatacattcaattctaaaataagacatggcccatgactttctgtttctaagccagccgtaatctcctcattggagcaagggaaggagccctggatggttgtgagggaagagacaggaagatggtgcccagacttggcatccagagatgagccccagaagttatctccaaaaagggatatttatgaaacagaattatcccagtgggttaacatggaagaatttaaaagccatagtcctgagagatcaattttcagcgctatctgggaaggcaactgtcattttgagcaacatcagggacaagaggagggttattttagacaacttatgattaaccatgaaaacatgcccatttttagccaacatactttactcactcaagaattttatgatagagagaaaatctctgaatgtaaaaagtgtagaaaaatcttcagttaccatttattttttagtcaccacaaaagaactcattctaaagaactttctgaatgtaaagaatgcacagaaattgttaataca

SEQ ID NO: 202615 - DNA, 774 bp, Homo sapiens
  Payload ID: 19955
  Gene Name: zinc finger protein 461
  ENST ID: ENST00000618437
  CDS Start-End: 1-774
gaaaaacgctatgaatgtaacgaatgtgggaaggcctttaattatggctcagaacttactctacatcaaagaattcacactggtgagaaaccttatgaatgtaaagaatgtgggaaggcctttagacagcgatcacagcttactcaacatcagagacttcatactggtgaaaaaccctatgaatgtaagcaatgtgggaaggcttttattcgtggctttcaacttactgaacacctgcgactccatactggagagaaaccttatgaatgtaaagaatgtggaaagacttttaggcatcgctcacatcttactatacatcagagaattcatactggtgagaaaccctatgaatgtcgggaatgtgggaaggcctttagctatcactcaagcttctcacaccatcagaaaattcattctggcaagaaaccttatgaatgtcatgaatgtgggaaggctttttgtgatggcttacaactaaccctacatcagaggattcatactggtgagaaaccctatgagtgtaaggaatgtgggaagacttttagacagtgttcacacctcaaaagacatcagagaattcatactggtgagaaacctcatgaatgcatgatatgtggtaaggcctttagacttcattcacaccttattcaacatcaaagaattcatactggtgagaaaccctatgaatgtaaggaatgtgggaaggcctttagctatcattcaagcttctcacaccatcagagaattcattctgatgcaacaactgctatcagt

SEQ ID NO: 202616 - DNA, 1692 bp, Homo sapiens
  Payload ID: 19955
  Gene Name: zinc finger protein 461
  ENST ID: ENST00000614133
  CDS Start-End: 1-1692
ttgacccatgagttggtgatgttcagagatgtggctatagatgtctctcaggaggaatgggaatgcctgaacccagcgcagaggaatttgtacaaggaggtgatgttggagaattatagcaacttggtgtcacttggactttctgtttctaagccagccgtaatctcctcattggagcaagggaaggagccctggatggttgtgagggaagagacaggaagatggtgcccaggtacatggaaaacttggggatttcacaataatttcttggacaataatgaggctacagacataaatgcagacttggcatccagagatgagccccagaagttatctccaaaaagggatatttatgaaacagaattatcccagtgggttaacatggaagaatttaaaagccatagtcctgagagatcaattttcagcgctatctgggaaggcaactgtcattttgagcaacatcagggacaagaggagggttattttagacaacttatgattaaccatgaaaacatgcccatttttagccaacatactttactcactcaagaattttatgatagagagaaaatctctgaatgtaaaaagtgtagaaaaatcttcagttaccatttattttttagtcaccacaaaagaactcattctaaagaactttctgaatgtaaagaatgcacagaaattgttaatacaccatgcctttttaaacaacagacaattcaaaatggtgacaaatgcaatgagtgtaaagaatgttggaaggcctttgttcattgctcacaacttaaacatctaagaattcataatggtgaaaaacgctatgaatgtaacgaatgtgggaaggcctttaattatggctcagaacttactctacatcaaagaattcacactggtgagaaaccttatgaatgtaaagaatgtgggaaggcctttagacagcgatcacagcttactcaacatcagagacttcatactggtgaaaaaccctatgaatgtaagcaatgtgggaaggcttttattcgtggctttcaacttactgaacacctgcgactccatactggagagaaaccttatgaatgtaaagaatgtggaaagacttttaggcatcgctcacatcttactatacatcagagaattcatactggtgagaaaccctatgaatgtcgggaatgtgggaaggcctttagctatcactcaagcttctcacaccatcagaaaattcattctggcaagaaaccttatgaatgtcatgaatgtgggaaggctttttgtgatggcttacaactaaccctacatcagaggattcatactggtgagaaaccctatgagtgtaaggaatgtgggaagacttttagacagtgttcacacctcaaaagacatcagagaattcatactggtgagaaacctcatgaatgcatgatatgtggtaaggcctttagacttcattcacaccttattcaacatcaaagaattcatactggtgagaaaccctatgaatgtaaggaatgtgggaaggcctttagctatcattcaagcttctcacaccatcagagaattcattctggaaagaaaccttatcaatgcgggaaggcgtttaatcatagattacaacttaacttacatcagactcttcatactggcgagaagccagtcaggtttcctctcctccctccccatcctagtctagcatcatga

SEQ ID NO: 202617 - DNA, 10414 bp, Homo sapiens
  Payload ID: 19956
  Gene Name: zinc finger protein 462
  Uniprot ID: Q96JM2
  ENST ID: ENST00000277225
  CDS Start-End: 290-7810
ggagagggagggagggagagagagagagagggagagagacggatatctcaggtcatctgcagctgcagcgagtctgaggagccgaggaaggcagggaagatggcgatcctccattgctgagacccggcagaagcacatgagactcccaaacaacttccacaacaataacccgagcaggaagaggagaaagagaaagaggataaggaggcggtggggctggagaacccgaagcacctcccggcgccgggacgcttcttctgttcctaatgtgagaggctagacccagatcatggaggtgcttcagtgtgatggctgtgatttccgagccccgtcttatgaagatctcaaggcacacattcaggatgtccacacggcatttctgcagccaactgatgttgctgaggacaatgtgaatgagctacgatgtgggtccgtgaatgccagtaatcagacagaggtggagttttcttctataaaggatgaatttgccattgcagaagatttatcaggtcaaaatgcaacttcattggggaccggaggttactatggccacagtccaggatattatggtcagcatattgccgctaatcccaaaccaacaaacaagttttttcaatgcaagttctgtgtacgctacttcaggtcaaaaaacctcctcatagaacacactagaaaggtccatggagctcaagctgaagggagttcatcaggaccccctgtcccgggatccttaaattataatatcatgatgcacgagggatttggaaaggtcttctcttgccagttttgcacatacaagtcaccaagaagggcaagaataattaagcatcagaagatgtatcacaaaaacaatttgaaggagaccactgctcccccacctgctcctgctccaatgccagaccctgtggttccgcccgtatcactgcaggacccctgcaaggaactgccagcagaggttgtggagcgcagcatcttagagtctatggtcaagcctttgaccaaatctcgaggcaacttttgttgtgagtggtgcagctaccagaccccccgccgagaacgctggtgtgaccacatgatgaagaaacaccgcagtatggtcaagatcctttccagtctcagacagcaacaagaaggaactaatctacctgatgtgccgaacaagagtgcccccagccccacttccaactccacctatctgaccatgaatgctgcaagccgggagatacccaatactaccgtctccaacttcaggggctccatgggcaactccatcatgagacccaattcttcagcttccaagttttcgcccatgtcttaccctcagatgaagccgaagtcacctcacaattctggtctagttaacttgacagagagatcccgttatggaatgactgacatgaccaattcttctgctgacctggaaactaacagcatgctaaatgactctagttctgatgaagagttaaatgaaatagacagtgagaatggtttaagtgctatggatcaccagacatcaggcctgtctgcagagcagctgatgggctcagatggcaacaaattattggagaccaaggggattccatttagaagattcatgaataggttccagtgccccttttgtcctttcctcaccatgcatcgacgtagcatctctcgtcacatagaaaacatccacttatctggaaagacagctgtctacaaatgtgacgaatgtccgtttacttgcaagagctcgttgaaacttggggctcacaaacagtgtcacacgggtacaacgtcagattgggatgctgtgaattcccagagtgaaagcatttcttcctcactgaatgaaggtgtggtgtcttatgagagctcaagcatcaatggtagaaagtcaggagtcatgttggatcccttgcagcagcaacagccaccgcagccaccaccaccgccgccgccaccaccaccatcacagccacagccactgcagcagccacagccaccacagctgcagccaccacatcaggtgccaccccagccacaaacacagccaccaccaacgcagcagccacagccacccacacaagccgcacctctgcacccatacaaatgcaccatgtgtaattactccaccacaactctgaaagggctaagagtccatcagcagcataaacattcattctgtgacaacttgccaaaattcgaggggcagccctcaagcctaccattggaaaatgagacagacagccacccctcttccagcaacactgtgaagaaaagtcagacctcaattcttgggttgtcctccaagaacaattttgtagctaaagcctctaggaagctcgccaatgactttcctctagatttgtcacccgtgaagaagagaaccaggattgacgagatagcaagcaaccttcagagcaaaattaaccaaaccaaacagcaggaagatgcagtgatcaatgttgaggatgatgaagaggaagaggaagacaacgaagtcgagatagaggttgagttggacagggaggaagaaccgacagaacccatcatagaggttcccacttccttttctgcccaacagatatgggtaagagataccagtgagccccagaaagagcccaacttcagaaacatcacccacgattacaatgccaccaatggggctgagattgagctcaccctttctgaagatgaagaggattattatggctcctcaacaaacttgaaagatcaccaagtttccaatactgctctgctgaatacccaaactcccatctatgggactgagcacaatagtgaaaacacagactttggtgactctggaaggctttactattgtaaacactgtgactttaacaacaaatctgcccggagtgttagcacccactaccaacgaatgcacccatacattaaattcagctttaggtacatcttggaccccaatgatcacagtgcagtgtacaggtgcctggaatgctacatcgattacaccaacttcgaagatctccagcagcattatggcgagcaccacccagaagccatgaatgtactcaactttgatcactcggacctgatctaccggtgtcggttttgttcatacacgagcccgaatgttagaagcctgatgccacattaccaaagaatgcatcccacggtgaagatcaacaacgcgatgatattttcaagctatgtcgtggagcagcaggaagggctgaatacagaatcccagaccctgagggagattctgaattcggctcccaagaacatggcgacttccacacctgtggctcgtggtggtggtttgccagctacgttcaacaaaaacactcctaagacctttactcctgaatgtgaaaatcagaaggaccctttggtcaacactgttgttgtttatgattgtgatgtttgttcgtttgcaagccccaacatgcattctgtcttggttcattatcagaagaaacaccccgaagaaaaggcttcctactttaggatccagaaaactatgcgaatggtgtctgtggacaggggctctgccctttctcaattatcatttgaggtgggtgctccaatgtctcccaaaatgtccaacatgggttccccaccccccccacaacccccgccaccagacctcagtactgagctttactactgcaaacactgttcctacagcaatcggtcagttgtgggagtgcttgtccactaccagaaaagacacccagaaataaaggttactgccaaatatatcagacaggctcctcccacagctgcaatgatgagaggggtcgaagggccccaaggctccccccggccacccgcccccatacaacagctgaaccgaagcagctctgagagagatggccctcctgtggagaatgagatgttcttttgccagcactgtgattatgggaaccggacggtcaaaggggtactcattcattatcagaagaagcaccgagacttcaaggccaatgcagatgtgatccggcagcatacggccaccattcgaagcctctgcgaccgaaatcagaagaagcctgccagctgcgtgcttgtctccccctctaatctggagcgggacaaaacgaaactccgagcactcaaatgtaggcagtgctcatatacctccccctacttctatgcactgaggaagcatatcaagaaagaccaccccgccctgaaagccacagtcacgtccatcatgcgatgggcatttctagatggcttgatagaagctggctaccactgcgagtggtgcatctactcccatacggagcccaacggtttgctcctgcattaccaacggaggcatccagaacactatgttgattacacctacatggctactaaactgtgggctgggccagacccatcccctccctctctcacaatgccagccgaagccaaaacctacagatgcagggactgtgttttcgaagctgtttccatctgggacatcactaatcactaccaagcattccacccctgggccatgaatggtgatgagtcagtgctactggacatcatcaaggagaaagatgctgtggagaagcccattctttcatccgaagagttggcaggccctgtgaattgtgaaaacagtatacccacccctttcccggagcaggaagctgaatgtccagaggatgcaagactgtcccctgagaaaagcctgcagctagcttcagccaaccccgccatatcctccaccccataccagtgcacggtatgccaatctgagtataacaacttgcacggccttctcactcattatgggaagaagcaccctggcatgaaagtgaaggctgctgactttgcccaggacattgacatcaacccaggtgccgtctacaaatgcaggcattgcccatacatcaacacccgcatccacggcgtactgacccactaccagaagcgacacccgtccatcaaggtgaccgctgaggactttgtgcacgacgtagagcagtctgctgacatatcccagaatgacgtggaggagacgagcaggatcttcaagcaagggtatggcgcctaccggtgcaaactgtgtccgtacacacacggcactttggagaaactaaaaatccactacgagaagtatcacaatcagcctgaatttgatgtcttttcccagtcgcccccgaagctgccagtccccctcgagcccgagatgaccactgaagtgagcccttcccaagtctccatcactgaggaggaggtgggagaggagcccgtgtccacttctcacttctctacctcccacctggtctcccacactgtgttccggtgccagctctgcaagtacttctgctccacgaggaaggggatcgccaggcactaccgcatcaagcacaataatgtccgagcccagccagaaggcaagaacaacctcttcaagtgtgccctgtgtgcctacaccaaccccatccgcaaaggtctggcagcccactaccagaagcgccacgacattgatgcgtattacactcactgcttggcagcctccaggaccatcagcgacaagcccaacaaagtgatcatcccatccccgcccaaggacgactcccctcagctgagcgaggaactccggcgggcagtggagaagaaaaagtgctccttgtgctctttccagtcgttcagcaagaagggcatcgtgtcccattacatgaaacgccacccaggggtgttcccaaagaagcagcacgccagcaagttggggggctacttcacggccgtctatgcagatgagcatgagaagcccacactgatggaagaagaggagagaggcaactttgagaaagccgaggtggagggtgaagctcaggaaatcgagtggctcccattccgctgcatcaaatgcttcaagctgtcctttagcactgcagagctgctgtgcatgcattacactgaccaccacagtcgggacctaaagagggacttcatcattctgggcaacggcccccgcttgcagaactccacctaccagtgtaagcactgtgatagcaaactgcaaagcacagccgagctgacctcacacttgaacattcacaatgaggaattccagaagcgtgccaaacgtcaggagaggaggaaacagcttttgagcaagcagaaatatgcagatggtgcttttgcagatttcaaacaagagaggccttttggtcacttagaagaggtgccaaagatcaaggagaggaaagtggtgggctacaaatgtaaattctgtgtggaagtgcacccaacgctccgagccatctgcaatcacctccgaaagcacgtccagtatggcaatgtcccagctgtgtcagctgctgtgaaggggctgcgttctcatgagaggagccacctggccctggccatgtttacccgcgaggacaagtacagctgccagtattgctcgtttgtttctgctttcaggcacaatttggatcgccatatgcaaacccaccacggacaccataaaccattccgatgcaaactctgctccttcaagtcctcctataacagccggctgaaaacacatatactcaaagctcatgctggtgagcatgcctacaagtgttcttggtgctcattctccaccatgacaatcagccagctgaaggaacactccctcaaggtccacggaaaagccctgaccctccccaggccacggatcgtcagtctcctctcctcacactcccaccactcctcccaaaaagctaccccggctgaagaagtggaagactccaatgactcatcatattcagagcccccagatgttcagcagcagttgaaccactatcagtcagctgccctggcaaggaacaacagccgtgttagccctgtgcctctttctggggctgctgctggcactgagcagaaaactgaagccgtgcttcactgcgaattctgtgaattctcctccggctacatccagagcatcaggcgtcattaccgggacaagcatggtgggaagaagcttttcaagtgcaaagactgctccttttacacaggctttaaatctgcttttactatgcacgtggaagctgggcactcagcagttcccgaggagggccccaaagatcttcgctgtcctctctgcctctatcacaccaaatacaagcgcaacatgattgaccacatcgtgctgcaccgagaagagcgtgttgtccccattgaagtttgccggtccaaactgtccaaatacttgcagggagtagttttccgctgtgataagtgtaccttcacctgctccagtgatgagagcctccagcaacatatagaaaagcacaatgaactgaaaccttacaaatgccagctctgctactatgagaccaagcacacggaggaactggacagccaccttcgggatgagcataaggtaagccgtaactttgagctggttggacgggttaacttggatcagctggaacagatgaaggagaaaatggagagctccagcagcgatgatgaggacaaggaagaagaaatgaacagcaaggctgaagacagagagctgatgagattttctgaccacggggctgctcttaacactgagaagcgttttccatgtgaattttgtggacgggcgttttcacagggctctgagtgggaaagacatgtgctgagacacggcatggcattgaatgacaccaagcaggtgagcagagaagaaatccacccaaaagagatcatggagaacagtgttaaaatgccctccatagaggaaaaggaagatgacgaggccattgggatagacttttccctaaagaatgaaacagtagccatctgtgtagtaactgccgacaaatctctcctggagaatgcagaggccaaaaaagaatgagcgtttggtgaaattcttaatcaaaccttacttgaacagtgatgaaaaagtgggagggctggcttgggctgagaagggagggacagaaaagagaagacagaacaaagctgctttttaggactgaacaatctattttcaaagcactggtacctgtgtgagtgagtatgtaaattaaagttatttaaatggttggaatatgtggctccttttccatcactacatcttttcttccggatcttcatcatggaagtttcatttgttgcggaatatggaagcacctcccaatggtacggtgcaccctgtggtggtcttggacagtatgtggaaacagaagctccatgacggtagaagacttctcattggggagcaactttttgacgcacaacttttggtgcgtttttctagttttaataccttaagctttttcaagacctaactgcagccgctttgggaaaaaaaaacaaaaaacaaaaaacagaaaacaaaaaaaaaaaaactgctttgcataaaacagtcacctgtttcctagtacctcaaacttaaccaagggaactctctgcatttgtcagtactacctgtcgtcgttgtggttaaatgtagagagaactgctgggcaagatggtgaatggagaaaaaaaaagagttttaaagaaaggaacacaaattgtgcttaaaatccccatgtgggttttatttcttaaaatactgtgatttttttaattattttagtaaaaaacaaaacaaaaaaaagaaacagactttaattattagataactgtttgtgaattgtcatcctttattccaggtaagctgtttattagtgttcaactataatttagaatttggtagattcatgtgagctaattttaaggtgattgtggagttttgtttgccacatgtttattttctatcaatttgagtgttacaaacacagcacaattcagtttttcatatgaattgtttttcgtgtgtgtgttgttattgttgttttaatttcggggcaagggagatttagttttttgtgaataggaatgtttttattttaaacatggaaataacaaagaagttaactttcttttttttttttttttttttttttaatttaactaaagaaccaaactttcggcacagctatgcagcttgtgggccagacgaggaggtcctcctcacccttttgttgcctgtcaaattcacgcattatccgtctcataaataatttctgttaggattggctggcttttgtgtgtgattttaaaatctgtgttttgtttctgctggcattgtgttttgttgggggttttcatttatttaggggacgaggggatgtactagaatcccatccctttcgtgagagtggacaagaaataacatatcctacaaggagcctggagaactactttctttctttctttttttttttttttttttttttttaaatctagctgccagctgctctgtcccccatatcagctttttcaggagggagcagcttagactaaatctaagcctacatttataatatgttctgattgtgaacaaagggtttcgttccaaaaaatagaaaagaacttttcttgaagcctaggttttagaagcccgtgtgtgtgtgtgcttggatgtgtgtgtgcgtgtatgagtgtgtgtgtgcatgtgtgcacgtgtgaatcctttggttttcatgtttttttttttttttttttacttggaagggttgtgggagggtgggagggaagaaagggaaggggaattgctgagatgacagtgtcccacacagcttcaaataaaatccatggaaagatgttgcatttgtggaataagtgcttacttgaaaagcatgttcttcttttattttcttactgttaagaatttttatttgtaggatgtttgttttaatttaatttttttaagggatgggggccatcatgtggaaaccagaaaatggggaaagtgtgaactatccagacaaagattcattttgtgtctatatttgtttttaattggcctcatttcaaatgtattaaacagttccatacctggattgggtgtttgtaatggttaccaaaaaacaaacaaaaaaagaaagaaaaaggaaaaaaaaaaagaaaataattgtgacatgcttttatcactactttatttttcaaataacatgtaaatattgtaatccattggattttgttttgctaacctgttaataaaaatatgggaccattatccttttaacaaggctagaatgtcatttttttctttttcaaacatatacctgatattttgtggccgcacattttggatgcattattataattctgttgactgtaatgacatagaatttacaacattttttgttgttgtttaatttatacagaggacatttttttcagagcttgagagaagaaaataaatagcaaaatgataacctattgactccagtaatcagtgtttcccaatacttcataagagatagggagaccctgagtccttgaagccaagggtttaaaaacaaaacaaaaacaaaaaaaaccacaagtaggttattcaagttgtttgcaacatacattttgtaatgaaatgtgagaaattaataaagaatttttttcacatgtg

SEQ ID NO: 202618 - DNA, 4828 bp, Homo sapiens
  Payload ID: 19956
  Gene Name: zinc finger protein 462
  ENST ID: ENST00000374686
  CDS Start-End: 1-4350
cactgttcctacagcaatcggtcagttgtgggagtgcttgtccactaccagaaaagacacccagaaataaaggttactgccaaatatatcagacaggctcctcccacagctgcaatgatgagaggggtcgaagggccccaaggctccccccggccacccgcccccatacaacagctgaaccgaagcagctctgagagagatggccctcctgtggagaatgagatgttcttttgccagcactgtgattatgggaaccggacggtcaaaggggtactcattcattatcagaagaagcaccgagacttcaaggccaatgcagatgtgatccggcagcatacggccaccattcgaagcctctgcgaccgaaatcagaagaagcctgccagctgcgtgcttgtctccccctctaatctggagcgggacaaaacgaaactccgagcactcaaatgtaggcagtgctcatatacctccccctacttctatgcactgaggaagcatatcaagaaagaccaccccgccctgaaagccacagtcacgtccatcatgcgatgggcatttctagatggcttgatagaagctggctaccactgcgagtggtgcatctactcccatacggagcccaacggtttgctcctgcattaccaacggaggcatccagaacactatgttgattacacctacatggctactaaactgtgggctgggccagacccatcccctccctctctcacaatgccagccgaagccaaaacctacagatgcagggactgtgttttcgaagctgtttccatctgggacatcactaatcactaccaagcattccacccctgggccatgaatggtgatgagtcagtgctactggacatcatcaaggagaaagatgctgtggagaagcccattctttcatccgaagagttggcaggccctgtgaattgtgaaaacagtatacccacccctttcccggagcaggaagctgaatgtccagaggatgcaagactgtcccctgagaaaagcctgcagctagcttcagccaaccccgccatatcctccaccccataccagtgcacggtatgccaatctgagtataacaacttgcacggccttctcactcattatgggaagaagcaccctggcatgaaagtgaaggctgctgactttgcccaggacattgacatcaacccaggtgccgtctacaaatgcaggcattgcccatacatcaacacccgcatccacggcgtactgacccactaccagaagcgacacccgtccatcaaggtgaccgctgaggactttgtgcacgacgtagagcagtctgctgacatatcccagaatgacgtggaggagacgagcaggatcttcaagcaagggtatggcgcctaccggtgcaaactgtgtccgtacacacacggcactttggagaaactaaaaatccactacgagaagtatcacaatcagcctgaatttgatgtcttttcccagtcgcccccgaagctgccagtccccctcgagcccgagatgaccactgaagtgagcccttcccaagtctccatcactgaggaggaggtgggagaggagcccgtgtccacttctcacttctctacctcccacctggtctcccacactgtgttccggtgccagctctgcaagtacttctgctccacgaggaaggggatcgccaggcactaccgcatcaagcacaataatgtccgagcccagccagaaggcaagaacaacctcttcaagtgtgccctgtgtgcctacaccaaccccatccgcaaaggtctggcagcccactaccagaagcgccacgacattgatgcgtattacactcactgcttggcagcctccaggaccatcagcgacaagcccaacaaagtgatcatcccatccccgcccaaggacgactcccctcagctgagcgaggaactccggcgggcagtggagaagaaaaagtgctccttgtgctctttccagtcgttcagcaagaagggcatcgtgtcccattacatgaaacgccacccaggggtgttcccaaagaagcagcacgccagcaagttggggggctacttcacggccgtctatgcagatgagcatgagaagcccacactgatggaagaagaggagagaggcaactttgagaaagccgaggtggagggtgaagctcaggaaatcgagtggctcccattccgctgcatcaaatgcttcaagctgtcctttagcactgcagagctgctgtgcatgcattacactgaccaccacagtcgggacctaaagagggacttcatcattctgggcaacggcccccgcttgcagaactccacctaccagtgtaagcactgtgatagcaaactgcaaagcacagccgagctgacctcacacttgaacattcacaatgaggaattccagaagcgtgccaaacgtcaggagaggaggaaacagcttttgagcaagcagaaatatgcagatggtgcttttgcagatttcaaacaagagaggccttttggtcacttagaagaggtgccaaagatcaaggagaggaaagtggtgggctacaaatgtaaattctgtgtggaagtgcacccaacgctccgagccatctgcaatcacctccgaaagcacgtccagtatggcaatgtcccagctgtgtcagctgctgtgaaggaggcggatgaccctgcccacttgttcctggatggattggaagcagccaaagacgccagtggcgccctggtgggccgggtggatggtgaacactgcttgcttgatggaatgttggaggatgaaacccggccggggggataccattgcagtcaatgtgacagagtcctgatgtccatgcaggggctgcgttctcatgagaggagccacctggccctggccatgtttacccgcgaggacaagtacagctgccagtattgctcgtttgtttctgctttcaggcacaatttggatcgccatatgcaaacccaccacggacaccataaaccattccgatgcaaactctgctccttcaagtcctcctataacagccggctgaaaacacatatactcaaagctcatgctggtgagcatgcctacaagtgttcttggtgctcattctccaccatgacaatcagccagctgaaggaacactccctcaaggtccacggaaaagccctgaccctccccaggccacggatcgtcagtctcctctcctcacactcccaccactcctcccaaaaagctaccccggctgaagaagtggaagactccaatgactcatcatattcagagcccccagatgttcagcagcagttgaaccactatcagtcagctgccctggcaaggaacaacagccgtgttagccctgtgcctctttctggggctgctgctggcactgagcagaaaactgaagccgtgcttcactgcgaattctgtgaattctcctccggctacatccagagcatcaggcgtcattaccgggacaagcatggtgggaagaagcttttcaagtgcaaagactgctccttttacacaggctttaaatctgcttttactatgcacgtggaagctgggcactcagcagttcccgaggagggccccaaagatcttcgctgtcctctctgcctctatcacaccaaatacaagcgcaacatgattgaccacatcgtgctgcaccgagaagagcgtgttgtccccattgaagtttgccggtccaaactgtccaaatacttgcagggagtagttttccgctgtgataagtgtaccttcacctgctccagtgatgagagcctccagcaacatatagaaaagcacaatgaactgaaaccttacaaatgccagctctgctactatgagaccaagcacacggaggaactggacagccaccttcgggatgagcataaggtaagccgtaactttgagctggttggacgggttaacttggatcagctggaacagatgaaggagaaaatggagagctccagcagcgatgatgaggacaaggaagaagaaatgaacagcaaggctgaagacagagagctgatgagattttctgaccacggggctgctcttaacactgagaagcgttttccatgtgaattttgtggacgggcgttttcacagggctctgagtgggaaagacatgtgctgagacacggcatggcattgaatgacaccaagcaggtgagcagagaagaaatccacccaaaagagatcatggagaacagtgttaaaatgccctccatagaggaaaaggaagatgacgaggccattgggatagacttttccctaaagaatgaaacagtagccatctgtgtagtaactgccgacaaatctctcctggagaatgcagaggccaaaaaagaatgagcgtttggtgaaattcttaatcaaaccttacttgaacagtgatgaaaaagtgggagggctggcttgggctgagaagggagggacagaaaagagaagacagaacaaagctgctttttaggactgaacaatctattttcaaagcactggtacctgtgtgagtgagtatgtaaattaaagttatttaaatggttggaatatgtggctccttttccatcactacatcttttcttccggatcttcatcatggaagtttcatttgttgcggaatatggaagcacctcccaatggtacggtgcaccctgtggtggtcttggacagtatgtggaaacagaagctccatgacggtagaagacttctcattggggagcaactttttgacgcacaacttttggtgcgtttttctagttttaataccttaagctttttcaagacctaactgcagccgctttgggaaaaaaaaacaaaaaacaaaaaacag

SEQ ID NO: 202619 - DNA, 4691 bp, Homo sapiens
  Payload ID: 19956
  Gene Name: zinc finger protein 462
  Uniprot ID: Q96JM2
  ENST ID: ENST00000441147
  CDS Start-End: 1-4239
atgatgagaggggtcgaagggccccaaggctccccccggccacccgcccccatacaacagctgaaccgaagcagctctgagagagatggccctcctgtggagaatgagatgttcttttgccagcactgtgattatgggaaccggacggtcaaaggggtactcattcattatcagaagaagcaccgagacttcaaggccaatgcagatgtgatccggcagcatacggccaccattcgaagcctctgcgaccgaaatcagaagaagcctgccagctgcgtgcttgtctccccctctaatctggagcgggacaaaacgaaactccgagcactcaaatgtaggcagtgctcatatacctccccctacttctatgcactgaggaagcatatcaagaaagaccaccccgccctgaaagccacagtcacgtccatcatgcgatgggcatttctagatggcttgatagaagctggctaccactgcgagtggtgcatctactcccatacggagcccaacggtttgctcctgcattaccaacggaggcatccagaacactatgttgattacacctacatggctactaaactgtgggctgggccagacccatcccctccctctctcacaatgccagccgaagccaaaacctacagatgcagggactgtgttttcgaagctgtttccatctgggacatcactaatcactaccaagcattccacccctgggccatgaatggtgatgagtcagtgctactggacatcatcaaggagaaagatgctgtggagaagcccattctttcatccgaagagttggcaggccctgtgaattgtgaaaacagtatacccacccctttcccggagcaggaagctgaatgtccagaggatgcaagactgtcccctgagaaaagcctgcagctagcttcagccaaccccgccatatcctccaccccataccagtgcacggtatgccaatctgagtataacaacttgcacggccttctcactcattatgggaagaagcaccctggcatgaaagtgaaggctgctgactttgcccaggacattgacatcaacccaggtgccgtctacaaatgcaggcattgcccatacatcaacacccgcatccacggcgtactgacccactaccagaagcgacacccgtccatcaaggtgaccgctgaggactttgtgcacgacgtagagcagtctgctgacatatcccagaatgacgtggaggagacgagcaggatcttcaagcaagggtatggcgcctaccggtgcaaactgtgtccgtacacacacggcactttggagaaactaaaaatccactacgagaagtatcacaatcagcctgaatttgatgtcttttcccagtcgcccccgaagctgccagtccccctcgagcccgagatgaccactgaagtgagcccttcccaagtctccatcactgaggaggaggtgggagaggagcccgtgtccacttctcacttctctacctcccacctggtctcccacactgtgttccggtgccagctctgcaagtacttctgctccacgaggaaggggatcgccaggcactaccgcatcaagcacaataatgtccgagcccagccagaaggcaagaacaacctcttcaagtgtgccctgtgtgcctacaccaaccccatccgcaaaggtctggcagcccactaccagaagcgccacgacattgatgcgtattacactcactgcttggcagcctccaggaccatcagcgacaagcccaacaaagtgatcatcccatccccgcccaaggacgactcccctcagctgagcgaggaactccggcgggcagtggagaagaaaaagtgctccttgtgctctttccagtcgttcagcaagaagggcatcgtgtcccattacatgaaacgccacccaggggtgttcccaaagaagcagcacgccagcaagttggggggctacttcacggccgtctatgcagatgagcatgagaagcccacactgatggaagaagaggagagaggcaactttgagaaagccgaggtggagggtgaagctcaggaaatcgagtggctcccattccgctgcatcaaatgcttcaagctgtcctttagcactgcagagctgctgtgcatgcattacactgaccaccacagtcgggacctaaagagggacttcatcattctgggcaacggcccccgcttgcagaactccacctaccagtgtaagcactgtgatagcaaactgcaaagcacagccgagctgacctcacacttgaacattcacaatgaggaattccagaagcgtgccaaacgtcaggagaggaggaaacagcttttgagcaagcagaaatatgcagatggtgcttttgcagatttcaaacaagagaggccttttggtcacttagaagaggtgccaaagatcaaggagaggaaagtggtgggctacaaatgtaaattctgtgtggaagtgcacccaacgctccgagccatctgcaatcacctccgaaagcacgtccagtatggcaatgtcccagctgtgtcagctgctgtgaagcaggaggcggatgaccctgcccacttgttcctggatggattggaagcagccaaagacgccagtggcgccctggtgggccgggtggatggtgaacactgcttgcttgatggaatgttggaggatgaaacccggccggggggataccattgcagtcaatgtgacagagtcctgatgtccatgcaggggctgcgttctcatgagaggagccacctggccctggccatgtttacccgcgaggacaagtacagctgccagtattgctcgtttgtttctgctttcaggcacaatttggatcgccatatgcaaacccaccacggacaccataaaccattccgatgcaaactctgctccttcaagtcctcctataacagccggctgaaaacacatatactcaaagctcatgctggtgagcatgcctacaagtgttcttggtgctcattctccaccatgacaatcagccagctgaaggaacactccctcaaggtccacggaaaagccctgaccctccccaggccacggatcgtcagtctcctctcctcacactcccaccactcctcccaaaaagctaccccggctgaagaagtggaagactccaatgactcatcatattcagagcccccagatgttcagcagcagttgaaccactatcagtcagctgccctggcaaggaacaacagccgtgttagccctgtgcctctttctggggctgctgctggcactgagcagaaaactgaagccgtgcttcactgcgaattctgtgaattctcctccggctacatccagagcatcaggcgtcattaccgggacaagcatggtgggaagaagcttttcaagtgcaaagactgctccttttacacaggctttaaatctgcttttactatgcacgtggaagctgggcactcagcagttcccgaggagggccccaaagatcttcgctgtcctctctgcctctatcacaccaaatacaagcgcaacatgattgaccacatcgtgctgcaccgagaagagcgtgttgtccccattgaagtttgccggtccaaactgtccaaatacttgcagggagtagttttccgctgtgataagtgtaccttcacctgctccagtgatgagagcctccagcaacatatagaaaagcacaatgaactgaaaccttacaaatgccagctctgctactatgagaccaagcacacggaggaactggacagccaccttcgggatgagcataaggtaagccgtaactttgagctggttggacgggttaacttggatcagctggaacagatgaaggagaaaatggagagctccagcagcgatgatgaggacaaggaagaagaaatgaacagcaaggctgaagacagagagctgatgagattttctgaccacggggctgctcttaacactgagaagcgttttccatgtgaattttgtggacgggcgttttcacagggctctgagtgggaaagacatgtgctgagacacggcatggcattgaatgacaccaagcaggtgagcagagaagaaatccacccaaaagagatcatggagaacagtgttaaaatgccctccatagaggaaaaggaagatgacgaggccattgggatagacttttccctaaagaatgaaacagtagccatctgtgtagtaactgccgacaaatctctcctggagaatgcagaggccaaaaaagaatgagcgtttggtgaaattcttaatcaaaccttacttgaacagtgatgaaaaagtgggagggctggcttgggctgagaagggagggacagaaaagagaagacagaacaaagctgctttttaggactgaacaatctattttcaaagcactggtacctgtgtgagtgagtatgtaaattaaagttatttaaatggttggaatatgtggctccttttccatcactacatcttttcttccggatcttcatcatggaagtttcatttgttgcggaatatggaagcacctcccaatggtacggtgcaccctgtggtggtcttggacagtatgtggaaacagaagctccatgacggtagaagacttctcattggggagcaactttttgacgcacaacttttggtgcgtttttctagttttaataccttaagctttttcaagacctaactgcagccgctttggg

SEQ ID NO: 202620 - DNA, 1233 bp, Homo sapiens
  Payload ID: 19956
  Gene Name: zinc finger protein 462
  ENST ID: ENST00000427098
  CDS Start-End: 1-625
ggaacactccctcaaggtccacggaaaagccctgaccctccccaggccacggatcgtcagtctcctctcctcacactcccaccactcctcccaaaaagctaccccggctgaagaagtggaagactccaatgactcatcatattcagagcccccagatgttcagcagcagttgaaccactatcagtcagctgccctggcaaggaacaacagccgtgttagccctgtgcctctttctggggctgctgctggcactgagcagaaaactgaagccgtgcttcactgcgaattctgtgaattctcctccggctacatccagagcatcaggcgtcattaccgggacaagcatggtgggaagaagcttttcaagtgcaaagactgctccttttacacaggctttaaatctgcttttactatgcacgtggaagctgggcactcagcagttcccgaggagggccccaaagatcttcgctgtcctctctgcctctatcacaccaaatacaagcgcaacatgattgaccacatcgtgctgcaccgaggtaacctttctaacttggttttcttggatgcagcggggggcaggcagcagagatggccttctagggatgctctctcagagtggcagtagcacctgtgccttgttcctcaccttatcttcaggcaagaaaccacagtgataaccacagtgacagccaaaagggcaaaaacaccttcctgctgggagtatttcctccacctggagggaggcaaaggtgatggattctgcagtgaacatttccgtagggcttcccagcatgggggatttgtacattctgacaattctgccacccacagccttgcgtagactgcatagaaggaatgaacaagaaacaaaatgggtgggtgaaagcaaatgtgaaatgtggagagctctatggctgtgagagattctttcaagaagaccaaaatgatttccaaagcagaacatggaacttcccttgaaatggttgaagggagagagaattctttaaaataatgtatattatacattctaataatagtctctattatatattctaataataattagaaaatccatgggctttggatttaaattctggttttagagcccactgtgtttaacctctccatccattaaaagagatgattgtacctatgagataatgggtaaagtgtccagtggtttttcataatggatgcataatgactgctcaataaatgttggttcctgctgat

SEQ ID NO: 202621 - DNA, 551 bp, Homo sapiens
  Payload ID: 19956
  Gene Name: zinc finger protein 462
  ENST ID: ENST00000472574
  CDS Start-End: 221-551
gagtctgaggagccgaggaaggcagggaagatggcgatcctccattgctgagacccggcagaagcacatgagactcccaaacaacttccacaacaataacccgagcaggaagaggagaaagagaaagaggataaggaggcggtggggctggagaacccgaagcacctcccggcgccgggacgcttcttctgttcctaatgtgagaggctagacccagatcatggaggtgcttcagtgtgatggctgtgatttccgagccccgtcttatgaagatctcaaggcacacattcaggatgtccacacggcatttctgcagccaactgatgttgctgaggacaatgtgaatgagctacgatgtgggtccgtgaatgccagtaatcagacagaggtggagttttcttctataaaggatgaatttgccattgcagaagatttatcaggtcaaaatgcaacttcattggggaccggaggttactatggccacagtccaggatattatgccttttggtcacttagaagaggtgccaaagatcaaggagaggaaagtggtg

SEQ ID NO: 202622 - DNA, 2553 bp, Homo sapiens
  Payload ID: 19957
  Gene Name: zinc finger protein 467
  Uniprot ID: Q7Z7K2
  ENST ID: ENST00000302017
  CDS Start-End: 415-2202
gagctcccacttccacacctactccaggctcggagccttaggaccatcacctgcccacctaagcccacggtgctccctcctgggaccccactcctgaaaccccctgcccctgcctcccccagcccggtgcgccggggctctccgcccgctccctcggtccctcctcccttgcaggcgccgtttcccggcttcgactccccgcgcgtctatccctctcctccccgcgaagtttcggggctgtcagtctgtcagtctttcaggccgtcagcacccgagctgcaggcggcgagcgccattgtgagcagagccggcggggcaggaggcccgggcgcctgggtccccgcggcgcgggcggagcggccggccagccaggttctgtggcctgatccccaggaggagctactctgggttaccatgagagagaccttggaggccctcagctccctgggattctctgtgggacagccagagatggccccccaaagtgagcccagggaaggatcccataatgcccaggagcagatgtcctcttctagggaagagagagcactgggggtgtgctcagggcacgaggcccctacaccggaggaaggtgcccacacagaacaagccgaggctccctgcagaggccaggcgtgctcagcacagaaggctcagcctgtgggtacctgcccaggagaggagtggatgattcggaaggtgaaggtggaggacgaagatcaggaggcagaagaggaggtcgaatggccccagcatctatcgttacttcccagcccctttcccgcgcctgacctggggcatctggctgccgcgtacaaactggagccaggggccccgggggcactgagtgggctcgcgctgtctgggtggggtccgatgccggagaagccctacggctgcggggagtgtgagcggcgcttccgggaccagctgacgttgcgactgcaccagcggctgcaccggggcgagggcccctgcgcctgcccggactgcggccgcagcttcacgcagcgcgcccacatgctactgcatcagcgcagccaccgcggcgagcggcctttcccgtgctccgagtgcgacaagcgcttcagcaagaaggcccatctgacccgccacctgcgcacgcacacgggcgagcggccctacccgtgcgcggagtgcggcaagcgcttcagccagaagatccacctgggctcgcaccaaaagacccacaccggcgagcggcccttcccctgcacggaatgcgagaagcgctttcgcaagaagacgcacttgattcggcaccagcgcatccatacgggcgagaggccctaccagtgcgcacagtgcgcacgcagcttcacgcacaagcagcacttggtgcggcaccaaagggtgcaccagacggccggcccggccaggccctctcccgactcgtccgcttctcctcattccactgccccgtccccgaccccatcctttcccgggccaaagcctttcgcgtgctccgactgcggcttgagcttcggctggaaaaagaacctcgccacgcaccagtgtctgcaccgcagcgagggtcgcccctttgggtgcgatgagtgcgcactgggcgccaccgtggatgcccccgccgccaagcccctggccagcgcgcctggcggaccgggctgcggcccaggatccgatcccgtggtgccccagcgcgccccctcgggcgagcggtccttcttctgcccggactgcgggcgcggcttctcccatgggcagcacctggcgcggcacccgcgcgtgcacacgggcgaacggcccttcgcctgcacgcagtgtgaccgccgcttcggctcgcggcctaatctggtcgcccactccagggcccacagcggcgccaggcctttcgcctgcgctcagtgcggccgccgcttcagccgcaagtcgcacctgggccgccaccaggcggtgcacactggcagccgcccccacgcctgcgccgtctgcgcccgcagcttcagctccaaaaccaacctagtccgccaccaggcgatccacacaggctcccgccccttctcctgcccgcagtgcggaaagagcttcagccgcaagacccacctggtgcggcaccagctcattcacggcgaagccgcccacgcggccccggacgccgcccttgcggccccagcctggtccgctccccccgaggtggcgccgcccccgctcttcttctgagcctagttctcacgaggaccctttcttgcccacagtttcgagaggcccgtgccatgagaccgcctggggtgagcaaggcgacctgggctgctgcccgaaggtttggccgccgcgggacacctgtttccttcccgcagtgtctgcgtccgcacagcatacccagctcggacctcctaggacagagactcagcgaacccttgctgggaaccgctgagctgaagttcttggaaggctcccacccaggtgccccgttggaaagcagatatttcccggacccagcgcggcctcaaccagggcaggaaagagtggttatttatgtacttaaagtttcattaaagttaaaatcggaaa

SEQ ID NO: 202623 - DNA, 913 bp, Homo sapiens
  Payload ID: 19957
  Gene Name: zinc finger protein 467
  ENST ID: ENST00000484747
  CDS Start-End: 155-595
gccgtcagcacccgagctgcaggcggcgagcgccattgtgagcagagccggcggggcaggaggcccgggcgcctgggtccccgcggcgcgggcggagcggccggccagccaggttctgtggcctgatccccaggaggagctactctgggttaccatgagagagaccttggaggccctcagctccctgggattctctgtgggacagccagagatggccccccaaagtgagcccagggaaggatcccataatgcccaggagcagatgtcctcttctagggaagagagagcactgggggtgtgctcagggcacgaggcccctacaccggaggaaggtgcccacacagaacaagccgaggctccctgcagaggccaggcgtgctcagcacagaaggctcagcctgtgggtacctgcccagtttcgagaggcccgtgccatgagaccgcctggggtgagcaaggcgacctgggctgctgcccgaaggtttggccgccgcgggacacctgtttccttcccgcagtgtctgcgtccgcacagcatacccagctcggacctcctaggacagagactcagcgaacccttgctgggaaccgctgagctgaagttcttggaaggctcccacccaggtgccccgttggaaagcagatatttcccggacccagcgcggcctcaaccagggcaggaaagagtggttatttatgtacttaaagtttcattaaagttaaaatcggaaagttctggggctgctaaatgaattgggggagggaacacctgactctccttagccactgtcccacctccatccacacacagaccacccccctccacttccccttctgtcctgggtgagttacatttagccagctgctgttaattggttctcccaaataaaaatgtaatatatttattcactaa

SEQ ID NO: 202624 - DNA, 4027 bp, Homo sapiens
  Payload ID: 19958
  Gene Name: zinc finger protein 468
  ENST ID: ENST00000243639
  CDS Start-End: 152-535
ggtttctgtcctgcgcgcgcagattcgcgcagaccaggaagtggatcccgtggaatgacggtcacgccgcggcgggcggattgacttctaaagactgttggtacgtgagaaagaaacccagaagaggaagaggaaagcaaaggagtcagggatggctcttcctcagggtctattgacattcagggacgtggccatagaattctctcaggaggagtggaaatgcctggaccctgctcagaggactttatacagggacgtgatgctggagaattataggaacctcgtctccctggagttttggtctgtcatcccggctaaagtacagtggtgtcatctccgctcactgcaacctccacttcccaggttcaagcaattctcctgcctcagccttccaagtacctgggactacagatatctcttccaaatgcatgttgaagacgttgtcgtcaacagggcaaggcaatacagaagtgatccacacagggacattgcacagacaagcaagtcatcacattggagaattttgtttccatgaaattgagaaagacattcatggcttcgagtttcagtggaaagaagatgaaacaaatggccatgcagcacccatgacagaaatcaaagagttggctggtagtacaggccaacatgatcaaaggcatgctggaaacaagcgtattaaagatcagcttggatcaagctttcatttgcatctgcctgaaccgcacatatttcagtctgaagggaaaattggtaatcaagttgagaagtctatcaacaatgcttcctcagtttcaacatcccaaagaatttgttgtaggcccaaaacccatatttctaataagtatggaaataattccctccattcttcattactcacacaaaaatgggaagtacacatgagagaaaaatcttttgaatgtatacagagcttcaaatcctttaattgcagctcactcttaaaaaaacatcagataattcacttagaagagaaacaatgtaaatgtgatgtatgtggcaaggtctttaatcagaagcgataccttgcctgccatcgtagatgtcacactggtgagaaaccttacaagtgtaatgagtgtggcaagacctttggtcataattcatccctcttcattcacaaagcgcttcatactggagagaaaccttatgaatgtgaagaatgtgacaaagttttcagtcgcaaatcacaccttgaaagacataagaggattcatactggagagaaaccatacaaatgtaaggtttgtgatgaggctttcgcatataattcatatctggcaaaacatactatacttcacactggagagaaaccttacacatgtaatgaatgtggcaaagtttttaatcgactatcaacccttgcacgccatcatagacttcatactggagagaaaccttacaaatgtgaagagtgtgacaaagttttcagtcgcaaatcacaccttgaaagacataggaggattcatagtggagagaaaccttacaaatgtgaagaatgttgcaaagttttcagtcgcaaatcaaacctggaaagacacaggaggattcatactggagagaaaccatacaaatgtaaggtttgtgacaaggctttccagagggattcacacctggcacaacatcagagagttcatactggagagaaaccttacaagtgtaatgagtgtggcaagaccttcggtcagacatcatcgcttataatccatcgtaggcttcatactggagagaaaccttacaagtgtaatgagtgtggcaagaccttcagtcagatgtcatcccttgtataccatcataggcttcatagtggagagaagccttaatagtgtaatgagtgtggcaagaccttccatcacaattcaaccctgtaagtcataaggcaattcatactggagagaaaccttacaagcataatgaatgtggcaaggtttttaatcaaaaagcaacctttgcacatcaccatagacttcatactggagagaaaccttacaaatgggaggaatgtgacaaaagttttcagttgtaaatcaaaccttaaaacacataagaaaattcacattgaagagaaaccatacagaggtaaggtttgtgacaaggtttttgcatataatgcatatctggcaaaacatactagaattcacactggagagaaactcattataagtgtaatgagtgtggcaagaccgttggtcaaaattcacaccttgtaattaaaaggtcaaaattcacaccttgtaattcatagtggagagaaaccttacaagcacaatgaatgtgacatggtttttaatcaacaatcacaccttgcaagtcatcatagacttcatactgcatagaaatcttacaaacgtgaacaatgtgacaaagttttcattcacaaatccagcttcaaatacataggagaattcacactggagaaaagccatagaaatgtaaggtttgtgacaaggctttcgggaatgattcacacgtggcaccccatactagaattcacactggagagaaaccttacaagtgcaatgagtgtggcaaaccctttagtgggcagtcaccacttattcaccatcaagcaatccatggtatagggaaacttgactaatgtaatgattgtcacaaagttttcagtaatgctacaaccattgcacatcattggagaatccacagtgaagagatcttacaagtgtaataaatgtggcaaatttttcagacatcgttcatgccttgcatttcactggtgaactcatgctggagagaaaccttataaatgtcatgattgaggcaaggtcttcagtcaagcttcatcctatgcaaaacataggaggattcatacaggagagaaacctcacaagtgtgatgattgtggcaaagcgtttacttcacattcacacctcattagacatcagagaatccatgctggacagaaatcttacaaatgtcatcagtgtggaagggtcttcagtccaaggtcactccttgcagaccatcagacaattccttttggagacagttgtttcaaatgcagtgagtatagcaaaccatcaagcattaattgacattagagtcaaatcagccttgacctgagtttgttgatttaacattgatttcaagcattaattgccattaaactgtttatgttaagaggattgcactgggggccatggctcatgcctgtaattccagcactttgagaggcaaagacaggtaggtcactggagctcacgagtttgagaacagcctagccaacagatgggagctacttttcccagcctttattttctttttcttgttttttttttgagatggagtcttgctctgtcgcccaggttggagtgcagtggcacgatctcagctcactgcaacctcctcctcccaggttcaagcaattctcctgcctcagtctcccaagtagctgacactacagttgtgtgccaccacacctgggtaattttttgtgtttttagtagagactgggtttcaccgtgttagccagaatggtctctatcttctgactttatgatccacccgactccacctcccaaagtgctgagattacaggagtgagccactgtgcctggcctgttttttgtttctttaacaaaaagttatagagacttctatgagtattgtaccgaatctaaatcacaattgagtatataatcattgagcgatattcatttttccaatcagtatgggatttatatctatttatacatgtttttaatcattttgatcaatgtttatagatttcaaggtacaaacctcactttttatgtttattcctaaatatttcttactttaagttctttagcaaatggaattggtttttaattttcttttaaaattatttattgttaatgtatggaaattcaactaatttttggtgctgttattctattctgcaaataaactgaatgtgtttgttagttccagttgcattttggctgactctttgtgattttctttacagaaggtcatgtcatctacaaacaaataaaatttgacttctttcttt

SEQ ID NO: 202625 - DNA, 384 bp, Homo sapiens
  Payload ID: 19958
  Gene Name: zinc finger protein 468
  ENST ID: ENST00000396409
  CDS Start-End: 1-384
atgtcacttgttcagggtctattgacattcagggacgtggccatagaattctctcaggaggagtggaaatgcctggaccctgctcagaggactttatacagggacgtgatgctggagaattataggaacctcgtctccctggagttttggtctgtcatcccggctaaagtacagtggtgtcatctccgctcactgcaacctccacttcccaggttcaagcaattctcctgcctcagccttccaagtacctgggactacagatatctcttccaaatgcatgttgaagacgttgtcgtcaacagggcaaggcaatacagaagtgatccacacagggacattgcacagacaagcaagtcatcacattggagaattttgtttccatga

SEQ ID NO: 202626 - DNA, 578 bp, Homo sapiens
  Payload ID: 19958
  Gene Name: zinc finger protein 468
  ENST ID: ENST00000601980
  CDS Start-End: 237-374
agaccaggaagtggatcccgtggaatgacggtcacgccgcggcgggcggattgacttctaaagactgttggtacgtgagaaagaaacccagaagaggaagaggaaagcaaaggagtcagggatggctcttcctcagtccctctcatctcgcttaggttccgtctctcgtgacccagtgtcatgaacttgggaagaggctgcactgggcaggtcctgggaagggctcacaccccgacatggatggacacggggtgagggtcctgtggtgtcagtgctcttgggcagcagggattgttcaggggccacatctggatgcactgtcagctcactgtggaccaggattggagcagctgccaatgggagtcacgtattaatatgcacgaagtacgtgggtctattgacattcagggacgtggccatagaattctctcaggaggagtggaaatgcctggaccctgctcagaggactttatacagggacgtgatgctggagaattataggaacctcgtctccctggagttttggtctgtcatcccggctaaagtacagtggtgtcatctccgctcactgcaacctc

SEQ ID NO: 202627 - DNA, 533 bp, Homo sapiens
  Payload ID: 19958
  Gene Name: zinc finger protein 468
  ENST ID: ENST00000597924
  CDS Start-End: 122-533
agaccaggaagtggatcccgtggaatgacggtcacgccgcggcgggcggattgacttctaaagactgttggtacgtgagaaagaaacccagaagaggaagaggaaagcaaaggagtcagggatggctcttcctcagggtctattgacattcagggacgtggccatagaattctctcaggaggagtggaaatgcctggaccctgctcagaggactttatacagggacgtgatgctggagaattataggaacctcgtctccctggtacgtagaagtgaagtgtgttgtacagatatttgggcagaggttattgttgcagatatctcttccaaatgcatgttgaagacgttgtcgtcaacagggcaaggcaatacagaagtgatccacacagggacattgcacagacaagcaagtcatcacattggagaattttgtttccatgaaattgagaaagacattcatggcttcgagtttcagtggaaagaagatgaaacaaatggccatgcagcacccatgacagaaatcaaagagttgg

SEQ ID NO: 202628 - DNA, 4407 bp, Homo sapiens
  Payload ID: 19958
  Gene Name: zinc finger protein 468
  Uniprot ID: Q5VIY5
  ENST ID: ENST00000595646
  CDS Start-End: 122-1690
agaccaggaagtggatcccgtggaatgacggtcacgccgcggcgggcggattgacttctaaagactgttggtacgtgagaaagaaacccagaagaggaagaggaaagcaaaggagtcagggatggctcttcctcagggtctattgacattcagggacgtggccatagaattctctcaggaggagtggaaatgcctggaccctgctcagaggactttatacagggacgtgatgctggagaattataggaacctcgtctccctggatatctcttccaaatgcatgttgaagacgttgtcgtcaacagggcaaggcaatacagaagtgatccacacagggacattgcacagacaagcaagtcatcacattggagaattttgtttccatgaaattgagaaagacattcatggcttcgagtttcagtggaaagaagatgaaacaaatggccatgcagcacccatgacagaaatcaaagagttggctggtagtacaggccaacatgatcaaaggcatgctggaaacaagcgtattaaagatcagcttggatcaagctttcatttgcatctgcctgaaccgcacatatttcagtctgaagggaaaattggtaatcaagttgagaagtctatcaacaatgcttcctcagtttcaacatcccaaagaatttgttgtaggcccaaaacccatatttctaataagtatggaaataattccctccattcttcattactcacacaaaaatgggaagtacacatgagagaaaaatcttttgaatgtatacagagcttcaaatcctttaattgcagctcactcttaaaaaaacatcagataattcacttagaagagaaacaatgtaaatgtgatgtatgtggcaaggtctttaatcagaagcgataccttgcctgccatcgtagatgtcacactggtgagaaaccttacaagtgtaatgagtgtggcaagacctttggtcataattcatccctcttcattcacaaagcgcttcatactggagagaaaccttatgaatgtgaagaatgtgacaaagttttcagtcgcaaatcacaccttgaaagacataagaggattcatactggagagaaaccatacaaatgtaaggtttgtgatgaggctttcgcatataattcatatctggcaaaacatactatacttcacactggagagaaaccttacacatgtaatgaatgtggcaaagtttttaatcgactatcaacccttgcacgccatcatagacttcatactggagagaaaccttacaaatgtgaagagtgtgacaaagttttcagtcgcaaatcacaccttgaaagacataggaggattcatagtggagagaaaccttacaaatgtgaagaatgttgcaaagttttcagtcgcaaatcaaacctggaaagacacaggaggattcatactggagagaaaccatacaaatgtaaggtttgtgacaaggctttccagagggattcacacctggcacaacatcagagagttcatactggagagaaaccttacaagtgtaatgagtgtggcaagaccttcggtcagacatcatcgcttataatccatcgtaggcttcatactggagagaaaccttacaagtgtaatgagtgtggcaagaccttcagtcagatgtcatcccttgtataccatcataggcttcatagtggagagaagccttaatagtgtaatgagtgtggcaagaccttccatcacaattcaaccctgtaagtcataaggcaattcatactggagagaaaccttacaagcataatgaatgtggcaaggtttttaatcaaaaagcaacctttgcacatcaccatagacttcatactggagagaaaccttacaaatgggaggaatgtgacaaaagttttcagttgtaaatcaaaccttaaaacacataagaaaattcacattgaagagaaaccatacagaggtaaggtttgtgacaaggtttttgcatataatgcatatctggcaaaacatactagaattcacactggagagaaactcattataagtgtaatgagtgtggcaagaccgttggtcaaaattcacaccttgtaattaaaaggtcaaaattcacaccttgtaattcatagtggagagaaaccttacaagcacaatgaatgtgacatggtttttaatcaacaatcacaccttgcaagtcatcatagacttcatactgcatagaaatcttacaaacgtgaacaatgtgacaaagttttcattcacaaatccagcttcaaatacataggagaattcacactggagaaaagccatagaaatgtaaggtttgtgacaaggctttcgggaatgattcacacgtggcaccccatactagaattcacactggagagaaaccttacaagtgcaatgagtgtggcaaaccctttagtgggcagtcaccacttattcaccatcaagcaatccatggtatagggaaacttgactaatgtaatgattgtcacaaagttttcagtaatgctacaaccattgcacatcattggagaatccacagtgaagagatcttacaagtgtaataaatgtggcaaatttttcagacatcgttcatgccttgcatttcactggtgaactcatgctggagagaaaccttataaatgtcatgattgaggcaaggtcttcagtcaagcttcatcctatgcaaaacataggaggattcatacaggagagaaacctcacaagtgtgatgattgtggcaaagcgtttacttcacattcacacctcattagacatcagagaatccatgctggacagaaatcttacaaatgtcatcagtgtggaagggtcttcagtccaaggtcactccttgcagaccatcagacaattccttttggagacagttgtttcaaatgcagtgagtatagcaaaccatcaagcattaattgacattagagtcaaatcagccttgacctgagtttgttgatttaacattgatttcaagcattaattgccattaaactgtttatgttaagaggattgcactgggggccatggctcatgcctgtaattccagcactttgagaggcaaagacaggtaggtcactggagctcacgagtttgagaacagcctagccaacagatgggagctacttttcccagcctttattttctttttcttgttttttttttgagatggagtcttgctctgtcgcccaggttggagtgcagtggcacgatctcagctcactgcaacctcctcctcccaggttcaagcaattctcctgcctcagtctcccaagtagctgacactacagttgtgtgccaccacacctgggtaattttttgtgtttttagtagagactgggtttcaccgtgttagccagaatggtctctatcttctgactttatgatccacccgactccacctcccaaagtgctgagattacaggagtgagccactgtgcctggcctgttttttgtttctttaacaaaaagttatagagacttctatgagtattgtaccgaatctaaatcacaattgagtatataatcattgagcgatattcatttttccaatcagtatgggatttatatctatttatacatgtttttaatcattttgatcaatgtttatagatttcaaggtacaaacctcactttttatgtttattcctaaatatttcttactttaagttctttagcaaatggaattggtttttaattttcttttaaaattatttattgttaatgtatggaaattcaactaatttttggtgctgttattctattctgcaaataaactgaatgtgtttgttagttccagttgcattttggctgactctttgtgattttctttacagaaggtcatgtcatctacaaacaaataaaatttgacttctttctttctgatttggatgagtttgatttcttttgctatttcattgttctggctaggacagccagtattgattgaatagaaggggtgagagcattcttgcatcatgtgagatcctacaggaaaagcattccgttttccctgattggttatttctgctgtggtcatttcatggatggtctttgtattgctgaggtaaattttcttctgtatctattttgtgtgggatttctatgatgacttgatgttgacttttgtgaaatgctttttctccatgtattgagatgatgtggttttcatctttcattgtgttcaagtggtatatcacattgatttgcttgactatgttgaaccatccttgcatcccagaaataagtggcacttgcatatctacaatccttttaatatcctcttgaatacagttcgctagtacaaggggtcttcaagaagttcatgaaaaaaatacatattatgtgaaaattgcacatgatgtcacattttctgcaccaaaataaactggcacaaatctgttataaca

SEQ ID NO: 202629 - DNA, 646 bp, Homo sapiens
  Payload ID: 19958
  Gene Name: zinc finger protein 468
  ENST ID: ENST00000601847
  CDS Start-End: 511-646
atagctgggattacagacatgtgtcactgtgcccagcctatcttttactgtggacgttgtcatcttttaagatatcagttgtgctctgtctcatctagataatgaatgtcacttggtgtgtctataaaagtttcaaacatttttataacaggaaccctacattgattttttatttgtttatttctgttatttttcacaaacataagaaatttatactgagagtatgtcttgataatactcaaaaagtgtaataaaatacatctggggagacatcatgtagtgagaaatcccttatttggatttgtcagaacattctctacagttaaatccatgctttcccctctctcctcctctcattttttgtaaagataagatctcctcccataaccatttggttaaaatgtgttttcatttcagggtctattgacattcagggacgtggccatagaattctctcaggaggagtggaaatgcctggaccctgctcagaggactttatacagggacgtgatgctggagaattataggaacctcgtctccctggagttttggtctgtcatcccggctaaagtacagtggtgtcatctccgctcactgcaacctccacttcccaggttcaagcaattctcctgcctcagccttccaa

SEQ ID NO: 202630 - DNA, 571 bp, Homo sapiens
  Payload ID: 19958
  Gene Name: zinc finger protein 468
  ENST ID: ENST00000602144
  CDS Start-End: 122-355
agaccaggaagtggatcccgtggaatgacggtcacgccgcggcgggcggattgacttctaaagactgttggtacgtgagaaagaaacccagaagaggaagaggaaagcaaaggagtcagggatggctcttcctcaggttccgtctctcgtgacccagtgtcatgaacttgggaagaggctgcactgggcaggtcctgggaagggctcacaccccgacatggatggacacggggtgagggtcctgtggtgtcagtgctcttgggcagcagggattgttcaggggccacatctggatgcactgtcagctcactgtggaccaggattggagcagctgccaatgggagtcacgtattaatatgcacgaagtacgtgggtctattgacattcagggacgtggccatagaattctctcaggaggagtggaaatgcctggaccctgctcagaggactttatacagggacgtgatgctggagaattataggaacctcgtctccctggagttttggtctgtcatcccggctaaagtacagtggtgtcatctccgctcactgcaacctccacttcccaggt

SEQ ID NO: 202631 - DNA, 13203 bp, Homo sapiens
  Payload ID: 19959
  Gene Name: zinc finger protein 469
  Uniprot ID: Q96JG9
  ENST ID: ENST00000437464
  CDS Start-End: 1-11778
atgcctggggagcgcccccgaggagcgccgccccccaccatgactggagacctgcagccccgccaagttgccagcagcccggggcacccctcccagccgccactggaggacaacaccccagctaccaggaccaccaagggtgccagggaggctggcggccaggcccaggccatggagctccccgaggcccagccaaggcaggccagggacggggagctcaagcccccatccctgagaggccaggccccgagcagcacccctgggaagaggggcagcccccagaccccaccggggagaagccccttgcaggctccctcaaggctggcgggcagggcagagggcagccccccacagcgctacattctgggcatcgccagctcgaggaccaagcccaccctggacgagacaccagagaacccacagctggaggctgcccagctccctgaggtggacaccccccagggccctgggactggagctccactcaggccgggcctcccaaggactgaggcccaacccgccgccgaagagcttggcttccacaggtgcttccaggagccaccctccagctttacctccaccaactatacctcaccaagcgccacccccaggcccccagccccggggcccccccagagcaggggcaccagccccctccagcccggttcctatcccgaataccaggccagtggggccgactcctggcctcccgctgctgagaatagcttcccaggtgctaatttcggggttccccccgccgagccggaacctattcccaaaggcagcaggcccggcggcagccccaggggagtttccttccagttccccttcccggcactgcatggggccagcacaaaacccttccctgcggatgtggctgggcacgcattcaccaatgggccactggtgtttgccttccatcagccccagggagcgtggccggaggaggccgtgggcacgggccctgcctacccgctgcccacccagcctgcgccctcacccctgccctgctaccagggccagccaggtggcctgaaccgccacagcgacctcagtggtgccctctcttcccctggagctgctcactcggccccgagacccttctctgacagtttacacaagagcctgaccaaaatccttcccgaaagaccaccttcagcccaggatgggctggggagcacgagagggccccctagctccctaccccagaggcactttccagggcaggcgtacagagccagtggggtggacaccagcccggggcctccggacaccgagctggccgccccagggcccccacccgccaggctgccccagctgtgggaccccacagcagccccttaccccacacctcctgggggccccctggctgccaccaggagtatgttctttaacggccagcccagcccaggccagcggctctgcctcccccagagtgcccccctgccttggccccaagtgctcccgaccgcccggccaagtccccacggaatggagatgctgagccggctgcctttccccgcggggggccccgagtggcaggggggcagccaaggagccctgggcactgctggcaagacaccgggacccagagagaagctgccagccgtgagaagcagccagggcggctccccagcactgttcacctacaacggaatgacagaccctggggctcagcccctgttcttcggggtggcccagccccaggtttcaccccacgggacacccagcctgcccccaccgagggtagtgggagcctcccccagcgagtccccactgccgtcaccggccaccaacacggccggcagcacctgctcttccctgtcgccgatgtccagcagcccagccaaccccagctcagaggaaagccagctccccggccccctcgggccctcggccttcttccacccacccactcacccccaggagacgggcagccccttcccgtccccggagcccccccactccctccccacccactaccagccagagccagccaaggccttcccttttcccgcagatgggctgggagccgagggtgccttccagtgcctggaggagaccccattcccccacgagggccccgaggtgggtcggggagggctgcagggcttcccccgtgcgccgcctccgtaccccacacaccacttctccctcagcagcgccagcctggaccagctggacgtgctgctgacctgcaggcagtgtgaccgcaactacagcagcctggcggccttcctggcccaccggcagttctgtggcctgctcctggccagggccaaggatggccaccagcggtctccaggcccccctgggctcccctcgccccccgctgcccccagagtccctgccgacgcacacgcgggcttgctcagccacgcgaagaccttcctgttagctggggacgcccaggccgagggcaaagacgaccccctgaggacaggcttcctgcccagcctggccgccacccccttcccgctccctgcctcggacctggacatggaggatgacgccaagctggacagcctcatcacagaggcgctcaacggcatggagtaccagtcggacaacccggagatcgacagcagcttcatcgacgtcttcgcggacgaggagccttccggccccagaggtcccagctccggacacccccttaagagcaaggcgggggtgactccagagagcaaagctccgcccccgctcccagcagccacgccggacccccaaaccccccgccctggggacaggggctgcccagcccgaggcaggcccaaaacgcgttccctgggtctggcccccaccgaggcggatgcgcccagccagggcaggcagcagaggagggggaagcagttgaagctgttccggaaggatctggactcgggcggcgcagcagaggggtcggggtcgggcggcggcggcagagcctccggcctgaggccccggaggaacgacggtctcggggagcggcccccaccccgtccccggcgccctagaacgcaggcccccgggagccgcgcagaccccgcgccccgggtcccgagagccgccgccctccccgaggagacccgcagctcccggcgccgccggctgccccccaggaaggaccccaggaagaggaaggctcggggcggcgcctggggcaaggagctcattctgaagatcgtgcagcagaagaacaggctccgcgagtacgacttcgcctcggagtccgaggaggacgagcagcctccgccgcggggccccggcttcagaggccggcggggccgaggcgagaagaggaaggaagtggagctgacccagggtcccagagaggatgagccacagaaaccccggaaggcggcgaggcaggaagccggcggggacggagcccccgcgaaccccgaggagccgggcgggtctcgcccgggccccggcaggagccctcaggcccgtggcccgtctcgaagcctggagacgggagcggccgccagggagggaggccccaagtgtgctgatcgcccctcagtggcccccaaggatcccctgcaggtccccaccaacaccgagacctcagaggaaacccgcccgtcgctggactttccccaggaggccaaggagcctgaaactgccgaagagtcagccccggacagcacagaattcacagaggctttgcgttctcctccagccgcctgtgcgggagaaatgggagcaagccccggtctcctgataccagagcagccgccgcccagcagacatgacaccggcacccccaagccgtcgggaagcctcgccaacacggcgccccacggaagctcgccaacgccaggtgtgggcagcctgctgggtggtcctgggggcacacaggccccagtctcccacaacagcaaggacccccctgcccgccagcctggagaatttctggcacccgtggctaacccctcaagtaccgcctgccccaaacccagtgttctgtcttcaaagatctccagttttggctgtgaccctgctggttttaacagagaccccttgggggttccagttgccaaaaaggggcctcagccctacagcagcccccacagtgagttgttcctcggacccaaagacctggctggctgtttcctggaagaactgcaccccaagccctcagccagggatgccccgccggccagcagctcctgcctttgccaggacggcgaggatgccggttccctcgagccacagctgccaaggagcccacctggcaccgctgagacggagccaggcagggctgcatcgccaccgaccttggagtcctcatccctcttcccagacctgccggtggacagattcgacccacccctctatggcagcctgtctgcgaacagggactccggtctgccgttcgcatgtgccgaccctccccagaagacggtgccgtcagatccaccgtacccctcttttttgctgcttgaggaagtatccccgatgctgcctagccattttcctgatctctcggggggaaaggtgctcagtaagacgtgtccccctgaacggacagtggttcccggcgccgccccatctttgcctgggaaggggagtggatgtagcgttgctcttatgagtcacctgtccgaggatgaactggagatccagaaattggtcaccgaattagaaagtcagctgcaaaggagcaaagacacacgtggggccccgagagagcttgcagaagctgagtcggtgggcagggtggagctcggcacaggcacagagccaccctcccaacggcgcacctgccaggccaccgtgccccacgaggacacgttctcggcagctgacctcacgcgcgttggagaatccactgcacatcgggagggtgcggaatcggctgtggccaccgtggaagcggttcaggggaggcctggggggacgtggccctgcccagcctccttccatccgggacatgcagcccttctcccctgtgcccaggaagacctggtttctggggctcctttcagccccaggggagccaacttccattttcagccagtgcagaaagccggagcctccaagactggactttgccaggcagaaggagacagcaggcccccccaagatgtctgcctgcctgagcccagcaagcagcctggcccacagctggatgccgggagtttagcaaagtgcagccccgaccaggaactttcatttcctaagaataaggaggccgccagctcacaagaaagtgaagactccctgcggctgcttccctgtgaacagagaggagggttcctcccagagcccggcacagcagaccagccccaccgaggggcccctgctccagaagcttttggcagccctgctgtccatctggcccctgacttggcatttcagggtgacggggctccacctctggatgccacctggccttttggtgccagtcccagccatgctgcccagggacattctgcaggcagagcaggtgggcacctccaccccacggcagggaggcctggctttgagggtaatgagtttgcaccggcgggggcctcctcactgactgccccccggggcagggaggcttggttggtccctgtgccaagtcccgcctgtgtatccaacacccaccctagcaggaggtcccaggacccagctttgagcccccccatacgtcagctccagctcccagggcctggagtggctaagagtaaagatggcatcctgggcttgcaggagctgacacctgctgcccagagccctccacgagtgaacccctcaggtctggaagggggcactgtggaaggagggaaggtggcctgtggccccgcccagggctccccagggggtgtgcaggtgacaactctccctgcagtggccggacatcagctggggctggaggcagatggacattggggcttgcttggccaagccgagaaaacccagggccaaggcacagccaaccagcttcagccagagaacggggtgagcccagggggcacggacaaccacgcctcagtcaatgccagtcccaaaacagcgctgaccggccccaccgagggtgcagtcctgctagagaaatgcaagggaagcagggcagccatgagccttcaggaggaggccgagcccaccccaagccccccgtcccctaatagggagtccctggcgctggccttgacagcagcccacagccgaagtggatctgagggccggactccagagagggcgtccagccccggcctgaacaagccactgctggccacaggggatagcccagcaccctctgtcggggacctggccgcctgcgccccctcacccacttcagccgcccacatgccctgcagccttgggcccctgccccgtgaagacccacttacctcgccttccagggcccaaggtgggctgggggggcagctgccagcatctccgtcctgcagggaccctcccggcccccagcagctgctggcctgttctcctgcctgggcacctctggaagaggcagatggcgtccaagccacgacagatactggggctgaggattccccggtggctcccccgtctttgacaacaagcccctgcgatcccaaggaagccctggctggttgccttctccagggggagggcagccccctggaagacccttcctcctggcctcctggctccgtcagtgctgtaacctgcactcacagtggggacacccccaaagacagcactttaagaattccagaggattccagaaaagagaagctgtgggagtctcctggccgagccacctctcctcctctggcaggggccgtctcccccagcgtggccgtcagggctactggcctgtccagcactcccaccggagatgaggcacaggcaggcaggggactcccagggccagacccccagagcaggggagccccgccccacaccaaccctgacaggatgcccaggggccactcctcgtattctccaagcaatactgcccgcctcggccacagggagggccaggctgtcacagctgtgcccactgagcctcccacgctacagggtgcagggccggactcccccgcctgcctggaaggtgagatggggaccagcagcaaggagccggaggacccagggacccctgagaccgggcgctctggtgctaccaagatgcccagggtcacctgcccttccacaggactgggcttgggaagaaccacagccccaagcagcacagccagtgacttccagtctgactccccccaaagccacagaaatgcctcccaccagactccccagggggaccccctcggcccccaagacctcaaacagaggtcccgtggctataaaaagaagcctgcatctacagagaacggccagtggaagggccaagctccacatgggcctgtgacctgtgaggtctgcgcagcctccttccgctccgggccgggcctgagccggcacaaggccaggaagcaccggccacacccgggagcccccgcggagccgagcccagcggccttgcctgctcagcagcctctagagcccctagcccaaaagtgccagccgcccaggaagaaaagccacagggtgtctgggaaggagagaccaaatcactcacggggagaccccagccacgtcacccagccaccgcctgcccagggctcaaaggaggttctcagagcaccggggtccccacacagccagcagctgcaccctccaagccctactgagcatgaggtagatgtgaagactccggcctccaagcccagaccagaccaggccagggaagatgagctgcatcccaaacaggcagaaaaaagagaaggccggaggtggcgccgagagcccaccgtggactctcctagccactcagaggggaagtcaaataagaaaaggggaaagctgagagggagaaggctccgggaggagagcattcttccagtctctgctgatgtgatttcagatgggcgcggctccagaccatcccctgcaatggccagttacgcagcctctccgagccactgcctctctgtggaaggagggcctgaggctgacggggagcagccgcctcgcttggccactctgggacctggggtgatggagggtgcagcggagactgaccaggaggctctgtgtgcaggggagactggggcccagaagccacctggagatcggatgctgtgtccagggaggatggatggtgcagctctgggggaacagccaactgggcagaagggagcctcggcaagggggttctggggaccaagagagaccaaggcgttgggtgtgtgcaaagagtctgggagcgagcctgcggaggacagcagcagggcccacagccgatcagaggaaggtgtctgggaggagaacacgccccccttgggccccctgggttttcccgagacttccagctctccggcggacagcaccaccagcagctgcctccagggcctcccggacaacccagacacccagggtggagtccaggggcctgaaggccccactcctgatgcctctggctccagtgccaaggatcctccaagcttgtttgatgatgaggtctctttctcccagctcttccctccaggcggtcgcttgactagaaagaggaacccgcatgtctacgggaagcgctgtgagaagccggtgctcccgctgccaacccagcccagctttgaggagggcggtgaccccacgctgggcccagcccgcctgcccacggacctcagcgactccagctccctctgcctctgccatgaggacccgtgggaggacgaggatcccgcaggtctgcccgagtccttcctcctggatgggttcctcaatagcagggtgcctggcattgacccctgggcccccggcctcagcctgtgggccctggagcccagcagggaagctggtgcagagaagctgccctcccactgccccgaggacgatcggccggaggccattcctgagctgcacatggtcccagcggcttggcgaggcctggagatgccggcccctgccgatgactcctcctcttctctcggagatgtgagccccgagccccccagcctggagagagaacgctgtgacggtgggcttcccgggaacacccacctgctgccgctccgtgccacggactttgaggtgctcagcaccaagtttgagatgcaagacctgtgctttctgggaccctttgaagaccccgtgggtctccccggccccagcttcttagacttcgagggcacggcgagctcacaggggccacagagccgaaggacagaggaggctgcaggggcagggagggcccaaggcagaggccggccggccaagggcaggcgggcctcctacaagtgcaaagtgtgcttccagcgcttccgcagcctgggcgagctggacctgcacaagctggcccacacgcccgcgccgccgcccacctgctacatgtgcgtggagcgcaggtttggctcgcgggagctgctgcgggggcacctgcaggagaggcacgcgcagagcaaggccgggccctgggcgtgcggcatgtgcctgaaggaggtggccgacgtctggatgtacaacgagcacctgcgtgagcacgcggtccgcttcgcccgcagggggcaggcgcggaggtccttgggggacctgcccggaggcctggagggcagcagcgctgtcgcccaccttctgaacagcatcacggaacccgcgcccaaacaccacaggggcaagcgctccgccggcaaggccgccgggagcccgggagacccgtgggggcaagagggagaagccaagaaagacagcccgggcgagagggcgaaaccccgggcacgcagcacccccagcaacccagacggggccgcgaccccagacagcgcctctgccaccgccctggctgacgccggcagcccgggcccccccaggacgacccccagcccgtcccccgacccctgggccggcggggagcccctcctgcaagccaccccggtgcacgaggcctgcaaggacccctcccgcgactgccaccactgcgggaagcgcttccccaagcccttcaagctgcagcgccacctggcggtgcacagcccgcagcgcgtctacctgtgcccccggtgcccccgggtctaccccgagcacggggagctgctggcacacctgggcggggcgcacgggctgctggagcggccggagctgcagcacacgccgctgtatgcctgcgagctctgcgccacggttatgcgcatcatcaagaagtccttcgcctgcagctcctgcaactacaccttcgccaagaaggagcagttcgaccgccacatgaacaagcacctcaggggggggcggcagcccttcgcgttccgcggcgtgcggaggccgggagcgccgggacagaaggcccgggccctcgagggcacactgcccagcaaacggcgcagggtggccatgcccggcagtgcccctgggcccggcgaggacaggcctcctccccggggaagcagccccatcctgagtgagggctctctcccggccctgctccacctgtgttcggaggtggctcccagcaccaccaagggatggcccgagaccctagagaggcctgtagaccccgtgacccacccgatcagaggttgtgagctgccatccaaccaccaggagtgtcccccgccgtctctgtctcccttcccagctgccttggctgatggcagaggagactgcgcgctggacggagccctggagaggccagagaacgaggcttccccaggcagccccgggcctcttctccagcaagctctccctctgggggcatctctgccgcggccgggagccagaggccaagatgcggagggaaagagggctcctctcgtgttctcagggaaacgcagggccccgggtgcccgtggcaggtgtgcccctgaccatttccaggaagaccacctacttcagaaagagaaggaggtgtcctcaagccacatggtgtctgagggggggccccgaggcgccttccacaagggcagcgccaccaagcctgcgggctgccagagctcatcaaaggacaggtcggcagcatccacccccagcaaagcactcaagttcccagtgcacccaaggaaggcggtggggagcctggcacccggggagctggcccgtggcacagagaatgggatgaagcccgccacccccaaagccaaacccggccccagctcccagggcagtggaagccctcgccccggcaccaagacaggaggtggcagccagccccagccagccagcgggcagctccagagcgagacagccaccaccccagccaagcccagcttccccagccggagccctgcaccagagaggctccccgctcgagcccaagccaagagctgcaccaaggggccaagggaagctggtgagcaggggccccacgggagcctaggtcccaaggagaagggagagagcagtacgaagaggaaaaagggccaggtcccagggccagccaggagtgaaagtgtggggagcttcgggagagccccctcagcccctgacaagcccccccggacccctcggaagcaggcaactcccagccgcgtgctcccgaccaagcccaagcccaacagccagaacaaacccaggccgccaccatcagagcagcggaaggcagagccgggccacacacagaggaaggacagactgggcaaggccttcccccaggggagacccctgctcaggccccccaagaggggcacagctgtccacggtgctgaacctgccgagccacacacccaccggacggccgaggcccagagtgacctcctcagccagctcttcgggcagagactaactggcttcaaaatccctttaaagaaagatgcttccgagtaatttctaggagcaagagcctgggaccggagctgggcgttcctgtctcggcctgcctccttggccagctccggctccctgagatggtccactctgtggccacttgacttcttgtgcaactgctcaggccttgatgtcagagctgaggtggtgatgctttgaacagggcccaggtgggcagcattccctttcttgctggaaggctgggggtgaaagacggggccactgcagcccttttgagaccacacagctgttttcttggtaccaagtacttgaagagacagcagcccatcccctcagcccacacccctgcgccctgtgggcaccgacaccacagaagccaatgtttggagatttgcacaacctcccgttcccccacatggagaagggaagtaagttgaggcagccgtgggatggtggtaggttccctcttagtcttgctgctgttgctggaattccaaagtgaccttagaaaccacgtgggggaaggcagtgctcactacttagaagggttgcttctgagccgcctggtcccccaagagcacaacaggcctcctccctctgaccacagggtcatgcctcctccctctgaccacagggtcatgccagcctccatttgctctgcgggagaaaagcccatctctagcacaccttgaccccaggaaccgggttcccgtatggaactgggaagaaaccgcccctgtgccagctcccgcgggccctcctcgttccctcccagcctccatggccgccctctagagcctccctgctgtacggagctctgggctccgcctatttgcaatgttactctgaagtttctggtgctatttttgtgttgtaatgtgaatacaggcttccttgatttttttttttaatgggggtattgggtgggacagacggggtcagggaggccccaccatggcttgtcgagggcacgggcacctgcatggcggcgctctccctgcctcccctgccgggctgcaagcctgaggtctgtgctgccagacggggatgctcagggctggggctgcagagccgctgccctggccagggcaccctcatgcaccgacccaacccaggcctgggacgcacgtgtcctctcacagcgtcgtgcctgtgaaggtgggtcaaagggtgagagggcttccttctcacccttctctccataagtatcttgaagatccatggtttgttttgctctattgtttagtttttacttgggtgcaatgtgtacgtcaaaagtttttattttgatatttgaaagagaccaaatcaggcccagaccgcctctctggaaggtgttgtaggccattcaaaacgcctccggagtgtcgcaaaccaagtgcggaggggccctgaggttgtactgtaaacatcatagtgacttgtcttttcaaatatattcccactattttcgcagaaaacctc

SEQ ID NO: 202632 - DNA, 13279 bp, Homo sapiens
  Payload ID: 19959
  Gene Name: zinc finger protein 469
  ENST ID: ENST00000565624
  CDS Start-End: 1-11862
atgcctggggagcgcccccgaggagcgccgccccccaccatgactggagacctgcagccccgccaagttgccagcagcccggggcacccctcccagccgccactggaggacaacaccccagctaccaggaccaccaagggtgccagggaggctggcggccaggcccaggccatggagctccccgaggcccagccaaggcaggccagggacggggagctcaagcccccatccctgagaggccaggccccgagcagcacccctgggaagaggggcagcccccagaccccaccggggagaagccccttgcaggctccctcaaggctggcgggcagggcagagggcagccccccacagcgctacattctgggcatcgccagctcgaggaccaagcccaccctggacgagacaccagagaacccacagctggaggctgcccagctccctgaggtggacaccccccagggccctgggactggagctccactcaggccgggcctcccaaggactgaggcccaacccgccgccgaagagcttggcttccacaggtgcttccaggagccaccctccagctttacctccaccaactatacctcaccaagcgccacccccaggcccccagccccggggcccccccagagcaggggcaccagccccctccagcccggttcctatcccgaataccaggccagtggggccgactcctggcctcccgctgctgagaatagcttcccaggtgctaatttcggggttccccccgccgagccggaacctattcccaaaggcagcaggcccggcggcagccccaggggagtttccttccagttccccttcccggcactgcatggggccagcacaaaacccttccctgcggatgtggctgggcacgcattcaccaatgggccactggtgtttgccttccatcagccccagggagcgtggccggaggaggccgtgggcacgggccctgcctacccgctgcccacccagcctgcgccctcacccctgccctgctaccagggccagccaggtggcctgaaccgccacagcgacctcagtggtgccctctcttcccctggagctgctcactcggccccgagacccttctctgacagtttacacaagagcctgaccaaaatccttcccgaaagaccaccttcagcccaggatgggctggggagcacgagagggccccctagctccctaccccagaggcactttccagggcaggcgtacagagccagtggggtggacaccagcccggggcctccggacaccgagctggccgccccagggcccccacccgccaggctgccccagctgtgggaccccacagcagccccttaccccacacctcctgggggccccctggctgccaccaggagtatgttctttaacggccagcccagcccaggccagcggctctgcctcccccagagtgcccccctgccttggccccaagtgctcccgaccgcccggccaagtccccacggaatggagatgctgagccggctgcctttccccgcggggggccccgagtggcaggggggcagccaaggagccctgggcactgctggcaagacaccgggacccagagagaagctgccagccgtgagaagcagccagggcggctccccagcactgttcacctacaacggaatgacagaccctggggctcagcccctgttcttcggggtggcccagccccaggtttcaccccacgggacacccagcctgcccccaccgagggtagtgggagcctcccccagcgagtccccactgccgtcaccggccaccaacacggccggcagcacctgctcttccctgtcgccgatgtccagcagcccagccaaccccagctcagaggaaagccagctccccggccccctcgggccctcggccttcttccacccacccactcacccccaggagacgggcagccccttcccgtccccggagcccccccactccctccccacccactaccagccagagccagccaaggccttcccttttcccgcagatgggctgggagccgagggtgccttccagtgcctggaggagaccccattcccccacgagggccccgaggtgggtcggggagggctgcagggcttcccccgtgcgccgcctccgtaccccacacaccacttctccctcagcagcgccagcctggaccagctggacgtgctgctgacctgcaggcagtgtgaccgcaactacagcagcctggcggccttcctggcccaccggcagttctgtggcctgctcctggccagggccaaggatggccaccagcggtctccaggcccccctgggctcccctcgccccccgctgcccccagagtccctgccgacgcacacgcgggcttgctcagccacgcgaagaccttcctgttagctggggacgcccaggccgagggcaaagacgaccccctgaggacaggcttcctgcccagcctggccgccacccccttcccgctccctgcctcggacctggacatggaggatgacgccaagctggacagcctcatcacagaggcgctcaacggcatggagtaccagtcggacaacccggagatcgacagcagcttcatcgacgtcttcgcggacgaggagccttccggccccagaggtcccagctccggacacccccttaagagcaaggcgggggtgactccagagagcaaagctccgcccccgctcccagcagccacgccggacccccaaaccccccgccctggggacaggggctgcccagcccgaggcaggcccaaaacgcgttccctgggtctggcccccaccgaggcggatgcgcccagccagggcaggcagcagaggagggggaagcagttgaagctgttccggaaggatctggactcgggcggcgcagcagaggggtcggggtcgggcggcggcggcagagcctccggcctgaggccccggaggaacgacggtctcggggagcggcccccaccccgtccccggcgccctagaacgcaggcccccgggagccgcgcagaccccgcgccccgggtcccgagagccgccgccctccccgaggagacccgcagctcccggcgccgccggctgccccccaggaaggaccccaggaagaggaaggctcggggcggcgcctggggcaaggagctcattctgaagatcgtgcagcagaagaacaggcgccaccggcggctggggcggcgggcgggcaggtgcggctccctggcggcggggaggccccggcccggagctgaggaccgcaggctccgcgagtacgacttcgcctcggagtccgaggaggacgagcagcctccgccgcggggccccggcttcagaggccggcggggccgaggcgagaagaggaaggaagtggagctgacccagggtcccagagaggatgagccacagaaaccccggaaggcggcgaggcaggaagccggcggggacggagcccccgcgaaccccgaggagccgggcgggtctcgcccgggccccggcaggagccctcaggcccgtggcccgtctcgaagcctggagacgggagcggccgccagggagggaggccccaagtgtgctgatcgcccctcagtggcccccaaggatcccctgcaggtccccaccaacaccgagacctcagaggaaacccgcccgtcgctggactttccccaggaggccaaggagcctgaaactgccgaagagtcagccccggacagcacagaattcacagaggctttgcgttctcctccagccgcctgtgcgggagaaatgggagcaagccccggtctcctgataccagagcagccgccgcccagcagacatgacaccggcacccccaagccgtcgggaagcctcgccaacacggcgccccacggaagctcgccaacgccaggtgtgggcagcctgctgggtggtcctgggggcacacaggccccagtctcccacaacagcaaggacccccctgcccgccagcctggagaatttctggcacccgtggctaacccctcaagtaccgcctgccccaaacccagtgttctgtcttcaaagatctccagttttggctgtgaccctgctggttttaacagagaccccttgggggttccagttgccaaaaaggggcctcagccctacagcagcccccacagtgagttgttcctcggacccaaagacctggctggctgtttcctggaagaactgcaccccaagccctcagccagggatgccccgccggccagcagctcctgcctttgccaggacggcgaggatgccggttccctcgagccacagctgccaaggagcccacctggcaccgctgagacggagccaggcagggctgcatcgccaccgaccttggagtcctcatccctcttcccagacctgccggtggacagattcgacccacccctctatggcagcctgtctgcgaacagggactccggtctgccgttcgcatgtgccgaccctccccagaagacggtgccgtcagatccaccgtacccctcttttttgctgcttgaggaagtatccccgatgctgcctagccattttcctgatctctcggggggaaaggtgctcagtaagacgtgtccccctgaacggacagtggttcccggcgccgccccatctttgcctgggaaggggagtggatgtagcgttgctcttatgagtcacctgtccgaggatgaactggagatccagaaattggtcaccgaattagaaagtcagctgcaaaggagcaaagacacacgtggggccccgagagagcttgcagaagctgagtcggtgggcagggtggagctcggcacaggcacagagccaccctcccaacggcgcacctgccaggccaccgtgccccacgaggacacgttctcggcagctgacctcacgcgcgttggagaatccactgcacatcgggagggtgcggaatcggctgtggccaccgtggaagcggttcaggggaggcctggggggacgtggccctgcccagcctccttccatccgggacatgcagcccttctcccctgtgcccaggaagacctggtttctggggctcctttcagccccaggggagccaacttccattttcagccagtgcagaaagccggagcctccaagactggactttgccaggcagaaggagacagcaggcccccccaagatgtctgcctgcctgagcccagcaagcagcctggcccacagctggatgccgggagtttagcaaagtgcagccccgaccaggaactttcatttcctaagaataaggaggccgccagctcacaagaaagtgaagactccctgcggctgcttccctgtgaacagagaggagggttcctcccagagcccggcacagcagaccagccccaccgaggggcccctgctccagaagcttttggcagccctgctgtccatctggcccctgacttggcatttcagggtgacggggctccacctctggatgccacctggccttttggtgccagtcccagccatgctgcccagggacattctgcaggcagagcaggtgggcacctccaccccacggcagggaggcctggctttgagggtaatgagtttgcaccggcgggggcctcctcactgactgccccccggggcagggaggcttggttggtccctgtgccaagtcccgcctgtgtatccaacacccaccctagcaggaggtcccaggacccagctttgagcccccccatacgtcagctccagctcccagggcctggagtggctaagagtaaagatggcatcctgggcttgcaggagctgacacctgctgcccagagccctccacgagtgaacccctcaggtctggaagggggcactgtggaaggagggaaggtggcctgtggccccgcccagggctccccagggggtgtgcaggtgacaactctccctgcagtggccggacatcagctggggctggaggcagatggacattggggcttgcttggccaagccgagaaaacccagggccaaggcacagccaaccagcttcagccagagaacggggtgagcccagggggcacggacaaccacgcctcagtcaatgccagtcccaaaacagcgctgaccggccccaccgagggtgcagtcctgctagagaaatgcaagggaagcagggcagccatgagccttcaggaggaggccgagcccaccccaagccccccgtcccctaatagggagtccctggcgctggccttgacagcagcccacagccgaagtggatctgagggccggactccagagagggcgtccagccccggcctgaacaagccactgctggccacaggggatagcccagcaccctctgtcggggacctggccgcctgcgccccctcacccacttcagccgcccacatgccctgcagccttgggcccctgccccgtgaagacccacttacctcgccttccagggcccaaggtgggctgggggggcagctgccagcatctccgtcctgcagggaccctcccggcccccagcagctgctggcctgttctcctgcctgggcacctctggaagaggcagatggcgtccaagccacgacagatactggggctgaggattccccggtggctcccccgtctttgacaacaagcccctgcgatcccaaggaagccctggctggttgccttctccagggggagggcagccccctggaagacccttcctcctggcctcctggctccgtcagtgctgtaacctgcactcacagtggggacacccccaaagacagcactttaagaattccagaggattccagaaaagagaagctgtgggagtctcctggccgagccacctctcctcctctggcaggggccgtctcccccagcgtggccgtcagggctactggcctgtccagcactcccaccggagatgaggcacaggcaggcaggggactcccagggccagacccccagagcaggggagccccgccccacaccaaccctgacaggatgcccaggggccactcctcgtattctccaagcaatactgcccgcctcggccacagggagggccaggctgtcacagctgtgcccactgagcctcccacgctacagggtgcagggccggactcccccgcctgcctggaaggtgagatggggaccagcagcaaggagccggaggacccagggacccctgagaccgggcgctctggtgctaccaagatgcccagggtcacctgcccttccacaggactgggcttgggaagaaccacagccccaagcagcacagccagtgacttccagtctgactccccccaaagccacagaaatgcctcccaccagactccccagggggaccccctcggcccccaagacctcaaacagaggtcccgtggctataaaaagaagcctgcatctacagagaacggccagtggaagggccaagctccacatgggcctgtgacctgtgaggtctgcgcagcctccttccgctccgggccgggcctgagccggcacaaggccaggaagcaccggccacacccgggagcccccgcggagccgagcccagcggccttgcctgctcagcagcctctagagcccctagcccaaaagtgccagccgcccaggaagaaaagccacagggtgtctgggaaggagagaccaaatcactcacggggagaccccagccacgtcacccagccaccgcctgcccagggctcaaaggaggttctcagagcaccggggtccccacacagccagcagctgcaccctccaagccctactgagcatgaggtagatgtgaagactccggcctccaagcccagaccagaccaggccagggaagatgagctgcatcccaaacaggcagaaaaaagagaaggccggaggtggcgccgagagcccaccgtggactctcctagccactcagaggggaagtcaaataagaaaaggggaaagctgagagggagaaggctccgggaggagagcattcttccagtctctgctgatgtgatttcagatgggcgcggctccagaccatcccctgcaatggccagttacgcagcctctccgagccactgcctctctgtggaaggagggcctgaggctgacggggagcagccgcctcgcttggccactctgggacctggggtgatggagggtgcagcggagactgaccaggaggctctgtgtgcaggggagactggggcccagaagccacctggagatcggatgctgtgtccagggaggatggatggtgcagctctgggggaacagccaactgggcagaagggagcctcggcaagggggttctggggaccaagagagaccaaggcgttgggtgtgtgcaaagagtctgggagcgagcctgcggaggacagcagcagggcccacagccgatcagaggaaggtgtctgggaggagaacacgccccccttgggccccctgggttttcccgagacttccagctctccggcggacagcaccaccagcagctgcctccagggcctcccggacaacccagacacccagggtggagtccaggggcctgaaggccccactcctgatgcctctggctccagtgccaaggatcctccaagcttgtttgatgatgaggtctctttctcccagctcttccctccaggcggtcgcttgactagaaagaggaacccgcatgtctacgggaagcgctgtgagaagccggtgctcccgctgccaacccagcccagctttgaggagggcggtgaccccacgctgggcccagcccgcctgcccacggacctcagcgactccagctccctctgcctctgccatgaggacccgtgggaggacgaggatcccgcaggtctgcccgagtccttcctcctggatgggttcctcaatagcagggtgcctggcattgacccctgggcccccggcctcagcctgtgggccctggagcccagcagggaagctggtgcagagaagctgccctcccactgccccgaggacgatcggccggaggccattcctgagctgcacatggtcccagcggcttggcgaggcctggagatgccggcccctgccgatgactcctcctcttctctcggagatgtgagccccgagccccccagcctggagagagaacgctgtgacggtgggcttcccgggaacacccacctgctgccgctccgtgccacggactttgaggtgctcagcaccaagtttgagatgcaagacctgtgctttctgggaccctttgaagaccccgtgggtctccccggccccagcttcttagacttcgagggcacggcgagctcacaggggccacagagccgaaggacagaggaggctgcaggggcagggagggcccaaggcagaggccggccggccaagggcaggcgggcctcctacaagtgcaaagtgtgcttccagcgcttccgcagcctgggcgagctggacctgcacaagctggcccacacgcccgcgccgccgcccacctgctacatgtgcgtggagcgcaggtttggctcgcgggagctgctgcgggggcacctgcaggagaggcacgcgcagagcaaggccgggccctgggcgtgcggcatgtgcctgaaggaggtggccgacgtctggatgtacaacgagcacctgcgtgagcacgcggtccgcttcgcccgcagggggcaggcgcggaggtccttgggggacctgcccggaggcctggagggcagcagcgctgtcgcccaccttctgaacagcatcacggaacccgcgcccaaacaccacaggggcaagcgctccgccggcaaggccgccgggagcccgggagacccgtgggggcaagagggagaagccaagaaagacagcccgggcgagagggcgaaaccccgggcacgcagcacccccagcaacccagacggggccgcgaccccagacagcgcctctgccaccgccctggctgacgccggcagcccgggcccccccaggacgacccccagcccgtcccccgacccctgggccggcggggagcccctcctgcaagccaccccggtgcacgaggcctgcaaggacccctcccgcgactgccaccactgcgggaagcgcttccccaagcccttcaagctgcagcgccacctggcggtgcacagcccgcagcgcgtctacctgtgcccccggtgcccccgggtctaccccgagcacggggagctgctggcacacctgggcggggcgcacgggctgctggagcggccggagctgcagcacacgccgctgtatgcctgcgagctctgcgccacggttatgcgcatcatcaagaagtccttcgcctgcagctcctgcaactacaccttcgccaagaaggagcagttcgaccgccacatgaacaagcacctcaggggggggcggcagcccttcgcgttccgcggcgtgcggaggccgggagcgccgggacagaaggcccgggccctcgagggcacactgcccagcaaacggcgcagggtggccatgcccggcagtgcccctgggcccggcgaggacaggcctcctccccggggaagcagccccatcctgagtgagggctctctcccggccctgctccacctgtgttcggaggtggctcccagcaccaccaagggatggcccgagaccctagagaggcctgtagaccccgtgacccacccgatcagaggttgtgagctgccatccaaccaccaggagtgtcccccgccgtctctgtctcccttcccagctgccttggctgatggcagaggagactgcgcgctggacggagccctggagaggccagagaacgaggcttccccaggcagccccgggcctcttctccagcaagctctccctctgggggcatctctgccgcggccgggagccagaggccaagatgcggagggaaagagggctcctctcgtgttctcagggaaacgcagggccccgggtgcccgtggcaggtgtgcccctgaccatttccaggaagaccacctacttcagaaagagaaggaggtgtcctcaagccacatggtgtctgagggggggccccgaggcgccttccacaagggcagcgccaccaagcctgcgggctgccagagctcatcaaaggacaggtcggcagcatccacccccagcaaagcactcaagttcccagtgcacccaaggaaggcggtggggagcctggcacccggggagctggcccgtggcacagagaatgggatgaagcccgccacccccaaagccaaacccggccccagctcccagggcagtggaagccctcgccccggcaccaagacaggaggtggcagccagccccagccagccagcgggcagctccagagcgagacagccaccaccccagccaagcccagcttccccagccggagccctgcaccagagaggctccccgctcgagcccaagccaagagctgcaccaaggggccaagggaagctggtgagcaggggccccacgggagcctaggtcccaaggagaagggagagagcagtacgaagaggaaaaagggccaggtcccagggccagccaggagtgaaagtgtggggagcttcgggagagccccctcagcccctgacaagcccccccggacccctcggaagcaggcaactcccagccgcgtgctcccgaccaagcccaagcccaacagccagaacaaacccaggccgccaccatcagagcagcggaaggcagagccgggccacacacagaggaaggacagactgggcaaggccttcccccaggggagacccctgctcaggccccccaagaggggcacagctgtccacggtgctgaacctgccgagccacacacccaccggacggccgaggcccagagtgacctcctcagccagctcttcgggcagagactaactggcttcaaaatccctttaaagaaagatgcttccgagtaatttctaggagcaagagcctgggaccggagctgggcgttcctgtctcggcctgcctccttggccagctccggctccctgagatggtccactctgtggccacttgacttcttgtgcaactgctcaggccttgatgtcagagctgaggtggtgatgctttgaacagggcccaggtgggcagcattccctttcttgctggaaggctgggggtgaaagacggggccactgcagcccttttgagaccacacagctgttttcttggtaccaagtacttgaagagacagcagcccatcccctcagcccacacccctgcgccctgtgggcaccgacaccacagaagccaatgtttggagatttgcacaacctcccgttcccccacatggagaagggaagtaagttgaggcagccgtgggatggtggtaggttccctcttagtcttgctgctgttgctggaattccaaagtgaccttagaaaccacgtgggggaaggcagtgctcactacttagaagggttgcttctgagccgcctggtcccccaagagcacaacaggcctcctccctctgaccacagggtcatgcctcctccctctgaccacagggtcatgccagcctccatttgctctgcgggagaaaagcccatctctagcacaccttgaccccaggaaccgggttcccgtatggaactgggaagaaaccgcccctgtgccagctcccgcgggccctcctcgttccctcccagcctccatggccgccctctagagcctccctgctgtacggagctctgggctccgcctatttgcaatgttactctgaagtttctggtgctatttttgtgttgtaatgtgaatacaggcttccttgatttttttttttaatgggggtattgggtgggacagacggggtcagggaggccccaccatggcttgtcgagggcacgggcacctgcatggcggcgctctccctgcctcccctgccgggctgcaagcctgaggtctgtgctgccagacggggatgctcagggctggggctgcagagccgctgccctggccagggcaccctcatgcaccgacccaacccaggcctgggacgcacgtgtcctctcacagcgtcgtgcctgtgaaggtgggtcaaagggtgagagggcttccttctcacccttctctccataagtatcttgaagatccatggtttgttttgctctattgtttagtttttacttgggtgcaatgtgtacgtcaaaagtttttattttgatatttgaaagagaccaaatcaggcccagaccgcctctctggaaggtgttgtaggccattcaaaacgcctccggagtgtcgcaaaccaagtgcggaggggccctgaggttgtactgtaaacatcatagtgacttgtcttttcaaatatattcccactattttcgcag

SEQ ID NO: 202633 - DNA, 7151 bp, Homo sapiens
  Payload ID: 19960
  Gene Name: zinc finger protein 470
  Uniprot ID: Q6ECI4
  ENST ID: ENST00000330619
  CDS Start-End: 687-2840
ggttgctgaggagaagggaggtctgggcggggcagcggccgaggctggactggggcgcggcgggggcggtgtcctggttcctgtgtgggcggcgggcgtgagcgtgcgcgtgtggcctggtggctgtgagtgcccatacgtggtgagcgtgcggtgctgtgctgaggaggggcgagcgcgcgcggggatggcggcccggtgtgtgactgtccggtgcgtggccgcgaatctgcgcctgcgtgcatggcccggcggcgtgcggaaggcggtgtgtgttggaatgagtgaagcactttaagtggccaagagcaggaaacccggccggaggaggcttaccccgttctcccctgtatcgactgcgtagagcccagtgtgggcaaagtcctagagcccggggaagttgcccgggcggggcagcctcggctgaagcatttcctgtcagccctatctggaaggggcagagcccaggacagggctccatgtccacaggacggcgaggagcgaagaccatggggactgagtacacagatgaagacacagaagcatagagaggataagtaatcactagcaagtggaagaaccgggattcagatccagaacaggctgactccagagtcactggctgtcatgtagtttcctcaactactgcctcagctctacaatcccagagtaaagctcttctccaaatgaagagccaggaagaggtagaggtggcaggaattaaactttgtaaagccatgtccctgggttcagtgactttcacagatgtggccatagacttttcccaagatgaatgggagtggctgaatcttgctcagagaagtttgtacaagaaggtgatgttagaaaactacaggaacctagtttcagtgggtctttgcatttctaaaccagatgtgatctccttactggagcaagagaaagacccttgggtgataaaaggagggatgaacagaggcctgtgcccagacttggagtgtgtgtgggtgaccaaatcattatctttaaaccaggatatttatgaagaaaaattacccccggcaatcataatggaaagacttaaaagctatgaccttgaatgttcaacattagggaaaaactggaaatgtgaagacttgtttgagagggagcttgtaaaccagaagacacattttaggcaagagaccatcactcatatagatactcttattgaaaaaagagatcactctaacaaatctgggacagtttttcatctgaatacattatcttatataaaacagatttttcccatggaagagagaatatttaattttcatacagataagaaaagcttaaaaacacattcagttgtgaaaaaacacaagcaagaccgtggagaaaagaaacttttaaaatgtaatgactgtgagaaaatattcagcaaaatctcaacccttactcttcaccaaagaattcatacaggagagaaaccctatgaatgtattgaatgtggaaaggcctttagccagagtgcccaccttgctcaacatcagagaatacacacaggagaaaaaccttttgaatgtactgaatgtgggaaagccttcagccagaatgctcatcttgttcaacaccagagagttcatactggagagaaaccttatcagtgtaagcagtgtaataaagcattcagccagcttgcacaccttgctcaacatcagagggtccacactggagagaaaccctatgaatgtattgaatgtgggaaggcttttagtgattgctcatccctagctcatcatcgaaggattcacactgggaaaagaccttatgaatgtattgactgtgggaaagctttcaggcagaatgcttctcttatacgtcatcggcgatattatcatactggagagaaaccctttgactgtattgattgtgggaaggctttcactgatcacataggacttattcagcataagagaactcatactggagagagaccttacaaatgtaatgtgtgtgggaaggcttttagccatggctcatctctgacagtacatcagagaattcatacaggagagaaaccttatgaatgcaatatctgtgagaaagccttcagccatcgtgggtctcttactcttcatcagagagttcatactggagagaaaccctatgaatgtaaagaatgtgggaaagctttccggcagagcacgcatctggctcatcatcagagaattcatactggagagaaaccttatgaatgtaaggaatgcagcaaaaccttcagccagaatgcacacctcgcgcaacatcagaaaatacacactggggagaaaccttatgaatgtaaggaatgtggtaaggccttcagtcagattgcacaccttgttcagcaccagagagttcatactggtgagaagccttacgaatgtattgaatgtgggaaggcctttagtgatggctcatatcttgttcaacatcagagactccacagtggcaaaagaccgtatgaatgtcttgaatgtgggaaggcattcaggcagagggcatccttgatttgtcatcagagatgtcatactggtgagaaaccttatgaatgtaatgtttgtgggaaagcctttagccatcgtaaatcccttactctgcatcagagaattcatacaggagagaaaccttatgagtgtaaggaatgtagcaaagccttcagccaggttgcccatcttactctacataagagaattcatactggagaaaggccctatgagtgtaaagaatgtggaaaagccttcaggcagagtgtacatcttgctcatcatcagcgaattcataccggagagtcatcagttattctctcctctgccctcccataccaccaagtcctatagattcaatctcgtaaatgcttctagcatccatctgcttttttccagcacatgtcccatcatcatagtccaagacgcaaccatctcatctggatttctgcagtagcataactgttgccccttttgcttctatcaactacatgtttaacactgtaggcagcctaaccttttaaaaataaaaatacataatttatgttattttcccatttaaaacacttgatttgaaaaatatattaactaatccatttcaaggatttagcacacactggcatatagttattgctaaataaatgctagccattaaggtaaaggtttccttacaaactatcatattaagcagcaagtaaaccaaacagtaagtctaagactaagattttagagcagacagaagactactctcctggtagagaggaaagatgaacaaactcagaattgaaagatttatggtacacaaggtaacatggtggcttatcactccctctgtgacattgttgatgagcaactctcactttacctgacactgagaagtgagaatcagccaattagaacaaaagcttttagctgggtgcggtggctcatgcctgtagtcccagcactttgggaggctgaggcaggcagattgcttgagctcaggagttcgagaccaacctgagcaacatggtgaaaccctgtctctacaaaaaatacagaaattagccaggcgtggtggtgcacacctgtagtcctagctactcaggaggctgaagcaggaggattgcttgagcccaggaggtagaggttgcagtgagtcatgatcacaccactgcaattccagctgggcagcagagccagacactgtctcaaggaaaaacaaagaacaaaagcatttggtagaatgtaggactaaccagggtaggtagtagtaaaccaaaagtaacaagccaaaaaaacttgaatagattaatagccatgaaacactgaaaagggtagttcaatactttggcctttataaaagtaccacagacaattcgtgtggtatttaaattgttctagcataaaataaaatgcaataagaccttccatcttgttccatgagattgacaagacatgccaaaacataaaaatatgtacactgcaattagtttctgaatgtagatgttacaacttaaacttatttttaaaatatttaaaaataggaaggctagacatgcctctgtatagaaaatctgataaaaatatttctccctaaattgtaaattcattgatattccagtaaaaatttccatatttttttagttgagaagctgattctgatcatctgtagaattttgattttaacgaggaatgtagtttacattaggaatgtagtactaatactaattgaacatttgctaatgtttcacacactattttaggtgctgggggatacagtaaggtacaagatggacaaaaatacgtgctcttacagatctagtagaacagaaaaaattaaatgcatgctatgtgataagtatatgatatgtcccataaagagaaatgatataaaaaagaagctagggagtgctggatcaggcaccttactatccccagaacatgttggtattagaggatgagggaagaactagaggtaactgtgagacacaaaaggcataatgaaaatagtcatgatagtcccaaggcagatattgtttatgatgctttgagtgttggaggaagggaggattgatggtttaacagagatcatggcagttatgttcactcatataaatgttgatttagaagctggtggaagggtattttttgagtgacagctttattgagacaaagcaattctggagaacacccatatccttctctctgtatccatcagcagaagtgaagagggagccccaaagttccacttaaagtgtacaacttatggcttttagttcattcacggagttgtgcaaccatcaccaccatcaattttagaacattttcatcacctcaaagaggaatcccttgtccttttgtagttatggccatccctggaagagtacttttttttttttttcaactgaagcacccagagctcttgggttccctcttaactgctttctgtggaagtatagagggccatgtgagggaagccgttatccagagtacatgactgctagaaaatggagtttggggctccctcttcacttctgctgatagaagcataatggctaggggatgggtagtctcaccagagaatgtggagctttcagactctccttatatatgataaaaaggatttttcattgtagtggggaaaaggtggtttgatcaaatggcattgggaaacttagctcactggaaaaacagatctgtacctttcacactaatgaaatgcctgagatattaaaggtctaaatgtaaaattaaagtacatgaaaaacagaataatatatatgtaccctcggtttgaaatagactttaagcactaatgcataaccccaaagctgacattaggcttttatatggtggaaaacatcatagtcaatagataaatgagagactgacacaaagtgtttgcaacagatataataaaggactgtaattcgtgatattcaaagtactattacaaaccaataataatctgcaacttagaaaaatggactaatgtcccattcacaaaagatgcaataaaagcagttaatgaaaattatccaatatcactagaaatcaagaaatgcaaattaaagtgattatctactttttccccaaaagactgactaatcgagtgataacattcagtattggtgaatgtgtggaaacaagggaattccattgttgattacatatctattgctttatgtatataccctttgaattaatattccttggaaaccaacatatacaaaggtagataaatgtattagtggcaaaaaaattaatggtaaactattaaaacaacaagtgtccatcagggtaataaataaattaattatggtatatatccattcaataggaattatgcagctgttgaaaaaaaatcaatgtgtgtagtcatagaaagatagctgtgctatactaaatgaaaaattgcagacctgtattgtagtataggcccataattgtgatatcaaaaataaaaatcaaaatatatattatagtaggcatttgtttttctctgcccagtttcccttgcctcctccttttggctgcactatctcatcttttccttttgagtaactggccataccctaccatatgtttttgatggacgtggccaataaaattgtctctgaatttcaaaaggcatttggatctgtgtcatccaatggcaactccctaaaagctgatgcagttattcttttgattggtccttggaaccaccctggtttttgtactttccaagtctgtgattcctcaaactacccattgtctttccggtacttgatttttgcctcctgttggtcagttgcttgcaagtaaagaaacaatcatacagaatttggtacgaagattgggtaatgggcattagaatctttggaaaaatcaggtattgggagttgctttttggatgagatggggcgaataagacttatattctagactggaaagcatctcatggtgtgcgatgagcaaacgcctgattattcattatagtcacctgggatgaatagaggtctagggttctggataatgataatttaaggaggatggagaatgctgaatccaaaaggtatatgtaatactggtatctaactgcttggaataacttaaagtttagctcttgaatttctagcattaaggcaaaaaaaattcacctaagggattttgtatgatattgttgaaagatgtcttacattgtttaaagtcatagggttaagatggctcataaccaaatttagagactatttttatgcattgttaaagtggaatgctggttaaattttatactttattcacaagagtcactgtgaattgaattgtgaattcagttctgaattgtgttcccaccagcaccaccaaatgctggcctctaccaccaccaaatttacttgttgaagtcctaaaccccaacatgactgtatttggacataaggcctttaagaaactaaggttaagttaggccataagagtgaggccctaatcccataggactagtgtccttataagaggaagagacaccagaggtttgtctctccacatgtgcacagaggaaatgctgtgtaaggacacaacaagaatgctgccatctgcaagccaggaggagagacctcaccaggaaccagccctgccagcaccttgatcttggacttttaatctccaggactgtgagaaaataaatgttggttgtttaagcca

SEQ ID NO: 202634 - DNA, 6601 bp, Homo sapiens
  Payload ID: 19960
  Gene Name: zinc finger protein 470
  Uniprot ID: Q6ECI4
  ENST ID: ENST00000391709
  CDS Start-End: 138-2291
agtgaggactgtgagtgaggacagaagaagctgaagggaagaaagcattttcagactttgattattagtgctacttggtttctcactacttctttttctccccagctctacaatcccagagtaaagctcttctccaaatgaagagccaggaagaggtagaggtggcaggaattaaactttgtaaagccatgtccctgggttcagtgactttcacagatgtggccatagacttttcccaagatgaatgggagtggctgaatcttgctcagagaagtttgtacaagaaggtgatgttagaaaactacaggaacctagtttcagtgggtctttgcatttctaaaccagatgtgatctccttactggagcaagagaaagacccttgggtgataaaaggagggatgaacagaggcctgtgcccagacttggagtgtgtgtgggtgaccaaatcattatctttaaaccaggatatttatgaagaaaaattacccccggcaatcataatggaaagacttaaaagctatgaccttgaatgttcaacattagggaaaaactggaaatgtgaagacttgtttgagagggagcttgtaaaccagaagacacattttaggcaagagaccatcactcatatagatactcttattgaaaaaagagatcactctaacaaatctgggacagtttttcatctgaatacattatcttatataaaacagatttttcccatggaagagagaatatttaattttcatacagataagaaaagcttaaaaacacattcagttgtgaaaaaacacaagcaagaccgtggagaaaagaaacttttaaaatgtaatgactgtgagaaaatattcagcaaaatctcaacccttactcttcaccaaagaattcatacaggagagaaaccctatgaatgtattgaatgtggaaaggcctttagccagagtgcccaccttgctcaacatcagagaatacacacaggagaaaaaccttttgaatgtactgaatgtgggaaagccttcagccagaatgctcatcttgttcaacaccagagagttcatactggagagaaaccttatcagtgtaagcagtgtaataaagcattcagccagcttgcacaccttgctcaacatcagagggtccacactggagagaaaccctatgaatgtattgaatgtgggaaggcttttagtgattgctcatccctagctcatcatcgaaggattcacactgggaaaagaccttatgaatgtattgactgtgggaaagctttcaggcagaatgcttctcttatacgtcatcggcgatattatcatactggagagaaaccctttgactgtattgattgtgggaaggctttcactgatcacataggacttattcagcataagagaactcatactggagagagaccttacaaatgtaatgtgtgtgggaaggcttttagccatggctcatctctgacagtacatcagagaattcatacaggagagaaaccttatgaatgcaatatctgtgagaaagccttcagccatcgtgggtctcttactcttcatcagagagttcatactggagagaaaccctatgaatgtaaagaatgtgggaaagctttccggcagagcacgcatctggctcatcatcagagaattcatactggagagaaaccttatgaatgtaaggaatgcagcaaaaccttcagccagaatgcacacctcgcgcaacatcagaaaatacacactggggagaaaccttatgaatgtaaggaatgtggtaaggccttcagtcagattgcacaccttgttcagcaccagagagttcatactggtgagaagccttacgaatgtattgaatgtgggaaggcctttagtgatggctcatatcttgttcaacatcagagactccacagtggcaaaagaccgtatgaatgtcttgaatgtgggaaggcattcaggcagagggcatccttgatttgtcatcagagatgtcatactggtgagaaaccttatgaatgtaatgtttgtgggaaagcctttagccatcgtaaatcccttactctgcatcagagaattcatacaggagagaaaccttatgagtgtaaggaatgtagcaaagccttcagccaggttgcccatcttactctacataagagaattcatactggagaaaggccctatgagtgtaaagaatgtggaaaagccttcaggcagagtgtacatcttgctcatcatcagcgaattcataccggagagtcatcagttattctctcctctgccctcccataccaccaagtcctatagattcaatctcgtaaatgcttctagcatccatctgcttttttccagcacatgtcccatcatcatagtccaagacgcaaccatctcatctggatttctgcagtagcataactgttgccccttttgcttctatcaactacatgtttaacactgtaggcagcctaaccttttaaaaataaaaatacataatttatgttattttcccatttaaaacacttgatttgaaaaatatattaactaatccatttcaaggatttagcacacactggcatatagttattgctaaataaatgctagccattaaggtaaaggtttccttacaaactatcatattaagcagcaagtaaaccaaacagtaagtctaagactaagattttagagcagacagaagactactctcctggtagagaggaaagatgaacaaactcagaattgaaagatttatggtacacaaggtaacatggtggcttatcactccctctgtgacattgttgatgagcaactctcactttacctgacactgagaagtgagaatcagccaattagaacaaaagcttttagctgggtgcggtggctcatgcctgtagtcccagcactttgggaggctgaggcaggcagattgcttgagctcaggagttcgagaccaacctgagcaacatggtgaaaccctgtctctacaaaaaatacagaaattagccaggcgtggtggtgcacacctgtagtcctagctactcaggaggctgaagcaggaggattgcttgagcccaggaggtagaggttgcagtgagtcatgatcacaccactgcaattccagctgggcagcagagccagacactgtctcaaggaaaaacaaagaacaaaagcatttggtagaatgtaggactaaccagggtaggtagtagtaaaccaaaagtaacaagccaaaaaaacttgaatagattaatagccatgaaacactgaaaagggtagttcaatactttggcctttataaaagtaccacagacaattcgtgtggtatttaaattgttctagcataaaataaaatgcaataagaccttccatcttgttccatgagattgacaagacatgccaaaacataaaaatatgtacactgcaattagtttctgaatgtagatgttacaacttaaacttatttttaaaatatttaaaaataggaaggctagacatgcctctgtatagaaaatctgataaaaatatttctccctaaattgtaaattcattgatattccagtaaaaatttccatatttttttagttgagaagctgattctgatcatctgtagaattttgattttaacgaggaatgtagtttacattaggaatgtagtactaatactaattgaacatttgctaatgtttcacacactattttaggtgctgggggatacagtaaggtacaagatggacaaaaatacgtgctcttacagatctagtagaacagaaaaaattaaatgcatgctatgtgataagtatatgatatgtcccataaagagaaatgatataaaaaagaagctagggagtgctggatcaggcaccttactatccccagaacatgttggtattagaggatgagggaagaactagaggtaactgtgagacacaaaaggcataatgaaaatagtcatgatagtcccaaggcagatattgtttatgatgctttgagtgttggaggaagggaggattgatggtttaacagagatcatggcagttatgttcactcatataaatgttgatttagaagctggtggaagggtattttttgagtgacagctttattgagacaaagcaattctggagaacacccatatccttctctctgtatccatcagcagaagtgaagagggagccccaaagttccacttaaagtgtacaacttatggcttttagttcattcacggagttgtgcaaccatcaccaccatcaattttagaacattttcatcacctcaaagaggaatcccttgtccttttgtagttatggccatccctggaagagtacttttttttttttttcaactgaagcacccagagctcttgggttccctcttaactgctttctgtggaagtatagagggccatgtgagggaagccgttatccagagtacatgactgctagaaaatggagtttggggctccctcttcacttctgctgatagaagcataatggctaggggatgggtagtctcaccagagaatgtggagctttcagactctccttatatatgataaaaaggatttttcattgtagtggggaaaaggtggtttgatcaaatggcattgggaaacttagctcactggaaaaacagatctgtacctttcacactaatgaaatgcctgagatattaaaggtctaaatgtaaaattaaagtacatgaaaaacagaataatatatatgtaccctcggtttgaaatagactttaagcactaatgcataaccccaaagctgacattaggcttttatatggtggaaaacatcatagtcaatagataaatgagagactgacacaaagtgtttgcaacagatataataaaggactgtaattcgtgatattcaaagtactattacaaaccaataataatctgcaacttagaaaaatggactaatgtcccattcacaaaagatgcaataaaagcagttaatgaaaattatccaatatcactagaaatcaagaaatgcaaattaaagtgattatctactttttccccaaaagactgactaatcgagtgataacattcagtattggtgaatgtgtggaaacaagggaattccattgttgattacatatctattgctttatgtatataccctttgaattaatattccttggaaaccaacatatacaaaggtagataaatgtattagtggcaaaaaaattaatggtaaactattaaaacaacaagtgtccatcagggtaataaataaattaattatggtatatatccattcaataggaattatgcagctgttgaaaaaaaatcaatgtgtgtagtcatagaaagatagctgtgctatactaaatgaaaaattgcagacctgtattgtagtataggcccataattgtgatatcaaaaataaaaatcaaaatatatattatagtaggcatttgtttttctctgcccagtttcccttgcctcctccttttggctgcactatctcatcttttccttttgagtaactggccataccctaccatatgtttttgatggacgtggccaataaaattgtctctgaatttcaaaaggcatttggatctgtgtcatccaatggcaactccctaaaagctgatgcagttattcttttgattggtccttggaaccaccctggtttttgtactttccaagtctgtgattcctcaaactacccattgtctttccggtacttgatttttgcctcctgttggtcagttgcttgcaagtaaagaaacaatcatacagaatttggtacgaagattgggtaatgggcattagaatctttggaaaaatcaggtattgggagttgctttttggatgagatggggcgaataagacttatattctagactggaaagcatctcatggtgtgcgatgagcaaacgcctgattattcattatagtcacctgggatgaatagaggtctagggttctggataatgataatttaaggaggatggagaatgctgaatccaaaaggtatatgtaatactggtatctaactgcttggaataacttaaagtttagctcttgaatttctagcattaaggcaaaaaaaattcacctaagggattttgtatgatattgttgaaagatgtcttacattgtttaaagtcatagggttaagatggctcataaccaaatttagagactatttttatgcattgttaaagtggaatgctggttaaattttatactttattcacaagagtcactgtgaattgaattgtgaattcagttctgaattgtgttcccaccagcaccaccaaatgctggcctctaccaccaccaaatttacttgttgaagtcctaaaccccaacatgactgtatttggacataaggcctttaagaaactaaggttaagttaggccataagagtgaggccctaatcccataggactagtgtccttataagaggaagagacaccagaggtttgtctctccacatgtgcacagaggaaatgctgtgtaaggacacaacaagaatgctgccatctgcaagccaggaggagagacctcaccaggaaccagccctgccagcaccttgatcttggacttttaatctccaggactgtgagaaaataaatgttggttgtttaagcc

SEQ ID NO: 202635 - DNA, 1640 bp, Homo sapiens
  Payload ID: 19960
  Gene Name: zinc finger protein 470
  ENST ID: ENST00000601902
  CDS Start-End: 672-980
gggaggtctgggcggggcagcggccgaggctggactggggcgcggcgggggcggtgtcctggttcctgtgtgggcggcgggcgtgagcgtgcgcgtgtggcctggtggctgtgagtgcccatacgtggtgagcgtgcggtgctgtgctgaggaggggcgagcgcgcgcggggatggcggcccggtgtgtgactgtccggtgcgtggccgcgaatctgcgcctgcgtgcatggcccggcggcgtgcggaaggcggtgtgtgttggaatgagtgaagcactttaagtggccaagagcaggaaacccggccggaggaggcttaccccgttctcccctgtatcgactgcgtagagcccagtgtgggcaaagtcctagagcccggggaagttgcccgggcggggcagcctcggctgaagcatttcctgtcagccctatctggaaggggcagagcccaggacagggctccatgtccacaggacggcgaggagcgaagaccatggggactgagtacacagatgaagacacagaagcatagagaggataagtaatcactagcaagtggaagaaccgggattcagatccagaacaggctgactccagagtcactggctgtcatgtagtttcctcaactactgcctcagctctacaatcccagagtaaagctcttctccaaatgaagagccaggaagaggtagaggtggcaggaattaaactttgtaaagccatgtccctgggttcagtgactttcacagatgtggccatagacttttcccaagatgaatgggagtggctgaatcttgctcagagaagtttgtacaagaaggtgatgttagaaaactacaggaacctagtttcagtgggtctttgcatttctaaaccagatgtgatctccttactggagcaagagaaagacccttgggtgataaaaggagggatgaacagaggcctgtgcccagatatcctgaaaatgccacatcagtaagttgaacaagaagaacgggagctttaagaacaagattcaagatgaaacaacacaagtgttgaatattttataaatagctaaaggcagaaaacgttgccaattatctcagacttccagaaagtgaaaacaaacaaacaaacaaactaaagtcttaattgaaaagaagaaagaaagacatgaagaaagaaatagagaatgcatgttgagagtggggacaggtaagtaccagctggactcttaccctgggctgttggtcctgaggatgcggtataggttcagcctaggcactggctccaccccttgaaatagtttggatatttgtccctgcccaaaatctcatgttagattgtaatccccagtgctggagatggggcctggtgggaggtgtttggatcatggggcaggtccctcatggcacggtgctgtcttctcgataatgagtgagttcttgtgagattaggtcctttaaaaatgtgtggcacatttcgccccttctgtcttgctcatgtgtttttgccatgtgatgtgcggctcccctttcaccttttgccatgattgtaagcctcctgtggcctccccagaagtcaagcaaatgccaatgtcatgtttgctgtacagcctgcagaactgtgagccaattaaacctcttttccttataaa

SEQ ID NO: 202636 - DNA, 433 bp, Homo sapiens
  Payload ID: 19960
  Gene Name: zinc finger protein 470
  ENST ID: ENST00000594953
  CDS Start-End: 1-140
tttctaaaccagatgtgatctccttactggagcaagagaaagacccttgggtgataaaaggagggatgaacagaggcctgtgcccagcaccaccaaatgctggcctctaccaccaccaaatttacttgttgaagtcctaaaccccaacatgactgtatttggacataaggcctttaagaaactaaggttaagttaggccataagagtgaggccctaatcccataggactagtgtccttataagaggaagagacaccagaggtttgtctctccacatgtgcacagaggaaatgctgtgtaaggacacaacaagaatgctgccatctgcaagccaggaggagagacctcaccaggaaccagccctgccagcaccttgatcttggacttttaatctccaggactgtgagaaaataaatgttggttgtttaagccac

SEQ ID NO: 202637 - DNA, 6287 bp, Homo sapiens
  Payload ID: 19961
  Gene Name: zinc finger protein 471
  Uniprot ID: Q9BX82
  ENST ID: ENST00000308031
  CDS Start-End: 134-2014
cctgcgcgatggggggttccagcgtcgactcacggagtccttcggatgagagcgtctgggtgccagacgaggccggggccttgccctcccaagacactgttcttcaagagaaagaccagaagagaaggcaaaaatgaatgttgaagtagtaaaagtcatgccccaggacttagtgacattcaaggatgtggcaatagatttttcccaggaagaatggcaatggatgaaccctgctcagaagcgtttatacaggagtatgatgttggagaactatcagagcctggtatcacttggtctttgcatttctaagccatatgtgatctccttattggagcaagggagagagccttgggagatgacgagtgagatgacaagaagcccattctcagattgggaatctatatatgtgacacaggaattacctctgaagcagttcatgtatgatgatgcatgcatggagggaattactagctatggacttgagtgttccacttttgaagaaaattggaaatgggaagacctttttgagaagcagatgggaagtcatgagatgtttagcaagaaagaaataatcactcataaagaaaccatcactaaggaaacagaattcaaatatactaaatttgggaaatgtatccatctggaaaacatagaagagagtatttataatcacacatcagataaaaaaagcttctccaaaaattctatggtaataaaacacaagaaagtctatgtaggaaagaagctttttaaatgtaatgaatgtgacaaaaccttcacccatagctcatcccttactgttcattttagaattcatactggtgaaaaaccatatgcatgtgaggaatgtggaaaagccttcaagcaaaggcaacaccttgctcaacatcacagaacacatactggagagaaactctttgaatgtaaagaatgtaggaaagccttcaaacaaagtgaacaccttattcagcatcaaagaattcatactggagaaaaaccatataaatgtaaggaatgcagaaaagccttcagacagcctgcacaccttgctcagcatcagagaattcatactggagagaaaccctatgaatgtaaagaatgtggcaaagccttcagtgatggctcgtcttttgctcgacatcagagatgtcacactggcaaaagaccctatgaatgtattgagtgtgggaaggcttttaggtataacacatcttttattcgtcactggaggagttatcatactggagagaagccttttaattgcattgattgtgggaaagccttcagtgttcacataggacttattctgcataggagaattcatacaggagagaaaccttacaaatgtggtgtgtgtggaaaaaccttcagctcgggttcatcccgtactgtacatcagagaattcatacaggagagaaaccttatgaatgtgatatatgtgggaaagattttagccatcatgcatcactcactcagcatcaaagagtacattctggagagaaaccgtatgaatgcaaggaatgtgggaaagcctttaggcagaatgtacaccttgttagtcatttgagaattcatactggtgaaaaaccctatgaatgtaaagaatgtggaaaagcttttagaatcagttcacagctggctactcatcagagaattcatactggagagaagccttatgaatgtattgaatgtggaaatgctttcaaacagagatcacaccttgcccaacatcagaaaactcatacaggagagaaaccttatgagtgtaatgaatgcgggaaagccttcagccaaacttccaatcttactcaacatcaaagaattcatactggagagaaaccctataaatgtactgaatgtggaaaggcttttagtgatagctcatcctgtgctcagcatcaaagactccacactggccaaaggccctatcagtgttttgaatgtgggaaggcgttcagaagaaagttatccttaatttgtcatcaaagaagtcatactggagaagaaccttaagaatgtagtgcatgtggccaagcctttagttatcaccaatcccctactgttaatcagagatgtcccactggataaaaaacatataaatgtaagaaatgtagaaaaaccttcagccaggaggctggcaagatggccgaataggaacagctctgatctgcagttcccagtgagatcaacgcagaaggtgggtgctttctgtatttccagctgaggtacctggctcatctcattgggactggttagacagtgggtgcagcccacggagggtgagctgaagcagggtggggcgtaacctcacctgggaagtgcaaggagtcggggatctccctcccctagccaagggaagccatgagggactgtgccatgaggaatggtgcactccggcacagatactacgcttttcccatggtcttcgcaacccacagaccaggagatcccccttgggtgcctatgccaccaaggccctgggtttcaagcacaaaactgggcggccattcgggcagacaccgagctagctgtaggagtttttttgatagcccagtggcacctggaatgccagtgaaacagaaccgcttactcccttgttaagggggctgaagccggggagccaagtggttcccatgcccactgagcccagcaagctaagatccactggcttggaattctccctgccagcacagcagtctgaagtcaacctgggatgatcaagcttggtggggggaggggcgccaaccattaccaaagcttgaataggtggttttcccctcacagcgtaaacaaagccatggggaagttccagctgagcagagccctccacagctcagcaaagcctctgtagccagactgcctctctagattcctcctctctgggcagcgcatctttgaaaaaagtgcagataaaaccctcatctccctgggacaaagcacgtgggggaaaggggtggctgtgggcacagcttcagcagacttaaacattcctgcctgccagctctgaagagagcagcagttcttccagcacagcgcttgagctctgctaagggacagactgcctcctcaagtgggtccctgacccccatgcctcctgacggggagacacctcccagcaggggtccacagacacctcatacaggagagctctggctggcatctggtgggtgcccctctgggacaaagcttccagaggaaggaacaggcagcaatctttgctgttctgcagcctccaccggtgatacccaggcagatatggtctggagtggacctccagcaaactccagcagacctgcagccgaggggcctcactgttagaaggaaaactaacaggaatataatcaacatcaacaaaggacatccacacagaaaccccatctgaaggttaccagcatcaaagaccaaaggtagataaattcacgaagatgaggagaaaccagtgcaaaaagcctgaaaattccaaaaaccagaatgcctcttctcctccaaaggatcacaactccttgccggcaagggaacaaaactggatagagaatgagtttgacaaattgacagaagtaggcttcagaaggtgggaaataacaaactcctctgagctaaaggagcatgttctaacccaatgcaaggaagctaagaaccttgaaaaaaggttagaggaattgctaactagaataaccagtttagagaagaacataaatgacctgatggagctgaaaaacacagcatgagaacttcgtgaagcatacagaagaaaaaccttcagccagattgaatgctttacagggaagaattcatactgcagagcggtcttaacaatgtaaagaatgtgcaaatgtcctcagacaagatgcacaccttgctcattagtgagttcatttcaggcagccagctcttcctcacccactacatcaccaagtcctgtggatatatctgctaaatatttttggaatttatccacttcttttggttccccagtccaaaacacagtcatttcacctggactatttcaatcattacacaggtgtccaaccttttgtcttccctgggccacattggaagaagaaaaattgtcttgtgccacacatacaatacactaacattaacaatagctgatgagctaagaaaaaaaaaaagtctgtgcatagttttagtgatacaccacctccgataagcaaaaaagtcctcacattcaatgggttgcatacccatgaattctaaaacttcatcctcttttgtccctttcgagttaacattacagccacagtgacctttcaaaaatgcaaattaagttactcttaaaactctagttaaaatacttgatgtacataaagtgcttagcaaaatgaccaactcatactaagtgcttagtaaatgttagataagtattctccagaattgatgtaaattatttttaaacagtgcattcttgaaagcagtatggcagtcataaaaattttggaaccaaaacagtatctttttttaagctaaaaaaaaagttttaaatggtgtctttctatgttgcccagggtggtctcaaactcctgtgctcaagtgaccctcccacctcattctcaagtggctgcaattacaggcaaccagcctgacttaaaacagtatcttaaggtagatggtgattagcacatgtagtatgcttaacatttaatattataataagacatcacagcggctgtctcatgattaaggctgtgttcccttgttggtgaggaaattaattatgacttgataaatagaacatgttttaagaagtggctatatagctctggataaaacgaacaaaagaattagaattcctgcggggaatatatacaagactttatttagtcaagtaaaaaaaaatcactaatgtttaactgaagaaagagaaattgaataatatagttctatttcaacatgtgggttcacagatttattctaaccttccaagtaaagttgttccactagtaaagttgttctggagtatattttttttaaaaaaaacacttaaaatgttccacttctttcatgaggctaagtcaactctgatatcaaaccaaggggaaagaaatgaaattataggtgagtttacttagttatatacaaaaggaaattattagcctctgctgatggagaacagaggctgtgaataaatggagatccataacatgatcctacatgaatgtttcaatattgtaatcctgtaagttacttttacattgacagttctgaaattcatgttgagtgttaattaggcaggaatcagaagggaggttttgtagaaggtcgtatccatgggttttttatatttgaaaagtgttttcgatgtatcattgggggagattaaatgtctttgacagttgtccaactagaaataaagtcagcatcccatttgactccttacacagaagttcattctatactcattacagatgtaagaggttaagatggtagaggagaatgtagagtatttctgtgcctttaggttcaggaggtctttgataagcaggacaaggtccagaagccatgaagagagaatgacaggactgtgtagaagatttaaacctttttcatggcgtaagatactgtatgcaaagttaaaaggcatatgacaggctgagagatatcttaaacatacattagaaaggatatagcccttgaaaaagggctgttggaaagcagcaaggataaggtgcacagtcttgcagagcatgtcaacaaaatttattggatgaagaaattaaaatggttaaatagaagaagttctcaacctcactaatgatcagataagtgcagattgtaaaagtcctcatccccaccaacacaaaccagcagaaattttatgtgaatgtgaagtttggataatatccagtattgtcgcaggtgtgagaaaccgtattttcaaatattgagagggtaaattagaggaaagccattttagagggcaatgtggtgttacctgtcagcattttgaatataattaccctttgccacaattctacacctagtcagttatgttctcaaaaagcacaagtgcagaaatatagatgcataagcaaatgtgttgcagaattgtgaaaaatttggaaaaaatgtttagtgctattaaagttatgggttacttaagttacagaaaatcagtttagtagatcactgtgtagttacggaaaatgagatggatctctactcaaagatgtcttgcagtttatgaactgagatgtaacttcatgactaacatgatgacatcgttattaactacataaactttataaagcttaaaaaatgcattcat

SEQ ID NO: 202638 - DNA, 5859 bp, Homo sapiens
  Payload ID: 19961
  Gene Name: zinc finger protein 471
  Uniprot ID: Q9BX82
  ENST ID: ENST00000591537
  CDS Start-End: 127-870
gatggggggttccagcgtcgactcacggagtccttcggatgagagcgtctgggtgccagacgaggccggggccttgccctcccaagacactgttcttcaagagaaagaccagaagagaaggcaaaaatgaatgttgaagtagtaaaagtcatgccccaggacttagtgacattcaaggatgtggcaatagatttttcccaggaagaatggcaatggatgaaccctgctcagaagcgtttatacaggagtatgatgttggagaactatcagagcctggtatcacttggtctttgcatttctaagccatatgtgatctccttattggagcaagggagagagccttgggagatgacgagtgagatgacaagaagcccattctcagaattcatactggtgaaaaaccatatgcatgtgaggaatgtggaaaagccttcaagcaaaggcaacaccttgctcaacatcacagaacacatactggagagaaactctttgaatgtaaagaatgtaggaaagccttcaaacaaagtgaacaccttattcagcatcaaagaattcatactggagaaaaaccatataaatgtaaggaatgcagaaaagccttcagacagcctgcacaccttgctcagcatcagagaattcatactggagagaaaccctatgaatgtaaagaatgtggcaaagccttcagtgatggctcgtcttttgctcgacatcagagatgtcacactggcaaaagaccctatgaatgtattgagtgtgggaaggcttttaggtataacacatcttttattcgtcactggaggagttatcatactggagagaagccttttaattgcattgattgtgggaaagccttcagtgttcacataggacttattctgcataggagaattcatacaggagagaaaccttacaaatgtggtgtgtgtggaaaaaccttcagctcgggttcatcccgtactgtacatcagagaattcatacaggagagaaaccttatgaatgtgatatatgtgggaaagattttagccatcatgcatcactcactcagcatcaaagagtacattctggagagaaaccgtatgaatgcaaggaatgtgggaaagcctttaggcagaatgtacaccttgttagtcatttgagaattcatactggtgaaaaaccctatgaatgtaaagaatgtggaaaagcttttagaatcagttcacagctggctactcatcagagaattcatactggagagaagccttatgaatgtattgaatgtggaaatgctttcaaacagagatcacaccttgcccaacatcagaaaactcatacaggagagaaaccttatgagtgtaatgaatgcgggaaagccttcagccaaacttccaatcttactcaacatcaaagaattcatactggagagaaaccctataaatgtactgaatgtggaaaggcttttagtgatagctcatcctgtgctcagcatcaaagactccacactggccaaaggccctatcagtgttttgaatgtgggaaggcgttcagaagaaagttatccttaatttgtcatcaaagaagtcatactggagaagaaccttaagaatgtagtgcatgtggccaagcctttagttatcaccaatcccctactgttaatcagagatgtcccactggataaaaaacatataaatgtaagaaatgtagaaaaaccttcagccaggaggctggcaagatggccgaataggaacagctctgatctgcagttcccagtgagatcaacgcagaaggtgggtgctttctgtatttccagctgaggtacctggctcatctcattgggactggttagacagtgggtgcagcccacggagggtgagctgaagcagggtggggcgtaacctcacctgggaagtgcaaggagtcggggatctccctcccctagccaagggaagccatgagggactgtgccatgaggaatggtgcactccggcacagatactacgcttttcccatggtcttcgcaacccacagaccaggagatcccccttgggtgcctatgccaccaaggccctgggtttcaagcacaaaactgggcggccattcgggcagacaccgagctagctgtaggagtttttttgatagcccagtggcacctggaatgccagtgaaacagaaccgcttactcccttgttaagggggctgaagccggggagccaagtggttcccatgcccactgagcccagcaagctaagatccactggcttggaattctccctgccagcacagcagtctgaagtcaacctgggatgatcaagcttggtggggggaggggcgccaaccattaccaaagcttgaataggtggttttcccctcacagcgtaaacaaagccatggggaagttccagctgagcagagccctccacagctcagcaaagcctctgtagccagactgcctctctagattcctcctctctgggcagcgcatctttgaaaaaagtgcagataaaaccctcatctccctgggacaaagcacgtgggggaaaggggtggctgtgggcacagcttcagcagacttaaacattcctgcctgccagctctgaagagagcagcagttcttccagcacagcgcttgagctctgctaagggacagactgcctcctcaagtgggtccctgacccccatgcctcctgacggggagacacctcccagcaggggtccacagacacctcatacaggagagctctggctggcatctggtgggtgcccctctgggacaaagcttccagaggaaggaacaggcagcaatctttgctgttctgcagcctccaccggtgatacccaggcagatatggtctggagtggacctccagcaaactccagcagacctgcagccgaggggcctcactgttagaaggaaaactaacaggaatataatcaacatcaacaaaggacatccacacagaaaccccatctgaaggttaccagcatcaaagaccaaaggtagataaattcacgaagatgaggagaaaccagtgcaaaaagcctgaaaattccaaaaaccagaatgcctcttctcctccaaaggatcacaactccttgccggcaagggaacaaaactggatagagaatgagtttgacaaattgacagaagtaggcttcagaaggtgggaaataacaaactcctctgagctaaaggagcatgttctaacccaatgcaaggaagctaagaaccttgaaaaaaggttagaggaattgctaactagaataaccagtttagagaagaacataaatgacctgatggagctgaaaaacacagcatgagaacttcgtgaagcatacagaagaaaaaccttcagccagattgaatgctttacagggaagaattcatactgcagagcggtcttaacaatgtaaagaatgtgcaaatgtcctcagacaagatgcacaccttgctcattagtgagttcatttcaggcagccagctcttcctcacccactacatcaccaagtcctgtggatatatctgctaaatatttttggaatttatccacttcttttggttccccagtccaaaacacagtcatttcacctggactatttcaatcattacacaggtgtccaaccttttgtcttccctgggccacattggaagaagaaaaattgtcttgtgccacacatacaatacactaacattaacaatagctgatgagctaagaaaaaaaaaaagtctgtgcatagttttagtgatacaccacctccgataagcaaaaaagtcctcacattcaatgggttgcatacccatgaattctaaaacttcatcctcttttgtccctttcgagttaacattacagccacagtgacctttcaaaaatgcaaattaagttactcttaaaactctagttaaaatacttgatgtacataaagtgcttagcaaaatgaccaactcatactaagtgcttagtaaatgttagataagtattctccagaattgatgtaaattatttttaaacagtgcattcttgaaagcagtatggcagtcataaaaattttggaaccaaaacagtatctttttttaagctaaaaaaaaagttttaaatggtgtctttctatgttgcccagggtggtctcaaactcctgtgctcaagtgaccctcccacctcattctcaagtggctgcaattacaggcaaccagcctgacttaaaacagtatcttaaggtagatggtgattagcacatgtagtatgcttaacatttaatattataataagacatcacagcggctgtctcatgattaaggctgtgttcccttgttggtgaggaaattaattatgacttgataaatagaacatgttttaagaagtggctatatagctctggataaaacgaacaaaagaattagaattcctgcggggaatatatacaagactttatttagtcaagtaaaaaaaaatcactaatgtttaactgaagaaagagaaattgaataatatagttctatttcaacatgtgggttcacagatttattctaaccttccaagtaaagttgttccactagtaaagttgttctggagtatattttttttaaaaaaaacacttaaaatgttccacttctttcatgaggctaagtcaactctgatatcaaaccaaggggaaagaaatgaaattataggtgagtttacttagttatatacaaaaggaaattattagcctctgctgatggagaacagaggctgtgaataaatggagatccataacatgatcctacatgaatgtttcaatattgtaatcctgtaagttacttttacattgacagttctgaaattcatgttgagtgttaattaggcaggaatcagaagggaggttttgtagaaggtcgtatccatgggttttttatatttgaaaagtgttttcgatgtatcattgggggagattaaatgtctttgacagttgtccaactagaaataaagtcagcatcccatttgactccttacacagaagttcattctatactcattacagatgtaagaggttaagatggtagaggagaatgtagagtatttctgtgcctttaggttcaggaggtctttgataagcaggacaaggtccagaagccatgaagagagaatgacaggactgtgtagaagatttaaacctttttcatggcgtaagatactgtatgcaaagttaaaaggcatatgacaggctgagagatatcttaaacatacattagaaaggatatagcccttgaaaaagggctgttggaaagcagcaaggataaggtgcacagtcttgcagagcatgtcaacaaaatttattggatgaagaaattaaaatggttaaatagaagaagttctcaacctcactaatgatcagataagtgcagattgtaaaagtcctcatccccaccaacacaaaccagcagaaattttatgtgaatgtgaagtttggataatatccagtattgtcgcaggtgtgagaaaccgtattttcaaatattgagagggtaaattagaggaaagccattttagagggcaatgtggtgttacctgtcagcattttgaatataattaccctttgccacaattctacacctagtcagttatgttctcaaaaagcacaagtgcagaaatatagatgcataagcaaatgtgttgcagaattgtgaaaaatttggaaaaaatgtttagtgctattaaagttatgggttacttaagttacagaaaatcagtttagtagatcactgtgtagttacggaaaatgagatggatctctactcaaagatgtcttgcagtttatgaactgagatgtaacttcatgactaacatgatgacatcgttattaactacataaactttataaagcttaaaaaatgcattcat

SEQ ID NO: 202639 - DNA, 564 bp, Homo sapiens
  Payload ID: 19961
  Gene Name: zinc finger protein 471
  ENST ID: ENST00000591759
  CDS Start-End: 335-564
cctccgtgtgaccatgaaacctgtgttagtgtttgtatgtcaccctgtatacccataattgtggccctgtatgactgctgtgtatggagagactacttggaagattgataggattggattctttatgagtgtggctgtttggaattgtgtgttgccgggataggaaatgtggaatagaattcctgtccccagtccaagggtttcagtaagaagcaaagctggggtgactgaagctcctaactgaagcaggagacaccctcacttctgtgtgacaggaggccttgccctcccaagacactgttcttcaagagaaagaccagaagagaaggcaaaaatgaatgttgaagtagtaaaagtcatgccccaggacttagtgacattcaaggatgtggcaatagatttttcccaggaagaatggcaatggatgaaccctgctcagaagcgtttatacaggagtatgatgttggagaactatcagagcctggtatcacttggtctttgcatttctaagccatatgtgatctccttattggagcaagggagagagccttgggagatgacgag

SEQ ID NO: 202640 - DNA, 4688 bp, Homo sapiens
  Payload ID: 19962
  Gene Name: zinc finger protein 473
  Uniprot ID: Q8WTR7
  ENST ID: ENST00000270617
  CDS Start-End: 360-2975
gggaaatagagtcctggcgctgccgcggaggatcctgggtgcagccgctcagagaagcttctcgcgcacaggaagtcgctgcgaggaggcgcgtgtgcggggagttgaatctcccgctcccttgaggctggggttgcgtctgttgacgcggccgactacaatcccgagggagactcacattgggacttgtcctcctcctcctggacattttgggggctcgtcagcatggacagcgagtcagccatgggtggaagggaggctttctcacagctcccttgtgcttcccacagccctgccagccgggaacacggaggggaaggaggaggagcttaaaagaggctactgaaccccagttggccatggctgaggaatttgtgaccctcaaggatgtcggcatggacttcaccttgggagactgggagcagctcgggctggaacagggggacacgttctgggacacagcgttggacaattgccaggacctcttcctgctggaccccccaagacccaacctgacctcccacccagatggcagtgaagatctggagcctctggcaggaggaagcccagaagcaacaagccctgatgtgactgagaccaagaactctcctctgatggaggatttcttcgaagaaggattctcccaggagattatagagatgttatccaaggatggcttctggaactccaatttcggagaagcctgtatagaggacacctggttagatagtttgctaggcgatccagaaagtcttctgaggtctgatattgccaccaacggggaaagtcccacggaatgcaagagtcatgaattaaagagaggactcagtcctgtgtccaccgtttccacgggagaagattccatggtgcataatgtttctgaaaagaccctcacaccagctaagtctaaggaatataggggtgagtttttctcctactccgaccacagccagcaggattctgttcaggaaggggagaaaccatatcaatgtagtgaatgtgggaaaagcttcagtgggagttaccgtcttacccagcactggatcactcatactagggagaaacccactgtccatcaagagtgtgagcaaggttttgaccggaatgcttccctttctgtgtatccgaaaactcacacgggctacaaattctatgtgtgtaatgaatatgggacaacttttagtcagagtacatacctgtggcatcagaaaactcacactggagaaaaaccatgtaagagtcaagatagtgaccacccacccagtcatgacacacagcctggtgagcatcagaaaactcacacagatagtaagtcctacaactgtaacgaatgcggcaaggcttttacccggatcttccaccttactcggcaccagaagatccacactcggaaacgctatgagtgttccaagtgccaggcgaccttcaacttgagaaaacacctcatccaacatcagaaaactcacgctgcaaaaactacctctgagtgtcaggagtgtgggaagatttttaggcacagttcgctgctcattgaacaccaggctcttcatgctggagaggagccttataagtgtaacgaacgtgggaaatccttcaggcataactctaccctaaagatccatcagagggttcacagtggagagaagccttacaaatgcagtgagtgtgggaaggccttccaccggcacactcaccttaatgaacatcggcgaattcatacaggctacagaccccacaaatgtcaggaatgcgtcaggagtttcagccggccctcacatctgatgcgacatcaggccattcacaccgcagaaaagccctatagctgtgctgaatgcaaggagactttcagcgataacaatcgccttgtgcaacaccagaaaatgcacactgtcaaaaccccatatgaatgtcaggagtgcggagaacgcttcatttgcggctcaaccctgaagtgccacgagagtgttcacgccagagaaaaacaaggattttttgtgagtgggaagatcttggatcagaacccagaacagaaagagaagtgctttaagtgtaacaaatgtgagaaaacctttagctgcagcaaatacctaactcagcacgagaggattcacaccaggggagtgaagccctttgaatgtgaccagtgtgggaaagcctttggccaaagtactcggctcattcaccatcaaagaatccactctagagtgaggctgtataaatggggtgagcaagggaaagccatcagcagtgcctcccttatcaaacttcagtccttccacacaaaggagcacccttttaaatgtaacgaatgcggaaagaccttcagccacagtgcacacctctcaaaacatcagttaattcacgctggagagaatccctttaaatgtagtaagtgtgacagagtcttcacccagagaaactaccttgttcagcatgagcgaactcatgccagaaagaagccgttggtgtgtaacgaatgcgggaaaacgttccgtcagagctcatgcctttctaagcatcagagaattcactcaggtgagaagccctatgtatgtgattactgcgggaaggccttcggcctgagtgctgagcttgtccgccaccagagaattcacactggagaaaagccttatgtttgtcaggaatgcgggaaagccttcacccagagctcatgcctttctattcaccggagagttcacactggggagaagccctacagatgtggtgaatgtgggaaagcctttgcccagaaagcaaatctaacacagcaccagagaattcacacaggggagaagccttactcctgtaatgtgtgtggcaaagcttttgtcctcagtgcccatctcaaccagcacctgagagttcacacccaggagacactttatcagtgtcaacgttgccagaaagcctttcggtgccactcgagcctcagccgccatcagcgtgtacacaacaagcagcaatactgcctgtagccattgggtggcagcagagtcccagaatatgagaccgttactcggatgttgaaagttggaaactatcccattgcaagtttctctccaaataaatgcatctaaagattgattagaaagtttgtgcgcatgtttttcattataacaatgaaaacacaaaagtggagaagctgtacaacgtcaggattcagaggtaggctctggagccagtctaccttgagttaaatcccacctctgccatctactacctaagtgaccttgggaaggtcagaaaaatctctcagggcctcggtgtccttatctgtaaaatgggcatcacctacctcagagggcttttctgaggattaaataaataaatgtgaagcacttagaactgatggccagcacatgagggctcaccaagtgtaagccacaaatacacatcagctatagcacaaatatacttgtgttacaagaaaggaattagtaatctgtgtttactgtagttaatgttcttacaatgtatcgcttttaatttaagttttccttttttacagtttttctccagcactttactcttcttaagtgcctggccttttttgtccctttatctctcctggtttttttcttaagccccagaaagccaaaaagaacatgtaaactcttcacctcaactagctacaaccttccactcctaacctcccaagcttctcacttaaagaggactccctatcccacaaacacatgctccctcttcctatgaccttcctccatttaacagtgttggttatgcaataagacacccaatttttcatgggagttgacaccaaaacacagctggattccatcaggaaagctgcattgatcagggtgttaaccgcatatgaaacaacccatatggaagacatacttaggggtcaaacctgtggtgtgtggaagtgaccactgggatgtcatcattcaccatttatccaggatggccgctcaccaggcaatttgctaggctcgggggcgggtagtatccatacactatgcactactgctctgaagcttctggaatcagaaatgaacccattttcatcgacgattgctgttagttgacaagtgacatcttgaaaatgccacattccctcatgtcacaggaagttctgggatcaccaaggattgttggagagtccagtgagatggaaccacacaaccagttccctaccagtgtcttgtcagctctgggtgtttgttccctgccactaagtggctcagtcacacctttgctgaaacacagtagtcttatgaaaagcactggacacatactttgaatacctttcatattttaggtgctgaaaatggtgagggagtgagtgctctgcacccttgggcttttcaactcttgcacctggagttctgctggttaagtttgttaaacttagttgaaactgggaacctgttggctaaccattggggccttacactgtttttcaaatggttgcaacatttaacttctcgcacatggttcccgtcctctggagctctgtcttgtcggggagatgggcatgttgtataccaaaagagtgtacaaagtgttgcagggctgtgacacaatagggactctatggaaaactggcagccattgggtgtgggggcagtctgtaaatcagtcacctgtgttgctgcaggccaaggtagaaacgccctccgtgtgtgcatatttgttggttctctgattaaagttttgagtct

SEQ ID NO: 202641 - DNA, 4715 bp, Homo sapiens
  Payload ID: 19962
  Gene Name: zinc finger protein 473
  Uniprot ID: Q8WTR7
  ENST ID: ENST00000391821
  CDS Start-End: 387-3002
aattagatgattctttaacaaggtaaaaatctggactacaaactgatgccgcctggtcctgattctctttctactctactcccacagtgctaaggctgaagaagcaggaggagatgggaaggcgaaagaagtcgcccgcacagccctctgggaaatagagtcctggcgctgccgcggaggatcctgggtgcagccgctcagagaagcttctcgcgcacaggaagtcgctgcgaggaggcgcgtgtgcggggagttgaatctcccgctcccttgaggctggggttgcgtctgttgacgcggccgactacaatcccgagccctgccagccgggaacacggaggggaaggaggaggagcttaaaagaggctactgaaccccagttggccatggctgaggaatttgtgaccctcaaggatgtcggcatggacttcaccttgggagactgggagcagctcgggctggaacagggggacacgttctgggacacagcgttggacaattgccaggacctcttcctgctggaccccccaagacccaacctgacctcccacccagatggcagtgaagatctggagcctctggcaggaggaagcccagaagcaacaagccctgatgtgactgagaccaagaactctcctctgatggaggatttcttcgaagaaggattctcccaggagattatagagatgttatccaaggatggcttctggaactccaatttcggagaagcctgtatagaggacacctggttagatagtttgctaggcgatccagaaagtcttctgaggtctgatattgccaccaacggggaaagtcccacggaatgcaagagtcatgaattaaagagaggactcagtcctgtgtccaccgtttccacgggagaagattccatggtgcataatgtttctgaaaagaccctcacaccagctaagtctaaggaatataggggtgagtttttctcctactccgaccacagccagcaggattctgttcaggaaggggagaaaccatatcaatgtagtgaatgtgggaaaagcttcagtgggagttaccgtcttacccagcactggatcactcatactagggagaaacccactgtccatcaagagtgtgagcaaggttttgaccggaatgcttccctttctgtgtatccgaaaactcacacgggctacaaattctatgtgtgtaatgaatatgggacaacttttagtcagagtacatacctgtggcatcagaaaactcacactggagaaaaaccatgtaagagtcaagatagtgaccacccacccagtcatgacacacagcctggtgagcatcagaaaactcacacagatagtaagtcctacaactgtaacgaatgcggcaaggcttttacccggatcttccaccttactcggcaccagaagatccacactcggaaacgctatgagtgttccaagtgccaggcgaccttcaacttgagaaaacacctcatccaacatcagaaaactcacgctgcaaaaactacctctgagtgtcaggagtgtgggaagatttttaggcacagttcgctgctcattgaacaccaggctcttcatgctggagaggagccttataagtgtaacgaacgtgggaaatccttcaggcataactctaccctaaagatccatcagagggttcacagtggagagaagccttacaaatgcagtgagtgtgggaaggccttccaccggcacactcaccttaatgaacatcggcgaattcatacaggctacagaccccacaaatgtcaggaatgcgtcaggagtttcagccggccctcacatctgatgcgacatcaggccattcacaccgcagaaaagccctatagctgtgctgaatgcaaggagactttcagcgataacaatcgccttgtgcaacaccagaaaatgcacactgtcaaaaccccatatgaatgtcaggagtgcggagaacgcttcatttgcggctcaaccctgaagtgccacgagagtgttcacgccagagaaaaacaaggattttttgtgagtgggaagatcttggatcagaacccagaacagaaagagaagtgctttaagtgtaacaaatgtgagaaaacctttagctgcagcaaatacctaactcagcacgagaggattcacaccaggggagtgaagccctttgaatgtgaccagtgtgggaaagcctttggccaaagtactcggctcattcaccatcaaagaatccactctagagtgaggctgtataaatggggtgagcaagggaaagccatcagcagtgcctcccttatcaaacttcagtccttccacacaaaggagcacccttttaaatgtaacgaatgcggaaagaccttcagccacagtgcacacctctcaaaacatcagttaattcacgctggagagaatccctttaaatgtagtaagtgtgacagagtcttcacccagagaaactaccttgttcagcatgagcgaactcatgccagaaagaagccgttggtgtgtaacgaatgcgggaaaacgttccgtcagagctcatgcctttctaagcatcagagaattcactcaggtgagaagccctatgtatgtgattactgcgggaaggccttcggcctgagtgctgagcttgtccgccaccagagaattcacactggagaaaagccttatgtttgtcaggaatgcgggaaagccttcacccagagctcatgcctttctattcaccggagagttcacactggggagaagccctacagatgtggtgaatgtgggaaagcctttgcccagaaagcaaatctaacacagcaccagagaattcacacaggggagaagccttactcctgtaatgtgtgtggcaaagcttttgtcctcagtgcccatctcaaccagcacctgagagttcacacccaggagacactttatcagtgtcaacgttgccagaaagcctttcggtgccactcgagcctcagccgccatcagcgtgtacacaacaagcagcaatactgcctgtagccattgggtggcagcagagtcccagaatatgagaccgttactcggatgttgaaagttggaaactatcccattgcaagtttctctccaaataaatgcatctaaagattgattagaaagtttgtgcgcatgtttttcattataacaatgaaaacacaaaagtggagaagctgtacaacgtcaggattcagaggtaggctctggagccagtctaccttgagttaaatcccacctctgccatctactacctaagtgaccttgggaaggtcagaaaaatctctcagggcctcggtgtccttatctgtaaaatgggcatcacctacctcagagggcttttctgaggattaaataaataaatgtgaagcacttagaactgatggccagcacatgagggctcaccaagtgtaagccacaaatacacatcagctatagcacaaatatacttgtgttacaagaaaggaattagtaatctgtgtttactgtagttaatgttcttacaatgtatcgcttttaatttaagttttccttttttacagtttttctccagcactttactcttcttaagtgcctggccttttttgtccctttatctctcctggtttttttcttaagccccagaaagccaaaaagaacatgtaaactcttcacctcaactagctacaaccttccactcctaacctcccaagcttctcacttaaagaggactccctatcccacaaacacatgctccctcttcctatgaccttcctccatttaacagtgttggttatgcaataagacacccaatttttcatgggagttgacaccaaaacacagctggattccatcaggaaagctgcattgatcagggtgttaaccgcatatgaaacaacccatatggaagacatacttaggggtcaaacctgtggtgtgtggaagtgaccactgggatgtcatcattcaccatttatccaggatggccgctcaccaggcaatttgctaggctcgggggcgggtagtatccatacactatgcactactgctctgaagcttctggaatcagaaatgaacccattttcatcgacgattgctgttagttgacaagtgacatcttgaaaatgccacattccctcatgtcacaggaagttctgggatcaccaaggattgttggagagtccagtgagatggaaccacacaaccagttccctaccagtgtcttgtcagctctgggtgtttgttccctgccactaagtggctcagtcacacctttgctgaaacacagtagtcttatgaaaagcactggacacatactttgaatacctttcatattttaggtgctgaaaatggtgagggagtgagtgctctgcacccttgggcttttcaactcttgcacctggagttctgctggttaagtttgttaaacttagttgaaactgggaacctgttggctaaccattggggccttacactgtttttcaaatggttgcaacatttaacttctcgcacatggttcccgtcctctggagctctgtcttgtcggggagatgggcatgttgtataccaaaagagtgtacaaagtgttgcagggctgtgacacaatagggactctatggaaaactggcagccattgggtgtgggggcagtctgtaaatcagtcacctgtgttgctgcaggccaaggtagaaacgccctccgtgtgtgcatatttgttggttctctgattaaagttttgagtct

SEQ ID NO: 202642 - DNA, 2833 bp, Homo sapiens
  Payload ID: 19962
  Gene Name: zinc finger protein 473
  ENST ID: ENST00000445728
  CDS Start-End: 146-2725
agagaagcttctcgcgcacaggaagtcgctgcgaggaggcgcgtgtgcggggagttgaatctcccgctcccttgaggctggggttgcgtctgttgacgcggccgactacaatcccgaggaatttgtgaccctcaaggatgtcggcatggacttcaccttgggagactgggagcagctcgggctggaacagggggacacgttctgggacacagcgttggacaattgccaggacctcttcctgctggaccccccaagacccaacctgacctcccacccagatggcagtgaagatctggagcctctggcaggaggaagcccagaagcaacaagccctgatgtgactgagaccaagaactctcctctgatggaggatttcttcgaagaaggattctcccaggagattatagagatgttatccaaggatggcttctggaactccaatttcggagaagcctgtatagaggacacctggttagatagtttgctaggcgatccagaaagtcttctgaggtctgatattgccaccaacggggaaagtcccacggaatgcaagagtcatgaattaaagagaggactcagtcctgtgtccaccgtttccacgggagaagattccatggtgcataatgtttctgaaaagaccctcacaccagctaagtctaaggaatataggggtgagtttttctcctactccgaccacagccagcaggattctgttcaggaaggggagaaaccatatcaatgtagtgaatgtgggaaaagcttcagtgggagttaccgtcttacccagcactggatcactcatactagggagaaacccactgtccatcaagagtgtgagcaaggttttgaccggaatgcttccctttctgtgtatccgaaaactcacacgggctacaaattctatgtgtgtaatgaatatgggacaacttttagtcagagtacatacctgtggcatcagaaaactcacactggagaaaaaccatgtaagagtcaagatagtgaccacccacccagtcatgacacacagcctggtgagcatcagaaaactcacacagatagtaagtcctacaactgtaacgaatgcggcaaggcttttacccggatcttccaccttactcggcaccagaagatccacactcggaaacgctatgagtgttccaagtgccaggcgaccttcaacttgagaaaacacctcatccaacatcagaaaactcacgctgcaaaaactacctctgagtgtcaggagtgtgggaagatttttaggcacagttcgctgctcattgaacaccaggctcttcatgctggagaggagccttataagtgtaacgaacgtgggaaatccttcaggcataactctaccctaaagatccatcagagggttcacagtggagagaagccttacaaatgcagtgagtgtgggaaggccttccaccggcacactcaccttaatgaacatcggcgaattcatacaggctacagaccccacaaatgtcaggaatgcgtcaggagtttcagccggccctcacatctgatgcgacatcaggccattcacaccgcagaaaagccctatagctgtgctgaatgcaaggagactttcagcgataacaatcgccttgtgcaacaccagaaaatgcacactgtcaaaaccccatatgaatgtcaggagtgcggagaacgcttcatttgcggctcaaccctgaagtgccacgagagtgttcacgccagagaaaaacaaggattttttgtgagtgggaagatcttggatcagaacccagaacagaaagagaagtgctttaagtgtaacaaatgtgagaaaacctttagctgcagcaaatacctaactcagcacgagaggattcacaccaggggagtgaagccctttgaatgtgaccagtgtgggaaagcctttggccaaagtactcggctcattcaccatcaaagaatccactctagagtgaggctgtataaatggggtgagcaagggaaagccatcagcagtgcctcccttatcaaacttcagtccttccacacaaaggagcacccttttaaatgtaacgaatgcggaaagaccttcagccacagtgcacacctctcaaaacatcagttaattcacgctggagagaatccctttaaatgtagtaagtgtgacagagtcttcacccagagaaactaccttgttcagcatgagcgaactcatgccagaaagaagccgttggtgtgtaacgaatgcgggaaaacgttccgtcagagctcatgcctttctaagcatcagagaattcactcaggtgagaagccctatgtatgtgattactgcgggaaggccttcggcctgagtgctgagcttgtccgccaccagagaattcacactggagaaaagccttatgtttgtcaggaatgcgggaaagccttcacccagagctcatgcctttctattcaccggagagttcacactggggagaagccctacagatgtggtgaatgtgggaaagcctttgcccagaaagcaaatctaacacagcaccagagaattcacacaggggagaagccttactcctgtaatgtgtgtggcaaagcttttgtcctcagtgcccatctcaaccagcacctgagagttcacacccaggagacactttatcagtgtcaacgttgccagaaagcctttcggtgccactcgagcctcagccgccatcagcgtgtacacaacaagcagcaatactgcctgtagccattgggtggcagcagagtcccagaatatgagaccgttactcggatgttgaaagttggaaactatcccattgcaagtttctctccaaataaatgcatctaaagattg

SEQ ID NO: 202643 - DNA, 558 bp, Homo sapiens
  Payload ID: 19962
  Gene Name: zinc finger protein 473
  ENST ID: ENST00000599155
  CDS Start-End: 252-558
aatcccgaggtacggagacgctggggctgagggacttgcgggctcggtccttcctgagagggagactcacattgggacttgtcctcctcctcctggacattttgggggctcgtcagcatggacagcgagtcagccatgggtggaagggaggctttctcacagctcccttgtgcttcccacagccctgccagccgggaacacggaggggaaggaggaggagcttaaaagaggctactgaaccccagttggccatggctgaggaatttgtgaccctcaaggatgtcggcatggacttcaccttgggagactgggagcagctcgggctggaacagggggacacgttctgggacacagcgttggacaattgccaggacctcttcctgctggaccccccaagacccaacctgacctcccacccagatggcagtgaagatctggagcctctggcaggaggaagcccagaagcaacaagccctgatgtgactgagaccaagaactctcctctgatggaggatttcttcgaagaaggattctcccaggagattatagagatgttat

SEQ ID NO: 202644 - DNA, 605 bp, Homo sapiens
  Payload ID: 19962
  Gene Name: zinc finger protein 473
  ENST ID: ENST00000598809
  CDS Start-End: 382-605
agaaacccgtcacaacgcgtttccatggcaacctaccgcttgctcttcggaaaaggttaacactccctgacttctagtaaagtgctaaggctgaagaagcaggaggagatgggaaggcgaaagaagtcgcccgcacagccctctgggaaatagagtcctggcgctgccgcggaggatcctgggtgcagccgctcagagaagcttctcgcgcacaggaagtcgctgcgaggaggcgcgtgtgcggggagttgaatctcccgctcccttgaggctggggttgcgtctgttgacgcggccgactacaatcccgagccctgccagccgggaacacggaggggaaggaggaggagcttaaaagaggctactgaaccccagttggccatggctgaggaatttgtgaccctcaaggatgtcggcatggacttcaccttgggagactgggagcagctcgggctggaacagggggacacgttctgggacacagcgttggacaattgccaggacctcttcctgctggaccccccaagacccaacctgacctcccacccagatggcagtgaagatctggagcctctggcaggaggaagcccagaagcaacaagccc

SEQ ID NO: 202645 - DNA, 603 bp, Homo sapiens
  Payload ID: 19962
  Gene Name: zinc finger protein 473
  ENST ID: ENST00000601364
  CDS Start-End: 153-386
gaggcgcgtgtgcggggagttgaatctcccgctcccttgaggctggggttgcgtctgttgacgcggccgactacaatcccgagccctgccagccgggaacacggaggggaaggaggaggagcttaaaagaggctactgaaccccagttggccatggctgaggaatttgtgaccctcaaggatgtcggcatggacttcaccttgggagactgggagcagctcgggctggaacagggggacacgttctgggacacagcgttggacaattgccaggacctcttcctgctggaccccccaagacccaacctgacctcccacccagatggcagtgaagatctggagcctctggcaggaggaagcccagaagcaacaagccctggtttctaaggtgataggagataagcctggagctgctcgtggtcaccttgccaccatggggggagaacctgccagaaaatgaaactaaccaaaaaggaagctgagctaagaggagtgaccagattactgacatgtctcttaaacacctggatccatctgttcctgaaggcaaaactgttcaattacataggctaataaattccctttcttccttaaacaaacagaa

SEQ ID NO: 202646 - DNA, 475 bp, Homo sapiens
  Payload ID: 19962
  Gene Name: zinc finger protein 473
  ENST ID: ENST00000594968
  CDS Start-End: 93-287
gttgaatctcccgctcccttgaggctggggttgcgtctgttgacgcggccgactacaatcccgaggaatttgtgaccctcaaggatgtcggcatggacttcaccttgggagactgggagcagctcgggctggaacagggggacacgttctgggacacagcgttggacaattgccaggacctcttcctgctgggcttttcccaggagagcagccagcctgctgtgtcgccctcttctgcacaccagtgtcacacagtgagacagcagcagggcccagactccagctaagaccccccaagacccaacctgacctcccacccagatggcagtgaagatctggagcctctggcaggaggaagcccagaagcaacaagccctgatgtgactgagaccaagaactctcctctgatggaggatttcttcgaagaaggattctcccaggagattatagagatgttatccaaggatggcttctg

SEQ ID NO: 202647 - DNA, 4828 bp, Homo sapiens
  Payload ID: 19962
  Gene Name: zinc finger protein 473
  Uniprot ID: Q8WTR7
  ENST ID: ENST00000595661
  CDS Start-End: 496-3111
gtcacaacgcgtttccatggcaacctaccgcttgctcttcggaaaaggttaacactccctgacttctagtaaagtgctaaggctgaagaagcaggaggagatgggaaggcgaaagaagtcgcccgcacagccctctgggaaatagagtcctggcgctgccgcggaggatcctgggtgcagccgctcagagaagcttctcgcgcacaggaagtcgctgcgaggaggcgcgtgtgcggggagttgaatctcccgctcccttgaggctggggttgcgtctgttgacgcggccgactacaatcccgagggagactcacattgggacttgtcctcctcctcctggacattttgggggctcgtcagcatggacagcgagtcagccatgggtggaagggaggctttctcacagctcccttgtgcttcccacagccctgccagccgggaacacggaggggaaggaggaggagcttaaaagaggctactgaaccccagttggccatggctgaggaatttgtgaccctcaaggatgtcggcatggacttcaccttgggagactgggagcagctcgggctggaacagggggacacgttctgggacacagcgttggacaattgccaggacctcttcctgctggaccccccaagacccaacctgacctcccacccagatggcagtgaagatctggagcctctggcaggaggaagcccagaagcaacaagccctgatgtgactgagaccaagaactctcctctgatggaggatttcttcgaagaaggattctcccaggagattatagagatgttatccaaggatggcttctggaactccaatttcggagaagcctgtatagaggacacctggttagatagtttgctaggcgatccagaaagtcttctgaggtctgatattgccaccaacggggaaagtcccacggaatgcaagagtcatgaattaaagagaggactcagtcctgtgtccaccgtttccacgggagaagattccatggtgcataatgtttctgaaaagaccctcacaccagctaagtctaaggaatataggggtgagtttttctcctactccgaccacagccagcaggattctgttcaggaaggggagaaaccatatcaatgtagtgaatgtgggaaaagcttcagtgggagttaccgtcttacccagcactggatcactcatactagggagaaacccactgtccatcaagagtgtgagcaaggttttgaccggaatgcttccctttctgtgtatccgaaaactcacacgggctacaaattctatgtgtgtaatgaatatgggacaacttttagtcagagtacatacctgtggcatcagaaaactcacactggagaaaaaccatgtaagagtcaagatagtgaccacccacccagtcatgacacacagcctggtgagcatcagaaaactcacacagatagtaagtcctacaactgtaacgaatgcggcaaggcttttacccggatcttccaccttactcggcaccagaagatccacactcggaaacgctatgagtgttccaagtgccaggcgaccttcaacttgagaaaacacctcatccaacatcagaaaactcacgctgcaaaaactacctctgagtgtcaggagtgtgggaagatttttaggcacagttcgctgctcattgaacaccaggctcttcatgctggagaggagccttataagtgtaacgaacgtgggaaatccttcaggcataactctaccctaaagatccatcagagggttcacagtggagagaagccttacaaatgcagtgagtgtgggaaggccttccaccggcacactcaccttaatgaacatcggcgaattcatacaggctacagaccccacaaatgtcaggaatgcgtcaggagtttcagccggccctcacatctgatgcgacatcaggccattcacaccgcagaaaagccctatagctgtgctgaatgcaaggagactttcagcgataacaatcgccttgtgcaacaccagaaaatgcacactgtcaaaaccccatatgaatgtcaggagtgcggagaacgcttcatttgcggctcaaccctgaagtgccacgagagtgttcacgccagagaaaaacaaggattttttgtgagtgggaagatcttggatcagaacccagaacagaaagagaagtgctttaagtgtaacaaatgtgagaaaacctttagctgcagcaaatacctaactcagcacgagaggattcacaccaggggagtgaagccctttgaatgtgaccagtgtgggaaagcctttggccaaagtactcggctcattcaccatcaaagaatccactctagagtgaggctgtataaatggggtgagcaagggaaagccatcagcagtgcctcccttatcaaacttcagtccttccacacaaaggagcacccttttaaatgtaacgaatgcggaaagaccttcagccacagtgcacacctctcaaaacatcagttaattcacgctggagagaatccctttaaatgtagtaagtgtgacagagtcttcacccagagaaactaccttgttcagcatgagcgaactcatgccagaaagaagccgttggtgtgtaacgaatgcgggaaaacgttccgtcagagctcatgcctttctaagcatcagagaattcactcaggtgagaagccctatgtatgtgattactgcgggaaggccttcggcctgagtgctgagcttgtccgccaccagagaattcacactggagaaaagccttatgtttgtcaggaatgcgggaaagccttcacccagagctcatgcctttctattcaccggagagttcacactggggagaagccctacagatgtggtgaatgtgggaaagcctttgcccagaaagcaaatctaacacagcaccagagaattcacacaggggagaagccttactcctgtaatgtgtgtggcaaagcttttgtcctcagtgcccatctcaaccagcacctgagagttcacacccaggagacactttatcagtgtcaacgttgccagaaagcctttcggtgccactcgagcctcagccgccatcagcgtgtacacaacaagcagcaatactgcctgtagccattgggtggcagcagagtcccagaatatgagaccgttactcggatgttgaaagttggaaactatcccattgcaagtttctctccaaataaatgcatctaaagattgattagaaagtttgtgcgcatgtttttcattataacaatgaaaacacaaaagtggagaagctgtacaacgtcaggattcagaggtaggctctggagccagtctaccttgagttaaatcccacctctgccatctactacctaagtgaccttgggaaggtcagaaaaatctctcagggcctcggtgtccttatctgtaaaatgggcatcacctacctcagagggcttttctgaggattaaataaataaatgtgaagcacttagaactgatggccagcacatgagggctcaccaagtgtaagccacaaatacacatcagctatagcacaaatatacttgtgttacaagaaaggaattagtaatctgtgtttactgtagttaatgttcttacaatgtatcgcttttaatttaagttttccttttttacagtttttctccagcactttactcttcttaagtgcctggccttttttgtccctttatctctcctggtttttttcttaagccccagaaagccaaaaagaacatgtaaactcttcacctcaactagctacaaccttccactcctaacctcccaagcttctcacttaaagaggactccctatcccacaaacacatgctccctcttcctatgaccttcctccatttaacagtgttggttatgcaataagacacccaatttttcatgggagttgacaccaaaacacagctggattccatcaggaaagctgcattgatcagggtgttaaccgcatatgaaacaacccatatggaagacatacttaggggtcaaacctgtggtgtgtggaagtgaccactgggatgtcatcattcaccatttatccaggatggccgctcaccaggcaatttgctaggctcgggggcgggtagtatccatacactatgcactactgctctgaagcttctggaatcagaaatgaacccattttcatcgacgattgctgttagttgacaagtgacatcttgaaaatgccacattccctcatgtcacaggaagttctgggatcaccaaggattgttggagagtccagtgagatggaaccacacaaccagttccctaccagtgtcttgtcagctctgggtgtttgttccctgccactaagtggctcagtcacacctttgctgaaacacagtagtcttatgaaaagcactggacacatactttgaatacctttcatattttaggtgctgaaaatggtgagggagtgagtgctctgcacccttgggcttttcaactcttgcacctggagttctgctggttaagtttgttaaacttagttgaaactgggaacctgttggctaaccattggggccttacactgtttttcaaatggttgcaacatttaacttctcgcacatggttcccgtcctctggagctctgtcttgtcggggagatgggcatgttgtataccaaaagagtgtacaaagtgttgcagggctgtgacacaatagggactctatggaaaactggcagccattgggtgtgggggcagtctgtaaatcagtcacctgtgttgctgcaggccaaggtagaaacgccctccgtgtgtgcatatttgttggttctctgattaaagttttgagtctaaaa

SEQ ID NO: 202648 - DNA, 1964 bp, Homo sapiens
  Payload ID: 19963
  Gene Name: zinc finger protein 474
  Uniprot ID: Q6S9Z5
  ENST ID: ENST00000296600
  CDS Start-End: 384-1478
aggcaacaaagactgcggttcctgttactcagcagcctcaaaaactcacaccagctcctgcaaggaatgtgaatcttggagctcccagctattctgttcctgtttctgtcagctccttccctgaaaactcagaggtgctcagcatgccatgctaaaaggcaaaataaaaagatcttggagacatctcagctttaatgaggactttccaacattccagactgccgtcctgcaatgaagctctgagtcacggtctgtgaggctaaggtactggcaacggtgtgaaccccaggacaactaacctcactaaccttcactctaagcagaagcccaaagtgagtctggcctgaaatcagagcaagcactacagaaagacatctttgttaatggaaagaggaaagaagaaaagaatttccaataagttacaacaaacttttcaccattctaaagaacccactttccttatcaaccaagctgggcttctctctagtgactcctattctagcctttccccagaaacagagagtgttaatcctggtgaaaatataaagacagacactcagaaaaagagacctgggactgtgatactatcaaaactgtcaagtagaagaattatatcggaaagccagcttagcccccctgtgatcccggcccgcaggcctggattccgggtatgctatatctgtggccgagaatttgggtcccagtcaattgccattcatgaaccccagtgcttgcagaagtggcatattgaaaacagcaagttgcccaagcatttgaggaggccagaaccctccaaaccacagtctctcagcagcagtgggtcctacagtcttcaggcaactaacgaggctgcatttcagagtgcccaggctcagctgctgccctgtgaatcctgtggccgcacattcttgccagatcatcttcttgttcatcacagaagctgcaagccaaagggtgagggtcccagagcaccacactcaaacagttctgatcatcttactggcctcaagaaagcttgtagtggaaccccagcccgaccaaggactgttatctgctacatatgtggtaaggaatttggcaccctgtcccttcctattcatgagcccaaatgcctggaaaagtggaaaatggaaaatgaccggctccctgtggagctccaccagccactcccacagaagcctcagccccttccgaatgcacagtccagccaagcgggaccaaatcaagctcagcttgtgttctgcccacattgtagccgaatctttacctcagaccgcctcctggtacaccagagaagttgtaaaactcatccttatgggccaaaatatcagaatttgaatttagggagtaaaggaggcctaaaagagtacactaattccaagcagcaaaggaacagggcagcacccagtgtaactgataaggtaattcatgccacacaagacgcattaggtgaacctggtggtgccctctgcctgtaggggaacaagagaaaactatccccagaatcagccacctcagcccctagtattttttctatcaatgccttgtatcagcctcaaagcagcctgttcaagttaactccctgttgaactccagggcctatacctctcttggctgaatagatataagaacatccttgcctgatgggttcatattcctcttcaattctgctgtctaaaagaagaagagatggacttctttcttccctgatccctgatacaaataatccctgggagagacagtaatttgaaaatgagtcattaatgctgtgtctacattacagagatataattcccattccaacagccaatatttattgtcggtttattttagtcatctaccttaggaattcatttttggcaatgctgggttatgctgagtttatcttactaaaatagaatctgtgtcaaaaacccccaatgactttagcaacaattaaacactgaagcacttgcaaaaataca

SEQ ID NO: 202649 - DNA, 546 bp, Homo sapiens
  Payload ID: 19963
  Gene Name: zinc finger protein 474
  ENST ID: ENST00000504912
  CDS Start-End: 358-546
acaccagctcctgcaaggaatgtgaatcttggagctcccagctattctgttcctgtttctgtcagctccttccctgaaaactcagaggtgctcagcatgccatgctaaaaggcaaaataaaaaggtaaagaacaaatgtcacaagatcttggagacatctcagctttaatgaggactttccaacattccagactgccgtcctgcaatgaagctctgagtcacggtctgtgaggctaaggtactggcaacggtgtgaaccccaggacaactaacctcactaaccttcactctaagcagaagcccaaagtgagtctggcctgaaatcagagcaagcactacagaaagacatctttgttaatggaaagaggaaagaagaaaagaatttccaataagttacaacaaacttttcaccattctaaagaacccactttccttatcaaccaagctgggcttctctctagtgactcctattctagcctttccccagaaacagagagtgttaatcctggtgaaaatataaagacagacactcagaaaaagagacct

SEQ ID NO: 202650 - DNA, 572 bp, Homo sapiens
  Payload ID: 19963
  Gene Name: zinc finger protein 474
  ENST ID: ENST00000505843
  CDS Start-End: 464-572
gctcctgcaaggaatgtgaatcttggagctcccagctattctgttcctgtttctgtcagctccttccctgaaaactcagaggtgctcagcatgccatgctaaaaggcaaaataaaaagagaatggaaaaatggcatcatgttgataaaaggtgatgccttccaggacattctgtaaatgtcctatgtgcagatatggtcaaaacgaataattcaggccaactgagtgaacatttctccagagatgcttgagatcttggagacatctcagctttaatgaggactttccaacattccagactgccgtcctgcaatgaagctctgagtcacggtctgtgaggctaaggtactggcaacggtgtgaaccccaggacaactaacctcactaaccttcactctaagcagaagcccaaagtgagtctggcctgaaatcagagcaagcactacagaaagacatctttgttaatggaaagaggaaagaagaaaagaatttccaataagttacaacaaacttttcaccattctaaagaacccactttccttatcaaccaagctgggcttctctctagtgact

SEQ ID NO: 202651 - DNA, 1811 bp, Homo sapiens
  Payload ID: 19964
  Gene Name: zinc finger protein 479
  Uniprot ID: Q96JC4
  ENST ID: ENST00000319636
  CDS Start-End: 18-1592
caggtatctgcagatttatggctaaaagaccaggaccccctggaagccgagaaatgggactgttgacattcagagacatagctatagaattctctctggaggaatggcaatgcctggattgtgctcagcggaatttatatagagatgtgatgttagagaactacagaaacctggtctccctgggtattgctgtctctaagccagacttgatcacctgtctggagcaaaataaagagtcccagaatataaagagaaatgagatggtagccaaacacccagttacgcgttcccatttcacccaagaccttcagccagagcagggcatcaaagattcactccaaaaagtaataccaagaacatatggaaaatgtggacatgagaaattacaatttaaaaaatgctgtaaaagtgtgggtgaatatgaggtgcacaagggaggttatagtgaagttaaccaatgtttgtcaactacccaaaacaaaatatttcagactcataaatatgtcaaagtctttggtaaattttcaaattccaatagagataaaacaagatatactggaaataaacatttcaaatgtaacaaatatggcaaatcattttgcatgctttcacacctaaatcaacatcaggtaattcatactagggagaagtcctacaaatgcaaagaatgtggcaaatcctttaactgctcctcaaaccatactacacataaaataattcatactggagagaaaccatatagatgtgaggaatgtggcaaagcctttagctggtctgcaaaccttactagacataagagaactcatactggagagaaaccctacacgtgtgaagaatgtggccaagcctttaggcgctcctcagcacttactaaccacaagagaattcatactggagagagaccctacaaatgtgaagaatgtggcaaagcctttagcgtatcctcaaccctcactgaccacaagagaattcatactggagagaaaccctgcaggtgtgaggaatgtggcaaagcctttagctggtcctcaaaccttactagacataagagaattcatactagagagaaaccctatgcctgtgaagaatgtggccaagcctttagcttatcctcgaaccttatgagacataggagaattcatactggagagaaaccctacacatgtgaagaatgtggccaagactttaggcgctcctcagcacttactatccacaagagaattcatactggagagagaccctacaaatgtgaagagtgtggcaaagtctttagcttatcctcaaccctcactgaccacaagagaattcatactggagagagaccctacaaatgtgaagaatgtggcaaagcctttagcttatcctcaaccctcactgaccacaagagaattcatactggagagagaccctacacatgtgaagaatgtggcaaagcctttaattgctcctcaacccttatgcaacataagagaattcatactggagagaaaccctacaaatgtgaagaatgtgagcaagcttttaagtggcattcaagtcttgctaaacataagataattcacactggagagaaaccctacaaatgtgaataatatggcaaagtccaccctcaggccttataatacataaaataatttacactggaaaaaaacactacaaatgtagagaatgtggccaagcctttaaccagttccaaaccttaattgaatgtaagagaattcatattggacagaaattttataaatgtaaaaaaatgtaacaaagcctttaaccaaccctcaaaccttaataaacctaagagaatttatttt

SEQ ID NO: 202652 - DNA, 2072 bp, Homo sapiens
  Payload ID: 19964
  Gene Name: zinc finger protein 479
  Uniprot ID: Q96JC4
  ENST ID: ENST00000331162
  CDS Start-End: 272-1846
ggcaggaaagaagagtcacatcacgtaggtgatgggcctagagatatttcacaatgccttctgtaattagaacccagaaaaaagagttatatcatttgggttaaaggtcttgtgatatgtcacaatcccaactaagggcaggacccaggcagaaaaggagagtcacttcctttgatgattggtccagagatacattacaatttcccctgaggacagctctcatgcagaagaggaactgaatatactgcatggcccaggtatctgcagatttatggctaaaagaccaggaccccctggaagccgagaaatgggactgttgacattcagagacatagctatagaattctctctggaggaatggcaatgcctggattgtgctcagcggaatttatatagagatgtgatgttagagaactacagaaacctggtctccctgggtattgctgtctctaagccagacttgatcacctgtctggagcaaaataaagagtcccagaatataaagagaaatgagatggtagccaaacacccagttacgcgttcccatttcacccaagaccttcagccagagcagggcatcaaagattcactccaaaaagtaataccaagaacatatggaaaatgtggacatgagaaattacaatttaaaaaatgctgtaaaagtgtgggtgaatatgaggtgcacaagggaggttatagtgaagttaaccaatgtttgtcaactacccaaaacaaaatatttcagactcataaatatgtcaaagtctttggtaaattttcaaattccaatagagataaaacaagatatactggaaataaacatttcaaatgtaacaaatatggcaaatcattttgcatgctttcacacctaaatcaacatcaggtaattcatactagggagaagtcctacaaatgcaaagaatgtggcaaatcctttaactgctcctcaaaccatactacacataaaataattcatactggagagaaaccatatagatgtgaggaatgtggcaaagcctttagctggtctgcaaaccttactagacataagagaactcatactggagagaaaccctacacgtgtgaagaatgtggccaagcctttaggcgctcctcagcacttactaaccacaagagaattcatactggagagagaccctacaaatgtgaagaatgtggcaaagcctttagcgtatcctcaaccctcactgaccacaagagaattcatactggagagaaaccctgcaggtgtgaggaatgtggcaaagcctttagctggtcctcaaaccttactagacataagagaattcatactagagagaaaccctatgcctgtgaagaatgtggccaagcctttagcttatcctcgaaccttatgagacataggagaattcatactggagagaaaccctacacatgtgaagaatgtggccaagactttaggcgctcctcagcacttactatccacaagagaattcatactggagagagaccctacaaatgtgaagagtgtggcaaagtctttagcttatcctcaaccctcactgaccacaagagaattcatactggagagagaccctacaaatgtgaagaatgtggcaaagcctttagcttatcctcaaccctcactgaccacaagagaattcatactggagagagaccctacacatgtgaagaatgtggcaaagcctttaattgctcctcaacccttatgcaacataagagaattcatactggagagaaaccctacaaatgtgaagaatgtgagcaagcttttaagtggcattcaagtcttgctaaacataagataattcacactggagagaaaccctacaaatgtgaataatatggcaaagtccaccctcaggccttataatacataaaataatttacactggaaaaaaacactacaaatgtagagaatgtggccaagcctttaaccagttccaaaccttaattgaatgtaagagaattcatattggacagaaattttataaatgtaaaaaaatgtaacaaagcctttaaccaaccctcaaaccttaataaacctaagagaatttattttaaaaaaa

SEQ ID NO: 202653 - DNA, 1239 bp, Homo sapiens
  Payload ID: 19964
  Gene Name: zinc finger protein 479
  ENST ID: ENST00000620639
  CDS Start-End: 1-1239
atggctaaaagaccaggaccccctggaagccgagaaatgggactgttgacattcagagacatagctatagaattctctctggaggaatggcaatgcctggattgtgctcagcggaatttatatagagatgtgatgttagagaactacagaaacctggtctccctgggtattgctgtctctaagccagacttgatcacctgtctggagcaaaataaagagtcccagaatataaagagaaatgagatggtagccaaacacccagttacgcgttcccatttcacccaagaccttcagccagagcagggcatcaaagattcactccaaaaagtaataccaagaacatatggaaaatgtggacatgagaaattacaatttaaaaaatgctgtaaaagtgtgggtgaatatgaggtgcacaagggaggttatagtgaagttaaccaatgtttgtcaactacccaaaacaaaatatttcagactcataaatatgtcaaagtctttggtaaattttcaaattccaatagagataaaacaagatatactggaaataaacatttcaaatgtaacaaatatggcaaatcattttgcatgctttcacacctaaatcaacatcaggtaattcatactagggagaagtcctacaaatgcaaagaatgtggcaaatcctttaactgctcctcaaaccatactacacataaaagaattcatactggagagaaaccctgcaggtgtgaggaatgtggcaaagcctttagctggtcctcaaaccttactagacataagagaattcatactggagagaaaccctacacatgtgaagaatgtggccaagactttaggcgctcctcagcacttactatccacaagagaattcatactggagagagaccctacaaatgtgaagagtgtggcaaagtctttagcttatcctcaaccctcactgaccacaagagaattcatactggagagagaccctacaaatgtgaagaatgtggcaaagcctttagcttatcctcaaccctcactgaccacaagagaattcatactggagagagaccctacacatgtgaagaatgtggcaaagcctttaattgctcctcaacccttatgcaacataagagaattcatactggagagaaaccctacaaatgtgaagaatgtgagcaagcttttaagtggcattcaagtcttgctaaacataagataattcacactggagagaaaccctacaaatgtgaataa

SEQ ID NO: 202654 - DNA, 3234 bp, Homo sapiens
  Payload ID: 19965
  Gene Name: zinc finger protein 48
  Uniprot ID: Q96MX3
  ENST ID: ENST00000320159
  CDS Start-End: 377-2233
tccccgcccccggtggccgcccccgggacgcctgggtccgagcccgctcccggcttggcgcggagcctgcatcccggagccgctggcggctcgggcgcctgcaccccgctgaggagctccggagggcgccggggtggcggagccggaggcggccggcaaggtgagagcggcggctgcgcgctgggaggagcagcaggtgcaggggcggccggcggcgcgggcagggggcaccgggagccgcgcccgtacctgggacccgacgccgcccggtgcccgcgctggccggcagagggcagcggcagggcgccgcgggccacacatggctgcgtgaccgcgggatgctgtctgtccccttgctcagggcggcgtgccggcgatggagcgcgcggtagagccttggggcccagatctccaccgcccggaggagagggagccacagagaggcgcccgcacaggtctagggagtgagaacgtgatttctcagccgaatgagtttgaacataccccacaggaagatgacttggggttcaaggaagaagatttggctccagatcatgaagtaggaaatgcctctctcaaacctgaaggcatccagaactgggatgacttatgggtccagagagagggtctaggaaagcctcagcctcgggacagaggcccccggctcctgggtgaaccacgctggggccaggctagtagtgatcgggccgctgtgtgtggtgagtgtggcaaaagcttcaggcagatgtcagatctggtgaaacaccagcggacccacacaggggagaaaccctacaagtgtggggtctgtggcaagggctttggggatagctctgcccggatcaaacaccagcggactcatagtggggagaagccctatagagcccggccaccagcccagggtcccccaaagattcctcggtcccggatccctgctggtgagcgccccactatctgtggtgaatgtggcaagagcttccggcagagttctgacctggtgaaacaccagcggacacacactggtgagaagccctacaagtgtggcatatgtggcaagggctttggcgacagttccgcccgcatcaagcaccagcggacacaccggggggagcagcccccccgaccagtggtgccccgacggcagccatctcgggcagccacggcagctacccagggaccgaaggcccaggacaagccatatatctgcactgattgcggcaagaggtttgtgctcagctgcagcctcctgagtcaccagcgtagtcacttggggcccaagccctttggctgtgatgtgtgtggaaaggagtttgcccggggatccgacctggtgaagcacctgcgggtgcacacgggtgagaagccctacctctgcccagagtgcggcaaaggtttcgcggacagctccgcccgagtcaaacacctccgcacccacagtggcgagaggccccatgcctgcccggaatgcgaccgtaccttcagcctcagctccacccttcttcgccaccgcctcactcacatggagccccaggacttcagcttcccaggctatcccctacccgctctgatccccagcccacccccacctcctctgggcaccagccccccgctgacacctcgaagtccctcacactcgggtgagccttttggcctgcctggcttggagccagagcctgggggcccacaggctggggagccacccccaccactggcgggcgacaagccccacaagtgccctgagtgtggcaagggcttccgccgaagctctgacctggtgaaacaccatcgtgtgcacacaggggagaaaccctacctctgtcctgaatgcggcaagggttttgctgacagctcagcccgagtcaagcacctccgcacccaccgtggtgaacgggcccggccaccaccaccatccactctgctgcggccacataacccacctggcccagtacccatggcccctcgaccccgagttcgggcccagccttctggacccagccagccccacgtgtgtggcttctgtgggaaggagttcccccggagctcagatctggtcaaacacaggcgtacacacacgggggagaagccatacaagtgtgcagagtgtggcaagggttttggtgacagttctgcccgcatcaagcaccagcgtgggcacctggtcctgacgccctttgggataggggatggtagggcaaggcccctcaagcaggaggcagcaacaggactggaatgacgcggtccagggagggcggaggcccaggagaccaaagggaggggctctgccgcttagcagagaagaaagggcctgggaggtggtgggagggagaaggaagggaagaaaggggaggaagaatagatagaaatagggattggagacagtaaccttgaagctcaggaaactgtcctggctgggctgagtcaggaccttgccaggacgggctgtacccctggcttctagaagactgcctagcacacagtaggcattcaatacttgttgaataaataaactggctttcacctaaggactcaaccctaaattcctgctgcctcatctgttaagaactgacactttccccttgctgggcaggtagtacacacctgtaatcccagcagtttgggaggctgaggtgggagaatcacttgagcccaaaagtttgaggctgcagtgagctgattgcaccactgatgcctcccaaccttgctctgggagaccaatgcctgaaccagggtttgtttaccttctgagctgcagagatggggcttctggaatttaaggtaacaggatgaggcaggggtatcttgatcatccggatggggcaaatactgctgtgtggcatggtggtacccacccctatggaggggcactcttggacagagcccagacctttgtgccctggagggagccaacccaccctgacacggagacactggcagaatagaccagagacagaaggtgctctcatggtatccagcctggatgccaagcccaagtcctggtggatagcagaggccagctgtttgggaaaagggcaggatgctctgaggcctggcagccacatttccatgtgtctttttaccaataaacggcttctcttctgaggcttggacagtgtgtgtgtacacacaggcatgaaaaaggtggagaggggtctctgcgcgcaaaactcagactgtaaattttgtgtgcttcccttgctctctgagcccattaaataaagaggttgtcttggcgta

SEQ ID NO: 202655 - DNA, 430 bp, Homo sapiens
  Payload ID: 19965
  Gene Name: zinc finger protein 48
  ENST ID: ENST00000495929
  CDS Start-End: 100-430
tttttccgcaaggaaggagaaggctcgcgtggccgcgggaagctcagtttttattgaagacagagtctgggagaagaagggggactccggaagacagtgatgcggtcggagtggctggcgctgtcggccggccggggaggtcggcgcgggtggctggagacacacagccacaattacgaagagcctcgggcctcaccacccagctgcagcccaggaggcacacggttaataccaccgagttcgggccgccggcctcggcttagagtagcccctgggccgcacgctgccgcccgccggccacagagctaccgccgacgcgggcgacccccacaggcccgcagctcctccaaggtcctagagcggctccgtgcggccccgcgcttccgcttcccgtccccgcccccggtggccgcccccgggacgcctgggt

SEQ ID NO: 202656 - DNA, 912 bp, Homo sapiens
  Payload ID: 19965
  Gene Name: zinc finger protein 48
  ENST ID: ENST00000524644
  CDS Start-End: 483-912
tttctttgtctctcccaggtcggagtggctggcgctgtcggccggccggggaggtcggcgcgggtggctggagacacacagccacaattacgaagagcctcgggcctcaccacccagctgcagcccaggaggcacacggttaataccaccgagttcgggccgccggcctcggcttagagtagcccctgggccgcacgctgccgcccgccggccacagagctaccgccgacgcgggcgacccccacaggcccgcagctcctccaaggtcctagagcggctccgtgcggccccgcgcttccgcttcccgtccccgcccccggtggccgcccccgggacgcctgggtccgagcccgctcccggcttggcgcggagcctgcatcccggagccgctggcggctcgggcgcctgcaccccgctgaggagctccggagggcgccggggtggcggagccggaggcggccggcaagggcggcgtgccggcgatggagcgcgcggtagagccttggggcccagatctccaccgcccggaggagagggagccacagagaggcgcccgcacaggtctagggagtgagaacgtgatttctcagccgaatgagtttgaacataccccacaggaagatgacttggggttcaaggaagaagatttggctccagatcatgaagtaggaaatgcctctctcaaacctgaaggcatccagaactgggatgacttatgggtccagagagagggtctaggaaagcctcagcctcgggacagaggcccccggctcctgggtgaaccacgctggggccaggctagtagtgatcgggccgctgtgtgtggtgagtgtggcaaaagcttcaggcagatgtcagatctggtgaaacaccagcggacccacacaggggagaaaccctacaagtgtgggg

SEQ ID NO: 202657 - DNA, 555 bp, Homo sapiens
  Payload ID: 19965
  Gene Name: zinc finger protein 48
  ENST ID: ENST00000528032
  CDS Start-End: 115-555
ctagcccgcgcgagggcggcacccgcggaggtcccggggggcgctgggcagtgtggggcgcggggattggacaagaggccgactgaaggcggagccgagggcggcgtgccggcgatggagcgcgcggtagagccttggggcccagatctccaccgcccggaggagagggagccacagagaggcgcccgcacaggtctagggagtgagaacgtgatttctcagccgaatgagtttgaacataccccacaggaagatgacttggggttcaaggaagaagatttggctccagatcatgaagtaggaaatgcctctctcaaacctgaaggcatccagaactgggatgacttatgggtccagagagagggtctaggaaagcctcagcctcgggacagaggcccccggctcctgggtgaaccacgctggggccaggctagtagtgatcgggccgctgtgtgtggtgagtgtggcaaaagcttcaggcagatgtcagatctggtgaaacaccagcggacccacacaggggagaaaccctacaagtgtggggtctgtggcaag

SEQ ID NO: 202658 - DNA, 2875 bp, Homo sapiens
  Payload ID: 19965
  Gene Name: zinc finger protein 48
  ENST ID: ENST00000622647
  CDS Start-End: 388-1875
agcccgcgcgagggcggcacccgcggaggtcccggggggcgctgggcagtgtggggcgcggggattggacaagaggccgactgaaggcggagccgaggtctagggagtgagaacgtgatttctcagccgaatgagtttgaacataccccacaggaagatgacttggggttcaaggaagaagatttggctccagatcatgaagtaggaaatgcctctctcaaacctgaaggcatccagaactgggatgacttatgggtccagagagagggtctaggaaagcctcagcctcgggacagaggcccccggctcctgggtgaaccacgctggggccaggctagtagtgatcgggccgctgtgtgtggtgagtgtggcaaaagcttcaggcagatgtcagatctggtgaaacaccagcggacccacacaggggagaaaccctacaagtgtggggtctgtggcaagggctttggggatagctctgcccggatcaaacaccagcggactcatagtggggagaagccctatagagcccggccaccagcccagggtcccccaaagattcctcggtcccggatccctgctggtgagcgccccactatctgtggtgaatgtggcaagagcttccggcagagttctgacctggtgaaacaccagcggacacacactggtgagaagccctacaagtgtggcatatgtggcaagggctttggcgacagttccgcccgcatcaagcaccagcggacacaccggggggagcagcccccccgaccagtggtgccccgacggcagccatctcgggcagccacggcagctacccagggaccgaaggcccaggacaagccatatatctgcactgattgcggcaagaggtttgtgctcagctgcagcctcctgagtcaccagcgtagtcacttggggcccaagccctttggctgtgatgtgtgtggaaaggagtttgcccggggatccgacctggtgaagcacctgcgggtgcacacgggtgagaagccctacctctgcccagagtgcggcaaaggtttcgcggacagctccgcccgagtcaaacacctccgcacccacagtggcgagaggccccatgcctgcccggaatgcgaccgtaccttcagcctcagctccacccttcttcgccaccgcctcactcacatggagccccaggacttcagcttcccaggctatcccctacccgctctgatccccagcccacccccacctcctctgggcaccagccccccgctgacacctcgaagtccctcacactcgggtgagccttttggcctgcctggcttggagccagagcctgggggcccacaggctggggagccacccccaccactggcgggcgacaagccccacaagtgccctgagtgtggcaagggcttccgccgaagctctgacctggtgaaacaccatcgtgtgcacacaggggagaaaccctacctctgtcctgaatgcggcaagggttttgctgacagctcagcccgagtcaagcacctccgcacccaccgtggtgaacgggcccggccaccaccaccatccactctgctgcggccacataacccacctggcccagtacccatggcccctcgaccccgagttcgggcccagccttctggacccagccagccccacgtgtgtggcttctgtgggaaggagttcccccggagctcagatctggtcaaacacaggcgtacacacacgggggagaagccatacaagtgtgcagagtgtggcaagggttttggtgacagttctgcccgcatcaagcaccagcgtgggcacctggtcctgacgccctttgggataggggatggtagggcaaggcccctcaagcaggaggcagcaacaggactggaatgacgcggtccagggagggcggaggcccaggagaccaaagggaggggctctgccgcttagcagagaagaaagggcctgggaggtggtgggagggagaaggaagggaagaaaggggaggaagaatagatagaaatagggattggagacagtaaccttgaagctcaggaaactgtcctggctgggctgagtcaggaccttgccaggacgggctgtacccctggcttctagaagactgcctagcacacagtaggcattcaatacttgttgaataaataaactggctttcacctaaggactcaaccctaaattcctgctgcctcatctgttaagaactgacactttccccttgctgggcaggtagtacacacctgtaatcccagcagtttgggaggctgaggtgggagaatcacttgagcccaaaagtttgaggctgcagtgagctgattgcaccactgatgcctcccaaccttgctctgggagaccaatgcctgaaccagggtttgtttaccttctgagctgcagagatggggcttctggaatttaaggtaacaggatgaggcaggggtatcttgatcatccggatggggcaaatactgctgtgtggcatggtggtacccacccctatggaggggcactcttggacagagcccagacctttgtgccctggagggagccaacccaccctgacacggagacactggcagaatagaccagagacagaaggtgctctcatggtatccagcctggatgccaagcccaagtcctggtggatagcagaggccagctgtttgggaaaagggcaggatgctctgaggcctggcagccacatttccatgtgtctttttaccaataaacggcttctcttctgaggcttggacagtgtgtgtgtacacacaggcatgaaaaaggtggagaggggtctctgcgcgcaaaactcagactgtaaattttgtgtgcttcccttgctctctgagcccattaaataaagaggttgtcttggcgt

SEQ ID NO: 202659 - DNA, 3339 bp, Homo sapiens
  Payload ID: 19965
  Gene Name: zinc finger protein 48
  Uniprot ID: Q96MX3
  ENST ID: ENST00000613509
  CDS Start-End: 483-2339
tttctttgtctctcccaggtcggagtggctggcgctgtcggccggccggggaggtcggcgcgggtggctggagacacacagccacaattacgaagagcctcgggcctcaccacccagctgcagcccaggaggcacacggttaataccaccgagttcgggccgccggcctcggcttagagtagcccctgggccgcacgctgccgcccgccggccacagagctaccgccgacgcgggcgacccccacaggcccgcagctcctccaaggtcctagagcggctccgtgcggccccgcgcttccgcttcccgtccccgcccccggtggccgcccccgggacgcctgggtccgagcccgctcccggcttggcgcggagcctgcatcccggagccgctggcggctcgggcgcctgcaccccgctgaggagctccggagggcgccggggtggcggagccggaggcggccggcaagggcggcgtgccggcgatggagcgcgcggtagagccttggggcccagatctccaccgcccggaggagagggagccacagagaggcgcccgcacaggtctagggagtgagaacgtgatttctcagccgaatgagtttgaacataccccacaggaagatgacttggggttcaaggaagaagatttggctccagatcatgaagtaggaaatgcctctctcaaacctgaaggcatccagaactgggatgacttatgggtccagagagagggtctaggaaagcctcagcctcgggacagaggcccccggctcctgggtgaaccacgctggggccaggctagtagtgatcgggccgctgtgtgtggtgagtgtggcaaaagcttcaggcagatgtcagatctggtgaaacaccagcggacccacacaggggagaaaccctacaagtgtggggtctgtggcaagggctttggggatagctctgcccggatcaaacaccagcggactcatagtggggagaagccctatagagcccggccaccagcccagggtcccccaaagattcctcggtcccggatccctgctggtgagcgccccactatctgtggtgaatgtggcaagagcttccggcagagttctgacctggtgaaacaccagcggacacacactggtgagaagccctacaagtgtggcatatgtggcaagggctttggcgacagttccgcccgcatcaagcaccagcggacacaccggggggagcagcccccccgaccagtggtgccccgacggcagccatctcgggcagccacggcagctacccagggaccgaaggcccaggacaagccatatatctgcactgattgcggcaagaggtttgtgctcagctgcagcctcctgagtcaccagcgtagtcacttggggcccaagccctttggctgtgatgtgtgtggaaaggagtttgcccggggatccgacctggtgaagcacctgcgggtgcacacgggtgagaagccctacctctgcccagagtgcggcaaaggtttcgcggacagctccgcccgagtcaaacacctccgcacccacagtggcgagaggccccatgcctgcccggaatgcgaccgtaccttcagcctcagctccacccttcttcgccaccgcctcactcacatggagccccaggacttcagcttcccaggctatcccctacccgctctgatccccagcccacccccacctcctctgggcaccagccccccgctgacacctcgaagtccctcacactcgggtgagccttttggcctgcctggcttggagccagagcctgggggcccacaggctggggagccacccccaccactggcgggcgacaagccccacaagtgccctgagtgtggcaagggcttccgccgaagctctgacctggtgaaacaccatcgtgtgcacacaggggagaaaccctacctctgtcctgaatgcggcaagggttttgctgacagctcagcccgagtcaagcacctccgcacccaccgtggtgaacgggcccggccaccaccaccatccactctgctgcggccacataacccacctggcccagtacccatggcccctcgaccccgagttcgggcccagccttctggacccagccagccccacgtgtgtggcttctgtgggaaggagttcccccggagctcagatctggtcaaacacaggcgtacacacacgggggagaagccatacaagtgtgcagagtgtggcaagggttttggtgacagttctgcccgcatcaagcaccagcgtgggcacctggtcctgacgccctttgggataggggatggtagggcaaggcccctcaagcaggaggcagcaacaggactggaatgacgcggtccagggagggcggaggcccaggagaccaaagggaggggctctgccgcttagcagagaagaaagggcctgggaggtggtgggagggagaaggaagggaagaaaggggaggaagaatagatagaaatagggattggagacagtaaccttgaagctcaggaaactgtcctggctgggctgagtcaggaccttgccaggacgggctgtacccctggcttctagaagactgcctagcacacagtaggcattcaatacttgttgaataaataaactggctttcacctaaggactcaaccctaaattcctgctgcctcatctgttaagaactgacactttccccttgctgggcaggtagtacacacctgtaatcccagcagtttgggaggctgaggtgggagaatcacttgagcccaaaagtttgaggctgcagtgagctgattgcaccactgatgcctcccaaccttgctctgggagaccaatgcctgaaccagggtttgtttaccttctgagctgcagagatggggcttctggaatttaaggtaacaggatgaggcaggggtatcttgatcatccggatggggcaaatactgctgtgtggcatggtggtacccacccctatggaggggcactcttggacagagcccagacctttgtgccctggagggagccaacccaccctgacacggagacactggcagaatagaccagagacagaaggtgctctcatggtatccagcctggatgccaagcccaagtcctggtggatagcagaggccagctgtttgggaaaagggcaggatgctctgaggcctggcagccacatttccatgtgtctttttaccaataaacggcttctcttctgaggcttggacagtgtgtgtgtacacacaggcatgaaaaaggtggagaggggtctctgcgcgcaaaactcagactgtaaattttgtgtgcttcccttgctctctgagcccattaaataaagaggttgtcttggcgt

SEQ ID NO: 202660 - DNA, 2971 bp, Homo sapiens
  Payload ID: 19965
  Gene Name: zinc finger protein 48
  Uniprot ID: Q96MX3
  ENST ID: ENST00000612608
  CDS Start-End: 115-1971
ctagcccgcgcgagggcggcacccgcggaggtcccggggggcgctgggcagtgtggggcgcggggattggacaagaggccgactgaaggcggagccgagggcggcgtgccggcgatggagcgcgcggtagagccttggggcccagatctccaccgcccggaggagagggagccacagagaggcgcccgcacaggtctagggagtgagaacgtgatttctcagccgaatgagtttgaacataccccacaggaagatgacttggggttcaaggaagaagatttggctccagatcatgaagtaggaaatgcctctctcaaacctgaaggcatccagaactgggatgacttatgggtccagagagagggtctaggaaagcctcagcctcgggacagaggcccccggctcctgggtgaaccacgctggggccaggctagtagtgatcgggccgctgtgtgtggtgagtgtggcaaaagcttcaggcagatgtcagatctggtgaaacaccagcggacccacacaggggagaaaccctacaagtgtggggtctgtggcaagggctttggggatagctctgcccggatcaaacaccagcggactcatagtggggagaagccctatagagcccggccaccagcccagggtcccccaaagattcctcggtcccggatccctgctggtgagcgccccactatctgtggtgaatgtggcaagagcttccggcagagttctgacctggtgaaacaccagcggacacacactggtgagaagccctacaagtgtggcatatgtggcaagggctttggcgacagttccgcccgcatcaagcaccagcggacacaccggggggagcagcccccccgaccagtggtgccccgacggcagccatctcgggcagccacggcagctacccagggaccgaaggcccaggacaagccatatatctgcactgattgcggcaagaggtttgtgctcagctgcagcctcctgagtcaccagcgtagtcacttggggcccaagccctttggctgtgatgtgtgtggaaaggagtttgcccggggatccgacctggtgaagcacctgcgggtgcacacgggtgagaagccctacctctgcccagagtgcggcaaaggtttcgcggacagctccgcccgagtcaaacacctccgcacccacagtggcgagaggccccatgcctgcccggaatgcgaccgtaccttcagcctcagctccacccttcttcgccaccgcctcactcacatggagccccaggacttcagcttcccaggctatcccctacccgctctgatccccagcccacccccacctcctctgggcaccagccccccgctgacacctcgaagtccctcacactcgggtgagccttttggcctgcctggcttggagccagagcctgggggcccacaggctggggagccacccccaccactggcgggcgacaagccccacaagtgccctgagtgtggcaagggcttccgccgaagctctgacctggtgaaacaccatcgtgtgcacacaggggagaaaccctacctctgtcctgaatgcggcaagggttttgctgacagctcagcccgagtcaagcacctccgcacccaccgtggtgaacgggcccggccaccaccaccatccactctgctgcggccacataacccacctggcccagtacccatggcccctcgaccccgagttcgggcccagccttctggacccagccagccccacgtgtgtggcttctgtgggaaggagttcccccggagctcagatctggtcaaacacaggcgtacacacacgggggagaagccatacaagtgtgcagagtgtggcaagggttttggtgacagttctgcccgcatcaagcaccagcgtgggcacctggtcctgacgccctttgggataggggatggtagggcaaggcccctcaagcaggaggcagcaacaggactggaatgacgcggtccagggagggcggaggcccaggagaccaaagggaggggctctgccgcttagcagagaagaaagggcctgggaggtggtgggagggagaaggaagggaagaaaggggaggaagaatagatagaaatagggattggagacagtaaccttgaagctcaggaaactgtcctggctgggctgagtcaggaccttgccaggacgggctgtacccctggcttctagaagactgcctagcacacagtaggcattcaatacttgttgaataaataaactggctttcacctaaggactcaaccctaaattcctgctgcctcatctgttaagaactgacactttccccttgctgggcaggtagtacacacctgtaatcccagcagtttgggaggctgaggtgggagaatcacttgagcccaaaagtttgaggctgcagtgagctgattgcaccactgatgcctcccaaccttgctctgggagaccaatgcctgaaccagggtttgtttaccttctgagctgcagagatggggcttctggaatttaaggtaacaggatgaggcaggggtatcttgatcatccggatggggcaaatactgctgtgtggcatggtggtacccacccctatggaggggcactcttggacagagcccagacctttgtgccctggagggagccaacccaccctgacacggagacactggcagaatagaccagagacagaaggtgctctcatggtatccagcctggatgccaagcccaagtcctggtggatagcagaggccagctgtttgggaaaagggcaggatgctctgaggcctggcagccacatttccatgtgtctttttaccaataaacggcttctcttctgaggcttggacagtgtgtgtgtacacacaggcatgaaaaaggtggagaggggtctctgcgcgcaaaactcagactgtaaattttgtgtgcttcccttgctctctgagcccattaaataaagaggttgtcttggcgt

SEQ ID NO: 202661 - DNA, 1843 bp, Homo sapiens
  Payload ID: 19966
  Gene Name: zinc finger protein 480
  ENST ID: ENST00000334564
  CDS Start-End: 65-1543
aaacccggaagcggatcgcgtggagtgaaggtcacgccgcggcgcgattgacttctaaagagtcatgctgtgtgatgaaaaagcccagaagagaaggaagaggaaagcaaaggagtcagggatggctcttcctcagggacacttaacattcagggacgtggccatagaattctctcaggcggagtggaaatgcctggaccctgcacagagggctttatacaaggatgtgatgttggagaactacaggaacctggtctccctggggagcagctatgcattgggaagcaatgcagaagacaaaccaattaaaaaacaacttggagtatcctttcacttacatctgtctgaactggagctatttccagatgaaagggtaataaatggatgtaatcaagttgaaaactttatcaaccacagttcctctgtttcctgtcttcaagaaatgtcttccagtgtcaaaacccccatttttaataggaatgattttgatgattcttcatttctcccacaagaacagaaagtacaccttagagaaaaaccttatgaatgtaatgagcatagcaaagtctttagagtatcttccagccttactaaacatcaagtaatccatactgtagagaaaccttacaaatgtaattcatgcggcaaggtctttagtcgcaattcacaccttgcagaacattgtagaattcatactggagagaaaccttacaaatgtaatgtctgtggcaaggtttttagttacaattcaaactttgcacgacatcaaagaattcataccagagagaagccgtatgaatgtaatgaatgtggtaaagtcttcagtaataattcttaccttgcacgacatcaaagaattcatgctgaagagaaaccttacaaatgtaatgaatgtggtaaaggcttcagtcataagtcatctctagcaaatcattggagaatttatactggagagaagccttacaaatgtgatgaatgtggcaaggccttctataggattgcgctccttgtacgacatcagaaaattcatactggagagaaaccttacaaatgtaatgaatgtggaaaggtctttattcaaaattcgcacctagcacaacattggagaattcatacaggagagaaaccttacaaatgtaatgaatgtggaaaagtatttaatcaactttcaaatcttgcacgacatcgaagaattcatactggagagaagccttacaaatgtaatgaatgtggtaaagcatttagtgagtattcaggcctttcagcccatcttgtaatccacactggagagaagccttacaaatgtagtgaatgtggcaaggcattcagacacaagttatcactaaccaatcatcagagaatccatactggagaaagaccttacaaatgtaatgaatgtggcaaggtcttcaatcgaattgcacaccttgcacgacatcggaaaattcatactggagagaaaccttacaaatgtaatgagtgtggcaaggcctttagtcgcatttcatacctagcacaacattggacaattcatatgggatagaaactacaaatgcaacaaatgcgtcaaagaatttagtgtgcactcaagccttactacccatcttttattccatactgcaaagaaattttgcaaatgtaaagaatatgacaaggtcttcaaacacaagtttttctaataactcattagagaatttatactggagagacttcacaattataataaatgtgtggaaaagtcttcaaaaaaatttcacaccttgcaaaaggagatctaaaaaacacaatcagaaatgacaaaggggacattaccaccaaccccacagaaatacgaaaaaccctc

SEQ ID NO: 202662 - DNA, 2722 bp, Homo sapiens
  Payload ID: 19966
  Gene Name: zinc finger protein 480
  Uniprot ID: Q8WV37
  ENST ID: ENST00000335090
  CDS Start-End: 124-1500
gattgacttctaaagagtcatgctgtgtgatgaaaaagcccagaagagaaggaagaggaaagcaaaggagtcagggatggctcttcctcaggaatctctcttcctgacctgaatattaactccatgttggagcaaaggagggagccctggtctggtgagagtgaagtgaaaatagcaaaaaattcagatgggagggagtgcatcaaaggtgtgaacacagggagcagctatgcattgggaagcaatgcagaagacaaaccaattaaaaaacaacttggagtatcctttcacttacatctgtctgaactggagctatttccagatgaaagggtaataaatggatgtaatcaagttgaaaactttatcaaccacagttcctctgtttcctgtcttcaagaaatgtcttccagtgtcaaaacccccatttttaataggaatgattttgatgattcttcatttctcccacaagaacagaaagtacaccttagagaaaaaccttatgaatgtaatgagcatagcaaagtctttagagtatcttccagccttactaaacatcaagtaatccatactgtagagaaaccttacaaatgtaattcatgcggcaaggtctttagtcgcaattcacaccttgcagaacattgtagaattcatactggagagaaaccttacaaatgtaatgtctgtggcaaggtttttagttacaattcaaactttgcacgacatcaaagaattcataccagagagaagccgtatgaatgtaatgaatgtggtaaagtcttcagtaataattcttaccttgcacgacatcaaagaattcatgctgaagagaaaccttacaaatgtaatgaatgtggtaaaggcttcagtcataagtcatctctagcaaatcattggagaatttatactggagagaagccttacaaatgtgatgaatgtggcaaggccttctataggattgcgctccttgtacgacatcagaaaattcatactggagagaaaccttacaaatgtaatgaatgtggaaaggtctttattcaaaattcgcacctagcacaacattggagaattcatacaggagagaaaccttacaaatgtaatgaatgtggaaaagtatttaatcaactttcaaatcttgcacgacatcgaagaattcatactggagagaagccttacaaatgtaatgaatgtggtaaagcatttagtgagtattcaggcctttcagcccatcttgtaatccacactggagagaagccttacaaatgtagtgaatgtggcaaggcattcagacacaagttatcactaaccaatcatcagagaatccatactggagaaagaccttacaaatgtaatgaatgtggcaaggtcttcaatcgaattgcacaccttgcacgacatcggaaaattcatactggagagaaaccttacaaatgtaatgagtgtggcaaggcctttagtcgcatttcatacctagcacaacattggacaattcatatgggatagaaactacaaatgcaacaaatgcgtcaaagaatttagtgtgcactcaagccttactacccatcttttattccatactgcaaagaaattttgcaaatgtaaagaatatgacaaggtcttcaaacacaagtttttctaataactcattagagaatttatactggagagacttcacaattataataaatgtgtggaaaagtcttcaaaaaaatttcacaccttgcaaaaggagatctaaaaaacacaatcagaaatgacaaaggggacattaccaccaaccccacagaaatacgaaaaaccctcaaagattactataaacacctgtatgcacacaaactagaaaacctagaaaaaattaataaattccttgaaagatataaccccccaagattgaaccaagaagaaattgcatccctgaacagaccaataatgagttccaaaatttaatcactaattaaaaatctatcaaacaaaactctggaccagacagatttatagttgaagcctacgagatgtataaagaaaagctgttaccaatcttactgaaactgttcaaaaacatggatgcagagggactcctccctatctgattctatgaggccagcatcattctaataccaaaacctgacaggcacaatgaaaaaagaaaacttcaggctggtactcctgacgaatataggtgccaaaatcctcagcaaaatactagtaaaccaaatccatctgcacatcaaaaagctaatccaacattatcaagcaggctttagtgttgggctgcaaggttggttcagtatacacaaatcaataaatgtgatttatcacatacacagaactaaaaacaaaaaccacatgaccatgatcatctctttagatgcagaaaggtttttaataaaattcaacatcccttcattttaaaaaccctcaacaaattacacattgagggaacatacttcaataagaaccatctatgctggactcacagccaaattaatactgaacaagcaaaagctggaagcattccccttgagaactggaaaatgacagggatgaccactctcaccactccgattcaacatagtactggaagtcctaagcttagtgatcaggcaagataaagatatgaaaggcatatataaataggaagaggggaagtcagtttctcttgcagaagatataattctgtatttagaaaacctgttgtctctgcccaaaggctcctagatctgat

SEQ ID NO: 202663 - DNA, 2527 bp, Homo sapiens
  Payload ID: 19966
  Gene Name: zinc finger protein 480
  Uniprot ID: Q8WV37
  ENST ID: ENST00000468240
  CDS Start-End: 67-1674
acaaacccggaagcggatcgcgtggagtgaaggtcacgccgcggcgcgattgacttctaaagagtcatgctgtgtgatgaaaaagcccagaagagaaggaagaggaaagcaaaggagtcagggatggctcttcctcagggacacttaacattcagggacgtggccatagaattctctcaggcggagtggaaatgcctggaccctgcacagagggctttatacaaggatgtgatgttggagaactacaggaacctggtctccctgggaatctctcttcctgacctgaatattaactccatgttggagcaaaggagggagccctggtctggtgagagtgaagtgaaaatagcaaaaaattcagatgggagggagtgcatcaaaggtgtgaacacagggagcagctatgcattgggaagcaatgcagaagacaaaccaattaaaaaacaacttggagtatcctttcacttacatctgtctgaactggagctatttccagatgaaagggtaataaatggatgtaatcaagttgaaaactttatcaaccacagttcctctgtttcctgtcttcaagaaatgtcttccagtgtcaaaacccccatttttaataggaatgattttgatgattcttcatttctcccacaagaacagaaagtacaccttagagaaaaaccttatgaatgtaatgagcatagcaaagtctttagagtatcttccagccttactaaacatcaagtaatccatactgtagagaaaccttacaaatgtaattcatgcggcaaggtctttagtcgcaattcacaccttgcagaacattgtagaattcatactggagagaaaccttacaaatgtaatgtctgtggcaaggtttttagttacaattcaaactttgcacgacatcaaagaattcataccagagagaagccgtatgaatgtaatgaatgtggtaaagtcttcagtaataattcttaccttgcacgacatcaaagaattcatgctgaagagaaaccttacaaatgtaatgaatgtggtaaaggcttcagtcataagtcatctctagcaaatcattggagaatttatactggagagaagccttacaaatgtgatgaatgtggcaaggccttctataggattgcgctccttgtacgacatcagaaaattcatactggagagaaaccttacaaatgtaatgaatgtggaaaggtctttattcaaaattcgcacctagcacaacattggagaattcatacaggagagaaaccttacaaatgtaatgaatgtggaaaagtatttaatcaactttcaaatcttgcacgacatcgaagaattcatactggagagaagccttacaaatgtaatgaatgtggtaaagcatttagtgagtattcaggcctttcagcccatcttgtaatccacactggagagaagccttacaaatgtagtgaatgtggcaaggcattcagacacaagttatcactaaccaatcatcagagaatccatactggagaaagaccttacaaatgtaatgaatgtggcaaggtcttcaatcgaattgcacaccttgcacgacatcggaaaattcatactggagagaaaccttacaaatgtaatgagtgtggcaaggcctttagtcgcatttcatacctagcacaacattggacaattcatatgggatagaaactacaaatgcaacaaatgcgtcaaagaatttagtgtgcactcaagccttactacccatcttttattccatactgcaaagaaattttgcaaatgtaaagaatatgacaaggtcttcaaacacaagtttttctaataactcattagagaatttatactggagagacttcacaattataataaatgtgtggaaaagtcttcaaaaaaatttcacaccttgcaaaaggagatctaaaaaacacaatcagaaatgacaaaggggacattaccaccaaccccacagaaatacgaaaaaccctcaaagattactataaacacctgtatgcacacaaactagaaaacctagaaaaaattaataaattccttgaaagatataaccccccaagattgaaccaagaagaaattgcatccctgaacagaccaataatgagttccaaaatttaatcactaattaaaaatctatcaaacaaaactctggaccagacagatttatagttgaagcctacgagatgtataaagaaaagctgttaccaatcttactgaaactgttcaaaaacatggatgcagagggactcctccctatctgattctatgaggccagcatcattctaataccaaaacctgacaggcacaatgaaaaaagaaaacttcaggctggtactcctgacgaatataggtgccaaaatcctcagcaaaatactagtaaaccaaatccatctgcacatcaaaaagctaatccaacattatcaagcaggctttagtgttgggctgcaaggttggttcagtatacacaaatcaataaatgtgatttatcacatactccttgaacctaaaataaaacatgaaaaaaagc
